United States Patent Application Publication US 2015/0376612 A1 - sequence listing, part 19

SEQ ID NO: 48159 - DNA, 1050 bp, Homo sapiens
tttactttttcctctagtggtctctgagattctaagaggtcttaatgccaagaagggcacaactgtagcccatttcccacagagcaaataatttattttcttaaaaaacatagatcatattaactatctactttctaaagtgcagtatcttcccactacaaccagaataaaatcttaaatccttaccttggcctactggaccctttgtgaggaggcccctggctacttttgccatctcctctttcaggatttccccttgcctgctggacttcagccaccctaggcttttttatgcttctcaaaacacactccccccacccccaggtcttccccccactcccagctcttccccctactccctttccccgagcctttgcgcgttctgttccttgtgtctggaaagcttggccctggatttttgcatagctggctgctctttcttcatattcagatccccgctcaaatttctccttcctttgggaggactcctctaaccatccaatataatgtgacctagatcccttctgtttctattagataacccgcctaatttccttaatattattttcactctgaagttgtttgtcatgtatatttattcatttatattaatcataacagagataagaagatcaataattccttactaaaaagtcaaataaaatgcaaatcatcataacaagtctgaagcattgccattttctgtggacacaattgcctgcaagcagttgtctaattcaacttgtatttacttactatgtacccaacagtacagtagtaacttcgggaggccaatcagacagtcagcaaatatttgttgactgtttcacacatgccagacagtgagctaatgtgcgaaacactggaacacagtgggaaacaaaacgtgcatgaccttgtcctcatgaacttaaaagcaaatagtagagtaagacctacagaggatggaagctccatgagtgtaggaatctcttccactcagtgttgcaacccagtgcctagatagtgccaggcacatgaaagtgctttgtataagttgatgaatgaaca

SEQ ID NO: 48160 - DNA, 1058 bp, Homo sapiens
actaaagaatgtgtatcatacatatgccattcatgctcttcactgttctgaaaggataattattgacagcccaaggagaaggccagtcatgtgtacattggttttctgaagtctaacaactaccagggctaataaagctattggggcatgatcaggaagtatgctaaaaccaaaccaaaatgttaccttcttatcaaaaccctgatggtgagtcttgaaatcagagtgcccagcccttggggcaactcaaggtgggtgtatgagaatagaagacggtccagggtatggtctctaagatgattaagaaattgaaaagtaggggttcctgattggactaacttgaattcttcaggaagagggaaaaagtgaaaagctgtaaaatcataaagggaagatggcaaatatggttgggtattttccccaactaaatcctgatatttaagaatacctttcgcagtttgagaaggttcagtgatagaccagtaaaagaaaggaagaaatcgtttatgtatgtttggaaacttaaaaacttgttactttcagtgtggtatagactacaaataatagagtacaggatgaataatgtaatagagatctggactacagtcccagagtgagctattgggagagttgatgtatatttggtggcacgttcctgactgttgagcttggtgtcaaatacccttaagcttcaagatgcagtgggaagactagacataaggactggccctgctgcttttcagttgtgtcacgcagggcagtagttctcaaagtgggtcctagaccagcagcatcaggatcccttgggaacttattagaaatgcagttataggcttcaccctatatttagtgaatcaaaaattctggaagtggcccagaaatctgtgttttaaagctctgtaggtaattctgattcaagctagagtttgagacccacttgtctggggcgagcaaattctgcctgagccttatttttcagatatataaaataatgatactaacacttatcccacagggctgttactttgaaaaaattatttacttgagacattgtggtt

SEQ ID NO: 48161 - DNA, 1025 bp, Homo sapiens
ctcaactgcactacacacggtccaagcaagattcaaccagacccagttttcatcacttctcacccaatgccacatcactaatgcccaaccaaggctgagtcctgattccaaattcccaggagagacattcttattagccagcttggtgtgatagccaccccttttccatcatctgtatctagaaggatgggggaagtgtccccatgcctacttaataggagttgttggggggtggggctctaaaagctagcacacgtgggataggatcaggccattgatcaacatgttcatccttaacaccttggaaaggtccactaagcctatgatcacacaaagaagagccagtagagatttgacaaaggccatgaacaaaacaagtgtgatgccttttcttctttagttatttgcatggtttgcatcaacagtacagagtcacagggcagtggcttaacccccatgcccatatacctggatggagagtgggcacagccaagaacacaaggtggaaatcaggttgaagactgtcattttttaaaggcgaactgggcactcatgtgttcccttttctcttctacctttaggaaagaacatgaggttcccttggaaatcattcaagaggaagatggaaggggctgtttagaagagcttaaaagctacaggctgtaagactggggcctgagtgctggcagtggaaaacactgttgggctgtgatctctccctgaaaagttccaggtgccttttcgcttcctgcaaaagaaaggaagcgaaagagaagaccatgtccatagccctgaagcaggtattcaacaaggacaagaccttccgacccaagaggaaatttgaacctggcacacagaggtttgagctgcacaaacgggctcaggcatccctcaactcgggtgtggacctgaaggcggctgtgcagttgcccagtggggaggaccagaatgactgggtggcagtacatgtggtggacttcttcaatcggatcaacctcatctatggcaccatctgtgagttctgc

SEQ ID NO: 48162 - DNA, 1023 bp, Homo sapiens
acataaatgtttgcaaatggtttgtatcttgatcagttatgtaaagacgtgcatttgagatgcaccaaagtgacttttagatgcttctttttaaaaatgacagtcttaacttgtgtttgcggaactctgtatttttcagttttcacctacgttaagcctttcaatttttttgttgactaaagttggtagaagaaatgattatcagagtttttatggaatcctccaccacctttttccaaaaggaattagaatcatctggtgcttatataaaatcaaacactgtttaaactcagggagctctttttttttttttttttttttttttttagaataaagtgcagtttaaagagaatagagtgggagcttttaccagatacctgttttggtctcttgctgggctgatactattttcctaggaatggtgactgtgtgtttctgtttttcctcttcagatttcttagaccaaatagaggaaatccactggaggcttacctaacaagacgtattgatgaatgtagaatcttaaatgaaaaagaagtcagtggatgtggcttcctgtactgtcagcttggaccaaaaataaagcgagccctcgccgcaggggtttggctcagccctgcgcctgtggcagatgttgttttccatggctttgcttgaggagtacacttctctgggcaaaagttcctgaggcctttggagacttttaaagccttttttttttctgtagcttttattgtttttaagaaaagtggtgtcacccttacttgtcattaaaaaaaaaatagtgtgggaaaaacaaataaactacccaaagaataaaacaagaaaaaccaaaacaactcccctaaatgaatgaaaaaatttacacccttcactcttttgcaagataactatttccatgcaagttggattagaaactatgagaagatttttctctttgatttttggtttcttctatttttaacatttttgacaagtctacacattgtggttacataaaaacatcaggattaagatatttgg

SEQ ID NO: 48163 - DNA, 1062 bp, Homo sapiens
gcccttctttttctcacccctccaaaacttccagaacaggaagtagctatgtgtcttgcaacaggaatgatacgaaggttctaatcagcaggcacatgcatcatggtgactattctagggtatgatgacctggattatgccattaaaaaatgtcattgccttcacttgtgtgctgacatgggtaaggtttattcagccagccttgatgagaggaattaaaaagtaatctctggtataaggagtcagtttgggcccatgatgtctagggaagttccacttgaataatttcttctaaatcctcagaactcatgagcttctgggaggtcatacagtaatgaggtatacatttatttccttattagtcagaaagaaactttacttaaaaggacccatttgtgtttactagatatggttggaggaaatataaattattatcactattactttatctccttcccatacaaggctttataaaattaaatgcattgtaaacctagactataataaaaatgagatcgtgtaaatatctgtgtgtcttacaggctacctgtaacaagataccttagactgggtggcttataaacaacagaaaatctatttctcatagttctggaagctggaaatccaatatcagggtaccagcatgattgggttctggtgtgggccctcttgagggtagaaagctttctggggtcccttttataatggctaatctcattcattagggtagagccctcataaccaaactatcttccaaaggtcccaccttttaatgccatcacattggaggttagaatttgaacacatgtagtctattgcactgtggctgctatcaggttagatgccccatttgaaagattagactgtcttggcagcttcccaaatgaatgccaaggtgccttctttccccttctgcttgtgagcaaggtggggtgtgtgtggaactggggagagtgcatgacctctgatgaagctgagggaatgtcttgatggggtccatcaccaacatcccctgtttggggctgacctcttggttggagaaggtgctagattccttcccac

SEQ ID NO: 48164 - DNA, 1035 bp, Homo sapiens
taattaacatttgttttagatcaagaatggaaaaccaactcttctggaggaaaacataaatgtctgctggggaacatgtatttgctttgggaacccttgggaccaagaaaataaaatgcttaataacaacagcataatgaggctgtaggagtgctgaaagcattaattaatgaacaattttaaagttcttcagaagcccagggagagtttagagtggatggattcctttactgacaaagactaatatgttggactgcttaggctgacttgattaaaccagagctaaattttaaaacacacctaattacagtttccctattttaaatggaatgcctcatatttattggagtcctattattctattgagatgaaccacggttaaccacatccatattttttaatatttaggctgtagaactaaacttttacatgtacctggagaagtttagaagttgacattatactgtccttacatgtgacgtcccactttgcaacaaaagagccataggaaggcaggccctgaactgaccaatcgaataacctgagagtctgatcagaagaatgcatgctatgtaaatagatcacgtttgggcaagtgcttcctattgctgtccattgaaacttaacactttcagtggtccttctgagtttaacaggtttctatctcctggcaataaaaccagactttgctatagtggtttacttggcaaacttaatctccacttgttcctgcagtaggattaagcatgtaaacacagcatgagttaattgtaaaaatggacactgatgtgacaactcagttggaatacttgctgtattttgtcatacaagtaatgagagtttttttgctcgtttttagtgatattgcttacagaacctttaaagtgattagcatagagagataacgcttctatgtgccttagaagagaatctatgctaattataacagtatgctgccagcatgattgttttgtaaatgatgttgtcctagtgatatgctgggaactgtacttactgttcctccaggataggaga

SEQ ID NO: 48165 - DNA, 1047 bp, Homo sapiens
gaacaccatatatatttagacttgcagcatatgttagtatatgaaaagcctacaatatcttgcagcaaggcacctgttaaactggtctaacctataatataataaacttatttgactacatacttttaaaaagatcacacttactaatatcctgaggaattaatgttttggggaacatactttgtgtatcactgatctaaatagagcatacaaagaagacaatgttagaaaagaaatccaatatccaaattaagatggaatacagggaggactacagactggaagattgcacagttactcttggttaggtaatataagcagcaacaatgatcacatcataatttcagtgttttctctgattttaaacaaaacagaaatacgaaaaactcaaatgttttatattgtaaaatgccttttgtcctctttatttttgttgtcttccccctttctctttttctattaccacataagcttcttgattttcatcaaatgagtcactgaaagttggaacaactggagaaagatgtgttcaaatccattgaacagaaagttattagttaagtacatagtgttactcaaatctgttacataaatttgttggaggctgggtgcagtggctcatgcctataatcccagcactttaggagagcgaggtgggtggatcatctgaggtcaggacttcgagaccagcctgggcaatatggtgaaaccccatctctactaaaaatacaaaaattagccggacgcggtgctgcgcgcctgtaatcccagctactcaggggcctgaggcaggaggatcgcttgaacccaggaggtggaggttgcagtgagccgggattgtgccactgcactccagcctgggtgacagagtgagactcctctcaaaaaacctccaaaaaaacaaaaaacaggccaggcatggtggctcactcctgtaatctcagcactttgggaggctgaggcaggtggagcacttgaggtcaggagttcgagaccaacctggacaacatggtgaaaactcatctctactgaaaatacaaaaattag

SEQ ID NO: 48166 - DNA, 1023 bp, Homo sapiens
gatgcagggtatttcagaaagccaaaagctgtgagtccatgcactcactcactcactcactcacccaaatctattacataagagggagtgatccttcatgaaaatatattttttgtacctggtgctatagccaaacatcctgtctcattgagttaatcatagacattgaccaaatgactgtgattatttgattgctaggtcaccagagcacagtatagtttaggtttttccaattttgttaaattaagcttctatatttggatattttctctttttgatttttctggatctccaaaaagatgaagaatagagctggcacttactaagtaggagactaagttggcttggttttctgttgcattagaaaatgttgataatctctaaatatccttttcttcagttaaatccatcctggacttagccttccatatgcctctgatacctttcttaaaagtcctggagggggttttatatttgagaatatctttctgcctcattaacttctctcttgtagtatcattttcttttcttttcttttcttttttttttttggtgcagtttaggcagtatttttaaacttttgcttgattgcttgattattatatcttcttgcctggtggttctggattctgtaaaggcttttgtttgctcctgtgtttgttgtgcactgaggaggtatgtgagtaggaagtcacccatttagctaagtgaattcctagctggaccaatgttactgtggtaatgatggctatctattgtttatggtttttactttgtttgaccaaataaccttcctctgattatggttaaagcaaatggattcttttctccaggaaaataaaatggattgtcattttaaaaaggtagcttattatatcttctcaagaaaaaaaagatatacattaatttgcaattaagtcattgtaaaatggtaaatagccacagttccacaaacatggcagactttgattgaaaagttggcttaaaaagttcttgtctaaatcagttgactgcaccaaaggc

SEQ ID NO: 48167 - DNA, 1050 bp, Homo sapiens
aagcaagagaactattctcatcaaatctgcaacacgaaaagttcagacaaaattccaacaacttcacattctgaactaaatgaggactaattaccagttcgagcaatgagaatatatgaggtcctccgtttgcactttgccagggatctgaaaacgttgggagtaggtcggcttcaccctgaagccagaccatcgacagccagttttccctcccttctccacccacaggtcttaggccctcatccttcccagcctcagaactagtctccaaagaagaggaaagttagaggagagagtaaatcgttgaataggatgaaggagatgtgggaaaaagaaaaagagaggctgcaagagagagggtcccagggataactctgctcttggaagggtggccacagtcatgtggtcccaagaggcaacaacaagcttaggaagccagagaaaccagttacaatcactgctactcttttcgattctgtgttgtttaagaaatatcacccgccaggagttctccagaaacattttccctgattccatgtaagtgctcaaccagtgaatggtaatcccattttggtttagtctgtaccatcccctattccaaaataaagggaaaaatggtgggtttatatcttaaattttctactttactaaactcaagggaaatagccaagcaaaaacgaaagctgagactcttgctaattatcctttccatagaatgtttgctaaaattccttgtcaaggaaggaataacaaagctagtccacgctctgtatagggtgtttccaattagttatactttaaagtataagtatttaacaaaatctataaattttgttaattatttacttgtagtgaaaaatgagccattctcaagcaaatcactttttattacacattccagagaataaccataaaaggacatttattatagcaaaaataaccacatctggatggaacttcaatcaccagtatttactaaataaatgcccagaaaaaaaatagttcatctttaatttcagtcatcattaataaaagctgaagtacctcttc

SEQ ID NO: 48168 - DNA, 1084 bp, Homo sapiens
tgttcctagccatattatgcaacttctggattattccagaaagtagcctgccactgaggcgtagttatgttacatgggtatattgtgtggtggtaaattctgggcttttcgtgtactcattacccaaatagtatgcattgtgcccaatagacgttgaaggcctcactaccagcatggttttcctttatagccactagtcaggatttagattatttccttcactcattaagaaacatactagatgccaggttctgtgctaggtgtgtggtgtgtatcagagaaccagaaagaatgcagagcttatcctctagaaggaaaaaaagaaattgaaaaataaccataacaaataattatgagtatgacgattgtatcaagaacaattgcaaggtataataacagcatgcgactgtggattcttccctaacttcaggggagaggaagaaaagcctctctaaaaaatggggattgaaattgatatctgaaggatactgggggttagtgttcctataagaagaaacagcgtatctgtaaaccctgaagagaaaggagcatggcatttccaagaaaagaagaagacaagtttaagatcaggccaggttttccctgagtctgaaacctcatttacacatttccttttggacttccgtcttaaatttgcccaaccttggactgacgatttgctgtcgtatttaatctcctttcagatgctggtgtcaggtttaaattctattacacttctttgcacttacatttaagaaagtttaccatctctacatatggagcacacagagggcagggaaagttagcctgtcgttgaggcagggttgtataataataattagttcaagctctaaagtcagactgctaggttaaaatcacagatttacttacttcctggctttgtgaacttagcgtgttgctttgactttctgtgcctatttttctcatttgtaaaatgtaaataaaaaatcttacttatgaaagattaaatgtataaataatatgtggggcacttacaaaagtactggcacatagtaagaaaccaagtgttagctattagcattatacagtgtaattaggggct

SEQ ID NO: 48169 - DNA, 1023 bp, Homo sapiens
caggatacaaggaatttaactgtattaacagactgaggtctcagtgggtgcttatggcaagtcactttaactctctgatcttctgttgccttacctataaagtgaagactagaatgcccaacgtatctacatcgtagcattgttatgataatcgaagaagttgatgcgttgctaaataattcataaattattaaatgttgataaaatgtgagatattatcggtagcagcatgcccttaaagactcatgggttgtgttacatcctttgcttctgaaaactaacttccttacccaagatttccttatcatctagaaatttctagcattctaaaattcattgagagtgttaattttttaatccacaccctgtgtgccatgttttacagggaagaaactatcttccagaggcaaagtacatcgtccgaggtcacacagcttgccaaaggcacaactaggttctcaacacatgttcaactaactccagatatggaactcttccattaaagcacaaaaatctgaactttttgtttttaaatataattgtttttattttccatgaaatctagtttcccttattattgcattcaattccgaaagggtaatatctgatattttataaaatgctatactatctctaagttttggtaaatatgcaatattattattggcaactattttcaatgtacaatttaactattacctcttggtaattgttaatgggtgtcttcttaattaagattcacaggatacccatattgttgatatataattgttcacaaagatattttaaaagggctgttactgtgaaaatattttgtgcttgtaaatataaaaggtatgtgaccctgaatattttgaaactttgagtgctggcataaaataagaggaccagagttcatattccatatctgcagatattacttattaagcaaataacgaggtgagtagagaggcctaaattatatttaaatctctggatgaaggatggtgaggaggtgtagaattttataataggcttttgaat

SEQ ID NO: 48170 - DNA, 1059 bp, Homo sapiens
gcccagatggtggggcagctgggcagaggtgctccttacttcccagacggtggagcagcctggcagaggcgctcctcacttcccagacggtggagcagccgggcagaggcgctcctcacttcccagatggtgcaggcagagatgctcctcaggtctcaatctcttgacctcctgatccgcccgcctgggcctcccaaagtgcttgattacaggcgtgggccaccacgcctgccctaccatctcttctttctcctcctaagcagctctcttactctcctgaattttgatgttctacttaacaccctcatgttcttacacatgttgccctgctggaggcgtccttctctttgggaagcctgacccaccaacagtgcctcaggagatagacatggaagcttagccggtgggggcccctcgtctctatcccacctcagttgcaggggaggggtcggttgcagctgcagcggtggccccgacagttttcttttgtgggaactgtggccggcagctctgtgtggagaagacctacttgacccaagagctgcaggatccttgggctgcatgtcctcccccaccatcagcaagcctggagagctgggcaggtggtctttacccagcaccttcaaggccgccttctctggccacagggagcagcctggaactggggcagggagcactgttggaagtgggtcaggcttcccaaagggaaggatgcctccagcagggctgtgtgaactggcgactccatggccgttggagtagaaactcactgcaggcacctgggccttgtcagtctggttgttttctgtcaagctcttgaggtggacatttccctccaagggcctgggattgtaccaggaggaagtgaagtttccctgagtctccaggggcctagaggtggaagctgcttccccattgctacaggggccccttttattgtcctcctgcccctgggtctctacctggtctgtcacctccgttgcttctctgggctcttctgccctcacctccatcttcgggagcctggctgggatcacctgctcatctaatgaaggaagt

SEQ ID NO: 48171 - DNA, 1088 bp, Homo sapiens
taaattcctcttatgcatatattaaaggagattttagtcttttttctatcaatctcttactataatgaattatagttattgatttcctaatatgaaaacatctttgctattcaagaatgaaccactcttggtcataatatgttattattgcaatgtactgttgggtcttatttaggtttttctttaactcatcatagtaagtgaacttgtacagttttctctcgagtatttactttctcaggatttgttattagtgttactctggctttcaaaataatcaggaattgtccttaattttgttttattctgaaatactctaaaaggctttgcaattgtgtgtttctttaaggataaaagaatttaactttgaaattaagtttggcaatatttcaggaagtagctctctgacattcttaatatcctctatgattattgacctgtttaagatttttaccacttaggaagcgactaactatggcgaccgccacggagcagtgggttctcgtggagatggtacaggcgctttacgaggctcctgcttactatcttattttggaagggattctgatactctggataaatcagacttcttttctctaagacttacaaattacaagaatgatctgatcttacagtcgaggaaaaagaagaactgattgaagagtggcaaccagaacctcttgttcctcctgtcccaaaagaccatcctgctctcaactacaacatcgtttcaggacggaatcttgctctgtcaccaggctggagtgcagtggtgcgatctcggctcactgcaacctccacctcccgggttcaagccattctcctgcctcagcctcccgagtagctgggaccacaggcacaaaccgccatgccggcctaattcttgtattttcagtagagacggagtttcaccatgttggccagaatgatctcaatctccttttttttaattaaaaagtaaacttcaatgtcgaaaatgcaaacttggggagggcagaaagatcacacacaaggctgtcacttcacacttggaaggttgcacagcagccgggcagagatgctcctcacttcccagatggtgagggggc

SEQ ID NO: 48172 - DNA, 1066 bp, Homo sapiens
ttgttataatcatcttatattttaccacagtgtctagtatagcacactgtcagtgatctgtaaatatccaataagttactgaataaaagaacatgaatcctgggtttagctgtaccttcagatgtcaaaataatcacctctagttaggatgaaatgaacaacatagataggtaacagacacttcttaaaaattgtcaaagtgatgccattctattacagtttattattaatttattttcattacatgtaagccaaaaatagtttccaatatttagagaaaatttactcctgattaatttatatttttgactttagataaaattgcagacagaatcatttcctgaacaagtacaagctgtgacttatttacatcttgatcaatgttacaagccagggccaaaagatattttaattctgggctattgcagaagagtttctggttacatcatgaagttaaatcatttgaacaattgttattagagctttaactaagtccagtgaactgtaaataggcaagttggatctcgtttaggcagaaaattgggctgtagatgtggggtgtgtggtgatgcttattgaatcaaacagaccgtgtcatctgcaaaaaagaaaaagtaacttggcgtcataatctgtacttttgatttggttggtgagtctttgaccatgtattcttatttttatttatttttgcctttgtttaagagcaactaaaaaagtcattgaaaggagcagcatatggtagtatctatctactcattactcctaggccatgtgactcaattcttcctatcttacttcctttctaagttctatagattatttttgtatgcattttaggtatttttatcctttgaaaaattttaaactattggattgtttcaagtatttttaatatatattctaaaaataacaaagactttgcattcacattacattgctttcaagttatcagtgtctagttattactaacctcttggcatgctgttcatactcacacactcaacgtctgcctcagttttggctattcccactttcttaactctcattttactgcagattcgat

SEQ ID NO: 48173 - DNA, 1030 bp, Homo sapiens
gtagccacagcaggaaagtggtaggagatgctgggtttttttttttgtttttttttttttttttgagacggagtcttgctctgtcaccaggctggagtgcagtggcgtgatctcggctcactgcaagctctgcctcctgaacgccattctcctgcctcagcctcccaagtagctggaactacaggggcccgccaccacgcctggctaaatttttttggttttttgttttttttttcagtagagacggggtttcaccgtgttagccagcatggtgtccatctcctgacctcgtgatccgcctgcctcggcctcccaaagtgctgggattacaggcgcgagccaccacacccggcagagatgctgtttttattgagtttcagccaggatccagaggcccacattttgaccacaataaaaggtttagatgttggaattttggtgaaaaaaagatacattggtagctaaagtcccaatacatatttatatagtatgtaaatcccatggtgctagatttggggacttctgtccatgcccttaaggtgcttcatttttttagtgttcttgagagcttcccaagccctctgtgatgctaacaacttctctccccagtttgatggggttttagtattgatgaaggaccttgtggaagtgaccctttcaggtacagccctaccctgatcaagcattgttgtaattaaaactgttctggttgccaggacaaggacattaaagctaggtttagtaatgaatagattgtaaatgaagggtaccctaatactctgcttccctctgcaagtttgttccatgtccttccctgcagactgggtttttcagtttcttcatattctctacacccacctctccttccaatttcatgttgcagtcggttttcatttattgtggtagagattatggtcatgctgctgtaataacattcaactcattgtcccacagctaccaccagtgcttcaagaaccaaatactaaatttttggaaaataaaagatggttggccgaacttacattgaata

SEQ ID NO: 48174 - DNA, 1036 bp, Homo sapiens
cttccaattaggagtagcaaatgtatttttattatatatttactgcgtaaaacatgatgatttgaagtatacatacatgtgtaataattaaatttagctaattaacattcattatctcacaattatcatttttgtggtgagaacacttaatctcctctatctttgctttttttttttttttttttttttttttagacggggtctggctctgtcacccaggctggactgcagtggcgccatctccgctcactgcaagctccgcctcctgggttcacgccattctcctgcctcagcctccaagtagctgggaccttacaggcgcccgccaccacgcccggctaattttttctatttttattagagacggggtttcaccgtgttagcgaggatggtttcgatctcctgacctcgtgatccacccgcctcagcctcccaaagtgctgggattacaggcgtgagccaccgcatccggcctatctttgcatttttgaagaatgcaatatattgtcattaactatagtcaccatgctatacaatggatctcttgaatttattcctactaactgtaattacatatttgattgacatctttatttgacccagaatttttgtttgtttgggtttttttcctttgggctggaggtgttacttggttgttttgcttgcttgttttgcaatggagatacagatctggcatggacttagtggcatctacacctcaatttttctggagaccgatggtaggcatttctgatatatctggtgatttgatagatcagagctctagaatgtagggtctttgtagattggaacaatgtaaactgtcccatatgagaaatgaacttgtaaccaacacaccaaatgagtaagttagcaataaaggcatcctttttaaagttgatctgaaaaatctgaaaagttcaactctttttaagccgtattcagagcctttagtcaaaaacatttctaaataaatccaaataacactacttctaaaaaaatatccatagcagcattttattcttcatttggatct

SEQ ID NO: 48175 - DNA, 1049 bp, Homo sapiens
attgttttgatttttaagatctcacaaacaagtgagaatatgtgatgtttatttttctgtgcctagcttatttcattgaacacaatgacctctagttctgtccatgttgttgcaaatgacagaatctcattcttttttatggctgaatatgtactgtctatgtctcaaaaagttgtgttactgtttttgattgtttcatcatttagtctttctacttaagtcaggaaacgtatacacactacaattactgtgttaaactattccgcgtttttctttgtgcttactattagcagtgagttttgtgcctttagataatttattcttgctcattaacatttatttttcagattgaagaaatccctttagcatttcttgttggacaggtctggtgttgatgaaatctctcagcttttgtttgtctgggacagtctttatccttcatgcttaaagaatatttttaccaaatatactattctaatgtaaatttttttcatcacattaaaaatatgtcatttcactctctcatggcctgtaaggtttccactgaaacgtcagctgccagatgtactggagtgccattgtatgttatttgtttcttttctcttgctgcttttaggatcctttctttatccttgacctttgggagtttgattattacatgccttgaaatagtcttatttgggctaaatctgcatgttgttctgtttccctcttgtgtatttgaacgttcttacctttccctaggattaggaagtcctctgatattatctctttaaataaactctctacctctatctctttctctatctcctccttacggtcaataactcttacatttgccctttgagactgttttctagatcttgtaggtgtgcttcattgactttttttgtctcctctgactgtgcaatttcaaatagcctgttttcaaactcactaattctttctgcttgatcatttctgctattaagaaactttgatgcattcttcagcatgtcagtggcatttttcaactctagaattcctgcttgattctttttattacaatc

SEQ ID NO: 48176 - DNA, 1022 bp, Homo sapiens
tgcaagccagagactttcaatcctaaacttgcttgcttcatggttaatccccttctgactctaagtattagccttacggatacaacattttgctttagacaaataatttcctcagtataacacaccaaggcttttgtttatataagagctgtagaaagctgtgactttctctagaatctgcaaaacaaaggaagagccttagagcatttgtactgttaggtttcctggattgcttcgttaacctacctgtcttttcttatcaactattagtattttaggggtagcttttaatttctgttataataccatgcattatttctatcagcttctttacaaattatatgtctgatgattcctcctcagcctcttattctgatatatggtgatgttagccgtctaccttttaaagcaggtgatggtaattaattgtgattggttactgtcaggtgcccattatcctgccattgttctccgaacttatgtttgctttgatgctacgctctggagttatttacagcttattttgagactattttggatctgtttggcttgcttcttattttattgattgattgagacagagtctccctccattgcctaggctggagtgcaatgacgtgatctcagctcagtgcaacctctgcctcccaggttcaagtgattctcctgcctcagcctcccaattagctgggattacaggtgcgcaccaccacacctggctaatttttgtatttttagtagaggtggcatttcaccatgttggccaggctggtctagaactcctgacctcaagtgatccactcaccttggcctctcaaagtgttgggattacaggcgtgagccaccgcacccaggttgtttcttatattactttatcagagcaaatatagttatatcaaaaggcacagaatttgcctacagaatgtgagagctataggtaatccattaggcccacagattttaaactgtgaattttttgaagatccttttgaaattctacaagtttttctgtgcatatataa

SEQ ID NO: 48177 - DNA, 1038 bp, Homo sapiens
gtgttttaaaatttttgttctactgtttgaccaattgttaatgctaaatccaaaaaagacatgggtagtagatagagttttgtagttatgtgcaaggcagagaattcccacaacaaaaacagatgctgctccccaagtagatagtcaatcacacggtgtttttttttttgcaaactgtttcagtgaccttggctttattcttaaaagttatatgcttctgatagtacttgaaaactaacaaacaaatatccagaaagaaaatttaaaataccaaaataaatttcccccaagtaaaatttttttatcgcatagacagataaaggagaagaaaactctcctttaatttttttaatccatctttgttcctgaatgctttgttctttctcatactgtagctctatttaatactaatgtatgggttgcaatgtccaattctttattaatatatttgagaaaaacaaatgttaacatgtcatatagacaaactttcataatagccgtgacgtggtagaaattatctaaaccatttcctgtttgttcagttatgagaaatggtaagtaagtaatgtcaattattatatgacattgtatctatcattatgttgtactatatgtcagtgatgcccacaggaactatcaaaatatttagaattttttggccacatatgtctgttttaaaaatatttgttttctctgaatatgtagccttcccttggttaatcttcacccttcccgtcagtttattaactatcactgctgttttctattttctttattgtttgaaaatgttgatcactacttcaattttatgtttattattgtatttatgtcttttttccagctttattttttgccaaataaaaattataaatatttaaggtatacaatgttgattattaaatacatgcatatattgtgaaatgattaccacaatcaagcttattgacttagctgttacctcacatagttaccttttttgtctggtgagaatacttcagatagtagatatactcttaataaattttatttatacaatta

SEQ ID NO: 48178 - DNA, 1034 bp, Homo sapiens
ctatattcaacaagttattttaagcaagagtactgcaataacaccgctcttcttttaatgtgctaaagagatattgtgaactatgaacatgaaataattaggttttgctcaatggattatacaaagtgttaataggaatttggggggcatttttgtttagaattaaagtatgattttagtgcttcaaataaaatgagatgctctcaagtacatttgttaaagagagccaacaggtttttgaatgtgaaagaattgaacaatactgaatgtaaacagaataacaaaaatattttaattgctcagtgtgaacagtataaatactaaagtaagaaaaaagtttatcaaaattacttcagtgtgaatgagaagggcatgtgtctaaatctgtttttcgctactgtaacaaaacaccaaaaatggggtaatttatgtaaataatagaaacttatctgactcatggttctggagactgggaagtccaacagcatggcaatggaatctggcaaggagcatcccctggtggaaggcacatgggtgtactagaaagaattgaaatctggccaaatccatcctttctatcaagagcccacttccatgatctctcaccaatgtgtgattgataatgatgttaatccattcaatagggaagaaccttcatgacctaataaccttttaaagttatttaaaacttttgatactgctgcattggggattaagtttcaaaaacatgaactttgggggatgttttcaaaccatgtcagcatcaactactgttttagcagcattatgtagaatatgggcagaacagccaacatcttttatagaatcattcatattttgcttaatcatttaataaatattgtttgtaccttcagataaatatccaccaaaatgtttatttgtagtatgtccatcaattcataaaagaaaaatttttttctttattaacttcaatttgaataagagcatttctgaaaaaattgctattatttctgaagttttatcagaaacagttttgcttacagtagccttat

SEQ ID NO: 48179 - DNA, 1045 bp, Homo sapiens
ttgttttgagcattgtcgtattttctgcagctttctttagaataaactcctaataatggaagtactaaacagatgtaatgtttgaactctttcaaagtttttgacacatatatccaaataaatttttagacatttcttgcactttaccttccactggtttttataactttgattttaagttcagaggtacaagtgcaggcttgttacacaggtaaacttgtgtcatgggggtttgttgtacagattatttcatcacctaggtattaagcctcgtaaccattagttgtttttcctgatcctctccctcttcccaccctccaccctccgaaaggtcctagtgtgtgttgttcttctttgtgtatctatgtgttctcatcatttagctcccacttataacagagaacatgtggtgtttggttttctgttcatctgttagtttgctaaggataatggcctccagtcccatcctcttatatttttaactaagaattgcctagaactggtcatatatattatcatttctgtcttggctctctctgtccaataatagcccatctagcaaactgaggtcccggccttgaaaggtcactgatgtatatgacaaactgtgactgcttccttaggtcctctttaggaactaagtattgttgcacacattattttcaatataaattcctgtgtcttatgtattagatctgagtgatgatctgttacaaatgatctgaagtataaaaatgtttcaaactgaatggggcaaagaggataatgaaatcacatgctgaacagtgctagctgggaaaactgaatactttttaaaactattgttcaaactcttactttaactctgcttctgatgaacacactttgtctaaaacttagacaaataacacagtttacttacctctcttttccggtatttgagtcctagtcatctatcttgcagcttgaatcacctgggaagaaaacaatgcagagtatttacctcagttaggagaatgcagcacttagggctgttgaaaactgcaaactttctctgtggaaagac

SEQ ID NO: 48180 - DNA, 1029 bp, Homo sapiens
tgcttttacgaatggtaaactacttgggctctgggtatctccagagattcatccactaatcttaggagctggttaagtattacacactagcacttatgaaaagaggcattagctgataacacactttcagctattagtacaaaatcattacattaccggaggctcatcattgctgaggaagctaattgaaggaaataattttattgagacaaactttattgtacagaaataaaacattgtgcttagtttatgaaagcagaaatcaagagactaggtaccaaggggataaagtgggtaacatcaatccctgacacatccatttgttatcattctgtcattaaataccactcacacatcaaacaaatacaggtgttttgaattcctatctccctcttgcccccaaaataaaagccttggaaaatcagttacactataggacaggaaatatgagtttgcaaagtataaagtactgaggaaccttctctgtaaatcagcacactatacgcacccggcatagtgcacagaactgaaatacaaactgccaatgttttttctctgcaagtagcatttgttttactgttatgtgaatttattgtctgcaaactctgacacagcctcagaaactgaactcctgtatttatccatagaagaacatggtgataatcttaaccctgtcttcaaagatatattatatgcagctttctacaaaaggaaggaaatgtattactttttctatgctagttaagcttggatcttcctggtccataaaatgtcagtagctgtgaattgtactgaaatctgctgcatggttttgagatgattcttctgtacactggggatttggctttgaagacaacgttcttttttctgcttgggtgaccagcctgcatttttcataactccacaaataaaaactatgctacagccatgaagaatggtattattgagatagaaacagagagcagacaataatgattttgaccacacaagtaagcataggtaaaaacttttttctttctgccatagtta

SEQ ID NO: 48181 - DNA, 1020 bp, Homo sapiens
ctgtgcttttcagggcattaaagaatatatcttttcatatttctagatattaatgcctgcgaaacatgccttctaattatatgctgccttgatacttgttatggaatttggttattcttattgtcacataacatcacttctgccaatctttatttcattcaaagttccatttagtagacttagaattgtgaattttgtttacttgaaatagaggaagttaaaaaaatacactgagaacattttattaggtctttattcccaccttcttatttccatttattctattctacttaacagtgaatgagttcagtgtaatttcacttgcagtttttctgactgaggcatattctgacaggatcctgttttttgaatgtgtgttttaattgggcttccatgtggtgatagatgcaggactccctgcgagtccctttctggcttctataattctcagcacagatggtttttattacactacttcttcctcccacccttcaccaccccgacaataaatactgatacagccccctaaggtattcattcatgtcttaggcctccaaacagaccagacagcatctcatgattggggagagtgacagtgggaggacaggatcattacaagacagttgagcagacctagccaccacccttgggagtttgaaacagatagtgtgagacaaaaatgaatcagttttcactgtagctgaatttcaattctagtgctccttgaggtttatttcaggttttgttttgttttgaattccccagtgcagcgaatgagatggaaaagaatatataaattaacttcgaaagactctcagggatatatgcatttcaggaggatggatggagaaaatggaagaagctttggactgtcaggggaattcatttatctaatggtcaatggggaaacatttaccctgagaaaagttgtgagacctgactttaggtactttgcatcctacatgctgtgtctctctttattcccagccatatgtatgattctattagggccctcctagt

SEQ ID NO: 48182 - DNA, 1047 bp, Homo sapiens
cttgtttccctttctcagactgaagaaaggtactcatgaataacccttagtgatggctgatatctgggatagctttggtagaccaaacagtttcaataatttgttgaacacattcaatgtaaattacctatttagaagcctccacttgactgacaatacaaggtgttttatacttactaattattacttttttgaaagaaattatttatttcatttttaataattattcaaatgtttgctttgcttaaagaaatactctgatttgatttcatctatgctcagtatctgtttcataaaacaaattctttttttccagaaacaaaaacatttctatcagaataatatgctaatcaagaacatttataatattttattataattgtctatacagtaagtttcttgagtgtgggaagtctgacttattgatttgtataacctagcacatgacacactctaaataaatgtcttggatctatcagggaaagtggtagatgatggtgtttattggactgaatagccattcttaaagtggggtctgacccatgttttaccctcttctaatttttcttctatatttttgaataattctgatcattagaagctatattgctctccactctgagaacaaccatgactctgaactcagtactactggagcctcttggctatgggctattttcatcaagttaatttgcctggctgtactgtaagccacggacattttctttcttttttttttttctttttgagacagattcttgctctatcgcccaggctggagtgcagtggtgcgatctaggctcactgcaagctccgcctcccgggttcacgccattctcctgcctcagcctcccgagtagctgggactgcaggcgcctgtcaccatgcctggctaattttttgtatttttagtagagatggggtttcaccatgttagccaggatggtctcgatctcctgaccttgtgatccacccgcctcgtcctcccaaagttctgggattacaggtgtgagccaccgcacccggccaaaccacggttattttctt

SEQ ID NO: 48183 - DNA, 1084 bp, Homo sapiens
attatttgaataaggagctttaaaattttcagcgtgctatctttatggagcttctgcctgtcttcctcttcaccacaatttaatttcaaatgttgatgcataaaatcttatgatttgaatgcataccttggatactatatggtctaaccccccaaccctatctagaaatttcttctaaagtcctataagagcccggcatctggctgcactgcctgtatttgagcactgtcagttcacgcctttccagctcagatcatatgggcttgggatcaagagaaacaaattggttgtagtctcagcttcgtttctaactctgcctattacataatgtaaggccaaacccctctctgagcctcaaaaacctcatgtataaaatgataggactgaaatacaaggcttctaagattacttgtagatttagacattatgactctgtatataaacacacattttaaaatcttattagtattaccttacagattagatttttgaaaatatttttgttactgtaatttcctactctctccaaaatttcaaataaacgtcaactgattcactatccaatctggtctcatatatatttagtagcaatataatacacacacacacacacacacacacacacacacacacacacacattactaccaagatcatatatgaaaattccagccgctatgttaaggcgctcttgactatgtttgtgtgcattattattggtgaaatgtcccacatcacaggacccaggaacagtaaaactagaaagaaatgtacacagtttatctaattcccttaaaagtaatacacaatgataaaaagaaatctgaagctgttcacctgtaacttgtaataaaatcagggtaagaaagcaagtaggcctgtgatggatctggagaagaaagagctagacagaggcctttgaaaattttctcatcttcctcttccacattcctgacatgaagtcattttgttttcttttaaccagttgtggttgtggggagtagccacatagtgctaagctgttctaactgctaaatatttatttctaacatagactcaaaatatagattcctgtaaaccttatt

SEQ ID NO: 48184 - DNA, 1044 bp, Homo sapiens
gaaggaagtagagtatatggttaactgcaaaattatggttaaagaattcaaatttaagctaaatttagaatgataacaaagcagtcactgggaaaagtattctaagtaatattaaaacacaaggtagaaattagtatagtttggttgaggaatagaaaaaaagctagtattgctaaaaggaagtgagtgtgggtaaaaagtgtgaagaagattcataaatgaatgggaacagattattatacagggctttaaaactcaggattagaggtttgggttcacttcccagtttaataagaagatattcgataattttaagcaaggccactacaaggtttcattcatgttttgaaaataatcactgtaattaccacatagagatggatggagtcaagggaaccaaaatggattctgggaattaactagataagtggctctcgaagtaattcaaagagataattgtgactgggactagggtggtggtcatgtaataggaaagactggatggtttcaagatatgatttggagtcagaagaacttgttgatattgaatatgcgagatgggagaaagagaagaacgaagaaaaactctatattattggattgagataatgagattatgatcccatttacaaaaatgaggaagactgatacagaagtaggtttttgcataaaatcaagagttctgtgttgtccatattgaaattaagtttgaaatacttataagatttctatgtggtgacaaggagtagtcagctggaaataagaagctatagtggtcaaaaataaaatgtttaaagtcatgggatgaaatgaagtcacctaaggagaaagtgaagaacaaacacaaagccctggaggaatacaattagaggttcaccagaggatgtgactcacccccaagagacaaggatgacttcaatcttcagtaagattgaagaatactagagaacagaagaataccctagaagccagaaggaaaacaagtttcaactgttttgtatactactgagagatcagtaaatatttataacatggtgatagatg

SEQ ID NO: 48185 - DNA, 1048 bp, Homo sapiens
acttgaataattaaaataaaaactgacatccttggggggctttatagttacaaagttgtatcacaaccaacagccttcataaaccagttaataagggttggcaaattccaatcaaagtaatgccaaggtaaaattacctgaaaagtttggccaagtctaactcctgccttctaaattttgggttccagatcttagccattttatagagaagtgtttagtcaaaactttcttgaacagtggcttggtagttgtaatgaattagaagaaatagtttcttttttttttttttctttttttttttgagactgagtctctctctgtcatccaggctagagagtgcaatggtgtagtggcatgagctcagctcactgcaacctctgcctccccagttcaagtgattctcctccctcagcctcccaagtagatgagattacaggtgcccgccaccactcctgactaattttttgtatttttagtagagacgaggtttcaccatgctggccaggctgattttgaactcctgacctcaagtgatccgcccacctcggcctcccaaaggattacagtgtgagccaccaaatctggccagaaatagttttcttactagtagagaatgttgatctgtcatgtgataaaagtaaacaaaagattatctaattttggctactgaattttcatagatattaaatatggattatgtttaactgatttattttctttgtcattgcaaatggaatcctaatcctcaggtagaagaatcatcatttgattttcaattaaaatgatttttattgctcaacgatttttccagttaatgtaattgtcttatttctaccttttgggaaaatcttcctggttttgcatagatgttatcaagtagaaaacaaagtgcacctctctagtagcaagattgtaggtgcagaactttaagctacatagtgttagctatgaaatactcttaatacatctaagaactgttgatgaacaaagtacctatttaatcaaaacaatatggttatgatcacctgccagaaaatgtgttgtttgt

SEQ ID NO: 48186 - DNA, 1052 bp, Homo sapiens
caaataacctttatagcatatgatttacataaatagatattcaacaattttaatatagccacataatgaggaggttattcagtggggtctacttccttccccagccctagtagagattaaagagagaatgtcccattgtcctccaaactcctctgccatacaagtaactgactctgggtccatttggagaaacttctacactcaaccacataaacctcataattcagagtagttgaggctgtattcattgtggcattcttcttccacctcattaaataccaggcaggcccctttgatcaggtctccatggcagtgctgcccctggtacacaagtgtgtacccatttaggaaaagacagtaactgcttacctgcacaacctaattatatggagatatggtctcagtcctttaacagtgagacagaaacagaaatccaagctccagggacaggaaagtctactgagatcaaaaccccttcttttgccccacaaaaacaaaacaaaacaaaacaaaacaaaacaaaaaaccaagaaaacctgtagttaatttctgccaattcctagataggacttaaaaattaaacctcttcaataaagtatttacatactgcctcttacaagggcatatggtagtaaaataaatggatctatatgctattctgtaccaagcatgagtgcatgaaattttaccagctgggaacctttatggacagagaccctgtgtgtgaacaggcataattgcctatacacatgctttttatggggagaagagatagtggaatatttatttttttcatttgaacaaactaacataggcaaaattttctagagcttaaaatttcagaaaaactgcaaagactaacacctggtcttggaaaaatatttaccttgatgattaccaccttcctggtcaagaactgagcctgtcttcttagaacgttagagctagagtctgagatctaatggagacattaaagctgataaaaataagtttcaatgttaggagccattaaatgggcaaattaaccatttgtttttatatgagaaaaataa

SEQ ID NO: 48187 - DNA, 1064 bp, Homo sapiens
tcttcctcctttcctcccttcttccctttctcttttatttttttttgtggagagaaagagtgtgactggggcaaagacataaatatgagtgttccttttaagatacattagtcaattttctcttttcaggggcatttaaagcagaaagtacataaataaaattaattgcataactctctagactcctcaaaatcttgatgtgtttagtctctgtaattggtgttgtatattcaaagtaagttttgcaaacagcaggagcacaggctgcataagagctgcctattaaataggggcaatttgcagtaatgaaagtcctgtcagcaatccttcatagttatgggagtcactagttggagtttcacaaagctaccttctccatttctatttctcacacatatgcacatacaaagttttaatgtttgttataactgatttttattagccactgtagtcttattatcttgacatgaaccaaagtaaaacaaatgtgttagttaatataatactagattctgtaacaaataaacctcaaggtgtataatagctcaaacacaatagaattacagttctttgtcatttaaagttaaaaaaaacatatggggtgcatggacagctctcatttaagtagagattcaaagaacagtgctccttccatctgagggcttgctattttcaatatgtgtcttctaggatcaccctgattagctttataatctggtagaagggaaaaagatataaggagcacaagtaggcatttttgaaggccaggctgaggagtggggtaccataattttactcattttccactgggtagaactcacctgacagagcaacagagacagggagtcatagcctacctgcatgtctaagaggagaagacatcggcttggtgaacagctaaactgtcactgcccagcaacatgtaaggtttgggaaatgcaataatcagtaataagaggatgactaaagttggaggctgatgcaaggcaatgtagaaattataaaatgtaacagagtgcttcataaattatttttataattatattgatcttttcatgcagaat

SEQ ID NO: 48188 - DNA, 1055 bp, Homo sapiens
ataccattgtcatcatcacctctgtgctattactcttatttcccttcctttcttaatggcatatatgtcatttctctcagctccagctctattcttagttctctatgcagtcgtccatgaccaaagtgtctcttctgacttcctgcagccaagtacctggatctaaacactgccttctaatggtaaatgctgcttccacattgagcttgggtacttggccttctccctttcccaagcttttagaagcttaaaaatagggcttacctattaataaagtcatattctagagatctttagaagccaagcccatacttactgtatataaactacaaagcagtaatcctttcttggaaatatttccacttgataatgcaatcattatacctgggtatggattatacttgaagtaaaatgtattgagatttttgtgtctgtgtggttgataaaaaaaataactgccctacttttcatacttatgtataacagtactatgtggtatatcgtgtttggtttttgcctgtgcaattctgtccattagtccgttagttcttgtaccttggattccatactacatttctttgccaaggagatatatatgcccacccaagaagatgaatgtctaaatcattttgagcatatgttagccatttcagtgttttaccttaaacattcaggtgtaagtggaattttatattggatctcccattaaactgcaaacgggagtattcagcaaaacatttggctgctaaacatatgccttcagccatcacatgctatctttttctaaattttattattccttttatataggttgctgaaattgcaaattctttctccaggatttttatcatcccagcaaatccactgaaaatctccccactgagcattgttgcttaagtttgtagtttctttaaatatgattcgatctttgtactagagactgagcttttgtaactcataaggaatggaatagaaagatatctgataatcaatgcatagaaatatgtctgtatgccatttacaaaaaaaaaatattttcttgtattccagaaggc

SEQ ID NO: 48189 - DNA, 1067 bp, Homo sapiens
gcacctgcaatcccagctactcaggaggctgaggcagaagaattgcccgggaggcagatgttgcagtgagcagagattgtgccattgcggtgacagagtgaaactctgtctcaaaaaaaaaaaaaaaaaaatcactgctcttaattattcaactaacagcttccccaaagtaaatgctgaatctaacagtggtcaaagtagtaactgtggtatatgaaacctctgagacaagatttagcatatagagcgcactctgtaagttgtagctcaaatgatgaactcatatatcttatctgtgtctgagaagatacttatgtttggaaatacattaatgaatactgcaaggaagaagaattagtgtaatttaactaaaattatatttccttgcttattctttcaatttttttcaccttctcttactttcctagaagaacattaaataatcatagactttacgtagaaacattttcataaggaacttgcccaattttttaatattatcaagtgtggaattgagggtcagagtggataagccttacccaggtccaactcataatgcctgaactaagactaatgctcaggtttccagattttttttttgacagtatcacacaacctgtattaattaagaccaaaaaaaaccttgataaagagtaatatgtttcttataataaattgttcaatcataccaaaaatttagggctctatttcatagaaatttctaagataagtaattgaagagaaatatgcattctactcattaaattattattcttaattaactcttacatccctcacaagaggtcctcatgagaagaatatcaacagctatgttctctaaccatggaacttcagagtcttacatgtcctaaattatctgctttttgtctactttattgttttgtctcacacattttcctgctctccctatggtctaattaggaaatgaggaggtgagatgaaataggcatagcatcctttcccaccttttccactgagctttctttatatcttccagaaaaacaagcaagtacaagcctctgttgatccaacgggcacaaatgcac

SEQ ID NO: 48190 - DNA, 1028 bp, Homo sapiens
aaggataaataaataataaatttactaaaattctgactttagattccattaaatgttatataattacccatttctccccatccctgaaatttctgggttgttattttgggtggattaaataaatcataacaagaattggttttcttcattataattactaaaatatgttttctttatgatactttttaagatctcccatcttatgagaacatatgttgctaaattaattaattcattcagttttcagtaatttaggacttgatctgtgccaataactgtattaagcttttgagatacacaaatgaatcagaagaagtctcttaggagacttagagagatgacagggacagacatggatatagacaagtactaaatgacggttgctcagagggttcgtgaaaaggagaccctgcaagactgatgctgaaggggaactgaggaaggaatatttcagagaagaggaacatttgaacaggactttatactatatggagttgggtggtagaataatggcacttgaggacagatgagatgtcataatgaaaaagcatgatgtgtatcaggaatgatgaatatcattaaaatacattgtgatgcatgcaagcaggggttatattagcaaagatatgggagaagaatctctctatatatcaatcacaatatacattcaataaacaaagacctcccatatttcaataccactgtaatatataattaagttataatttaatatatctttagagtgtaatataataggttttgttacttttctgttttgtttcagtatgaaaagagggtgagaattatatgttattaactatttattcaacaaatatcaagaaccaccatgtgctagaacctgatataggtatgtagatatagcagtcaacaaaacagaaaattcctttttctcacggggtttacataccattccatgcaccaccataggaatcatcagataatgattgacattcatggaactagtttccttatgaaacttcttgtaagaagaccaagcagataaaaac

SEQ ID NO: 48191 - DNA, 1111 bp, Homo sapiens
ctggtgtcttatccttcttagtttgtaaaactagatcatattcagacatgttataataagttagtgcaagtattttaaggcaaaaaattgaaatccatgcatggtttattcatggtatgcgttttccatgaactttttgaagtttctttgtatttgcaagttatactttctcctttgacaattacgatactttgccactgacaatctgtttttaagagcttttactgctttccttcaaattctaatcctttacttactaaatgtgagatcttgggcaagtcacttaatgagagtggggtttgggatgatattagtatcttccttaaaggctttctgtgaatattaagtgggttaatacatagaaagattgtagcataatttctagtacagagtgaataatatatgagtgtgttttcttatcagctttcaatgttaaagactcctttcagccttatttacagtttgatatttatcatggagaggaatagagaaaatattcaattataatctcacaggaatagaagctgtggagatggggattattaattaggaatggagtagcatttttccagtatgtttttgacagttggcacttggatgttttgggttatgaatgtgccaagagtttgcagttttttattattttgtcatgtaatctaaaggtaaaacaagtggcacaactttttgaatagatgccttagggctgctgattttggtaggatgcagccagaaatccaacagctggagccaggagcaagtggtcacatgaattcttcattcttcatttattattcatggattgggaaggacagtagttctcagactctatgcattggaatcacctggaaagcccacaagagcagattcctgggccaggtccctagagtttcagattcagcaggtcttagctggagcccaaaaaattgcacttctgccaagttcacaagtgatgctcatgccgctggtcctagggtcacactttgatgaacccttgagtagcatgctcaagcttcttaattgctctgagcaattatgaaaaataattgagcatattttctctaaaaattagacatcattttgggagaagggatatatttcgtatttgattttc

SEQ ID NO: 48192 - DNA, 1037 bp, Homo sapiens
agtccctagttatcaccctcgcactttcccttcatgtcatttttaaacttcataaatatgaaaagtagattcagatcttaaaaagtggctcaccaaatgaagtctaacaccatatttttgtggttgggattcaaagttctctgcgatctgactccaacatgagtcctccttgattttcaaactttgttgttcctccacaagtagacactcaggaaatattttcttattggtttgttcatttattcatccgttcattcaacaacatttatttataacttgtgctgtgccaggcattgtgcttctgccatgtagccttccccaacctccaaaaactggtagagagctccttcttccacattcgcatagcatcctttctgtgctcatcatactcaattatagcttcttatttatatttttcttctacaaaatgtgagctccttgtggataaaaatggaccttttaatcattatttttatctgacaagccataattgctgaataaatgtttgactgaatagatgaataaactaagaaattaatcacgtatgatgtctgttccagagatgctcattgtttagtagatgatgatggtgaaaagaaattgttttggccttagcaaaatatatctcaagatttgggctggaaatatattaggaaaaaattggaacttttatttattttattttatttttgagacagagtcttgctctgttttccaggctagagtgcagtggcacgaactcagctcactgcaaccttccagtttcaagtgattctcatgcctcagcctcccaagtagctgggattacaggtgcacaccaccatgcccagctaatttttgtatttttagtagggacaggattttgccatgttggccaggctggtcttgaactcctggcctcaagtaatctgccaccttgacctcccaaaatgctgggattacaggtgtgaaacaccatgcctagccaattggagcttctataaattctgttaaccctgaggtagagaccactgaagtattttcttcactcagtttat

SEQ ID NO: 48193 - DNA, 1045 bp, Homo sapiens
gggacatggggaggaacagtttggggatgggagaagttaagtgtgggacctggttaagtttgagatgcctgtttgatagctaagtagagatgttgagtaaacagttggatatgtgaatctggagttctgtgaaagtttggagcttaagttaaaatttggggtatgacctatttcttattttcagaagaaactcttaacaccataattaacacagagttaacttttattacaggaaaaaccatatggcatagttgaaaagaagtccagaatattccctgtaagtcttaacacttctgatttttcttttgtttattgtttttctctttccttttcctccctttccaagcaattattagattaaaatgttctttccttctcactttcggtttaagtccctgttttgtgtattcttgtaaaaaacaaaacaaaacaaaaaaaaacaggaagaaataccgtgaggtaacaattacagttcaaatgggaagtgagcacatttattttcaacctggctgtaaaacgtgttttgtgaccttgattttcctaaagggagttgaaagtaccaaaagtttttcactgtgtcctgtttcatgttgggtaaagagcttagggcatgagcctaagcaaacatccatgcatggtgacagcaactgaatttctgttattaattccaaactctcatgtcctatggctttgtacctcattttcaagatttgaccttaagttctccatctgtgaatttaatatccactaatgggtgttttaaattttatactatgggccaggcacagtggctcatgcctgtaatcccagcactttgggaggccaagatgggtggatcgtgaggtcaggagatcgagaccattctggctaacacggtgaaaccccgtctctactgaaaatacaaaaaattagctgggcgtggtggcgggcgcctgtagtcccagctactcgagaggctgaggcaggagaatggcgtgaacctgggaggtggagcttgcagtgagccgaggttgcgccactgcactccagcctgggtgacagagcg

SEQ ID NO: 48194 - DNA, 1034 bp, Homo sapiens
aagatctattctttcagcaatgttgaaaatacaatacattattgttaactatggtcaccacactttacaatagatttggaaaacttactccttttgtctaactgaaactttgtacctatccaccaacatctcctcattcccttactccagcttctggtaaccacacttctactctctacttctataagttgaacttttttggattccacatatgagaccatgcctgaatcttttcacttagcgttgacatcctccaggttcatccatattgtcacaaatgacaaaatttccttctttttaaagtctgaatatttcattgtgtataatatacaatgctttctttatccattcaactgttagtgaagatttaggttcatatgttggctattgtgaatggtgatgcaataaatatgggagtgcagatatcacttcaacatactgatttcatatcgcttgtgtatatatccagtagtgggattgctggattatatggtaattctacttttagttttctgaggaagctcaatgactgtactaatttacattcccacccactgtgtgcaaagattcctttttctccacatcctctccagcacttgttatcttttgtctttttgataataaccattttaacaggtgtgaggtgatatcttattgtgactttaatttgtatttcttttatgattaattattttaagcattttatacctgttggtcatttggatgtcttctttggagaaatgtctattcaagtcatttgcccatttaaaaattggattgttttattgctattgagctgtttgagctcctgatacattttggatattaacctgtttatgtggtttggctctgtgtgcccacccaaatctcaccttgaactgtagtaatacccatgtgttgtgggatggacctgggggtggggaggtaattgaatcatgggggcaggttgttccggtgctgttcccatgatagtgaataagcctcacaagatgtgatggttttataaaggggagttcccctgcacatgctctctt

SEQ ID NO: 48195 - DNA, 1033 bp, Homo sapiens
gactcaggcagggcattctaggggcctaggaaccaactcccagtaccttagggtaaaagccagacttctttttgggtaaggttaattgtttactacacagccttatttcccattgctcttctgcaggacatctcctgccaaacaaggtaatactcaaacggtcccataccatgcagtttttttttcacctgtaatatttctccctttacttctaaaatgcagaagcactttgcattccatgaggctcagcttaagtcttacttacccctagaaactttgcccaaagcttttctaatcacccacttttctaactagttggtgtatgccttgtgtggctttgcaatgtggctggtattcatagacttccctgagccttatatctctctgagcctatgtgtccacccaaagtaattgcttagaaaatgcttattattgatgataattttccttgtgtctaaggcattcgataaatctcttgacatgaactgaactgtttcttcatgattgtaaattaggcatctttgttgggtgtatcttattctttctgatgatttgggctttaatttagatatgtcactaagtgaattattagatcctaaaacaatcaaattcaaattgaccttcagaatgtttgcaaatgaaaacaacaagtggtgggttaacataagtggtccccaagaggtcaaaaaatgtttccctggaaccaatgcactgagtgagactggcttggcagttatttttactgtgaccccttgtgggttagaccctataaaagttgggtaaatctcatccagagagctcttttgagaaataatgatgccttgttttagtatcccgagatcccaggattgagcacttagttaggaaggaccactgtctgcagggtagaaagatgggtttttgctactgctgggtagacaaacaagttccctcacccccaaaacagaacacctttaccaaggtgtctgaatgactggctccattcagacatggcctcaatgtccatgcctcagttgtcatgacaaccgtgtat

SEQ ID NO: 48196 - DNA, 1032 bp, Homo sapiens
tttatactttttgagacagggtctcagtctgtcttccagtctggagtgcagtggcctgatcacagctcacagcagccttgacctcccaggctctagctttcctcccacttcattctccagagtaagtgggaccacaggtgtgcaccatcatgcccagttaatctttaaaattttttttgtagagacagggtctcactatgttcctcaggctggtctcaaactcctgagttcaagcagtcctcctgccttggtctcccaaagtgttgggattacaggtgtgagccactgctcctggccagttttcttatttttaaaataaaaaaatggttactacattagtgagtccaaggggcagcacaagtagcatatctgaattgggaacagtcccccataagagcatgcatcatatgtgatctggaaaagcacactggattttatcatcaagttctgtatttgtaaaatgaacaaaaattgtacacattgattttggagttcaagctactgaaagtaaagctcaaccaaattttcttggctgatgggactaaggtcaaaagaggcagagaaacctgggactagatgatttacagattgatgattctgcaactctatttagaatattgacaaatcagtgtttgattgctacttttaaacactgcaccttattaggaggtgcaggaaaaacagctcataccaaagacctgtgtttcagcaaataaagaagctttaaacaaaataaatcccaacaaagatagtgtgccatacatgatgatgcccttggtaagccttcttcctgaactgcacacaagtagctgattgaggctcacttgttcaggtatggatttaccatagcattcagggcaaggctcagtggtgcaccccctcacagggagcactcagctggcttggttattagatcccaagcggataataattacaagcccagtagccccctactgaaattcccctgccttttaggagctttcaaagagtcagaaattaatacacagggagcaccgtgttcctatgaagtat

SEQ ID NO: 48197 - DNA, 1035 bp, Homo sapiens
tatagccaagctcacctaggccatatctttactgtctctgccaacagtggctctgctttcacaggagatgggaagatgtgtggatttttaatttgctctggatgagagattttacatcaaaatgagccatgtgtctttttgcagctgctgtcattttgttggagatcgccacatccagtgacccagtctcagtaagactctattaaacacattttcaagtgaaccatcaagaagtctgtttctcagtcattcagctgtgaacagtgtgctctgccctagccagagaattacgttgtgtctgatttgttcatatatgtttaagaaagaatatgatatatatgtctatatctatatatgcatacatatatagatacatccatagatataatgtatattttagtatatatttagaatagcatatgctttttgtttgaaaaagtctcatactgtaaagtcttctggctattagggtgagtttcccctatccaaatttagatatgttgagttgaaagagaccataactaaaaatactctggctacatccggaacatggggatcctttgggatctgtttcatttgaccatattctaatcataatgattttgagcacggattttgtgccccaggatgtgaatcctccaataaatttttctgttaggttttgtttatttattttaagaaatttacctctaggtttataaattcttgtgggtcagaaatatacacattttcaacacagatcaaaactgtcataaagctattgtttataagagaaataggtgagtgaggtagagcctggttctttgaaatcatttttcattgcattatttgaattgtaaaaccctcgggaattgtgtatgttaaccaatggtttcatgtgcttctaattgccatttaacagataaattaaggggtgtgggaatatcaaccagcacaagctaacattattaactgatcttgctgctttatttttatttttttgagacagtgtctagctgtgtcacccaggctagagtgtagtggcatgacggtggc

SEQ ID NO: 48198 - DNA, 1030 bp, Homo sapiens
agagactgggtttcaccatgttgcccaggctagtctcaaactcctgagctcaagcattccacctgcctcggtctccaaagtgctgggattacaggtgtgagccaccacacctgacccaagttatctcttaagtagctcaaattaaacatgtccaaaacagaagtcctgattttgctccccagaccagcccagtctttatccaaagagcatttcgggagaaggaaaaggaagctccaagacccagaggtaggaaaaacttggtatatttgagaaacagccagttggactggagaggacttgtacagagtaggggatacagtggtggtggtggtggggagtggcagaggcctggtaggagatgaggttagagaaggtagccatgtatggctttgtagagatttggatttttcccccaagagagattgggaaccagtggaaattttaatcaaggagcaatgttgtatatttgaatgcctaattctaatttcctctggctactgtctggagaatggatgtcagggagcaagagtggaagcagggatgccaactgggagactattgcagaagtctcagtgagagatgacagtggctttatccaggataaagctggtggagttgtgttaagtgttcagtattggaagtagtatcaacaagacttgctgatttgctgcatgaaggaaagaagagaaagagaggaattgagattgctctaggtttttggctcgagacaatagatgaatgatgatccatcttttgagatggtgaagactgggctggtttggggagcaaaatcaggaattctgttttggacatgtttaatttgagctacttaagagataacttggaccaggtgtggtggtttacacctgtaatctcagcactttgggagactgaggcaggtgagtcgcttgagctcaggagtttgagactagcctggacaacatggtgaaacccagtctctaccacaagaaatacaaaaacttagctgggtgtggcggcatgcacttacggtcccaactgctggagaggc

SEQ ID NO: 48199 - DNA, 1025 bp, Homo sapiens
ttagctgggcatggcctatagtcccagctacttgggaggcagaggcaggagaatcgcttgaacccgggagtcggaggttgcagtgagccgagattgcaccactgaactccagcctggcaacacagcaagactctatctcaaaacaaacaaaacaaacagaaaacattttattagctcaaatagttactcttccagatgaatgttctatgcaacttgtcagattctattttaaaaaattaggattttcctttgattatttttaatttatcaattaatgggaggggtattgcccatattaaccgtgttggattatcagaacagattttgatgccaagagctgggactgtagtgggttttgtgtgtgtgtgtgtgtgtgtgtgtgtgtgtgtgtgtctagaatggtggtggtgggaggtaagcatggagggctttcctttatagtgtcattttcatagcaattttagagggaaaagtaaatttgctggctcactctgccatcgtggactagaggctctgataacttttatgagataaaacaatctatatttaaaaaggattcaaggccaaataagccaatacagtttagtttaccttaaaatgttaatacattataaagtcactgaataatacacatggaaaagttgccatagtaacagtcattttcatgaagtggatttagatactaaattcttgagtgatggcatgccttgttatttgctttaaggcatctttagtactctttcttgtctccttggggaatagaaaatgggaaagggacttgcacctgatacagttctgtggttgaaagccacagaattcaattttggcttatttaagttgaaaatgtattggtaggatgaagggatggttcatagagttaaaggaaatgtggaagagagggaattcagagaggggctttggagggatcagaaatttggagcaactctgaggacctggggatcagtaatcatgggacagcttctggtatggttaggctttgtgtccccacccaaatctcatcttga

SEQ ID NO: 48200 - DNA, 1068 bp, Homo sapiens
ccttttaaacttctgggtactttaagggaagttgcattaaccttagtatggttcctttcaggggagcatcagagataatacactgtgacagtagtactgtgctgccctggcattaacagtcagacatccctgtaatcccagcactttgggaggccgagacgggaggatcacctgaggtcaggagttcgagatcagcctgaccaacatggagaaaccctgtctctactaaaaatacaaaaaattagctgggcatggtggtgcatgcctgtaatctcagctactcgagaggctgaggcaggagaatcacttgaatccgggaggtggaggttgcggtgagctgagattgcaccattgtactccagcctgggcaacaagagcgaaactccatctcaaaaaaaaaaaaaaaaaaaaaaaaacaggcatcatccttgaggagcctttgagtcccacttcaattatattccttgttgacaaggggcaggtctaatagggctcactggaacccacgtgtacgtgtcacacagtctgccatgttggagtggagaaggatgcttttgaatttatgtctacagagattttacatcacattcttgggaactattttgtactgtgcatcttctgtgtattctgtgtagtgtggtggttgaaaacagactctggagtcaaccacatctgagttggaatcctagatttccctcttaggaactatgacttgtgcaagacactcaacctgtctgaatttcagtgctctcctctctcaaaactgggctattaaaaccatttgcacaagactgtgggaattaagtgacttagtgaatataacaaccaggcacacagaagattcttagtagatgtctgtttccttctcttgtatccctctgctaggtttacaaagatgagcaggtggtggtgataaaggataaatacccaaaggcccgttaccattggctggtcttaccgtggacctccatttccagtctgaaggctgtggccagggaacaccttgaactccttaagcatatgcacactgtgggggaaaaggtgattgtagattttgctgggtccagc

SEQ ID NO: 48201 - DNA, 1053 bp, Homo sapiens
tagtggaagcctgatttaatccttggtcaagagttcgtgtgagaaatggatctttttttttttttttttttttttttttcctcctgagatagggtctcactctgttgcccaggctggagtgtagtggtgcgatcttgactcactgcaacctccacctcctggggctcaagtgattctcccacctcagtctcccaagtagctgggactacaggcatgtgccaccacacctggctaatttttgtatttttttgtagagacggggtattgccatgctgcccaggctgggagaaacaggtcttcttttctggcggcagagtctgtgatcatgagcaggccaggggttctggaatagggaaacttgtggggattaattgaagctgcctcatagggatcttggcaatagctaagggagtatgtacgctgttggacattttatggaaggatttaaacctttagaaattggtaggatttggagctccagccacctgcaataacaggtgattgctaataggcctttaaggaaacaccacctgttcagctgccgcctgtagtgaagcttgttttctttagggaagataggagcaagtgcctggttctttgttgcatttgtgtttaactttttccaatctctttcagtacagttgaaagcagagtgtaacaagggatatgtcaaggtaaagcaggtaggtgtatttataacttggaattttatactcgatgattttcttatgctgttgactttagagtgtctgtgccagccagtgaaggcttctctgtcatgtatggaagtgatggagtaatataggtgaacataaggcaaggtgcttggcatatagtaagtggttaacatagcagtggctatcttactgtaggtgctgttgctattattataattattttctgattgtttattccataggtaggagtcaatcccaccagcattgactcagtcgtaattgggaaggaccaagaggtgaagctgcagcctggccaggttctccacatggtgaatgaactttatccatatattgtagagtttgaggaagaggcaaa

SEQ ID NO: 48202 - DNA, 1103 bp, Homo sapiens
tagggtggcttccctagggctggaggacccacttccaagctgggtcactcatatactggctgttactggctgggagctctgctgggacctctccttcatgtggctaagttgggcttcttacagcatggcagctggatcctttgaacaggagcacccccagaggataggccacaatgtgtaagcagttattaaggttctgcttgtattgtacttggtagtgtcccattggcaaaagccagtcactcagccaagtccagtcaatgtggaaggggactatggaagggtaggaattctgaaaggggagaatcaattaggtctactaaagtaattggctaccacagagagaaaggctaagtatacattttctaaaaaattttgcgttctttttttttctttaatcatgtatgctatatcctctctctctaaaatatccaagaagtcatacaggtgaaaagtaaggtctcttgtgaatcaaagccctttggagggtggttaaaatttttgttacaggcctcataatttaggagcaatattattctatgaaagcagaagttttactgtggttaaacgtatggtgaagacagttgttgaaatagtattattttcacatagacagctggagctttgcttgtgaaaagaatgacaaagtaggagtgtctcggggttgtctgaatggtgtaaatgtgtagacattcaaatttgttgtcaagagggaccaaaccatgctcaggaaaatgccactggacgtccagtctgaagtgcagtaagaaagacaagtgggagaaagagcagcaatgcaatattggaaagactagcagtaaggagactgcaggttcaggagagtgggctcagcactgaggctgtgaaaggtgagcgtgtcctgcagctgtcctcagtagactgaaagctccttaaggggaagggctgtgtctggcttgttgactcaacatggaccccactgcgtgacacagagaaggcactcttaagtgtttgatgaatggatacatttaaagaaacgcagaattggaaaccattccctctctttaagattctggtgccataaaataattagagtaaccttttaaaaaatatggcacttcggg

SEQ ID NO: 48203 - DNA, 1057 bp, Homo sapiens
ctccaaaagggaaatcgtgggcccaggaactgacagcggtcctacccacgcggccaactgcctcccgaccgcggctccatcggtttcccggcgccaatggcgccagccaggggactaggggcagcgcgagggctcaaactcaccggtgcgggctgaggccggtgtgtgagggagcgggaaggagcgccgagctgtgcgcagccggggtagttaccgctcctccgcctctcaccgagcgttctggaaagttccgcccggcgcgccgcagccgtcctcttttgtagccgaacccgggcgcgtcacccgccggaagtcccgcccttctcggccgctgccaccgccccgccgttacctgggcaacggcgcgggggcgcacgggtcgggaggagctgcgccgaaaggccttgtgggtgttggtgctagcgcggcttcccggcgctcgtggaatcttctggagcccttttctccactcagcgagcctgagagtgcggaagtctccggctggtggggcatggcccaggagcactgcaagtcctagggttcccaaacctgtggggtggccgcctgggcccgcgagggcgggaagggctcgagtacagtgacccagcgggagctgtgtgtgaacgggaaagctcttggaacagtcttgcccccccccccccccctcttacgggcgcctcttctctttttgggaacgtggcgagcaaaaaatgcttgagccaggtgggtctagtccccagaccaatagcataggccttgggtcttgctgtttttcacgcgtggtccaaggcggcataattaatcaaattgtgaagttgttaaggctttttgtgcaagtccaggcccctagacacatgttatctgccctggacctcgctgattcgtgcagattgagctcagtgtgtctgggactgagctaaacagtgagacgtttggaccgtctttgatgtacagagggccgtggactcctctggtcaggttttcacccagtttggctacagagtagccgcaagagtgtctgactaaaacaatttgtttaattatttgacctcacttt

SEQ ID NO: 48204 - DNA, 1036 bp, Homo sapiens
taactattaggttagtgcaaaagtaattgcggtttttgccattaaaagtaatggcacattacttttgcaccaaccgacctaatatgactttcttttagtgttcttaggatttttaattgtaaaacatgtaacaaattttcctaaacaattgtgcaattcagtggcattatttacgatgttacgcaaccactattgtatttccaaaatgtcatcaccctaaacagaagccctgtaacattgtcaattaacttctccttcccttcccctcagcctttggtactgtttctgcctcaatgcatttgtctaagtttagttcatataagtgaaattatacaatacttgtccttttttatctggcttatttcatttagcatgttttaaaggttcatccatgtatcaaacagtaaagtgcttcatatttgggggaagtataaaaagtattccttttaatggctgtgtatttcacagtgtatgtacacatgtatattgagaattgagagatttgtaggtacacattaaccatttgttggtggacagtcaggtttccactttgggctgttgagaatgcacagtaaacactgaccatacgagttttttttttttttttttttttttgagacagtctccctcttgtcgcccaggctggagtacaatgatacaatcttggttcgctgcaacctccacctcctgggttcaagcgtttctcctgcctcagcctcccaagtagctgggattataggcgcccaccaccacacccggctaatttttgtctttttagtggagacggggtttcaccacgttggccaggctggtcttcaactcctgaccttaggtgatcagcccgcctaggctgcccaaagtgctgagattagaggtatgagccaccgcgcccggccttcattcgtttttaattccttttgtatagtcatccctcagtatccatgggggtactggttccaggactttccatggataccagaatccgagggtactcaagtccctgatataaaacaagatggttatttgcatataacct

SEQ ID NO: 48205 - DNA, 1045 bp, Homo sapiens
tggctgcccaaaatgctatggcagatacctgttcatcctcaactgggctctgcctaggcttgctccagcagaggttacaaactctatgcttcttcctctgtgtctccaacctcatcttcctcttctcacctccatcctggccctaaaggccctatgtttgaagcattcacactgtatattctgtggggcacacggccccagtgtctggcacatggtagtcaacaccacaaaccgcagaaccagttgtaaaaggacatggagtcggaatgtgagttttaaccagggtcatgctgggctgggttctggcatgatgctgggttgtgggctgagtgagaacagcaagggtgatggtggatggagcaacagtcttgcagccggggctctcaggccaagtgtatggcagctctgtgataatgactttccctttactctttgcagattagtttttagaggcatgtctatatctcgcccaaatgctgtggtcgggaggtgtcgcatgatccgccactcaagagacaagaaaaatgaacccaatcctcagaggtgcattctttgtttattcatactccttccccctttaggatgaggtaggctgcaggtccgaggctctgggcctagagggaaattgaggtggtcaggttacagtggagagggaggaggaagtacgtgtgatgatttcttcttaagatttttgttttaagacaatctccttgtgctcttttccttgtaggtttgaccgaattgcacacacaaaggagacaatgctctctgatggtttgaactcactcacctaccaggtgctggatgtacagagatacccattgtatacccaaatcacagtggacatcgggacaccgagctagcgttttggtacacggataagagacctgaaattagccagggacctctgctgtgtgtctctgccaatctgctgggctggtccctctcatttttaccagtctgagtgacaggtccccttcgctcatcattcagatggctttccagatgaccaggacgagtgggatattttgcccccaacttggct

SEQ ID NO: 48206 - DNA, 1059 bp, Homo sapiens
tttctagaggggaattgctgactcagaggttttggtactctgtgttgattgtagagtgacggcagaaaagtgaggcccaagagtttcctagtgaccatgtgtagtggacaagtcaccagtccctgtgagtgtttggcccaaaggctttaaggcatttgatatcactgtttttgtttctgcaccaggcgggagacactatattcaatcgtgctaagctcctcaatgttggctttcaagaagccttgaaggactatgactacacctgctttgtgtttagtgacgtggacctcattccaatgaatgaccataatgcgtacaggtgtttttcacagccacggcacatttccgttgcaatggataagtttggattcaggtaagagatactcagtcagaatctgtggtaaacatgtctctctcatgtgttgactaggaaatgcagtcctggcagctcaagagtgcctctttaagctctggagcagaatgcctcctctgagaaatgggtgctttgtattagttgagatggaaagaagagaccagaaatgcctgtagtctctgcacatccagacaaaaacaaattttccccccttttttttttttgtttgttttttgagacagggtctggctctgtcacccaggctggagtgcagtgccgtgatcttggctcaccgcaacctctgcctcccgggttcatgccatcctgtcacctcagcctcctgagtagctgggactacaaacacttgccaccatgcgcagctaatttttgtatattttgtagagatggggttttgctgtattgcccagtctggtctcgaactcctgagctcaagcaatccatctgccttggcctctcgaagtgctggattataggcatgtggcaccatgcctggcctaagaacagtttttagcatttgggaggggctctcatctttaagctccaaatgatactgtattttcttgcttttttctttctcttgccccacaagttttggaaagtaaattggaatagttttcccccactgaattatttagcttgtatacctcagcagatgttccttggcc

SEQ ID NO: 48207 - DNA, 1072 bp, Homo sapiens
agtcccagcttctcaagaggctgaggtgagaagattgctggagtccaggagctcaaggccagcctgggcaacatggcgagaccctgtctcccctgcaaaaaaacaacaacaacaaaagcaaaactagagcccaactgctgtgaactcatggctgagtagatattattagccctccacaaactcagcatttgtataatcccaggctgtttccagtaattctctggggatcatctcccagcctgtccactgttccaggatccacacttaggcctataggaatgccccgtcagagcttctgctgccgctgatctgttactgtttcatgcaacccactcggcctagttccttcctcttactgtctcagtgggcacagaaaagcatacagagggtgtttcagcaaacattgccactggctgcagacctgcccccggatctgtcctgttgagagcttagtgctgcgttcttgcatggtggggaggggtgtggctctgtgatgagccagggcatgtgtataggagcaacagtgtctctcttatcacgtagaagttctgactcattgcgagtcttggctttgggttaatggttccagccatgttgctgctgtgtcttttggtgcaggagaggctgggcacagttggtccctaagccattatggataagggatgtgtctgctgatatacacacatggacctgacatccagggaaggcagggtgattggacagaacagttcttccagaagctgttggaacttggacaagagtggcccttggctttctgtagttggtcatctgtcccctgttgcaatcaggggaaggccacacttgccttccttaaccacagttaggattttcttggggattagaccagattctagcacctgtcctgaacctctcgccccgcccctacaaaggctgcttgcaagtgtagtgcacatacacagggagcaggtggggcatggaagtggaagtggagcccctgcctttggcccttgggggaggcactgtctgcttacccacggttgttgcctcataggaatcatacaacagcttcctaactggtctccttgccttc

SEQ ID NO: 48208 - DNA, 1030 bp, Homo sapiens
tatctgtcaccctacctcagcagttgtctctgtcactggtccaagcagctggttcctacacaaggtcaagatcaactggggagaagcagactcctgggtctatcccattagtgaggacagctgcctgggcttatggcctcattggtttggtttctatcttgatcatctctaccatccccccatcccggccttccattttctacctcagctgtcagtgcacagattgatgtgtgtgggaacggagcttgggaggagtggggtagggctggtcctgtcctgtagcctccccttccttcgggcacttggaccctttggagcttgccggggtggggaatgggagtgggaaggccagggagtgtctctgcaccatcactgtttgagtgttgcccctttgctgtgtgccccacctagtctatgtgtgtctctgttctctggggactcaatttgctggtgaattgcttccatggacattgttctgggaaatgccattttttctgctcacccatgactctgtgacaaggaatgacagcttattaggaatttgtttttgcattggaacagtggtcatcagaatgggccccttttcccttgcagctttgacatttgcctctcttttcctcacctctctcccttgcatccacccttttctctttttcttcttttttgttttccttctagcaggggccttttacctttacttgttaatcctgtttgtagcaaagcaagtggaaggaggagttcctctctgatctgcttcttattctccacctaccttctcttctgtactttccgcctcctagagagagagagagagagaggaatgccgacctaactaccgctgccactgctgctgccaccaccgctgccaccaccaccctggtaatgttcacatgtcctcaaatcaacccagagccagggccctgctggtcagggggaggctatgtaaataatcccatgagtgtgccatcctcaggccctggggtctcctaggcaagaccagggcctctgtgggctctctcggaaatgctga

SEQ ID NO: 48209 - DNA, 1082 bp, Homo sapiens
catggtaaaccttcagtaaataccagccgttactaggagggtccactcctgcctctccactctccattcatcctgcctgtttcctctgcctgcttcctctgcctgcttctgtggtggtgaattcttcatggctcccaccgcctcctgctgcacccccactcagggcccgcatcaggacccttcctcctattggtttgaactccttggagtcagagggtaatggatagtggagtgagccaggtggcagaatctcagaggccatcccgggcctataagcctcttcaaaatagggccacgtatcaagctttacacacaggagtgaactttcacaagttgttatgactcatactctgtctatagtaagctgttaaccactcccatttggcttatgcctctgtaattattgtactaacttatatcttaaaataaggatattgaaggaatgagccgggagaggctttcctggttgagatatagaagaacaagagttgctctttttccttaaggtctctcctcccacccctgaccttagctcaccagcatgggagaatactatttgactccttgtactctgagacgtggatttcaagatatagcattccaacttcaacggcagcaagaaaagaagcaacagaaggagaagacatcatagcaaacagggatgcatgctgcatttcctaatactcaaacccggaaacgagacttcactcaaggtgaagggagggcaggtcaccacctggtagcactagccctaaattaaggaatgcagaatgtttgtgggattgcccatcataaaaattacaaaatgagtaaggaatgcaggcacagctggccaggtgggtttgtcacaaccatggcagccctttgccccacagccagtacacagaactggtctctccaattccgattgcatatcttctggcacctctgttcctctccctcagctgcccaggatttttctggttctgaccatgttacttcctcttttaaacctgttagcatttcacgactgcctacaggcaacggtctaaatggtcggaaggcccaagcttagcatccgagaccctgacctacctccagcc

SEQ ID NO: 48210 - DNA, 1033 bp, Homo sapiens
atagttgaactctgctgactctcctcagtaaacagtctctttttatgacaccttatcctctactgaattctctctatcaagaatgacttggccgggcatgggggctcatgcctgtaatcccagcattctgggaggccgaggtgggcagatcacccgaggtcagaagttcaagaccagcccggccaacacggtgaaaccctgtctctatgaaaatacaaaaatcagctgggcgtggtggcaggtgcctgtaatcccagctacttgggaggctgaggcgggagaatcacttgaacctgagggggaggttgcagtaagccgggatggcacattgcactccagactgggtgatggagaaactccatctcagggggaaaaaaaaaaaaaaaaaaagaatgacttgtcttcctcttagagtgtgaggtctacatacaaatattattcttgtattcagcaaatgtatgtcataggcctagtgtgtgttaggaactgtgctgtcaccaacaaagtttagagaggttataaaacttgactgtagctttttagaggtggaggagtgatttgaaacctaggctgtaattccttcctcctgtgattccttcctactgtgttgccttcccttgaaaattgcatttgggggccaggtgtggtggctctcgcctgtaatcccagcactttgggaggctgaggcgggtggatcacctgaggtcaggagttcaagaccagcctggccaacatggcgaaaccccgtctttactaaaaatacaaaaattagctggatgtggtgtgtggtgacatgcacctatattcccaggtactcagtaggctgaggcaagagaatcacttgaacccaggaggcagaggctgcagtgagctgaaattgcaccactgcactccagcctgagtgacagagtgagactctgtctcaaaaaaaaaaaaaagaaaagaaagaaaattgcatttagttcctgtagactgtgtgtcaaatgtctaaatctcttctaacaaatggcctaaggaggtgcaaagcgaagca

SEQ ID NO: 48211 - DNA, 1061 bp, Homo sapiens
tgaggtggcaaacatactaactgtgatttgtgcagagcaaaattatttccatttatagaggaagagactgagattcagaagggttctgtcttgcccaagaatacagatcttggcagagctcaccacaaggccaacggaagccatggagagcgctgtgaactgtgggaattgctgcaggtgacatctaaaaggagatttattgaggatcaaggcagaggtccccagaggacaaactgtacatctgattccttcctcctgcttttcttcctggccgaaatagatgattgaattcatctttcttctggcaccttgtctcagagacttcccttgccacagttccagacccatccaggccatgactgccatgtagacgacacacctctctgctcacaaataactggccaagcctgaggtagccaggttttggagcattgataatatgggtttttcctgtgttgcccctaaacatgttgtttcattttgtccccttgtcatggggtcttcacagaactcctgccttagaggataaggagagactcttgctgtagcaactgtagacaccggtgtgcactaaatagggaggtgaaccttggcagaagatggaaaatttttttggagaaggggatttttggatcagtgcttgtggctctgactctctttctgaaagggaatacccaagaacatgaggattttctgtatctagagcttgaagactagccttctccagtattttgcgctcttccttaaacgatcacaatatagtctgaggtcagctttcttcaaacaggaatgaccttacaggcagagaagatagctataggtggagactgttacctcatactgtagactcagatgtgtaggataggttcagatccagctgcccaagctcaatttggaggacatgccattcttggtactgttcattctgaactataaatttctttgtctgcttctctaagacatctttctgtcttgtgtttactgcttagcacaccaaaccactgtccttcaattatgataacagtgaatcatttctgtgtgcttactatataccacataac

SEQ ID NO: 48212 - DNA, 1028 bp, Homo sapiens
ccacagctaggactgagtgtctccacatcctttctgaagcctacgaagctcatttatgtgctctgagatacatctattcaagcacataccaaggaaatgctcactgtgcatttggaagtaggtgttggacagttggactgcagatgttaggtgtctgtgtctctccacaacataggcatcaaccccaatctgccttacgttggccgtgagcattggtagagtcagcctgacttggcggaagcacgtgtaggtggtcttgcctgttagcttcttactcccccttgctgtgccctttgaggagtttgcctcacgttataattctacatattaggctcagcacctgtttttctttctggatgcatctacagcttaggttcctttaggtgtgaaaagtatgtccccatataggataggttgggttataaaggtgtcatttcctattctttgctgcatcttgaacagctgaccatggtgtggtgtcctttgatagtgttgtttgacagacaaagggctatctggcgatatgcttggcattttcctggggaatgtaactttatggacgtctcaactgaggctgacatgtcacaagatattgagcatattttcaggcacttaggattggttttagaaataaacagatctgcttcttacagctacttcatctgttccagctccaaagacaacaggccctccctctgccctcccgtctgtgagctccctgcccagcaccacctcctgcactgcacttctgccgtccacatcccagcacactggcgacctgactagcagccctctctctcagcttagcaggtatggggaaggtgtgggcccaaagtgagaagtaccttggggcaagtcctggagctcctgtagaaggttgctttcatgaacagagcacacttgttgtctctgacgtgatgtcctgggcttttgcattacgactgtagcttaggttttggccaggttgttccttaaaaccaccagatatggaaaccttgcctgcttgtaccgcctctgctggcacagag

SEQ ID NO: 48213 - DNA, 1057 bp, Homo sapiens
agagccacagatccttatttcaagtacagatttgaagatctggctcagagaactgttgttcttgagggttttgctgtatcccatagttggaggatgcatggttccttgaccaggtgatactttcatcattggtgagtccccaaaaatagagtagtcagctcagtgttcacttcccacccaccatcacaactcccccgcattgctcttagatgcaggtggtgatattaatgccaaccattcctgtttaacttttaatttctcctttttttttttaaatgagacagggtctcgccgtgttgtccaggctggtcttgaactcctgggtgcaaatgatcctcctgtcttggcctcccaaagtcctgggattacaggcatgagccaccatgcccagccaacttttaatttttcttagcttgttttttttctttctctttttagaaaagtcttagcctattttctccttgtttctcactccttcttcttgccagtattgcctgggaacctaaatgcttgtttggctctgttataggcctttgtgacctggaatctgtgacctctgttcctgacacgacagctttgctttttcagatcccagcttctgcagtggaaatgcctggttcagcagatgtcacaggattaaatgtgcagtttggggctctggaatttgggtcagaaccttctctctctgaatttggatcagctccaagcagtgaaaatagtaatcagattcccatcagcttgtattcgaagtctttaaggtactgaatttagtcctttgttatgaagcaaaatagaccctaagagagatcaactggtggaaaagaatacatcctgtggtaatagctatcctcagtgtttatccagaccttccatcatctccataagaaaccccatacctgtagcagacagtctcagtttcttcattgccctgccccttagcaaccaataatctgtctctggatttgcctacctggacatttcatataactggaatcttggaatatgtggccttttatgtctgatctttcacttagtgtaagttttcgaggtacaccca

SEQ ID NO: 48214 - DNA, 2117 bp, Homo sapiens
agaaatatacccattagcaaatgtattctagaatatgatacatgctttataattactttctaaatataaaaatatctacagtaaggccgggcatgatggctcatgcctgtaatcccagcactttgggagctggggcatgaggattacttgaacccaggagtttgaaaccagactgggcaaaactctgtctctacgaaaaaagcaaactaacaaaaattagctgagtgtggtgttgtgtgcctgtagtctcagttacttgggaggctgaggttggagggtcacttgtgcccaggagtttgaggttgcagtgagccatgatcatgcctctgtactccaggctgggtgacagagcgagaccctgtctctaaaacaaaacatcaaaaaattctacagtagatcttagtccagaaaacaatgatgtggtaatttccaagcacatatctgatgattccatgtggaatttaactacctgagtttcctggacaaagataaaaatttttttatggtttgtcaaattctttgaactgatgatcactcttgagattgaaagtacccctttcttctgaatgatgttttccttgtgttttgtttcatattatgtctctatagttagtatattcaatttcttgttttccaattaaatgcgaaagtttatcagaattgacttgctataaaatcatgtaaaaacagtctgagtctgcctaggcgcttacattttttgcttttttttccccctaagaccgtaaaataagctacattttcttaaaatgccaaatgattaacagaggcccttatagtttggatgtgtttttattgaaacagtgtcatttagtactgtatgactgacttccaatgtgtgttaagctcccatccagaaggaacttcagaaactgttagtgaaggctgtgaagataggcttatggaagtataagcttagatcatagcttatacaagaatgttgctttagaatggtgaactgaagttcctacccaactacaggaagttctgagctggcaaggggaagttagaaaggtctatggatgcagaactacagctcttactagggataattattttagtttgttgctgtgtttttcctgaaatttattgctgagaaacagaattttctcccgagtcaaatcgtttgttttaccctgataaaattgagaattgaatatttaaacttttccttagtattttctactctgtgtagccatatcatgtgttgggcttggggacttggtgtttttagtatcattggtatatgaggtggtgtcagtgcttgaagtagaacagcccaaggcttctctattttgagaaggcctaataaaaaccctgatttttaattgacgcaccagagtcttttcctcctccgcctttccctctgctactggtataattatgtaatgcccttgctgaaatctatgtgtgtccactgaattgataagaaggacttgagtttttacagcaatcttcagatatgttgctttatgtagtgaccagcatgagaatgaccaacatgagaaggcagaataagaattgtttgtgtggcgttgtattagagcagtggttctcgaccctactctaatctttaaaaatcactgggagctgggcgcggtggctcacacctgttattccagcactttgggaggccgaggtgggtggatcacctgaggtcaggagtttgagaccagcctggccaatgtggtaaaaccccatctctactaaaaatacaaaaattagccaggcgtagtggtgggcgcctataatcccagcttcttgggaggctgagtcaagagaatcacttgaacccgggaggtggaggttgcagcgagccgtgatcatgccattgcactccagcctgggcgacgagagaaactctatctcaaaaaaaaaaaaaaaaaaaaaaaaaaaaaaaaatcattggggaggccaggcatggcatggtggctcatccctgtaaatcccagaactttgggaggctgaggctggaagattatgagatgccaggaatttgagaccagtctggcaacatagcgaggcctcatcttgctaaaataaaataagctggttgtcatggcacatgccctgtaatcatagctactgtaatcccagct

SEQ ID NO: 48215 - DNA, 1034 bp, Homo sapiens
actttcattcttttcatatgtttaaaccctcaattttacattggtccacagaactggcatcaaatactcacaacatagctcaggatctgtcaaacaaaagttcttatggactcaaaggtatgaatacttaattttttaatttttaaaattaagaatcttataaattgcttgcaatatctttcattttttatcaaagctagctaataaaaatttatcagataaatgtttgtaaactatacctatttatttggtaatcagatttgcagtttgctaatggaaatgttttattgattgactttcaaggtgccacagaattttcatcattattttccatgttcctaagtggccttaacatacattcgttagaggactaacaccaagttaaattgaacataaaacattcatctccaatatattgttttaagctgaaaataaggattgttgaagtttttccgttatattttgtggtgtaggtctaatgaccaaattaaaattttaatattccaaaatatgattaggacctgagcctttgccttctgtatttaatgtctggaattttttatagtctgtgtgggtatggctagttcctgcaacaacgtggcacttgcttctcacatgggagtttcccctgtaatttcctgacttaccactctatcatgttgcatctctgcttataactatctgtttcgctgtttttccttcaggctacatacatagtgccttgtacttgcttttaaatgtactcagattctcaccctattatgcaagtccaaagttgtgtttaattattttcaaaatactgctctcaaagtggtaggccagtcttttttatttttattatattatttttatttattttttttgagatggagttttgctcttgttgcccaggctggagtgcaatggtgcgatctcggctcactgcaacctccacctcctgggtttaagcaattctcctgcctcagcctcccaagtagccgggatttacaggtgtgaggcaccactcctgactaattctttgtatttttagtaga

SEQ ID NO: 48216 - DNA, 1031 bp, Homo sapiens
agcaggtgagctgcaagctgtgggtagttaggtttgaaagatacgtgcatgtgccgggcgcggtggctcacgcctgtaatcccagcactttgggaggccaaggcgggcagatcacgaggtcaggagatcgagaccatcatggctaacacgatgaaaccccatctccactaaaaatacaaaaaattagttgggcgtggtggcaggcgcctgtagtcccagctactcaggagactgaggcaggagaatgttgtgaacctgggaggcggagcttgcagtgagctgagagggcgccatgcactccagcctgggcgacagagcgagactccgtctcaaaaaaaaaaaaaaaaagaaagatacatgcatgtgcctttgataattgtacacactttgaatgataaatgattaacagccgttctctctgatagacttcatgggagactgtagggtgtaagaaaaagaattttgcaaaagaaaattcagaaaacaaagagaatagagagaagaaaagcgagaaagaatcgagtcgtggacgtggaaacaacaaccggaaaggaagaggcggcaatcgtggcagagaatgtaagtacagactttctcctcagttttttctcttctttcatctcaagtgaccctcccgcctcagcctcccaaagttttgggattacaggcatgagtcactgcgctcagctttctcaaattttttcttagtttccatacattctgaacgactgaaagattagtccatagtatgctcataaattcgtttcctcaatgcagaatttgttctaatagttaacactagaaatgagtggcacctgagtagtttcataagcgcctcccatgtggtttcgtatcagcattgacctgggctgtaggcaggtggttgtgtagtgtgatgactcccttctgttatgagtcagacacatttgttaattttagaatggtgtgtgtgtggcaaagaaggggccaggggccatttagttacaggtagataaagctgttttatattctccatttatagacactcatgg

SEQ ID NO: 48217 - DNA, 1058 bp, Homo sapiens
aacatgtcctcattgtaaactcaagagtctagaagaggccatcttcatgtagaaggattatgtaattctgtatttgtatagaagaatcttaatatcaagtgccagttttttgtttgcctctaaccattttctgatatgttcactagcttatggaagtgacagggaaaaatcaggatgaatgcatagtggccctacatgattgtaatggagatgtgaacaaagctatcaatatattgctggaagggaattcagacacagtaagtattattaattgatttgcattgtttacatttgtctccaattccgtagcacattttcaacttcaccttgtttgggggtagggatggaatggattatggtgccattccatatttgttttaagttccagaaagaacgattacctgaaaagactgtttttgttatgtatggtttcttcatgaagtcgtagaatctgatgacttgaaagagaacttggtgatctactccagccttacagtttccaaaaatctctgtgcctgtgtatattttcaccacccccacctgaaaagcatctcttggctctgttgcttatgtttcttcatctcagtcctcacctctgattacttcttacatctctattataacagaaaaccaggatttgctggtatatgtatttgcttatgtggaatattaagttttcttttttttttttaatattgggttaagtttggtgagcttgcaggctcatgagctcaggccttggattttaagaaggatacagctaaagctacaccaggcacttgtcagccctaaaattttgctgtgtgtatatatttatatttatatattatagtttttatacatatgtatatatttatttataaatatatatttatttaataattttaaattttaaataatttaattttaaattaaattaaattatttaataatatatttaataatataaatatatttatatatttaataatataaatatatatatttaataatataaatatatttatatatttaatatatattatatataatatttataatatttgtttaataatata

SEQ ID NO: 48218 - DNA, 1036 bp, Homo sapiens
tgaatttctgtaccaatgtctttttgggtataatgtagcagtattgcagcagttaaactgaggtctcagcaggcataggttgggatgaacaggccaaagcacctggagtttgtataatcacccacccacatggcctggaaaggccttttgaaaagtgctttaaaatgcaaaaaatgtcaacaactcccacttatcccacttcagtcaagattatttgaaatgagtgtatataaaaaactcagaataaaagctgtttattagttccttatggcttttcttcctctaagatctttttgtaaactgttaagctttttaaatatttgtgttgggagttagtatagacttggttagcgaggcaacttaaactattttggagtaattttagatttaatagaccgttgtacagagatgatacagattgttcctgtatattcctcacctaatttccctgttgtaataattacggtaccttcgttaaaactaagaaaccagactggcacattacaaagtcacgccacagaagaataactttctttagaacttttctgattttttgttggtaaaaacatcagaaaacgaaacttcagtcagtaatgtgattgaaaaaatattttgagtgacaaaagtaaatagtttttctgcaaatagccagatgtggtggtgcgcacctgtagtccaagctacatgggaggctgaggcggcaggatctcttgaactcaggagttggaggctgcagtgagctatgatggcatcactacaccgcagtctgaggggacagaatgagaccctacctttaaaaaattaaataaatacggctgggtgcagtgacaggcgcctgtaatcccagcaactcaggaggctgaggcagaagaattgcttgaacctgggcggcagaggttgcagtgagccaagatcgtgccagtgcactccagcctgggcgacagagtgagactccatctcaaaataaataaataaatactccagcctgggcgacagagtgtgactccatctcaaaataacatacatacatacatac

SEQ ID NO: 48219 - DNA, 1039 bp, Homo sapiens
gtgcagagcatttttgtggagatggttttaaactccttttaacactggtagacatttctttgaccctatagttttacttctttgtattcattgttagaaagctatatttggggctgggcgtggtggctcatacctgtaatcccagcactttgggaggccgaggtgggcggatcacctgaggtcaggagtttgagaccagcctgatcaacatgatgaaaccctgtctctactaaaaatacaaaaattagccgggcattgtggcatgtgcctgtaatcccagctactcaagaggctgagacactagaattgcttcaacctgggaagtggaggttgcagtagccaagatcgcaccactgcactccagcctgggcaacaagagtgaaactctgtctcaaaaaaaaacaaaagaaagaaatctttctttggccgtgtgtggtggctcacgcctgtaatcccagcactttgggagggcaaggcaggagggtcatttaaggtcaggagttcaagaccagcctgaataacatggtgaaaccgcatctgtactaaaaatagtaaaaattagctgggtgtggtggcgaacacctgtaatctcagctactggggaggctgaggctggagaatcgcttgaacctgggaagcggaggttgcagagaatcccttgaacctgggaggcggaggttgcagtgagtcgcgatcacgccactgcactccagcctgagcagcagagcatgactgtctcaaaaaaaaaaaaaaaagccatctttgatgtatgtacagatttgggtataagaatggacctcagcctgccacagtggtgcatacctgtaatcccagcactttgggtggccaaggtgggcagatcactcgaggtcagacgttcaagaccagcctgaccaacatggtgaaaccccgtctctaccaaaaccaaaaattagcagggcgtggtggcatgcctgtagtcccaagcatgagaattgtttgaacctaagaggcggaggttgcagcgagccgagagcacactactgcaaggcaacagagg

SEQ ID NO: 48220 - DNA, 1069 bp, Homo sapiens
gtgatctgcccgccttgacctcccaaagtgctgggattacaggtgtgagccactgtgcctggctgttttttttttttttttttaatagacaggacctcgggctgggcgtggtggctcatgcctgtaatcccagcactttgggaggccaaggcaggtagatcacctgaggtcaggagtttgagaccagcctgaccaagatggagaaactccgtctctactaaacatacagaattagccaagcatggtggcacatgcctgtaatcccagctacttgggaggctgaagcaggagaatctcttgaacccaggaggcggaagttgcgatgagcagagatcccaccattgtactccagcctgcacaacaagagcgaaactctgtctcaaaaaaaaaaaaaaaaaaggaaatataagtcatttatttttcatttgttacatggaatatttacatagattgtttcctgctgggcatggtggcttactccagtagtcccagcagaggtgggaggattgcttgagtccaggagttcgagaccagcctgagtaacgtagtgagacctgtctctacaaaaattacaaacttcttatactgtatggtaggataagtgcttgaatctattggcttaccaattaataaaaaaacattttgaaccgggacatggtggctaacacctgtaatctcaacactttgggaggctgaggtgggaggattgtttgagctctggagttcaagaccatcctgggccaagtagcgagaccctgtctccataaaaaatattttttaaaaaatttataagaaaaaaacctttttggccaggtgtggtggcttgcgtctgtaatcccagcactttgggaggctgagacgggtggatcacctgaggccaggggttcgagaccagcctggccaacattacaaaaccccatctctactaaaaatagaaaaattagctggccgtggtggtgtgcacctgtaatcccagctacttgaagggtgaggcacaagaatcacttgaacccaggaggcagaggttgcagtgagccgagactgtgccactgtgctccagtgtgggcga

SEQ ID NO: 48221 - DNA, 1050 bp, Homo sapiens
taattttttgtatgtttggtagagacggggtttcaccatgttggtcaggctggtcttgaattcctgacttcaggtgatccacccagctccgcctcccaaagtgctgggattacaggcgtgagccactgcagcaggtggtgagagttcttttgaatccgtataaaccaggatttttgtcctgggtctagcacttagtaattagatgagttacttaaatctcctttaacctcttttttttttttttttttttttgagctagagtctcactctgttgcccaggctgcagtgcagtggcttgatctcggctaacggcaactgtgcctcctgggttcaagtgattctcctgcctcagcctccagagtagctgggactacacttgtacatcaccacacccggctaattttagtagttttagtagagaggggtttcaccatgttggccaggttagtcagttttgaattcctgacctcaggtgatctgcccacctcagcttcccaaactgcccggattataggtgtgagcccctgggcctgaccgtgaacctcaatttaaaaaaaaaaaaaatacattgtgagatttacggaaaagttgcaatgggaatatgaataattactgaatacccttttttcagattccccagattttaacatttctgtcacatctactttatcctgttctcttcctttccctacagtttattcccagaaacgtttgacaagtagttgtgaataaggttcttcttcacttaatacctcagtgttttttaaaaaacaaggatctttttacataattacagtacaattataaaaaatcagaacatctacagaccatacttatattttttcaatggtcctcataatgcctttttttttttttgagacagttttactttgatgcccaggctgtagtgcagtggtgcgatctcagctcactgcaacctccgcctcctgggttcaagtgattctcctgcctcagcctcccgagtagctgggattataggcatgcgccaccatgcctggcaaatttttatattttcagtagaaacgaggt

SEQ ID NO: 48222 - DNA, 1075 bp, Homo sapiens
aggcatggtagtgggtgcctgtaatggcagttagtcgggaggctgaggcagggagaattgcttgaacccgggaggcagaggttgcagtgagccaagatcacaccactgcattcaagcctgggcaacagagcgagactctgtctcaataaaacaaagacccatttgaataaaatttttaatgttaaatactccctcctcctcaatttggttatattattattttaagtgaagtgagataagtgctaagcacagtacctggtgcaaaattaagcattatatacatgttattgactagattggcaaaccctttttcataggcaatatgcaagtaagtaaactatatccagtttgtcttacttgcagattgatttgactatactttgatagttaattaaaagtgcttcttaaaatcactcatttatacccaagtgccctgttgatgttaggggacatagtgaggagatttaagtgttgcgttacatttttcagtataaagttagtgtagtattctgctggtattaacagacagatatctctgctactcagtgcttgatcctaaatacacttactctgataggaatttattcacaaactgatctagtccagtgatggaaaaatttggaggttttaggctaggtcctccttttatagttgaatttacttaggaaaaagtttgcttaatgaatggtctttttttttttttttttgagacggagtctgtcgcagtggccagtctcggctcactccaacctccacttcccgggttcaagtgattctcttgcctcagccttccaagtagctgggactacaggcaggcaacatcatgcctgcctaatttttttttgtttcttcgagatggagtctccttctgtcgcccaggctggagtgcaatggtgccatctcagttcacagcaacctccgcctcctgggttcaagcgattctcctgcctcagcctctcaagtagctgggattacaggtgcctgcctccacctccagttaatttttgtatttttagtagagacagggtttcaccatgttgcccagcctggtctccaacacctgagcccaagtgac

SEQ ID NO: 48223 - DNA, 1036 bp, Homo sapiens
cggctaacttttttgtatttttagtagagacggggtttcattgtgttagccagcatggtctcgatctcctgacctcatgatctgcctgcctcggcctcgtgaattgctgggattacaggcgtgagccaccgcacccggccacacaattgtttctttaagatttattatttacagctgacttttgcttttaggcatagcctgtttcttgacacattttaaattgggctattggcaggtaaaatcttggctgggtgcaatgttgttttggggttcaaatagcaactgcaagtagtaagaggcagatagcacttcatgtacagtgactacatgtagtgataaaatggttgctggttaaaattggtggtacttgagatttttgtttagaattgctaagctcgtaaaccatagacttagattgcagtagtcgaattggtttaacagataccagcaaaatgtaaaatcctcaagggctacttcttgagaatttgtattccagagagcttttatcttttattgtaagtgtccttgttttctctgaagtacatgcttatcttttactatgattgttttgcttaccatccctactttcttgcagattttctattttgtacatacattattttgtatatactgtatatgatgacttcagtgagcagtgaccattgtcgaggtgctcgggaaaaaccacagatttcagcagcacaatcaacgcaaccacagaaacaagtggtacaggtaagtttttgtggaactctttttttttttttccttttttttcttttattattatacttgaagttttagggtatgtggaactcttgtttgccttgtttagaattaaggaaattaagggagagcatatgatttaatgttttcctttgtaggaaactttaggattttggaccctttgtttaaacagtaggtgatggccgggtgcggtggctcacgcctgtaatcccagcactttgggaggccgaggtgggtggatcacttgaggtcaggagtttgagactagcctggccaacattgtgaaacc

SEQ ID NO: 48224 - DNA, 1061 bp, Homo sapiens
gtgtgtgtgtgtgtgtgtgtgtgtgtgtgtagtaaaatgtacataacataaagtttattgtaaccattgttacatatacagttctctgacattaagtacatttacattgtcgtgcaaccaccactgccgtccatcttccgaacctttgtatcctcccctacagaaactccatacctgtgatacagtaactccccattcttcccctacccccagcctctggtaactaccattctacttgtttctatgaatttgacttttctaagtaacttgtataagtagagtcatgtagtatttgtccgtttttttttaccccttgccccgagagttttgctctgtcgcccaggctggagtgcagtggcactaccttggctcactgcaacctccgcctcttgggttcaagcaattctcctgcttcagcttcctgagttgctgggattacaggtgtgtgccaccatgcctggctaatttttgtatttttagtagagacggggtttcaccatgttggccaggctggtcttgaactcctgaccttgtaatcaatctacctgcctcctcttcccaaagtactgggattacaggtgtgagccactgcaccctagccttatttgtccttttttgactggcttatttcacttagcataatgtctttgaggtgcatccatgtggtagcatgtgttagaatatcttcccttcttaaggctgaataattttccattgtgtatatatgtcacattttgcttatccattcatctattgatggacacttgggtatcttccactttttggctattatgaataatggtgctttttaattaattaatttattttttatttttaaaatttatttatttattttgagacggagtcttgctctgttgcccaggctggagcgcagtggcacgatctcagctcactgcaagctccacctcccgggttcacgccattctcctgcctcagcctcctgagtagctgggactacagtcgcccgccactacgcctggctaattttttgtatttttagtagagacggggtttcaccgtgttagccaggatggtctcga

SEQ ID NO: 48225 - DNA, 1034 bp, Homo sapiens
cagtgttgcgccactgcactccagcctgggtgacaacagtgaaactccatctcaaaataaataaataaataaataaataaataaataagacagggtttacagctgaattagcaggataggaataggacagatgtgtgcaaacagctatgggcaattaattcccttcgtggccttaggtaacctgaaagagaattgtgacgatatcaaataaattttgatgtcctatagtgtttgagttcaccagcactcatcctttccatgggcaggttatatccatggaacagcagataactttgtgattcttctgtcagcgaagtgtgggtgtaggggagttcaaccttgtccatcagctgctagaggcctgaccctgcccttaacagctgcagagaataaaagtatcagcttgttcagctcctggcatgcagggtacaagcagttgagctgcatggaattggatctcatagttgagtttcttggcaccctagataccttgttctctcctcgattacgggtgtagactttgtgttggtggctgttctgggcctcctaatttagttgagattcttttcttttcttttttttttttttgagatggagtctcgctctgtcgcccagcctggagtgcagtggtgcaatctcggctcactgcaagctcttgcctcccaggttcacaccattctcctgcctcagtctcctgagtagctggggctacaggtacccgccaccacccccggctaattttttttttgtatttttagtagagatggggtttcgccgtgttagccaggatggtctcgatctcttgacctcatgactcgcctgccttggcctcccagagtgctgggattacaggcgtgagccaccgtgcctggcctatttttttcttttttaaataatagaaatggggtctcactgtgttgcccaggctggttttaaactcctgggctcaggcgatcctccccctcttggcctcccagactgttggagttacaggcatgagccactatgccaggccagattcttttgtttatttt

SEQ ID NO: 48226 - DNA, 1047 bp, Homo sapiens
aactcctgatctcatgatccacctgccttggcctcccaaagtgctgggtttacaggtgtgagccaccgtgcctggccgcatttcttccttcttcttctttttatttttttaaatagagacaaggtcttgctatgctgcccaggctggtctcgaactcctgagcccaagtggtcctcccaccatggcctcccaaagtattgggattacaggtgtgaaccactgggcctggcctatgtatacattttcttttttttttttgagaagttttgctcttgttgtccaggctggagtgccgtggcataatcttggctcattgcaacctccgcctcctgggttcaagcaattctcctgcctcagcctcccgagtagctgggattataggtacccgccaccacatccagctaattttttatatttttagtagagacaaggtttcaccatgttggccaggctggtctcaaactcttgaccttctggtgatccaccctcctcagcctcccaaagtgctggattacaggtctgagccactacgcctggccctatgtacacatttttaggtgaacgtgttttcagttctcttgggtgcatacccaggagtaggattgcttggtctttatcataactgtttaatttctttaggaactgttaagagttttttttattttttaggagatgtggtcttactctattgcccagtctggagtgcggtgacatgatcatagcacactgcagccttgatctcctaagctcaaggattcctaccacctcaacctcctgaatgggtgggattccaggtgtgcgccaccaagcgtggctaattaaaaaaaaatttattgtatagacgaggacttgccacgccgcccaggtttgctcacctcctgctgtgcggcccagttcctaattaccccagtctgcagcctgggagttggggattggggatccctgctttatagtataggcttttttgcttttttttttcctttttgtaggagagagagaactgttataagtagtggtgaagactggttatgaataattacatgcttt

SEQ ID NO: 48227 - DNA, 1159 bp, Homo sapiens
tcttgtttgtttttttttttttttttgagatggagtttgctcttgttgcccaggctagagtgcaatggtgcgatcttggctcactgcaacctctgcctcctgggttcaagcaattctcctgcctcagcctcccaagtagctgggattacaggcaggcaccaccatgcctggctaatttttttttttttttttgcatttttagtagagctgtgggttcactatgttgggcaggctggtctcgaactcctgacctccagcgatctgcccacctcggcctcccaaagtgccgggattacaggtgttagccatcgtgcccggcccgttgatttcttatagtagtatgaggttacattgtaaggatgtgccatatgttgtctatttcattgttgatggatatttgtctcatttccagttttttgagattaccaattttacttgtcctcatgtggacatttgccaccctgcccacaacaaacaaagtccattttctcaagactacataactgagagtggaatttttggtttgtatgtagggtatgtgtaacttttactaagtaatgctaaagtgttttccacatgttgcacagttgttctcaggcttgtcagctgaaccacagaacacagaaagttgagttactattttctcaaatctgtcaaggatggtacataatgaatttcattctaggtgtctggaaaaagttcagcttatacacagagtggatgccctaagaattgggaattcattctcaaagactgagtggtttaagagttctacatccttgccaacattttatgttgcctttttagttttagccaattgtagtgggatgttctagatatatctttcatgaacgccacatagctggattttgctttgttaagttagcaacttgctaacttctttttaattaattagagtgtatcgctatgttggctgggctggtcgtgaactcctgggctcaagtgatcttcccacctcacccgcacaaagtgctgggattgtaggagtgagccatcagctaacctctttaactagagcatggagaccattcatatctgttgtaattacagatattttggatatatgtctgccattatatttagtcttctagttggctggcctgtgtgtttgttttctgtccctttttttttttttttt

SEQ ID NO: 48228 - DNA, 1079 bp, Homo sapiens
cggcttttccacattttcccctgagtttttagtctaattagttgcccacgcatctcaactgtcaccactctggtctctaatgcttgctcgctttaggggttgatcccatcattattactgttatttcctgtttgatgtaatccagtcatttactaccacttctattggatattgtttttacctcacattcaaggaaggtatatggtttgccagtatttaggcttattgtctttctacagcaccagtgtatcctaacagttgagagattttaaaaaattactattaattttagagatatggtctccatatgttgcccaggctggcctccagctcctgggtttaagcgattctttcacctcagcctcctgagtatctgggattacagtgtgcaccacggtgctcagctagttgagggttttttcaggtctccataaggtatccaaagattatcttttatttgaagggcatataatttcttgggtgaacccagttcttatattcctcttccgttgtgacagcacttttttcaacaaggggtatgcgactagttattgcattcctcacttttcactgtgaattgtgtatccgttttagtgccagtttgtgaaaggtggaaggaagttgaacatgatacctaagctctcccgtatcctacattggtgtgttccccttttacctcaggaaagggaatgtattccactccctggagatgatagtttccttcaatacactcacctgtggagccccttcgctagggttgtccttccattgctttgaaggcttctcttatcattaggcagaagtgattagtttcccaaactgcccttttgcttgctgccagcatactcctgattttcctacttatggctagttgatacgtgtgacgagagattttcccacagcgctgatttcccccatttgcttccctgttgcctctcaccctcaataattatgaaacctttcagagaaggaaggtttttgttgtgattgaaatatgcccgaaagtggtggcatgggagagaatgaggccatgggaaagggttgtggtaattgcctctcttgcctgtttcctgctgctc

SEQ ID NO: 48229 - DNA, 1079 bp, Homo sapiens
caaagtgctgagattacaggcgtgagccactgcacctggccgagagccctactttctatcctgtggtaatttttttgctgtggtcctgcctgaactaaaattctatttatgctaagatgtggcatggtgggataaggaggaagtttacaaagggcatgaggaaacctcagggtaatgagtatgttcattatgtagattgtggttatgatgtcatggatatatacatatgtcagaacctcaaattgtatactttatgtgtcgtatattgtatgacaaacctcaataaggctgaagaaaatactgagtttagttctgaccactgagtaaattaagcttccacctcaaatcttttataacatattctctgtaagagcaccctcattctttattgaagagggaaaaaatacttattttagtgtactttgaaggtttcaaaatacctttttctgacatgccatttcatcataccaagaaccctgtgggaagcagatgagaaaacatagttttacatataagacctagagccagctaaataacttgcccagcatcacacagcttgatgggggaacagctagggaccagaatccaacttaacaaattgtattttctttatctcactttatcccatttctcgctttatcccatttctcatgcaaaaatatggctgtgttatcctgagagtcctaaaaggcacactgtggattgcagttcaccctctctttttcaagtagtgtttattcctgtgcagatactgcaaagtagcttttgttttgggttttttgtggttttttttttttttttttttttgaagacagggtcctcactctatcagccaggctggaggaaagtggtgcaatctcagttcactgcagcttttccacctgccaggctcaagcagtcctcccacctcagcctcccgagtagctgggactataagcgtccgccacctcattcagctaatttttgtatttttgtagagacaggttctcatcatgttgcccagagttgtctcaaactcttgggacacccacctcagcctcccaaagtgtgtgctaagattacagggattacagccgtga

SEQ ID NO: 48230 - DNA, 1034 bp, Homo sapiens
atatagacaaaacataaaccatataaactaatatttaccagtaatacatcagagtgtgataagtgccatggagaagaataaaggcagcataaagggactgagagtaaggtggaggatgctgtatcagaagataaagtttcattgataggatgacgcttgagcagggagacttaaaggaaatgagggtacaagccatgtagatgtctagatgtctggaggaagagagttccagatggaagatgggacccagaggtagaaggcaagagctatgtgtccactacccacagtagtgccaatttcattccagctttgagctcctcaagatagaaggtaaagattgatcattctctgtgggttgagaccaccagagatcagagttgtaatttctacaaaaatattttcagtctgacttgtatgcttctttagagagtttattacaatccttattttactaatttcttattttcctccctgtacctgttactccctgctctccaaggatggacacaaggactggatcttttccatcgcatggatcagcgacactatggcagtgtctggtaaagttgcccttttatagggagcttttgatgtggcagggattgggggctagagattgaaaagggatagtagtgtgataggaaacagcccagccgggctcagtgactcacgcctataatcccagcactttgggaggctgaggtgggtggatcacttgagcccaagaatttaaattagttgagtgtggtactgcatacttgttgtcccagatactcagaaggttgaggcaggaggattgcttgagcccaggagaaccaggctgcatcaagctgtgatcgtgccactgcactccagcctacatgacagagggtgaccctgtagaataataatttcttatttagtgtaaaagtgatacacatttattgtaagaaaattttaaaatataggccgggtgtggtggctcacacctgtaatcccagcactttgggaggccgaggtgggtggattatgaggtcaggagttcgagaccaggc

SEQ ID NO: 48231 - DNA, 1881 bp, Homo sapiens
gtagagacaagctttctccatgttggtcaggctggtctcgaactcccaacctcagatgatccgccctcctcggcctcccaaagtactgggattacaggtgtgagccaccacacccagccaatattttttattttttgtttttgagatggattctcactctgtcgcccaggctggagtgcagtggtgtgatctcggctcattgcaacctccacctcctgggtccaagcaattctcctgcctcagcctcccgagtagccaggattacagactcacgccaccacacctggctgatttttgtatttttagtagagatggtttcgtcatgttggccaggctggtcttgaagtcctgaccccaggtgatccgcctgccttggcctcccaaagtactgggattacaggcgtgaaccaccacgctcagcctgggatcatttgtttaaaaggataagaaacccactcacatttattggaaagacgagttcacaaaccccaagaacagaaagtattattggatctcagagagaagtggaaacaggaattgaaaagccactaggaaccaaggatgtccatgtttcctgtcttttttttttttttgagttggagtctcacactgtcacccaggctggagtgcaatggcacgatcttggctcactgcaacctccacctcctgagtttaagcaattctcctgtctcagcctcccgagtagctgggattacaggcgcccgccaccacatccagctaatttttttttttttgtatttttagtagagatggggtttcaccatgtttgccaggctagtcttgaactcctgacttgaagtgatccacccgcctcagcctccctaagtgctgggattacaggcataagccactgcgcctggcccatgcttcaagtctcaagttttcttttctccaaggactggctttggtaaaaagtggccacccgggcggtttggtctagtgccaccagccagttacatattccctaaagaatctgaatggcctagtccaatctagcctttggactgattgtcctgaaactccctctagactgtgctgtgatcagggggtctaggcttatagcaaataaaacagctacagagcctcaccctcacagggatgtgggggcctactacagtagttgggcaggccctctgaaaggtgactgttgtaaatgcttaagtagttgctggggcaagattgtagaatcaaataagataaattctctgcacttagaattgggagagagttaatagctttatgaggaagacaaataagtaaatattttaaatcagtgcgatatggtctaagtgttgtgggtagagggatatcttgggagcctacaagagaggcacttgatcagcctggacatttagagagtagtccaagaggacatatctgaaccgaatcatgaaagataagtacatgttggccaggtaaaagagtaggagaggctgggtgcggtggctcacacctgtaatgccggcactttgggaggctgaggcaggtggatcacaaggtcaggagttccagaccagcctggccaatatggtgaaaccccatctttagtaaaaatataaaaattagctgggcgtggtggtgcacgcctgtagtcccagctgctcggagggctgaagcaggagaattgcttgaacccaggaggcagaggttgcagtgagctgagatcatgccactgcactccagcctgggcgacagagcaagacttggtctcaaaaaaaaaaaaaaaaaacagaaaagaataggagaatcatttctggcattgtgaacagcatgagcatgaaacaaaataattatatttcattgaagaatttttcatgtatgatatttataagcaattatttctagagtttgaagtccatg

SEQ ID NO: 48232 - DNA, 1103 bp, Homo sapiens
aagtcctcaaaggagtgtatttcttcaggccctctctggatgtgctgcttctagagggttgtttgtttgtttgtttgtttttgcctcatatttttatgctggtttttaagtcataggcctcaaaggaaagatttaagaaataatgatgcttagagcatcattcaggatacataatagtgaaaacagcctaagaacgtatgtcgaagtatttaaaatagcacacttggctgttttttagtgaacagaatctaaaaatgtataaactgaaatatgagaaatacatgaactgtttcctataaggaaggcagggaatgtgtgtctggtagtatatttcagggtataagcattagctctttggaaagtagcctttttaagagtgaatagaaagacagttataaatgaatgaagtgaaaaatttctcagtaagctttgtaaccaacccaattataggccaggataaaataagtcaaagagcagaaacgtttggaatagagtccacgaatagcatgatgtcacaagactggcaaatgaaaagaggcagggcctagggcctaggggtgggaaatgattacgcccagccctccctcggttttcacctcccctgtgtgaatggacaagtaatgtcataatgtgtgagtaaattgaccctggaatgaaacacattttggatcattaaaagagagaagattgctctagatcaagaaagtcttaagtactaggagaagtgtctgtttataaaggacataggcaaaaatttaaacagttttaaggaaggaaataataccatggtggttggtctgtttataaaggacataggcaaaaatttaaacagttttgaggaaggaaataataccatggtggttggggccaacctttcgtttcctcttctgttgaggagtcgcttgtcttacccagaagcctttcaaaactaagtggtggcaacgggcctccacagaacttccttttcttggtctctccagctgcccactcgtggttaagaactgtcatccttgtcacttggagtagaaaaagagtctcctgcttggaagagttcattccactccccgcacgtgcatcatagtgtttagcctagcaaatattac

SEQ ID NO: 48233 - DNA, 1045 bp, Homo sapiens
aggattccttcccccagcagcactggtggtcctcacttccgggtgcctgcggataggcgggctggggtcggaggtcggcggccagaagccagattcccttggccccagctcgtccacttccatccagcagtagccaaacaaccgttgaaaatggcctggcggcggccgggaaacaccagagaactatcttccaacccctagatcccgcccatctcgttccggcggtgtttccgtggcgacgctatccgaagtgcggctgcgcaagggtgacggcgcgcgagcaagggggagggggtgttttggttctagccgctcgccgtccttgcaggctctgccgtcggaaagccgctcattctcgcttccccttccctttcccggctcaagtccttcctctctctttcctttctttccgcctatcttttttctgctgccgctccgggtccgggccattttccgggccgggcgcactaaggtgcgcggccccggggcccagtatatgacccgccgtcctgctatccttcgcttcccccgccccatgtggctgcggggccgcggcggcgctgcccactatggcccggaaagtagttagcaggaagcggaaagcgcccgcctcgccgggagctgggagcgacgctcagggcccgcaggtgagggttgagaggccggcacctgggtggtgaggctgaggaaccaagatgggcttagggtccgcagatcctgcgacgggaatcggggtccagggtctgcagtcagaggcaaaacaggaatgggttcagggcctatagggtcaggactggaccctcgttaactggagggcagataggccagggcggtgaggagccaaaggggaactcaggaatgggacataatccgcgggaggcctgcattcgtggatagggcttgaaaagaaaccagaatcttggctttggaggaaggggaaaccgaagttaagggaatcggaaacaaactctggtagagtgaactctaccttccatgggccctaggaagctgggatgattgcgtccctcctggaagaaggaagtag

SEQ ID NO: 48234 - DNA, 1071 bp, Homo sapiens
ggaaattcccagcaaagcctaaatcgacaatttgggaatcaaaacaagttttctgaaggcatcagtaaagcagtgaataatgagaaacaagacaggtgtttttaaatcatattgctaatagtatcatgtacaaaggtaagtaatgactatttgttattgccaataaaaaaattcttacacaaataaaacatggaaaaacgttacaaagtaggtctatctctcttctggcccaataaagtctccatacacaaaaggaacattaattcagtattaaagatacttaagatgcttgacaccattagacatgaaagaaatgcaaataaaaaccacaatgagagacaacttctcacccacaagaatgtatataatgaaaacgagttaataagagtgggcaaggaagtgaagaaattggtaccctcttgtagtgctgctgggattgtaaaattgtgcagccactttggaaaaatagcagttctttaaaatgttaaacatagagttactatgacccagcaatgccattcctatacattatacccaagaaaactgaaaacatgtgtccacacaaaaatctgtttacagatgttcagagcatcattattcataatagccgaaaattagaaactaccacaatgtcccatcaactgatgaacagataaacaaagtgtgttatatccaaacaatgaaatattattcacctacaaaaataaatgaagtactaatacctcattcatacaacgtggataaaccttgaaaacattatgctaagtgaataagccagtcaccaaggctgctactgcagaattccatttatatgaaatggccagaataggcaaacccatagagacagaaagtagatactggttgccagaggctgcgaggaggctgccagaggctgtggggagtgacttctagtggacactgggtttccttttggggtgatgaaaatgttcgggaattagatagtaatgattattacacaactatgtgaatatattaaaaatcactgaactgtatgtataccttaaaaaggtgaattttggccgggcatggtggctgacacctgtaatccca

SEQ ID NO: 48235 - DNA, 1062 bp, Homo sapiens
cacgcctataatcccagcactttgggaggccagggcaggtggataacttgaggtcaggagttcgagacaagactggccaacatggtgaaactctgtctctattaaaaatacaaaagttagctgggcgtggtgccgagcgcctgtaattccagctactcaggaggctgaggcaggagaatcgcttgaacccaggaggtggaggttgtagtgagccgagatcgtgccattgcaccccagcctgggtgacagagtgagactcagtctcaaaaaaaaaaaaaaaagaaagaaaatcctagtcatcatgtcatttattccataaatattgtatatatctcagctgggcgcagtggctcacgcctgtaatcccaacacttttggaggccgaggcaggtggatcacttgaggtagatcagcctggccaacatggtgaaaccttgtctctactaaaaataaccaaaaattagttgggcatggtggcaggctgttacaaccccagctactcgggaggctgtggcaggaaaatctcttgaacccaggaggtggaggttgcagtgagctgagatcatgccactgcactccagcctgggcaacaacagagcaagactccatctcaaaaaaaaatttttttaaatgtatctcaaagagatactttttaatgtagccataatgccattatcttacctaaagaagtaattctttattatccaataagtattataattcctctaattgtcccataagtgtctttttatagttaacttgttcaaatcaaggtgccaataaaatcctatgtgagttcttattccctctttcattttttctatatcagtgtattggttgaagaaaactgggtcacttgtcctgtaagatttgccacattctgtacttggccacctgcatctttgtgttgatgtttaacatgttactcattatcctttatgtttcctgtcaggtggctaagctctatagccgtgttgttcactatggcagccaccagccacatgtggcaattgagcacttgaaatgtggctggtctgaattaagatatgctctaagtgtaaa

SEQ ID NO: 48236 - DNA, 1050 bp, Homo sapiens
gctcaagtgatcctcccacctcagcctcccgagtagctgggattacaggcatcacaccaccatgccaggctaatttttgtattttttgtaaagactgggtttctccatgttgcctcggctggtctcaaactcctgaattcaggtgatccaccctcctcagcctttcaaggtgctgggattacaagtgcctggcccacatgttacttttataatctgaagaaaaacttacttaaaaaataaactgcactttgggagtccgaggtggacagatcacttgggggcagcaatttgagaccagcctggctatcatagcgaaaccccatctctactaaaaatacaaaaaattagttgggcgtggtggctgcatgcctgtaatcccagctactcgggaggctgaggcatgagaatcgcttgaacctgggaggtggaggttgcagtaagccgagatcacacccctgcactccagcctgggtgacaaagggagactgtgtctcaaaataaataaactgtggaactctgattctgtcaaggttagtaaggtcaacgtaggtgttactccagcctcactgataaagtgtgagcaaatgaaagtgtgtgtgatgcaaaggacgttatgaattgtgtatatacattaactataataatcttgcatgtttacatatctttcatgaaagatatttacaaaagtactgggaaaaccaatatctaaaccttattggaaggaaagatactaattcccttaatcaataaatgctttctaaggtctttactcaaaagctaaagctatccatgagcacttttagaaggagagacagaattgccatatactcgctgtaataaaaggaaacaaaaaaatgtattcccactttagttgtgggttttttcttttttttttttttttttttttttgagaaatgccgaatatatccacatctatagataactatagatctagtgggtttctttgttttggatttcatacttaactataaaaacctatggtgataatttgagcaacgaattattttgtctccttgcctagaaactgtg

SEQ ID NO: 48237 - DNA, 1297 bp, Homo sapiens
cccagtaagaatccaggagcaagctttggtgaatccagtgggctgagtggctctatggatgtggttgtttggatgtggtagggagtgcttagcagaatgtgtgtgtatctctgaggctgtcagggggtgggtgggtgtgtgtctctgttggacctgtctctcctcagtctattcctgtcatagatgtgggtgtccctggtagggaagtgcctgtgtggtctgtttacagtgcagaaggcggctcagcagtgcaatgggctgacagccttggaccgggagtcagaagcctgggttctggttgtagctctggcccctccctgtgatcttcaacaagccacttgctttctctcgtcttcagtttcctcaactagaaaatgaacagcagctgaaattatgttgaagatccttttatacctgaaagagtttcttcatagaaatttctgtggtggggagggggcaatctctgtgtgtctcagtatacctaaaggttggggtggggcggagttgtgtgtctctgtagaaaggcgaaggggcagttcctatcaggactgtgtatgtctgagcacatgtggctctgtttgggattacgtgtttgtctgtgaatgtgtgtgtgtgttggagggttgtctattgtgtgtggctgtatagggtgtctgtagatcaagatgtgtatacagctgcttctgctattgctggtttgggggaggggactggaaagctgagactgaaaatcaagagggaagaggtgaggaaggcccacccctggggctgggcagtgtagacctgccaccgtgtgaagaaaaatgaaagcacagatagcctaagactgcacaggcctgtgcccacataccttatagcacaggcccaggtggatcatctcatgctaacaccccacatgtgctggtggatccactcccatggatccactcacatgctgcaggcatgcagtagactcacccacagcccactctctggacaccaatcctgggaggtgggagctggaatggggagcaatgagaggagggagtgagactgttggcttaggaagggtggtacctctccctgcatcatacccaggaactgccagctccaaaatattggggtacagctcaccaccccccactccgccaacccattcctacctcctctagtgcagggacccaagttagatgatgagaaaatgccaaacaaagggaggcaaggacagagaaggtacctgcaggacccacaaggcccatactggcccccatctgaacccacctctcccacccagatcaacatccccccaacccctgtg

SEQ ID NO: 48238 - DNA, 1072 bp, Homo sapiens
gggaagagtagatgggactcctccaagacccaggaagctacttctggtaacagttgtcacataccaggcagtggactgggtcacctgatggccagctccatgaagctggtaggctttggaaccttggagaactcagaccttggcaaaggagtcaggagcaccactcaggcagcgtagccaaatgggctcccccagccttctgccccttactttgtagccccatcctgcacctcccacaccataaccttcagtggcttcttcttccttctgcgttaatcccaaactcctctgtctggcattcaagtccttcatgttctgagtttgtaaccagagagggtcttcggccccttagcacaggaccagacttataattagtgacatggatatttgttgaataagtggctgaataaatgaattttacttctctaacctgacctctctcttcacccctctatccagagccacacttatgctcacttttaaatgcatttttgcacacactatccctccttcctagaatgtccacctctctccaggtcatggtgtcacctaaaggaagccctctctgactgcgccatccttctgtgattgtctctcccccgccagcctttccctggcatcaagtacacactaactaccctaacatgggagttgtggttcctgaaaaacagggggcagcctcctctttttgccccccactgtctgcctcaggttgtgcagggccaggtactatctccaccaagcagcaggggcctggagttgggatccctgcctcagtccttctaggagcaagtggtttcacagtggaggcccagcccaggctgccctgagtagtaagacagggtggcctcaggggcaggacacagcttccttcccatgttctcctgcagagaagcagcgggagctggcccggaagggctccctgaagaatggcagcatgggtagccctgtcaaccagcaacccaagaagaacaatgtcatggcccgaacaaggtagaggccctccctaccccacctggaccctgccagccaggacctatttctgctggtcctgagcctccccctcttccct

SEQ ID NO: 48239 - DNA, 1033 bp, Homo sapiens
acattttatatcagaagcctgccaattctactgttttttgacatcttcctttctgttcttttatcttctgctgctgcttggttcaggcccctattatctcttgctggcattgttgcagtagtttcctaattatccttacctccaatctcactcccttcccaggcgtcttgcacatggctatcggagggtccttttccatctcaaatctgaccatgttactccctgcttaaggcttcattggctccccgtcatcttctgagtaaagaaaaaaatcaaagcccaccttccagcatgatctgagccccctcctgactccacaaacttgatttcctgcaacttttctccataccttctgagcttcaactatagcaaaatgccgactattccttgaatgtactatgctagttttatgcttctgagacttttcacatgttccctgaatgtccttactcctcactcttaaactaattggtgacctaatgttttaagatcttttcaagtgtctcctttgaccaccctccctttgtcccattctctctacttttatatggctcttggttacctttattaataattattgggaacttcttaaagatgggactgttttcttttctttctttctttctttttttttttttttttgagacggagtctcgctctgtcgcccaggctggagtgcaggggtgcaatcttggctcactgcaagctccgcctcccgggttctagccattctcctgcctcagcctcccgagtagctaggactacaggcgcccaccaccgtgcctggctaagtttttgtatttttagtagagatggggtttcactgtggtctcgatctcctgacctcgtgatccacccgctttggcctcccaaagtgctaggattacaggcgtgagccaccgtgcccagcccttttttttttatttttaaagacagggtctcaatatgtcaatatgttgcgcagactggacttgaactcctgagtttaagtgatcctcctgcctcagcctcatgtagctaggactacaggtgc

SEQ ID NO: 48240 - DNA, 1026 bp, Homo sapiens
ggaaattagattcaaattgcctaccaggtgtgactttggacatattactttatgcaacctagttcttcaattttaaaatgaaaatgatatttgccttacttggttttggggaggattcaatgaaataatatagataaagcacttagcaccatggccgtacctctggcaggtatttaagcaacattaactaaatgactggatgagttttggaagaactacacctgggctaaattgttccgaacaactccctgcctggatccagccagagttcttagtagagctgcctccccaacgtgagctttgagaagtccctcctcttctctcctctcttcccagactattgttccctcttgccactaggaatgtaaccaggttaaggtcagggtggagggctctttgagaggctgtctggggatggtgtgggcgtagagaggctggcctagagccacactattccaagtgtggtcgctgtattaacagcattggtaccacctgggagctaatatgaaatgctgacaattcaggttccagacctactgaatcagaatctgcatttaaataatatgcccagatgatttctatgcacattaatatatgaagaaacactgtcctaggggcacagatgggttcagcaggggtggagggttgagacagtgcaggtgtgtcagctgtctagaagaggtagaggttgtatgggggtgggggaggctgtggcaggggggtgtactcagagaagaggaagtgtcctcagagatgtgggttgtagagctgtagggggctctttgggaaatgttggtcatttgctgtttcagcggcctttcctattgatgcctggagtacgaggtggtaccccttcctattgatgccttgagtatgagttagccggtaagtgtcactgcaccagccagggagtgacaggtgggcaggcaaaggctctctactgccctgagcctgcagagacgttcctgcaagtatcctaggaccatctagcttagcagttgagtattgttttccatggagatgcat

SEQ ID NO: 48241 - DNA, 1027 bp, Homo sapiens
ctgcctgttgaacatggttacaagaaccaggttgtcagaaagcactttgaacagacagaggatcagaacagccccactcctatctccctccaaagagttttctgatggtttggattccaagctggtttcccattcttccgaactcagtaacaagagttgggccttaatcatttgattgtggaagtatatatctgcaagctaatggctgatcttagccctttagtcacaaagaaggctgcatctatctgctcagtttgttgttagtctccatgagaagttgacctgaaattgagttgctgctttggctgtggaccttaagtgaagttttaactaggccaagccttcaggtgagttgaaggagggtttgggggactcctactttggctgttctccaaaataactttgagcccctgaccagaggcttacagtgaagaagtagtcctacaaagagcacaaaatgcaacatctgtctgtgggacaccattagacaagactccagcatggtctgataggtcaggagtgtttgccacctctctgttatagaaagatccttgctatgccttcaaatcaagtagaaggcagtgtttgtcttttcagattatggcctttcattttctatgccaagcattgggaggacatagtggaggcaggcatggtccctaccttcacgaacatttattaaacaaattatacaaatagtcatttaaataaaatttgctaagtgcatgaaagaaatgtatgggggagcaggggctgtgagactacattatagaaggatctaactgagcctggcatttatgggaagcttcttttaagaggtgatgtgtcccagcctgggcaacgtagactccatgtcaacaaaaatatgtatgtatacaaaaattagccaggtgtggtggcgtgcacctgtagtcccagctacttgggaggctgaggtaggtggatcacttgagcccaggaggctgaggctgcagtgagccgagattgcgccactgcactccagcctgggcaactgagtaaggcactg

SEQ ID NO: 48242 - DNA, 1083 bp, Homo sapiens
agaaaaccatcaacattgagcagataccttcctgtttcttactccctgttgagagatctcctacagttccactttcaccatataagaaaaggaaagcaaggggacaaatttactctcacattccccaaggtaaaactatgatcactaatatttgaatgttctggatggttctctttggcttctggccttcctcccattagtgttgtctcttgttgtgttatcgttttctgtatggccattttatgtggtaaagtaggaaagggaccaggaaacttggggcccagttctggatatgggacttcaggggagttactcagctttatagggcttcagattctttttctctgtaaaattgagataaatgatagatggattatcagagattaaatgaaataaaatgaggaaaaagccttgaaattttaagttgcaatataaaaataaatatctatattttctgaatttaaccttttctgatttgtattgtaaactcttatgtcaagaagcatgtctctaaatctgtttactgtggtatagcaatttaataggaagattggagagatactgaagaatctggagaggccacttcattcttttttttttttttttttttttttttgagacggagtctagctctgttgcccaggctggagtgcagtggcgcgatcttggctcactgcaagctccgcctcccgggttcacgccattctcctgcctcagcctcccgagtagctgggactacagacgcccgccaccacacccagctaattttttgtatttttagtagagacggggtttcaccgtgttagccaggatggtcttgatctcctgaccttgtgatccgcccgcctcggcctcccaaagtgctgggattacaggcatgagccaccgcgcccggccgaggccacttcattcttaaaaccaacctgagcaacggggagggcagaggagagtcggaggcttatttcctacttgattcacttctgtattgtgttactttccccattgaatatgcattacctttataagttaaggaaaccaatacagattttttttaatggcttaaaatgatacagtcagtctgga

SEQ ID NO: 48243 - DNA, 1466 bp, Homo sapiens
tttttctacttgatcttcagcactggtttctgaagtattgaattaatataaagtttaaaatccttttgaaataaataggccaggtgagagggagtaacctggactctgctgagcagataagagggggaaagaagcagattcaggaaaagatctcatgaatttcatatgagtggttggccacacttaatatgaaattataagcccttgaccaaagaagcaagaaggaataggctacaagaagagacccataagccagaagtcactggcgaggaaaggccctattataggttatacagccttagcgctcttttgtttacccaggctaaataggcctgctttttccttttaccatttcccgggacactggcttccaaattcgcagtcatcctagctgccctagtggatacttttaggtttctcacccctgaaactgaacacagagctgtacatgtgatctgcacagcacagattattgtgggactgccactacccataatattgatattgtacttctattattgtcagttgagcttccatgatcatatttaataaccatacctattgttatattgaactcagaacatatctggaacagagcagccctttcccttagcagtgtaaaatcaaggcaagaacctggaatcacatcttgagctaggcttactgccaatacaggttaagagtccactgaggatagtgagatgatggttccacatttgttagaaactacactacatgtgtgtcatgtgactcttattctcagaaaggtagctggctgaattcagcaagacagaatttcaataggaatctagggaggctgtgtgattggagaaggtagggacctttaaagcgagctagtgcttgagtggacagaaagcttaatataagtccactatataacaaagctaatgtgctgttggactacattaatagaagcatggaattcagttcctaggaggtaatcatcctactctgccctattctgtagtggtcatcaccatctgaagtcctccattctgtactgatatcatcattcaagagattgggtgactagaataatgaaaggagtcaaaagcatgtcatgtgagaatagttagaagaactgagctgtttggcctatgaataagcagtctcagagaaagcattttgaggttttcaaatacctaaaggactgggattaggaaagaaaaggaggatagtcttcatgttatctgtagcttcacagggagaaccagagccatggtgggaatgtgaatgtgttcttacctcacattctctatggtatcagttcttaaactgggccagaggccagggcaccaggaagacacactgctctgtgcaaatgtcctagtccttccaaagtaggtgctaggaataatattctagcagtaaacatggctctgttatgtgtgtgtactataaacgtgtccaagaatccactgtggaacttagcacaagcagcactt

SEQ ID NO: 48244 - DNA, 1034 bp, Homo sapiens
tatactcttcgctcctatgctcggggcctccggcttgagctcaccacctacctctttggccaggacccttgaccagccaggcctgaaggaagacctgcggatagacaggagcgggcaggcccgcacatatccacttgctggagcccatgtttacagacagggacatacaccatgcagatcctgagttcctgctgtatgagcagggatatccatgcttatgtatccaaacacagagacccatgggaacaaatgagacacatatagatactgagacctgtgtgtacagtaggaccatgcactcacacccatctggagagggagcccccggtataccaagggagccagttgtgttcagacacacacatcacagcttgactcactaactgaggcctttccatagctccacagcttcccacctcctccccaccaaaccggggttctagagttaaggatgggggagggtattatactgcctcagtctgactcctcaacccagcagcaatttgaggggatgagggggaagaggagctgccttttggaggcccccttcacctgcagctatgatgcccttccccttctcccctgtcctcaccatatgccttatccccattctactcccctgctatgcaagtgcccctgtggcttgtccccaaccccctcagcaacaaagctcagctggggaacgagagtaatttgaagaatgcttgaagtcagcgtcttccattccagaaagacccccattcttcctttgggggtatgatgtggaagctggtttcagcccaggacccaccactgaggagaggatctagacaggtgggcctaattccaaggggcccttcctggcctggagaaggccttttacacacacacaacacatacacacacacacacacacacacatatcacagttttcacacagcccctgctgcattctctgtccatctgtctgtttctattaataaagatttgttgatctgttccatctttttgtgtgtctgagcagccggaaaaagcctctgacccctggggacctc

SEQ ID NO: 48245 - DNA, 1067 bp, Homo sapiens
gctcccagcttgaactgcctcctctccgcttcagtcctggtaaaggcgggccttaacaatcgttgagtcccagaaggcttcacttccgggctcgtctgcttcaccagccagtgagctcgggcgagcccgtccattctgggtctcactatccccacacctatccgtatgtagagtggcgctagctaggtcagacctcgcctgaagaccctgacatctgccgctgggcgacttggccccgcccccttgcctcccttgcgcggcaccgccccactcctccgtgctccccccgaggaaatggttcaaccgaagggcggtgccaaggtgcccgggccgctccgattggtcagggcgagccgtaccacggcggtggcgggggagcgcttcgtgggcagccggcgggctccgaggccgtgagcgcaaagcctcaggccccggctccctcctgagctgcgccgtgccaggccgcccgccgggatgcagtgggccgtgggccggcggtgggcgtgggccgcgctgctcctggctgtcgcagcggtgctgacccaggtcgtctggctctggctgggtacgcagagcttcgtcttccagcgcgaagagatagcgcagttggcgcggcagtacgctggtgagcgggcagagggcagggaggggagcggccggcctgggagcggagcctagggttccgaaggcgccatccccggacctaggaccggtgccagccctgactccgccgcccctctgcctccgccagggctggaccacgagctggccttctctcgtctgatcgtggagctgcggcggctgcacccaggccacgtgctgcccgacgaggagctgcagtgggtgttcgtgaatgcgggtggctggatgggcgccatgtgccttctgcacgcctcgctgtccgagtatgtgctgctcttcggcaccgccttgggctcccgcggccactcgggtcagtgctagcggcgggccagactgggaggctggggttgtaaaggggcccatgccctcctttctgatgtttggctgggccatgcaatggcgcgaataccctgatagtgtcatgt

SEQ ID NO: 48246 - DNA, 1364 bp, Homo sapiens
tgggtgctgacttagcagccctgtgctcagaggctgctctgcaagccatccgcaagaagatggatctcattgacctagaggatgagaccattgatgccgaggtcatgaactctctagcagttactatggatgacttccgggtaaggaccacacccgtgcctcaggtacacacatacgtgctttgacccctcccttgataagtctcatccccagttttccctccttttctagtgggccttgagccagagtaacccatcagcactgcgggaaaccgtggtagaggtgccacaggtaacctgggaagacatcgggggcctagaggatgtcaaacgtgagctacaggagctggtccaggtagggcaacttggtccagggtgagtcactgtctcagtacattgtaattgatctgggtgatctcagggtgtcaacacatttgctgcaagagttgtgagagcacgacttaggaacctactgttcttaggtttgaggcactaaggagtcttcttctagagaacctggatctgataccattgggtacaccatgaaataatggaggggatgcttctgtttagttaggtttctttcaaaatgtggaggtagccttgaaccctctttccttttcctcctagtatcctgtggagcacccagacaaattcctgaagtttggcatgacaccttccaagggagttctgttctatggacctcctggctgtgggaaaactttgttggccaaagccattgctaatgaatgccaggccaacttcatctccatcaagggtcctgagctgctcaccatgtggtttggggagtctgaggccaatgtcagagaaatctttgacaaggtgagctacaataggctgaactatgtattgatttgcctgagggcaaggaatagaggctgtttttctttaagagggttgaaatattcttagtgctggctgctcaactgcacagtaagtcacttgattttctttctgaggtctgagagacctagtgttattttttttttctctctctctctcttgagacagggtctggctctgttgcccaggttggagggcagtggtacagtcatggctcactgtaaccttgaaacctgggcttaagcaattctcctacttcagcctcctgagtagctgggactataggcatgcgtcaccacatctggctaattttttattttttgtagagacaaagtctcagtatgttgcccatgctggtttcggatttctggcctcaagtgatcctcccaccttggcctcccaaagtgctgggaatacaggtgtgagccaccacgtttgcctagagacatctagttttgttagtgcttgaatcaatccattcctcctacaggcccgccaagc

SEQ ID NO: 48247 - DNA, 1094 bp, Homo sapiens
gtctcttgcaaattgtgaggatatttccaatgggaatactattttgtcttgttttgttgacttcagtatccccagcccttagaacaatgcctggtacataatagagactcatgaatttgttgaatgaagaaattcgttttaaaaatttattttctttgcttccttcattgtctggccttcctactttggttaatgcttatgttttcctgagccttactaacacgaggccgctcttaaaaaagagagagcgctgggtgctgtggctcacgcctgtaatcccagtactttgggaggccgaggtgggcagatcacctgaggtcaggagttcgagaccagcctgaccaccatggtgaaaccccatctctagtaaaaatgcaaaattagccaggtgtggtggcgcatgcctgtaatcccagctactcgggaggctgaggcaggagaatcacttgaacccgggaggtggaggttgcagttagctgagatcgcagcattgcattccagcctggacaacaaaagcgaaactccatctcaaaaaaaaaaaaaaaaaaaaaaaaagggagagggagcttgctgagtctagtaagtgacagctggaaacgggctaggtaataagttggtgtcactgtctggtgaatgatcctagcttctaggaaataacactgagtgtagacccagtcgactttgatttgggtgagagggatttggatttgccccatgtctcagcatttcttggttttgattttttgagccaactttatggaattgtgtacttttgcagatattactgtgaagttccttttgaccttgagcctctttctggcggtttgatgtctgttagtgttttttccaaatatgatggtctttatgcttggcattcctttggtactatggaatgccctggcatcagtaggtttagcctataaggagggtagcaccaatgattctgcttcgttgtccccaggcttgcttggtagaacttaaggcctccctgagcctcaagggaggttgtctggcttacttaattccctggaaagttagcttatgctttactctatactgttaatcatggtgaccattaataccatgtgccaggt

SEQ ID NO: 48248 - DNA, 1050 bp, Homo sapiens
ctcagtttccctttttataaaacaatgcctaagactatgtcaagttctaagactctgtactctgggctggggctacaggtaatcgagacacttactttcacctgcttcagactctgaagaggctagatcggagggatgaggccactgcactctggtggaggctggaggcccaaactaaggggtcacatgaagatgctctgtggtgaggctcaggcctgctggcttggggctgaggggcagttggtgtcctagagtccttggacctattgtgggtggtgaacactgaaagcgggggtatggctgcccagctttctgccaatctttcacccttaggcatcatccttctttctctccaggtctctccccctgtacctagaaagctatttgagctggatccgtccctctgatcgtgacgccttccttgaagaatttcggacatctctgccaaagtcttgtgacctgtagctgccacgttttgaagagcttgagctgggtccccagtgggctgtctctctgtggggagggctttctgcttcaccatcattaggaatgtgaccattcctatataattcctggactggtgagattggtggtaggcctgtgaaatttgccctagttactaccattctcgttttggaggaaacaatctctgccaccaccaagtcattgactttgctcgaggcaccttttttcctgtttctccttttctgttgtcgagtaaaatttcatatttatctcgtctgcctactacatatacttgcgtgggaaggcttgtgaccgtctagttgagtgctagttgtctatgatgccctttcctgacatcgtctaccttatgaacttgaagtctgggtatgaggaaagggctacaggaatcctcactttggaggcagtggctttagtccttcacattgcctgaatgcagagccccaaagcccaggacagtgacaatgagtggagttgggtctgaagggtggtctagataggcctctcaggacaagggcaggtacctgttacttagagacaggcaggtttctctcagagtaactcttc

SEQ ID NO: 48249 - DNA, 1076 bp, Homo sapiens
ctagcctcaccccttcattgtggcactcagagccagaccaagcacatactagcaagcaggtgcctacagacggggaggtgaggttccccttgctcacctgagcttctcttcccacttctgatgcctcccctggggtgtgactctgcttttgttcttgtgacttgggggatgaatgaggcagtggcaggacataggtcgccactcctcagcctcttaccttgcttctagacctgaactgaggactcttctctaagacattaaccttctctatctttgacactctgaagtctcttccccagtccattctgtaactggggtagatccatactgagccaaaattggagccctaagaccttccctccctttctcctcctcagggcccatgaacatccatctgttagctaagagagaacattctcaggacccttgcaggttccctgctagggcctagggtgaggcttatgggcttttactcctcagggcaggagacgctgcagagcattacttggacctgctggccctgttgctggatagctcggagccaagggtgggtgtgtcttcaagcttctctgcaatggggtagacgggttggtgtcccctttgaaatacagcaagactgcaattttttgttttttcctctattctgtctgtccagtctgggggcccaggactctgcatggtaccagagcctggtgaagaggttggggatggtggctcatgcctttcaagacactgcttcttcttcccactccagttctccccacccccctcccctccagggccctgtatgcctgaggtgtttttggaggcagcggtagcactgatccaggcaggcagagcccaagatgccttgactctatgtgaggagttgctcagccgcacatcatctctgctacccaagatgtcccggctgtgggaagatgccagaaaaggaaccaaggaactgccatactgcccactctgggtctctgccacccacctgcttcagggccaggcctgggttcaactgggtgcccaaaaagtggcaattagtgaatttagcaggtgagcccggggtcctagagggggtgtggagg

SEQ ID NO: 48250 - DNA, 1029 bp, Homo sapiens
gcttttgttaggaggtggaatatttcctccaactagagaggagaggatggctgtagacacgtttgcagattggtggtaggaagtaagagagctcacatatgatggcttcctttttccttctgaggtatgagtcaagactaccaacagcatagggaaggaaacagggagggtgagaggtagaagagagtaatgaagggatgaaacatttgttgcaaagagtagagtaggatacttgttagagaaatatagtaagactgctgccaatattaacttcggtaatgatgaatttatttttaaattttttggaacataaactcaagattttattgtcttcataacaaaacaaaagatgacacttaaaactggatcacttggccttttcacttatctcctcccagttcaaagtgcttgcatctcttaatagccacattttctcagatctgaaattgagctcaacacactcaagccttagcacaatcttctctgtagttttagcttttttctggaaaatcggcttactctgcccaccatagccactgtgcttcctgtcataatgctgctttccctagacacacagagaatccttgcccttcttggactatgtcactttgtggagttggtgcttgtgatacttcttacagaaagtctggtgggtttggggaacattcaccatgttcgctggagtgctgtcagctggtaatgatgaatttagagtgatgctaaatatgctggcctgtacaactttctccagcaaagctgagctatttgagtacagacatggagaaggtaaggggttatattcattcagggttggggttttatcaggcaagtatacttttaaaagaatgtagtatcagtgaagttttattgaagttaaaggactactagtgaggatgcttcaacaagtgaatggaattcactaagctataaatcataaaatctatgtggcaacatggataaatgcttaggaactaaattaaagcagaatataaaataatcttaatgctacaattacatccatgcaaaatt

SEQ ID NO: 48251 - DNA, 1049 bp, Homo sapiens
gcaaatagcatagtccatttatagtcaaaatctcagaataagaacaagccctttgccaaaaacacagcccatctggcatcaagccctaggggcccacccaaaggaggcaggacctgggaaatctaacagcccaacccagtaatacacaacagtgctctagaagagtttccttctctgctttgggcaaacgtttgaaggaatctgcggccctgagaaccttaaatgccaaagtctcacccaaggactaaaggaattactcaataaatcttaactgagtacctccaaagtgccagacactgtagtgtgtgaaagaaaaaaacctgatgcctgccttcatggagtttatagttcacccagggagactaaacaaataaataactatgactgtatactcgattaagtaggcctttggaatgtgctgcattcaaaggaaagatagttaaatcatgaaagccagctccatccagggaggccaattagcatatttattaatcagggtccagtttacactgtattggcaattaaaattatctgttttctctttaaaaatttttattgtagagacggggtctcactatgttggcaaagctggtcttgaactcccgggctcaagcaatcctcccacctcggcctcccaaagttctggaattacaggtgtgagccaccatatgcccagccaattacttatgcctgaattgaaaactcttgaaaagtcaccggaatctatcaataacatactcttggttaagctccacttttattcccattcattttgtgggaattcagtacctatttttatattacatatttttatttaaggcataggaactcacttcaattaacaaactactgtccattacactggagaaatagaaccctgatttgctcttttcagcatcaggccattcatttttgtttctttctggtcaatgtaaagagctaagaaaaggtaggtatagaactctgctcttcaggactaattctgtagcagctggcaagttatttgattcccctcagcctctgtttcattttaaaatggggataatacc

SEQ ID NO: 48252 - DNA, 1026 bp, Homo sapiens
atttttttttttttgatacagagtcatgctctgtcacccaggctggagtgcagtggcatgatctcggctcactgcaacctctgcctcctggttcaagtgattcttctgcctcagcctcccaagtagctgggattacaggtgtgtgccaccacacctggctaatttttgtatgtttagtagagatggggttttgccatattggccaggctggtctcgaattcctgacctcaagtaatctgcccaccttggcctccccaggtgttgggattacaggcatgagacactgcacctggcccattataagcatttttgaaaacatcatcccaaacaaaaactgaaactttgacaataacatacatctaactatgtggttccccctttcccaccccttttgtttctcaccatctgaggtgagcatttgaaacccatttttatcattcccttgctttcctttttatgcagttttatgcatctgcatgtatttttcaaactaaaaaaggttttgtgttgcatgtaatcttttggagtttattcaattcttgtttcaattttggtggactgttgatttcaggaattttttcaaaggtcctgtgattttcttttattcatccttgcagaggggatttatgcttgcctagggttgacatacaatcaaatgattgatttgggatctgtatgaaattttatagcagttcctggtcagaatcaaaggcagaacagaaggctataggctgccattgtggggacccagcaggctgtgtggactgagtggggcgctgtctccagttaaacattttctctccactgccacatccaacactggccactgggtgtggcagctcccatcagagcaagttgtggtcatgtttctgtgatgtctgtccctggaaggaggcacagaggcagcaagcattcctgtggtgcctcagctggccccgtcactcctttctcagattagaacacccttcagggatctagaaatattctttattcagatggaaacaatcatagtaacaggccattcta

SEQ ID NO: 48253 - DNA, 1031 bp, Homo sapiens
tggatgtacatctatggctttgcattaatagattgttatttattctagtcttcactggctgacttgtttaggtctttctagggtatgtttgcttagaggttctttgcagttgcccagtgagtccccttattcctagatcaccatctcctttttggtaatagatggtgccttaagcccaggtttgccttggctcttgcaaacattcagagcactgcccgtctcaaatggggttgtagggggaggtcccaaagggaatgtggggaggctggctaggcgtttgtgaccggaaaacctgtggagtatttctcttaacagtgtggagctattgagaagtcactttaatttggcatctcctttggctgagatgaagaacagagttacatgggctagggttgctagtcctgtctcctctctttgtttctagctgttcttggggattttttcttctacaggcacttgtgatgcctcctgtgggttgaagcaggaatggttttcctgcaagggaatgcaagatgatgggaaagctggttgtctacctcagtctcacattttctggtgtagaaactgtgaacccaggagcaattttccatgtgtggtgcctggaaaactgagtgagggttgtcacagatagagaagtctgtttctctatctgctcaaagtttttccacttctgtgtccctggggattgtctcagcctcatatttgagttctgggatattgctgatgataattttggtcctggatatttgtttttggttttctgtgggagggagtgaagccagattacttctactctgctattttggtggcatcagtcttctacattaattaattttctgttaaaccaacattgcatttataggataaatatattgttatatatatttaataactttcttagtggttgctgtagggattacaataataatcactgggtggggtagcttatgcctataatcccagcactttgggaggctcaggtgggaggactgcttgagccctggagttcaagactgacctgggcagtgaga

SEQ ID NO: 48254 - DNA, 1271 bp, Homo sapiens
agtcccagccctcctccagcagccctagctggtacctgggtgtgcccggaggtcgggattggcgcggtctcctaggaccccggacagcgcagacacaagcagcagccccaccacacccaagagcgaaactgcgcccgccattgccggcccacgggtggagggatcgggcgggcggtgccgaagcggtccggcattggccggccgccccaacgcgcacgcgcacgcgagcaggccggccggctccggggaggccacgcccactccccgtagggcggggccagaccatatttgcataagatagtgtcattctagctttcctgtatttgttcatttcgtgtctattagctattctgctagccacaatgcctctgaaagcctatagtcttagaaagttatgcccgaaaacggtttttttaatctcacgccaccaactttctcaccctaatcataaaacacaatttctttagggctataaaatactactctgtgaagctgaggacgtggttcgtgctgaaggcctgtatcctaggctacacactgaggactctgttcctcccctttccgcctaggggaaagtccccggacctcgggcagagagtgccacgtgcatacgcacgtagacattccccgcttcccactccaaagtccgccaagaagcgtatcccgctgagcggcgtggcgcgggggcgtcatccgtcagctccctctagttacgcaggcagtgcgtgtccgcgcaccaaccacacggggctcattctcagcgcggctgttttttgttcccgagaccacggctcactgcagcctcgacctccccgggctcacgcgatgcctcacctcaggctcccaagtagttgggaccgcaggcgcacgccatcatgcctggctaatttttgtattttttgtagagacggattttcacctgttgcccaggctggtctcgaacgcctggtgtcaagcgatcagtccacctcgccctcccaaagtgctgggattacaggcgtgacaccgcgcccggtcaacgcggctgcttttcatgcgcgggcagctttacgctgttcttggccttgctatgaagtccttgtgctcattactccaaatatggagcattcctgaaacagcctcctcttctacctccctctccctttggcaaacgccatagtagccaccattcactgtgtagctggtacacaacatatggactctgcttgggctagaatcctgcctcctgtactcaagagcggtgaccttgtgaaacttagttctctctccgt

SEQ ID NO: 48255 - DNA, 1050 bp, Homo sapiens
acaaggcctttttgacccctgacctctgacccacaggctgaggcagatgtggcctccctgaaccgccgcattcagctggttgaggaggagctggaccgggcccaggagcgcctggctacagccctgcagaagctggaggaggccgagaaggcggctgatgagagcgagaggtggtcaggggcctcggggaggatggtccgggagggagaagggagcctgtctctgctggtcctgaccctacgctcaccctctccctgcctttcagaggaatgaaggtcatcgaaaaccgggccatgaaggatgaggagaagatggaactgcaggagatgcagctgaaggaggccaagcacatcgctgaggattcagaccgcaaatatgaagaggtgacagccttgcccctctgcctgctcgctgcccagcctgcaacatgcccagtccttctccactgatctaccctctctttctcactccccacaggtggccaggaagctggtgatcctggaaggagagctggagcgctcggaggagagggctgaggtggccgagaggtaaagatacccgggggtgacaagtgagcccattggccctggggccttccacacagtgggaaggtagcatcctaggcttggggctgtagggacaggccctgttctctgacccctgcccgctgcccccagccgagccagacagctggaggaggaacttcgaaccatggaccaggccctcaagtccctgatggcctcagaggaggaggtagtgacccctctgaacctttctgggcaatggcgccttctctcagctcaccttccctccgtctcagcaccgcaggctgctctttctcagctgctggggatcaggaagggcctggggcttctgagccctgcctgctgtcactctcacaactttgctcttctcttctctcctccacccgtcccctgctgtgccatctccactgtctggcttcgctgtgccctcacaccctgccccccccgccacacaccccctgcagtaaatgtggggacctagaggaggagctgaaaattgttacca

SEQ ID NO: 48256 - DNA, 1058 bp, Homo sapiens
tctcaaaaaaaaaaaagaagagtttacacgaagtcacctctatttcagaagataatctagactctattccctcagagtcttttttctccccaaagataacactgtcctaggtatttcctcatacccccaggcccacagttcatggcccacatgtcccctgatgctgtctaccacatgctgaccctcccttttctggtgtagcctgaaggacttcctgcccaaggagtatgtgaagcagaagggagagcgtaagatcttccaggtgaatgtgggtaggggaaagtatttgggatgaccgcggagctttgctgcttaatcttactgactaaatggccccctgcctcctccccgtctcccctaacttggctttcacccaccgggctgttatcccacctcacctctgccaagaaagcagacagcttgggcttttagtctcagctccatccctgcttttgctgtgcaattcagttcaatattcttgtaatcttttatttacctctgatttgggataacagtacttgccccgtgtaggactgataggatcaaatgaggtagcataatctgaaattactgtgaaagagtatagtctttgtccactataaggtgttacccccactctgaatactcagcccagaaggccttctctttgcccttctacttccaaactctctgttcatatctccagaatgtctgcaagttccttgactgtatcccttgactcatcgcttctgcatagcccttatcagcctccatcccgttaccctctcgttctcatatcttgtactcctcaacctttccagtgtccccataattctctctcgttagagttagcatccaaccttaattccttagctgtgatatgaaactctttgctaaattcttccccattttatgcacaggcacacaagaattgtgggcagatgagtgagattgaggccaaggtccgctacgtgaagctagcccgttctctcaagacttacggtgtctccttcttcctggtgaaggtaggttatgggcccttttcactgccctccttgtttcccactcttgcccttttc

SEQ ID NO: 48257 - DNA, 1066 bp, Homo sapiens
ccggacagggaagagccagcaggacacagcaggagacaaagagagaaaaatactgaaccaggcaaaaatgaaaagaaggcaggagtagggctgagaaaggtgatcagggacaaggggcaagagagatacttggatgaaagtagggaggtacaaattccagtggtggggcagggcagtgtcctcaggtagcactgcatttcagacctgctattgtaccttgcagaccagcttctcctttccctcagatgtcttaaattgttaggacttggccgggcgtggtggctcacgcctgtaatcccagcacttggggaggccaaggtggatcacgaggtcaggagatcgagaccatcctggctaacatggtgaaaccccgtctctactaaaaatacaaaaaattagccaggcatggcagcgggcgcctgtagtcccagctactggggaggctgagacaggagaatggcgtgaatccaggaggcggagcttgcagcgagctgagatcgcaccactgtactctagcctgggcaacagaacgaaactctgtctcaaaaaaaaaaattgtcaggactcattcttttgatgtaaataatttttcactctttaaaattattaaatacaatgaaaacaaccttattaccatctactttggtgagtccctttcaaaaacactcttcccttggactccaccatctggggggcctcttctcccaccagaagagtgtattctaatgccctgatgccatgggtcaggtatagccaggctggagaaaagaagctgccaccatggttgcactttcactgaagatcagcattgggaatgtggtgaagacgatgcagtttgagccgtctaccatggtgtacgacgcctgccgcatcattcgtgagcggatcccagaggccccagctggtcctcgtgagtctgactcccccggtggctggagtgggagtcttcagtcccttcttgttcccaggctctcggccttgagagttgacccctttgtcccctaagactactcacccctcaggtctgtgttccatggttccctcgttctttaggcccaaggtcatg

SEQ ID NO: 48258 - DNA, 1033 bp, Homo sapiens
gttttcttctatcctcagccggggccaagaagcctatgagagactgctgtggaatggtgagttcggggagcctaagtagtcttaaggcagctgagaggacaccaggagccttatttttctcttcctcgactccaggccgctattacaactatgacagcagctctcggcctcagtctcgtagtgttatgtctgaccagtgtgctggacagtggttcctgaaggcctgtggcctaggagaaggagacactgaggtgagagaggaggaggagcagccagagagaaaaatgggttttccctggaggtgggaagtaagtatatgagaccatgttcctgcccttgcccctccaggtgtttcctacccaacatgtggtccgtgctctccaaactatctttgagctgaacgtccaggcctttgcaggaggggccatgggggctgtgaatgggatgcagccccatggtgtccctgataaatccagtgtgcagtctgatgaagtctgggtgggtgtggtctacgggctggcagctaccatgatccaagaggtaatgcactccttttcccatctctccaccatctgtatcctggcccagaaaacttcctcaaccaccaaatttcttcaaggcataacccaatgccatcttgtccgtctataaagcctcccatttttccctggtatgcattccagctcctgccttcaggcttctgtctgtgggtcatagttatctcctccacttgctgggagctccttgaaggcaaagactctactgcctccatctatccagtggaagtggctcttcagagggtgccaagttagtatgtatgactgtcatctctcccaacagggcctgacttgggagggcttccagacagctgaaggctgctaccgtaccgtgtgggagcgcctgggtctggccttccagaccccagaggcatactgccagcagcgagtgttccgctcactggcctacatgcggccactgagcatatgggccatgcagctagccctgcaacagcagcagcacaaaaaggcctcct

SEQ ID NO: 48259 - DNA, 1362 bp, Homo sapiens
accattccaacaaaatgaaaaattattttatacagttgtccctcagtatccatggggggttgggcccaggacctgctatccgaggatgctcaagtctttgatttgaaatggcttatagtatttgcaaataaccattgcacatcctcctatatactttaaatcatctgtagattacttataatacctcatacattgttacataaacccttgttgtgccgtacagtaaataaagtgtgtacatattcggtacagacacaactttttttccacatattttagatttggttggttgaatccactgatgtggaactcacagatatggagagcccactgtatacaataaaaatatttgacatagtttgaaccagggaaagggatattaatccctcatagctcctaccctccaagagctaaaactttttttgagaaaataagacttaggggaaatggagactgtgagaccacatcagtgctaaaaggagaggggtggatagtatactgtggaaaaagggacggtgctgcagatttcgctcattccctccacatacatgccaactctgaagaagggtgcatcagtgaattaaaaaatgtccctaccctcagaagaatccatacagcagtcagggacacagaatggtcagtcaatacattataacataatacaccaaatgctagaatagaaggggaggggggcacacataatgactcactgctggaagaagtagaggaggaagagatggcttttgacctaggctttgaaggatgagaggtttcaccagatagcgaacaagcatgagcacaggcatggaggagagaatgtagtgtgctcaaggaacagtgagtgtttttatatgaacagactataggtgcttgaacaggtgatgagtctgatgggcagggagaggccagctcaagaagggccttgaaagccaggcaagagttgagactttagcctgagggccatggggagtcactgaaacatcctaaccaaggactgacatatcttgatttgcctgtgagaaagatcactctgctacccagatgaaaagggccacagaaaaagcaggagattgggcttaagtgaggtgctaacaccaccgtagtggagaagggagagaaagcttgggagatagatggatggggaggtagcaggacttggtgattcactgagcctgggggatgacttgaagctgatggtgcagtggtaacagttgcaggctctgaaaggggaggagctgatttgaggagagggaagacttagtctgtggtccctgtggtttaccccgttccagcctatctgccctcttaagttcacagtgtgcctgcgtcgggaagggcagactgtgtaccagcaagtcctgt

SEQ ID NO: 48260 - DNA, 1073 bp, Homo sapiens
gccctccagcaccacccagaaagactcgtaccagccaccaggaaacgtctattggccacttcgaggtgtgaaatgtgagagggtaggccagaacgagcccattactcagagggaagaagaggaaggaatttctggtggggctgtggattctccagtggatataagggcggaaccccaaggttcttcttccttttctcaagttagtttcttctgggcctccttcttaaccagaccccaccttgcccaccccccaactctctcacagggaagcgtgaagccatgctggagatgctcctgcagcatcagatctggtaagggattgggtaaaggggaagagggatggggaggagaaaaattgggtgagaatggccttgacacccctcgggctacatagtaaagaggtgcaggcagaacaggaacccacaaggaagctcttcgaggttgagtctgtgacacaccatgactaccgaatggagctggcacaagcagggactcctgccccaacaaaggtgagaacccaccccccatcccccgccacttgcaccagctgggctctgacaggctgtggccaagtaccaagcccagaggttgagagagagggctgaaggccaggagttactcagtaccctccctcacagcctcacgactaccgccaggagcaacctgagaccttctggatacagagggcaccacagctgccggtgtgtgagggtgactaggtgttgggggcagagcggggcaggaaaggtagggcagagttgttttgttctggcttggggagagtgggatccatcctcatcctggcactcctccagggtgtcagtaacatcaggacattggacacaccattccggaagaactgcagcttctcaacaccagtacccttgtctctggggaaacttttgccctatgaacctgagaattacccctaccaattgggagaaatatcttcccttccctgtcccggaggaaggctgggtggtggaggggggagaatgactcctttctgaggggtgaggagggaagtggggtatggaatatggaatctatttctgtctgcactagagaggtcg

SEQ ID NO: 48261 - DNA, 1049 bp, Homo sapiens
acccacaaggtgggcatgcatttttgctgcactgtccccacagctgtgtttgaaatcacagtgacccaagcagatgggtcacagggcatcagaggatctgctaaaaacatttccatccaaaatgctgccagagaatgctttgatgcctagtgggcttcagctgtctaaagaagtatctatagaccctcacatgccaaagctctgctaaatagatgaggcgttgtgatatcatagttttctgtttcaggtaaagcaccctcagtgatttctatccctcgctgtaggaatcggtggtggaattatccatcagcatgaattgatccacggaagctccttctgtgctgcagaactgggccaccttgttgtgtctctggatgggcctgattgttcctgtggaagccatgggtgcattgaagcatacgcctctggaatggccttgcagagggaggcaaaaaagctccatgatggttggtgtccctctctcgaggaattaagtaaccaaatagtagacaagtacttcaaagtggaaattccaaagacagctgaacactgaagccagaagtttcccccttttcacttcttagggaaagagcagggctccctcgcactaaaactgcacagtcttcttggctgacccatattgccactcttcctccccaggggtggtggtggacagaggtctagagttccaagacagcagggaagatttccttcagttttgttttctcagccagtatcacagggagggtacttaatacacattttaatgaagaaataaatggacaaaacatgttatgtatatatcacacatacatgcactgtatgtgtagtatatctgtgcttcatacataaaaacagtgtagatttttggcccccaaaaccaatttgtgagcatatgctgaaggaaaagagatggggagtggaggccgagagtgcaggagagaagtgtatagagccctacagtagggttctgaagaggtgggaagagatgagctgcaaagccaggcagagggtccacgagagggcatggcgagccgagatgatgggtg

SEQ ID NO: 48262 - DNA, 1033 bp, Homo sapiens
tgtttgcccctagggttgtcagtgcatcagaaatacttctaaatagtggtaaaaatgcacatggttaatgcacatgttacttttaaatcattaggatatccctcacctgttcctgatgaataaaaagtgtgttaaagaccaaaattcttggcataataatcagctacatacaaatcacatatagtttaatcttttttaatgaaaaaaaatcatgtttaaaatggcaaaagcccatcttatacacttttatatagctgcaaaaaatttatatctgtacagatctaacactacgacactcagtattcattttattgaagcatgcaagtaaagcactttttctaatttatatagaggtatctaattaacacagcacattgtactaatgactaggagtagcagctttttcttctctccctctatgaattcttataatgtccctttttctgtaagtttttgagaggcaattggcaatttaggaggcagcagggtctgttttggtcaaatcttgaatttcgttgttgcactctagtgactgatctttgggaatgtcttgtctttgcatggggctcatagagatgtgtgcagacttgcttattgtggttagtgtgtatcaggaacacacacacaggtgttctgaccagctcaggcttgccacagtgagcaactctgtggctagcaaaagagaagtttatttgtgcccagccattggtcaccttgggtgatgcaccagatagcaggcagatgttggttcattggccttcgtcctctttcctcctaaaataatattggctttaccatcttaactcagctgtgggttttttgtgggttcttgtttgttttttggcatgaattgtcatctttggtgtttttttaacccccagcccctcaaaaaaataaggcctccaggtatcaagatctcatattaggattttctgtccttaattttttgagcaaaatctggaaaatgtgaaagcatatttagattttatatactatctgaaatgtgatttgttaagattcttaaatttgggcc

SEQ ID NO: 48263 - DNA, 1022 bp, Homo sapiens
ataataattacagtattgaaacacatcaaatatgttaaagttcatgagttgatggtggatacttcataaaagaaattaggtggtctcatttatcctattctacctaaattattctgagtattgtttaatatgaggtattctaataaatgaagaatgataaaataagaatattactgttttgccatttttaatgaattaatggatcttgacagtattccatcattggctgctaacataaccagtggacacgatgggtcttatggtataagtattcacatctccctatttataggacaagggggcaagggatttgttaaacccagtgggtcagggatgggaggttcatttagcagatttcaaactgggaatttctacagctcattaacctggtttcttcaaatttaagagtgaaaaagagtcttgagacatattaggccatggtaagttacggatttgtttggatccttatttgaacaaactactttttaaagttttgaattgaaaacaaagacatttgaacgttaattggtcatttgatgttaaagaattagtgttaatattttaggtgtgatgatgtcattgtggttatattctaaaaagtctatctttttagagcagcgattctcaacctggggacagtttgtcccctaggggatatttgggaatgtgtggaaacatttttggttgttacagctagggggtgttaactggcactgagagtagagggaggccaggaatgctgcaaaacatcctgtagtccccaggccagccccgacaacaaagaattatccagctcacagggtcaaagttactaactttgttttacagatgcacttgatacaaatgaaatgataccatctttcagttttgttttaaaataaggtgaggtttaggatagattgtaataggtaaaagattagccatggactattgacctgcgtaatggatagatcaaggttcattaatgttacttttctccttttgtatgtgtttagattttttcataagaaacatttaaaaaa

SEQ ID NO: 48264 - DNA, 1083 bp, Homo sapiens
agtgtgatttagaatcaaattgagggcctactcaaattatatctcctactaagctgaactcacagctgagaattgatgtcttattgatgggagattgtagtgtagtgtaatttttcaggtggtttgggaatttaaagagaaggtcgagtactacacgaaagttttattatgctgttttataccctatatgtcgttacctcatttgccttagaatgagtttttaaaaacaaagcttatttttcacttcgtatcatttactgtgcatctccctcccctgttctaccccatcccagcattttttaaaggttttaaatttgaattgatagcatatatttttttccccgctttacatttttagattttaggttaagtacatcctaacacctgtgcatatgcagtaatgtgaaatctttaaaagatcttactcagttgatccattttgttgcattggcagagtgaagatagtccaagtcctaagagacagcgcctctctcattcagtctttgattatacatcagcatcaccagctccctcaccaccaatgcgaccatgggagatgacatcaaataggcagcccccttcagttcgaccaagccaacatcacttctcaggggaacgatgcaacacacctgcacgcaacagaagaaggttagttgattacaatttatttcttaagttttcttccattggtagatttgtgagtatatttaacatcagaaaacattttttctgtaggcatttcataaacacatcaccacatatacacgtacattcactcacgaaaaagaaagttgcctagatttccagtaggttagaagagtttatttagcttatcattgacagatgaagaaatggaaagaggctaaaatcagtcgatgccattatatatgaaattagctacttaaggtacagattgttgtggactagcctgcgatcttgactattagaagatgcattttgtagttcataactgtaaggatatatggaagtcttagaaatgagctactccttttctactccattccttttccttctgtatcctcaaaggcaattaggagcttaattatgtttcttataaaccca

SEQ ID NO: 48265 - DNA, 1022 bp, Homo sapiens
atggtctgggaaacagtctcaggaggtcccaaggaaatgtacccactacagtcgaattacagttttagggaggcaggagttacaaagtcataaatcaatacatggaaagtatacattgtttcaaaccgaaaagacacagaatatcttgaagtgaggacttaaagattttaggtggattcagagatgagattctgtaatttgcagttggtttatagagtaaagctttgtctaaaaatttggattcagcagaagggaatcttataagaaagtctgttaaccaatacactgggttagagtgacctgtaggggtgtgtgagttaacccttgtctggcttggccttaggtcctgtttataatttggtatcttattgtcacaaaaagtccattctgttaggtcctataatttctattttaacattaatgctggtcagttttgcctaaactccagaagcaggggatggagagataaaatgaggtgtatctagtcttccttcctgtccaggccaagaactcaatttttctagtttctctggggtctctgtagtcaagagagagtcagttcagtcatttgggggggattttatttttagtttacaaaagcagtgggaatatccttccagattcagttttgtatttactcatgtaaagagaccttgtagtagcgtagttctggatgagtttttatgtttttatgtttagaggttcacagacagcatggatcgtgaaaatctgaaccccaaatagggtgtgaggagtgaacctaagtttgaattctcacgggagaaacccacttccactcgaagtcaacacagagcagacatttccttattgacgtttccttctcttttccactggaatgactttttcttgtcttcctttttaagtgtactactttggaaattttgactacttcatgtaggggtctcagtcataaggccttatcttctattcctcttgagagcatcaaaaatacaaatttggtcttcagttttcctcagtttctgagtccttgatgatttccc

SEQ ID NO: 48266 - DNA, 1051 bp, Homo sapiens
aggaggcggaggttgcagtgagctgagatcgcgccactgcactccagcctggcagcagagcgagactctgtctcagcaaccaaaaaaccacattttacgtattatctggacatagtttaaaaatgaaaacctcagcttgtggagaataaaatgaggtaatgttagaagtcattttgtaaactattgtgtgatccaaatataaaattcttaattttctgctttccccagcttatatccatcttctgcaaaacaaaaaaggatcttgtcttattttttagtaacaagttgcttatatagagtgttgatttctaagtgttttcacatttatttaaaatgaataaaatttagtgagagtttgctcttcctgggccctttgcatttaactgtttttccttaattgtggaataagaaacttcatttttgttaaaggtaattaaggcaagtagagaaagtctgggagtttaaaggagaattgaagattcttaactcatgctgtgcttatttgtaaatctaaggtgaagagtagtcctgactgattagaaagaggaccaggttcttgagaaattccatttccccacacaagttgcctctttgctgctttgggaaggaagtccttagggctcactagtggttgccattagaggcatgttgtagtcactgagtagaacttgaaacctgtttctgttttgggaaaagtttgtctggctcagcatctcctattatctctaagacttgctgatatatatataaacccaagatatatattacatataaaattgtttttctttagcctttaatgacttctgacttgttcatctggaattatggaatgcattcttatgcctgcctcaggttcatttcacttctgttgatgttttggtaataaaaatggtttggtgttaatagaggtgtactcctagactcatttttatcagatttaatgctaagcataaaacctgcctttccttccttcctcccattatgacctctttgacctcccttgatccctaaatctgtagcagtgttctatactgtaatgtctgtacaacgt

SEQ ID NO: 48267 - DNA, 1027 bp, Homo sapiens
tgcgagagaagtaaaccatcagttgtgccaataaattagataattggaatttctagtatatttattgctctttactgtttttaatcctcaacgtcttgtaggcaacattcttagtatcttctaggcagttgatcataagcttaagaaaccacaagaaaaatgtttttaaagttacatttgtgatctctaattgggagcactgattttggccctaagtagggtttttagatattaagaagcatagttttggtgaatggatttaattttctgtcgtttaagttagaaaaacattcgtttgcattaagttaaaaaattttctcttatagtattggatagcaatagcctaaaaatgcataggtgtaaaatacaacaatgttactaatcgccacagagtatcttgtatgcacagatttcttgactcaataatcctttctcaattttcttttgggaaaacactaaaatcagttaaaactgattttcagtattgtacatgacagtagaagatggaaatgaaaataaactttcctaaaatccgcaagtctctgaagtgaaaatagtatttagtggtggtagaaggaaagcaggatttctttgtaagcactatacaataattagagttaatattttatgtagcctgtgatggagtatgtacacacatacacatactcttctcttgcacactcacatatccagggtgttaaatacaaagtaattcttcagtgtcagaaaacactaaggggatttgtgttcacagcttataaaattgtgataatggatttattctctaaatacaaaatactcagtgtaccaaaatgaaggcaatgccctatccctaatgtttgacagagagatttttgttttggacaaataaaaggagtaaatgccttaacacaggttactgaattaagtatacccaggaagtgttagtactagttgagataaagtaatttcagggagtgtttttgctgaaaggccctttaccctagagattcccccagaacatttctgtccctttcccagtcttttc

SEQ ID NO: 48268 - DNA, 1100 bp, Homo sapiens
gacagagcaagactccgtctccaaaaaaaaaataaaaaaaaagaagtgtcaccgactgtgattttcttctttatgtgtcataaattttagttggaagtcagatatctcatgtaggacagtggggactgagctctgtagtatttagtttggaaatgggcacacctcttcttttgcctggctcttaggaggtcgatctagttaggagctgagcccgtttgaattatggtgatgataggattatcctcagcgtcccgtaggcttcagctctctccagcattacctcgtgctagttttctccgcttcagatcttcctttgtgcctgctgctcagaggcgatctccgctgctctcgccctccctcagcagtagactgccattatttgtcaccctacgtgatggcagggtttctctcttgtcctgggtcatccttagtctaggtaggtgctgtgtctgtggtcttgagagcaggactttttcagtgaccctggctctacccccagcactaggggacctctgatgatctgggcctaagtcactttcctcccaacacccccagagataagagtgttttcccgctgtttctctgtgcatacggtttgttttgtaagagagttagggggaaagaacacaggagaggggcttaatgcctctctcacttttgtccccagcctgcgtcaggagggtgctgtctccagtctctcatctgcccccagttttctccatgaacacctagtgaaggccacagagaagtgaacaggtgcagctactcccagagtttctgcactcacactaattcacagctggtctttaacagtgcattgaaaatgttagctgagttcttactggcttgtatgacacatgcagccctgcattcagcagggaagtgctcaggcctcgtctccttggaggcgcctgtctttctttttttgagacggagtctcactctttcacccaggccggactgcagtggcacgatctgggctcactgcacgctccgaaaggcacctgtctttttgtagcattcaggctagccggttgtccagcagcctcagctctgatgggttccaccagaaagtccatgtttgtgtatattctttctac

SEQ ID NO: 48269 - DNA, 1051 bp, Homo sapiens
aatggaggctgttttgctgcatagagttgcagagagcatctgattacttaaaccttgcaccaattcttattttaatgtctacccttctaccccttattgctagaggcacctgaagccactagtttctgagccttttagggattccatgatataaattaggttgtgagtttttgttgttgtttgggggttcttgtgggtttttttctttttctaccgctggctcagaattcagtttttcagagtctactacattatttactgttgatctacctattttccagcttctaacgttttattcctgtttcctcttttcttccatccttttaggtttatatcttaaaacaaaaacctttaccgtcatttaatgggatttttgggagggagtggaggtaggtatacgtgcttcatctaccatcttaacctggaaagcatgtattttaattctgtggttttgtatttatttcttaaattaagaaggtgtagtgtatggcactgtggtcatatgaatactggctctaaagacaggcagacttgattttgaatgttggctccaatacttacgagatgggtgattttcagcaagtgagctccgaatctcattttctttaactataaaattaggataatagaaacatctctctacttcaaagtgtcgtaaggattaagtgaaaaaatgcaagtagagcagctggcacaattgcttgacatttggtaaatgttattaatggctagtctttggtataaggcatttagaagtgatttgtgctggcattcacagcatagacagatctcattcctatttccagatgctctgagatagcatactcatcctctaattgtgtacaaacttcaaacttaccaaacacttaagttcattatctaaaaatagccttaaccaatcaataataatgccattttacaggtggagaggttgagactgcaagtttcagtggccaatgagtagcagctggccaaggcctaggggactttttttttttttttcatttaaaaaaattatttctagtcagtctgtgcttatccaggggacttt

SEQ ID NO: 48270 - DNA, 1049 bp, Homo sapiens
ggcaaactatctggagaaaaggttttatgtagtataagaatgaaatttacaataatagctgaatgacagtggaatgggctgctttggaaggcaactagtcccttttgctgggctgtacaggcacatgcttgaccatcacttggagttattttcaaaaacatgttgaataaacctgataattctataatgtagcctatgggctaatagatttgaaaactaattttagatttgtttttctttcagctccatttatcttaaagaaattggacagcatatgaagacaggacatcacatatgaatgcacgatatgaagagcctggttacagtttcgactcctctctgcaagtgaataggcccagaaaggtgtaagagactctttgaatggacataaaattctgcttgttaagaacaagtttggctctggtaactgaccttcaaagctaaaatataaaactatttgggaagtatgaaacgatgtctcgtgatctggtgtacccttatccctgtgacgtttggcctctgacaatactggtataattgtaaataatgtcaaactccgttttctagcaagtattaagggagctgtgtctgaaatggcactgtcttgtcagtcatttctgtttacctttttcttctgcccagagtgtatttgtgaagagtctcttatattatgttttgtggaaatcagcacacaaccacaatgacatttaagcacaggatcattattagtctatgtttttaataaacatatcaattaagaaaagttgggtttctatttttcttatcctactttttgctgcaaaccaacaatcactagtgagacttgtattatattgagattattgcaagcttcagtaagttcatcttgttttggactagagaatttgccaatcctgatgaagtgtcattgtgttttattgccaggcagtcttaatgaaaggtagcattactgcttgatgctgagtatatgaaatattaatactaccaaaggaaaaagtactatatttttaagccaaatagttctccaagtttgttgagtggagggggga

SEQ ID NO: 48271 - DNA, 1029 bp, Homo sapiens
agatgtcatgcaaagacacttgcctatgtgccactgccaccctctgccctgctctttgggtcaaggtacctccaagcgcctcactcctgcagctgcatttttttttatttattttttttttgagatggagtcttgctctgtcacccaggctggagtgcactggtgaaatctcggctcactgcaaccttcgcctcccgagttcaagtgattctcctgcctcagcctcccaagtagctgggactacaggtatgcgccaccacacctggctaatttttgtattttcagtagagaagggtttcaccatgttggccaggctggtcgtgaactcctgacctcaggtgatctgcccacttcggtctaccaaagtgttggcattacggcgtgagcacctggccacgcagctgcaatcttaggcccatcattccactgagttccgaagaatatagccttttcctgaagaaactcctttcttcaatgcttcaggccagttgtgagtctctaagtaagtggacaggatatcaaacactgttagagagtaaacagaaaacacagtgaccacagagggaaaaaaagaacgagtaaatgaaaaggatgttctgtaatatttcgttcaacaaacctattctgcaccatatgtggtactaaggtcttgcggggagaggcaaggacacaggctctgcttgctctcaaggacctcagcctaccctgaaagatacaggcctatgaatggatagggtgcaacagaaaggaacacagtaaaatgggaaacagaagggctctgctgtggcctgggatggggaagggccaagatgctcctgaactgaaccctgaagatcaaacaggaattcagtggtgagaggttaaaagctgggcattctagatgaaggggacaattttttttttttttttttttttttttttttttttttttgaggcggagttgcactcttgttgctcaggctggagtgcaatggcacgatctcagctcaccgcaacctgcacctcccagattcaagcaattctcttgcc

SEQ ID NO: 48272 - DNA, 1048 bp, Homo sapiens
atgctgaggcagattctctttttggtgtttagaactttacccacccaaagctgtgccatattcaggggctttactcctagagccagtgaagttgagagctatcttgtatgcctctccttactacatatcctaaagatctggagaattaagtttggacatcagagaagcatgtttttaaccaagaagcatgttattaaccaagcaccacccttatggtttgaaagagccaatgttcctctccaagtactgaatttaacacaagagaataatatggccaggaaaataagtttaaagtgtcttaacactgtagataaaaaaagttatgattcccagtctagaattaaagtgctctgaccatctaggggaatgacttttacaaagttggtaacctagggagtttgatttctttgtaaggcatagcccacctctgtgatttctagtatacctttgaacagtgtaaagttccttcttggaagaaaggaggcagcaaatgtcatcacgtgccttgttcttgttgaacagctatggagaactgctcagaaaaggaatcacattctaaaggagactccggacacacctttgccacttcattaaatttcattttcttttctcttcccaccaggctattagctccagattgtgaaatcatacaggaagtgggaaaactctatccactggagatagtatttggaatgaatggaagaatatgggttaaggcaaaaaccatccagcagactttaattttggcaaacattttagaagcttgtgaacacatgacgtcagatcaaagaaaacagatcttctccagattggcagaaagttgatataggtggacttttttacaggtcagttgaggcaaaaaactatgggttttttcaggtgaacctcccccatttaaatactcagaagataaggtgtgaatgtatgtattattagagtccgaaagtatttttataagttactggttttcacccacgcttttgtgggagagaaaatcattgcaaaatcattttttttgttcggtacaataaagtttactaaaaaacag

SEQ ID NO: 48273 - DNA, 1033 bp, Homo sapiens
ggcttctccctgcaacttcataactggggggacctagatcttttttttgttttgttttttgagacggagtctcgctctgtcgcccaggctggagtgcagtggcacaatctcgggtcactacagcctccgcctcccaggttcaagcaattctctgcctcagcctcccgagtagctgggattacagatgccggccaccacgcccagctaatgattattaaaggaactctaaatccacatacagatccctcaggaatgagaagtaagcctgtataatgggtgtaagtatttaaattacagacttttcccactactttcccaaaatatgaagtaatagaaaatattgtccgtaactaccaatgttttttatttttttattttacaagataataagcaaactacaaaactaagaaatgaactagaagacattaccaagtatgtacaaaatgaccgtctagattcaaaccagaaaatgcatgcccctgtctctgaacagtacagtgaggtgatctaatggaactgagtatgaattccagctccaccacttactatatctaagaacttgggcaaatctctttatttgagttatagttttttattccttaaatagctacaatatctgtctcacagagggatactgtgaggattaagtaatgtataaaaagtgcttcacagaaggtttggcacatagaaagcattaaaaaatggaagttagtattattaataaataaagcacacttgagctcatgcaccaaagactcttcagatcttcactcaaaactttctttttttttgagacagagtctcgctctatcgcccaggctggagtgcagtggcgcgatctcggctcactgcaacctctgcctcctgggttcaagcgagtctcctgcctcccgagtagctgggactgcaggcgtgtgccaccacgcccagctaatttttgtatttttaatagagacggggtttcaccatgttagccaggttggtctggaactcctgacctcaggcaatctgcccacctcagcctcccaaagtg

SEQ ID NO: 48274 - DNA, 1028 bp, Homo sapiens
tgatgactcttaacgagcatgctgccttcaagcatctgtttaacaaagcacatcttgcaccgcccttaatccatttaaccctgagtggacacagcacatgtttcagagagcacagggttgggggtaaggtcatagatcaacagcatcccaaggcagaagaatttttcttagtacagaacaaaatggagtctcctatgtctacttctttctacacagacacagcaacaatctgatttctctgtcttttccccacatttcccccttttctattcgacaaaaccgccatcgtcatcatggcccgttctcaatgagctgttgggtacacctcccagacagggtggcggccgggcagaggggctcctcacttcccagaaggggctgccgggcagaggcgcctcccacctcccggacggggcggctggccgggtgggggctgccccccacctccctcctggacggggcggctggccgggcgatggctgaatctttgtgtacatgttgtgtgaattattttcttaatctgtagtcttagaaggaaaattatggttgtgtgtgtgttccatattcattacacattggtggctctggcagatatacgccccttaggaactaatgctatctgattctttctgtgcctcagctctacgctttctactttgagagtgatcatggttctctttaacatcttttgtcctgagtgttgagcagttcaccacagcatgtgtgtagtatgaggagggaaaaaaaacttaaggaacttggcaattttttgttccaagtgaaagacctagacggttttttgttgtttttattatttcccattgaaactcttaaatatggtttggattgtttccacctcttggctgttgtgaatagtacttctgtgaacgtgggtgtacaaggtctttgagactgcgctttcaattgttttggttatatccccagaagtaggattgttggatcgtatgttcttttttttttttaaagcagggtattactctgtcacccaggctggaacgcagtgacat

SEQ ID NO: 48275 - DNA, 1022 bp, Homo sapiens
ttacatacctcactttttaaacttagtagtgtgtgtgtgtgtttctttttaaaatgacgagtaggttgaagagggcagggaataggggtgggtgagcgtgaacagagtcaggctgattgctgcagggtcccttgcattagttcaggtgagaagagacccgagtaggccagtgagcctggaggagaggctctctgtgtgtttaattggtttccagctttttttctctattcatgtaggttatacacgtttcttctgtgaatttttatttaaatgattttttgttgttactggatctacaaacagcccaactccaaggaatctggcatctctcagtggagcatacaggtgacttcataatctaaccgcattagtaactgccaaaatcggaagtaatttctctctgtttaaaaggcagtgaaacaaattttcagagcaggtttcttcaactgaacaaaatattttggaccttagaggtggtatggctctcctgatcagggagggacagtgaaaggtttgagctctgacactgcccagctctctggatacaaccaagtgactttctttgagtggggagaagtttcctgactccttgtattaccttccttagggtagactttgggcctgcagtgacattagtcctaacttgctcttaggtaaaaagagttcatcttttctaataggaacatgacagcaaagcagctcaaactccaaagaggcgttaggccatagattgtacagatgtctacattttcttaatcatagtctatattcttagaaaaggatatacagatcttagtgtaacatacttaagtaaaatagtttctttcatttgcttcacaagagaaagcaaaaaaatttggctgggcacagtggcttacacctgtaatcccagcaccttgagaggctgaggcagttggatcacttcagcccagaagctcaagaccagcctgggcaacatggtgaaacctcatctctacaaaaaaaatacaaaaattgggccaggcgctgtggcccacacctgt

SEQ ID NO: 48276 - DNA, 1032 bp, Homo sapiens
gagccaccacaccaggccatatacaatattttatttctgtatctggcttatttcactgcccctaatgtccttcaggcctattcctgtgtggtgaatgacaagatcttttttagggcggaatagtattctgtcatacatacaccacagtttctttatccattcatccttgacagaccttcagttgttttcatatgctgactgttgtgaatggcgctgctgtaaacatggagtgcagatgtctttacaagatggtgattttacttcctttgggtatatgcccagaaaagggatcgctaggtcatactgtagttctacttctaatttccttacaaagctctttactcttttccataatggctgtaccaatctacattcccaccaacagtgtataagagtttccttttttccgcatcctcgccaacatttgttatcttttgactttttgataatagccattctagtgggtatgaagtgatacctcatagtggttttgacttgcatgtccctgatgattgctgatgttgaacaccttttcatatacctgtcagccatttttttatgtcttctttggagaaatgtctattcaggtcttttgcccattttataatcaggttatttgttttttcactatggagttatgtgagtcctttataaattttggatgttaaccctttatcagatgcatggtttgcaaatattttttcccaatctgtaggctgccatttcatcttattgtctcctttactgtgcaggagcttggatgtagtcccatttatttattttgagcttttgatatgatatccaaaaaaatcattgccaaggccagtgtccaggagcttttcccctgggctgtaagagttttatagtttctatttttatatttaggtcttttatccattttgagttgattttttgtgtgtaatagaagatatgggtccagtttcattcttttgcatgtggaaatctagtttattagcaccatttattgaagggattatcttttctccattgtgtcttcttggtaccctcatc

SEQ ID NO: 48277 - DNA, 1034 bp, Homo sapiens
ctggtccaatatcttgaacaagtggagatactgaggcccagaaagaggaagaagcttgcctgcctctggctttcccagcaggcaagctgtttgctagcagcatttgagccagcctgagtcagggcagcaggggtggtgggggaagagggggtctgtctctttgctcttatcgcatggaggatttcatgtcctttcagggctcatggaggaaaaatgaactttctgctcaattagcgtgcttcgtgttttctccttctaaaaggtttaaaagaaatgccacaattagaagccactgctgtaggcaaaacagagactcctcaaacactctttgcagaggactaaatgagaacagtgaactttagaatgtgcagatgccttgcaggataagagagtgcaccattgaggggacactgtgaggaatattagatgacatttccctttattcagaattactgagaaaatgtgccctgctggtggtaaaacattgccaaggacgccaccctcaacattagactggcacctcttctggactctgagcctggtgctttggtgattctggtgcagtgggggtggagagtgtaggaacagccctgggcctatgcccaggagacctgggttcaaatcctagctctgcctctgacaagttacgggatcccaaactagtcaccatgatttgcacccttcctttctgaagggttcagacagaccctagtttgagttctgcatattctctgagccctctgtttactctctagcacagcaagtgtaaatcctgccccgccacctgctctgggctgctgtaacatgtgagtgaggtgatacgggtcagcatgcccagcacagggcctgatatttgggaatagccagctttcacactgtgatagtatgttcaagaagagtagcaaccattgccatcatttttacagataaagaaactggtgttcacattacgtcacagttaatgagtaaagagatgagattgcaacacagctcgaggcctctttctaccttgtggggtctctcggaatagaaac

SEQ ID NO: 48278 - DNA, 1052 bp, Homo sapiens
taggggccagtgggagtggggatatgaggaaaggctgctctcccctcatctatcagcagggagcaagtctccacttccttctgccgtccaagcatccccttgttgggttaacatctgagactccagacacctagctccgtggtggttgcttgctcccatgtgtgagccaccagggtggtccctgcaaggccacagtgggacctccctggccattgttgagttccccacacagccccagcatacctgaatacctgacagtggacttagtaggtcactgtattccccagccaggcccctgcagggatgatgaagccttttaagagcaaacttcagggaaggcaggtgtgtgcagctcaggtacagtactgcttgcctcaggacccccacactgctcagcagtggttgcaggggccctgagctcctggccatgtgccccatgactcccccaacagagggagctctgcacagcggtgaagacaatggctctgggtcttggcttaggctcttgaaacccagctccgccacatactaacagggtagtgttgggcaaagggactgaacatctctgagccttggttttctcatctataaaatgggtttcacaggtgtattaatgaagacacaatatatgtgaagtgcttagcatatgctccagcatatagtgagtgctctatcagtggtagctcaaatgtctttattatggacctcagagagccacgggttgttggggaaagagctcggtgtgtcccagtgcattgcaaattgtctgggttcaacctggaagtctccatctgtgcccacatccactgtcctttacgatgatgggttctagattttattggctacagctggaaagaatgctagagaatctcacagaactggagtccaatccaggctcccctcttcctggataacctgtcttgaacctctcacctctcttgcactctgtacgttgtgctttggtgtgaccttggatgaatgagtgaacttctctgacctcctagttgctcatcaggagctggagatgatgaccactcaacaggtatcctttt

SEQ ID NO: 48279 - DNA, 1050 bp, Homo sapiens
cagaggagacgccgagaacctgctgcgactctgcaaggagtgtagctaccttgtccggaacagccagaccagcaagcatgactactccctctccctgaggtgagtgccgccccgagcacccccagccctcctcggcagcctctgcgagcgcagccggccaccgtgtctgtggcagaaaaacccgccagtgtcccctgggaaacttgccagcacacgttattttaggcctgggtttttcaatttgatcctattctcctgggatacagaggagtttttatgttcactgttgctgcccttccagaagatgaggggcctttttctaggattttgtattaactatccaagaaagctttcacatctgctgtgagccggggtggtacgaagttcctagcatgcctcatcctgctctcaaagcccacgacgatggtcctttgatttttttgaggaacatatcgtcgccaatttgcagatgagtaaacaggttcacggaggtgggtgtggctggcccaagtggctgggccaggacttgtgaccagcccatgactctctgccactgtgagcatgacctagctctggcttgcggtttgtgtgggcctgagtttgggtgttgcacaaagtctaggaggagcactgggaagaggtggtgttactgcctatcgcagctttggaaactttcaggtctttctgacctgtgaggcatttctgtcaggatgggcaggcccagaaataagaaaagcatgttttagttgggtgctattgctggacgggacccaaaagaatgcctaaacccattttacagaaaaactgaggtccagaaaaagaagggatttgccaaggacatatagagagctggtgacataactggggtgtaaacccaggctcttcagccagcacagatcccccagaagcagtgaatccctctgcctggcatcctctctgtcccacttaccgctgttagaggccatgggagggagagccggcctgcagggacacggttgtcaggagagctcacacacatgccggccctgtagacagaggcttcagtaaaac

SEQ ID NO: 48280 - DNA, 1067 bp, Homo sapiens
aaataagagaagaaaggcatgccccttctgccaggcccgccgtccccatcccaggtttggacatgtgtgtacggcgttcctggaacccaggcagcgtcctggcacctgcttcacagccttcccgcttgcctgctttgtggtgagtcgctggccgcctcccctcacaatgaggacctctgttctcaggcacctcccatcatgagtggcagcacaatgccctgaggcctgtgtgtgtcttccaggcgaacacagaggcctcttgttggtgatcctggaaatacaaatcaaacatttgctaagccacttgtcctacaggtacctgaaaggaacctacactcactgggcaggtggggtaggtgggtgagcaaaactcactcttgaactagagggaagaaggggcctcacctctctgggcctcggttgtgtcatctataaaatggtaattctcatacttgtttgggaattctaatacttgttttgctgtgtgttggtgagggtcagatgagatgatacagtacgttgtttggaaagctgaaacagcagaggcccattgtcatgtgaacagggtttcagtcatctacagatgttagtgcattgttgtgaaagttgatggcattttcatagactccgggggtcatgtagtccaccctacctcccaaaccaatgcataatctcccctccttgccccttcctggggtcgcacaactacctgggcagcagtgccttctgggctctccacctcagctctccccactctcacccacctttccccctcaccaacaccccagagtcccagcctagctgttggtgctgtgcaggaacccctgccagggactgtgcaaggccttgggcaccttgactctgcctctgtacattcgtgaaccaacaccagggctgcaacagccttcaagcccctcctgtcagccacatatggtttacaaatgtggcccatgttcattccagctcatgtgcagaggggctaagaagcctgtggcggttgagagctccttgcaagcagtctacacacggtgccttgtttttcatcattccaacctttattgcctctg

SEQ ID NO: 48281 - DNA, 1031 bp, Homo sapiens
cggattcctaggccccatcctgtagaggccctcactgaagcccgagaacttgcactgtaatacatggctccatggctctgggacagatggtcccatggttagagagtccctgctttagcaaagagcttaggcctggggtctccttcagttgttcaagctgtggtctggcctggcctggtctgccagcagcagcaattctcgctgacttctcgctccctctcttttctctctccactgcctgtgggagggatggacatccgttctgttgtctccttgaagctacctgtgcaagtcctgaggacccagccctgggcctgtggaaaggaatggaaaccacccactcaggtgtggtgccccagcctcgtggctcttcttgtcagccttcacaaagctgtgattcatactggaatcttgtaaatctctgaatggccaaatagaacagggctgggggtagagggcatggggtgactagtggagagagtcatgagctggaggctgcaggagtgaattgcagctcctccgacagccggtttgagcttggacaaggcatgcctcagtttctccatctctgaagtcaaggcttcagccagatcctaaggtgactttagtgctaacctgtcctggtagtggtggcagtcacacaaagacacgctggatgcacacagggacacaatctcccagaacacagaagcctcccacgtgctgctggtggttgggctgctgcctcggctgcctttgtttgtccccagtctctgtcagacctccactcagtatgcggcgcttggtgtctgcagcttccactcagcactccagaaacctgtttgtgagctcaagtcacactagcctccctaggggatatctttccacagaagcctactttcgaattgggcctaattgtagcatatatacctttaaataattttttttagtgtatttgaaacagctgtcattttgcatgtgcatcagctgaataaagtggagcagccatttgagctcctggtcaccccgagtctgcagcaggcttccttcac

SEQ ID NO: 48282 - DNA, 1037 bp, Homo sapiens
tatgactttgcatttggaaggagattttacaatgtgcattaataaataagggccattctgggcccgattcatacagccgttgtcaagtgctgtgttggtgtttcatggaaaccagctcccgtgatggtctcagatgtccccttaaagcggaagggacacagggtgggaagagggtctggaaaagtcagtgctcttaagcaataacatgcacaccagaccattgacatcataggaaggcttggtttctaaagtaatactaaaaggactgaaacactcacctggggtaatgcttccctagaaagcatggtgatctccaatgaaattagaaaaatggacggttaggggtttcttatgaagctaaacttactcaccttaaaggactatgctttattctcaatttcctttttacctttttactgttaaattgttattgtctttatcttttttcgtttgattttgttttgttttgttttttgagacatagtctctcgctctgtcaccaggctagagtgcagtggcgagatctcggctcactgcaacctctgcctcccgggttcaagcgattctcctgcctcagtctcccaagtagctgggattacaagcacacaccaccacgcccagctaatttttgtatttttagtagagacggggtttcaccatggttggccatgatggtctctatctcctgacctcgtgatgctcccaccttggcttcccaaagtgctggggttaaaggcatgagccaccatgcccagccctttccttcataaaatgtgggtgaagacagatggcggttgggttcttttagtgtgcgtgatcttgtctttccccccttttttttttgtataatttttttgtatagtagtccatgaaatccaggattctggccctaacaacccactctacccattctacagatggggaaattgaggagctgatagaatgacttagctaatggtgccctgctggcaagaggaggggattacagtctgggcctcaagctccccatggaaacttctggatgttggtgtttgggg

SEQ ID NO: 48283 - DNA, 1064 bp, Homo sapiens
gcagctctagaatgcagtttcagaacccaaatcctgggttctggcttaaaataagactggggcctagggattcatggagggcagggcatgggccgccagactcctgtcgagaggcccatttctcctcctctcccctcgcccctcgagctccagctgcaagttgccccagaggcctgtggcctactggaccagccgctgccctcgctgaggcaggaggggatggtgggcccggccagcctggcctggactcatgagggagctgagcttccctgaggtacttcttatatcagggctgtttccggatgacccctttgctacgtgttttactgcccttgtgtggtcaagttaaagaggttgttcaggaagtaggattacaacgggaccttgtcgtggctttgtaacctctgctctgtagatggcagggactgggcccacagggaggggccaagggtagtaaaatccagaatcttggaatccattcattcacatactcctttgccacaaagtgggatgggtgtgcttggccccagggccatgacccccttcggatcttgcagacttcttgcaaacttgaagtggcagcagcacatacaggctaatgactaagcagttcccactgcgctttaaagtcttgccttaggctttcaattgtgcttatcattcaaaatgctcttttttgcaaaagagcccattttgtcagttttcttcttgtttagatttaatgattaatcagaaaagtggttttttgtttttaggtttttttgtctggtttggagataacattggaggcttaacgcctgacagcagtatctgacagggcactttatcttaaggatgcttttcaccattccagctatgtattatccacatttttccggggaagaaaatgttctctggcgaccccttttttgtagtgtagtgtcctgggctgtcacgcccgcccgccagccctgcctgataagcgataagcgtcaggagttcagaaacatgtttttcttcacggctgacagtctgtctcaaaaaacttccatctcctcacttcctcgggctcctgatcccacccg

SEQ ID NO: 48284 - DNA, 1040 bp, Homo sapiens
tgctgtaaaaccccaatagtccccaaattgccagtaactccaacaagggaaaaaacctccaaactccagtgccctccagagcagccaagactctacattttaggcttctagtggcctcatgcaggcctgtgctgcctgccttttggtgtggtggtgggcattggaaagagcagctttgattctcctcagtggcaggtgggagtgatgattaaaaacagttagtaattaccacctcctctatggagagcttttagctggggacttgtgtgtgatctgcaaaggattcaggacccatgagaccttaggagtgcttcagctccttcagcatcatgcttggcacatagtaggtgcttagtaaacgtcttatagatgaataaatgaattagattagaaagagacttttctggaaagagttgttgcagccagattgaagggctgcaaataccatactaaggagttaattgagcctttggcccacaggcagtgggactccaggacaggtttgtgcagggagggacgtctgcacaacatgtgtcgcgctcaccccattatttgccctttccggtgtgactgagttgccagataatgaggtgttgggctgcacaaagcgcttccttgtgctagagagaggcagggcctgccttgaagccagttggccaccggcctcctccctgtaatttatgtgcagtggcaggttagagtgggctgccaggcagaaccagggcatgcccgcttctccaggtcaacaccttggtgtgctggttccagcataggggccatggccctggattgaggcctggccctgagctttctctgccaccagtgcgttcagggagaatggtttcttttcttaatttttttttttttttgagacggagttttgctcctgttcctcaggctggagtgcaatggcataatctctgctcacctcaacctccacctcccgggttcaagccattctcctgcctcagcctcccaagtagctgggattacaggcatgtgccaccacacccagctagttttgtatttttagtagagat

SEQ ID NO: 48285 - DNA, 2401 bp, Homo sapiens
tactcttcttgcatccctctgctgtaatttctccgctttcagcctttgctttggtgtccctagaagaggccctagagctggcttttctgtttctctgtctcccatctgcctcagagttccagaaatgagatgttaatgcagcacttgagttattttatagagaaattctgagcacagagttggcacatcccaagggacagctgcacaaaacgtgagtcttgtaactgtcatgtcttctcattctaacaccaagcattccttcccttcaaggatttgccgggctgtgtgtgctctgtttggaggaagagactggcggtacattggccctgatcaacaaggaacttaagtttccttgaaggagatcaggtgactgtcctctctaatctgacaatctcagaacatgactgattaccccagggcttaacccccatgacttgaccctatcctctctttgcccccagagcatttctgacccataaaaattagctttaaaagtcaaatctgaaacagctgtggtttcttctgatcagtcagcaaggtctaacttgcctgtggtcaagccttcccctgattagcttagcttgtgctgggagagcccagaagtggtggcctgtggggaatgggtaggccaggcttggccctagaaaataaactgggacgtgtgactttccaacagagctcgcatgctggctggctgacggcaacacaccctgtggctttgtgaggttggttgatggtggtggtaggggtgatgtattttctatttctttttttttttttttttgagacaggatctcactcctgtcccccatactggagtgagtggcacgattacagctcactgcagcctcaacttcccaggctcaggcgattctcccacctcagcctctcaagtagctgggactatagtcacacgccagcacacccaactaatgtttgtatttttttattgcccaggctgatctcaaactcctgggctcaagtgatccgtctgccttggcctcccaaagtgctgggattacaggtgtgagccactgtgcccagaaggttgtgcattttccgcaggacaaaggtggtggtcgtctctgacttcctagctttcatttggcctgtgctgactgagcaattgctatatgcaggccaccatcaggagctgtgtggatacagggatgaaccagggcctggatagtgcccgcccctgaaaagcttatcttttggttgaggacacaggaaccaaggttgaaacccacatctgtatgtcagaatttatctgtaaataaagtggtgtgggtgagctaaaagctgtcttggcacagagactgttctgggcagggccttgatttcatggagccacaggagatgcagggtgaggaggaggtatttgagtaaaaaaggtacaatcacttgaattaagggagttttccactacagtaatattagctaatacttttattatacatactctgagctaggtgcagttctgtgtgctttgtatgtaactttactcctcactacagtcctttgaggtagctactactactgctacttctattttcatttttacatatgaggaaaccaaggcacagacaggttaagtcacttgtctaaagtcaggtcggtggttcatgcctgtaatcccagcacttcctgtaatcccagcacattgggaggccaaggtggatcacctaaggtcgggagttggagaccagcctggccaacatggtgaaacactgtctctattaaaaatacaaaaattagctcggcgtgttggcacatgtctgtaatcccagctacttgggaggctgaggtgggagaattgcttgaacccgggaggcagaggttgtagtgagccgagatcaggccactgcactccagcctgggcaccaaagcgagacactatctcaaaaaataataataataataataaagtcagacagccagtaagtggcagagatgagatgtgaagccagatctagcatctgtttgtaaccactgtgccatactacctcaagctgcacaatcccatgcctgaatttgctttatcatctctgccttatttgtggctagacttactctttgtaaaatgtcccctctgttggcatggtagaagtgactgattccaacatttatgtaagtattccacagcttaaagggcactttcacaccggtaatttgtttgcttctcagagccactctgcgaggaatgggctgtaatctcccctttgcagatggagaaacagaggctcatggggaggagtgcattcttccctgcctcacagcagaggcagagctggtggccagtacctgctgtgtgtgttgaccttgtgttgaggccagtgccctttgtgccggggtggtgtggaggtggcgtggccgaatctggagtctacaggaagggtga

SEQ ID NO: 48286 - DNA, 1938 bp, Homo sapiens
tcccctccaggaatactggcggcttggcttcctttatcatgtttcatctgagagcaaaaatgtcagatcggatgcacagaaaaatggcccaaattgtttaataactagaagaaatataggagcagcaagagggtaatatggagaggggagggcctccatgaccggtgtctgcagagccaggggtacaggcacccagtgttgtggcctggcaccaccggcctctcagagcgtgggtggcccactgtctttacccggaggacagcaggcctgatcaccagcttttctacctgtccctgtaagcatcacgttgctagaagaaaatctcatgccagagcttgcaccatccctagcttgggggttaggggttgtctcttggtgacctaaatgaaaaaataggtccagatcagagttcctgacgcagagcactcacccactctttgaatcgtgggaggggaggcctggttttagttaaacctaacctctttgaggaaccacagagcccaagactggaagccttcagaatcttctggcccccaaccctccctggggacccctgtggcctgtctcaccagagcactcttctgtctgtagatgtctcagctgctctacaagggagtcccatttcaggtgtggggctgggcatggtcactcctgctggatgtctagaaggtggaaactaaggacctaggaaaatgccagatacagcctttccaccctcatccagagcaggacaaacaggcccggtggtgtcaggagcccaggtctccagctggagggaacgtcaaccctgcagtgggagcaggggcccatcgcacatcctaggcacagatgctaatgcaggcactgcaggtaagctgggcttggtatccttccctggcttcagaaagaagccaacaaggagcgttttgcagaatgaaacctttgtttccagaagcactgctgactgtaagtggttgccgtttgtggcagtgagcattttgtccattctgaggttggattggtttctccttttggccttgccctgccctacagaccataaaggagaacagcaagaagcccccagcaaacatccacatatggccctggacatcagccacattctgaggaacatgtcatgttctgggagggctaaggcatcaagtaaggcctgtggggctggaggatccaaggcaaggtggggcaatccagagccatgggggcttcccatgggaattgggaggtcccaaggcagagtcagaggttccacaggaggagtcagagagtcaccaagggctctcctggcccagggagcagtcaacaccatggactgaacacttgctgggctccaacccttgggccaggctgcccatgtggggccaggaggcagctcagagtgggaggcagagagagaagtgtgctcagagggcacctgtatctggatgtaatgtggtcctgagactctggctgggaagtgcttccagggtatcatatgtgttatgcagctacttcctctccccagccttaccctgtaggaattctagtgactatgttgccaccatcttggagctccatgccctcatagtgtaatggcaccagcagatctgcctgtgcacagacttcctgtactacctcactcctgaggggagatgcttctgcgggcctgcgacctggtgctcaactttagacaccatcatcctggagcggcactgcaccctcactagccagggtgttgacgtcctcaaggccaaggccacattcaagactttggacttcattgatgcacttgtgccgagcaaggtgggcatctctgggatcttaattcaggaggtagaatgcagcttgagatcaagtgtctgatcaaagaacttgaacttgatctggagggctctggggagccatggaaggttctggataaaggagggacagtcagccacgttttagagatgactgtggaaggct

SEQ ID NO: 48287 - DNA, 1031 bp, Homo sapiens
ttctggcaaaatttttcctttcagttgagaatgcttacccattgcctgcacaagcattgtagcttggcagcagttaacttgctttatagttcagaggcttatgtgcctaagggactgtatagccttgtgtcagatgagactttaagctttggacatttgtataaatgctggaatgatacaagatttggggggactgtagggaaggcatcattgtattttgcaatgtgagaaggacatgagatttgggagccagggacagaataataaagttaaaggtggggcctggtggagggtgatttaatcatggtggagagtgtgggttggaaggtggggggtagggagaatgaggggattatggtgggggtgaggggtgaaaagtggtggtgggaggtggatccttcacaaatgattaaacaccatctccttattgctgtgcttatgctagtgagttctcttcgtgattttggagctgtgagattgaatggatactggcctcctgggttttggacttgcattgggtgtgtggttctatttgtggttttttcctgggaaatttcttccctttgaattgagaaagcttacccaatgcctgtaccatcattgtaccctgaaagaaaagaacatccttttaaattcagggactcataggtgcaagggactgtagacttgtctcagatgagatgttgaactttttacatttgagttaatgctggaatgagttaagacttttggaaacttttgacaaggcatgaatgtattttgctctgtgagaaggacatgagattctggggtaccagggtcagaataatatggtttggctgtgtttctttaccaaaactcctgtggaatgtactccttaatgttggaggtggggcctggtgggaggtgatgtaatcatggcaggaggggtttggggttggaaggaaaaggggtgggtagggtgggaagtaggttggcagtagggtggtgggagggtggtgggtagtaggaagggggagtagtctgcttcagaggcagaggctcatgggaaa

SEQ ID NO: 48288 - DNA, 1052 bp, Homo sapiens
gatctgcctctgcatcaggcttctgcctggaaacagtgggagttgggggtggggggcaaatccttcaccaatggttaaacaccatctttttgatgctgaccttgtgagttctcatgagatctgcttgtataatagggcatggcacctctttcctctctctgtctttctcctactcctgccacgtgaatcatctcattgccccttgacattctggtatgattgggaggcttcctgagtcctcccagattcagaagccagtatgtttccttacagcctgcagaatcatgaggttctttatgatcatagagaaaattagtactgggaagtggatgtatgaaatgtcttcaaggccttttccctattgtcttgggagtcagtactcagcttcttttcattcaagtatctgagggcttcttgaattttctccctgaaaatggacttgtcttcctttaccacattgccaggctgtgacaaagatagctgataatgtagaagcaggttcagaagggggtggcagacagagatcaggagagtttggagggcttcgaagacaggaaaatgaagaaaagtttggatctttgtaaagaattgttaactacttgtgatcagaaggctgacaggaaaatggccagtgaaaaccagacttggaaggtctcagataaaaatgaggaacttcctgggaacagaagccaaggttacttttattttgctgtagcaaagaacatggctgcatggtgaccctgccctggagatctgtgaaactttaaacttgaggttgatgatgcagtgcatatctggtggaatgaacttctaggaagcaaagctcaagaggtgtcctgtctgcattgaacagcctgtgctctgatgtgtgactgagaaaatgacctctggatgggacttatattaaatgagtcccaactcttatgttaaatgagaaacaggactcaaaagtttggaaaatttgcagcctggccaagtggtcaaaaagaaaagctgattttcagggggaaaattcaggaaggcttcagaaacttgcatgaaaaggagcccag

SEQ ID NO: 48289 - DNA, 1816 bp, Homo sapiens
aggcacagcttgggtcactgcttcaggggtacaagatgcaagccttggtggcttctacatagtgttaagccagcaggtgcacagagcaaaagaggagagccttgggagccttcgtctagactccagagcatgtacagaaaaacctgggtttccaggcagaagcttttccaagaggcagaccctcatgggaaagcttttctagggcattacagaaggaacatatagagttggaacccccacacatggaggcaccattctgcaaacccagattcatagacctaccaacagcttgcaccctcagtgtggaaagctacaagtgctcaacactagcccagcccatgagggcagctgtgggggaaagaccctgcaaagccacaggtgcagagctacccaaggccttgggagcccagccatcacacccctgtgttctggatgtgggatttggattgaaaagtgatgatttggagctgtacaatggaatgactggcctgctgggtttttgacttgcatcggatctgtaagtctcatctatattttgtgcttctttctggcaaagttttttcttttggctgggaattcatacccaatgcctgtacaatcattgtaccttgaaagtaattaacttactttgtatttcagaggctcagaggcagaagggactgcagccttgtgtcagataagactttgggctttggatacttcagtaaaggctggaatgacttaagactttgggggactgtagagaaggcatcattgtattttgcagtgtgtcaaagatatgagatttgggggaactagggtcagaataatacgatttggttctgtgtccctaccgatactcatgtggaattgtaatggggaatgtgaaagttgggacctggtggaaggtgatttaatcatggtgaagcatgggggttggaggtacgggtgtggggagaatggtggagattattttgggagtggggtcaaaagatgaggatggggggtggatccttcccaaatggttaaacactatctccttaatgctgtctgcatgatagtgagttctcttgatgattatggagctttaagattgagtgaatactgtcctcctgggcttggacttgcatttgtgttatttttctgggaaatttattccctttggattgagaaatcttacccaatgcctgtactatcattgcaccttgaaagaaaagaaatcccttttgaattcagggactcataggcagaagagaaggtagccttgtctcagatgagactttgaagtttttacatttggaatgagttaagacttctggaaaattttgaaaaggcatgattgtattttgctctgtgagaaaaacatgagattctggggtatcagggtcagaataatatggtttggctgtgtgtccctgtgaaactcatgtggaattgtaatcccaaatgctgaaggtggggcctaggggaggggatttaatcatggatgggagggagttgggggtggaaggagaaagggtgggtagggtggggaggaatgggttggctgtagggtgatgggagggtggtgggtagtaggaagggggagtaacctgctgcagaggcagtggttcatggaaaacctctactaggacagtgcacctgtgactttacagggtttagcccctgtggctgctctcatggggtgggctggtgttgactacccatacctttttcaaactgaggctgtgagctgttggtgggtctatggatctggggtctggaggttggtggccatctgcgtgggggctccaagcccatattttccttccacatttccctagtagaggttttccaa

SEQ ID NO: 48290 - DNA, 1621 bp, Homo sapiens
cttccacatagtgttaagtcagcaggtacacagagcacaagacgagaaacttcggagtcttcatcttctagactccagagtatgtatggaaaatcctgggtttccaggtgaagcttttccaacagacagagcctcgtggtaaacctctacaaggatggtatagaaggaacatatacggtgggagcccccacactgggaggcaccattctccagaccccagattcatagacccaccaacagcttgcacccttagtgttgaaaagctactggcactcaacagcagcccagcccatgagggcagctttggggaaagaccttgccataccacaggtgctgagctgcccaaggctttgggagaccagccattaaaccaccctcttctctggatgtgggatgtagattcaaaaaatatgacttggagctctacgatggaatgactggcctgctgggtttttgacttgcatggggtctgtaagtcccatctgtgttttgtgcttctttctggcaaatttcttccttttggctgggactgcttacccaatgcctggacaagcattgtaccttgaaagtagttaacttgctttgtatttcagaggctcagggatagaagggactgcagccttgtctcagatgagactttgggctttggacatttgagtaaatgctggaatgagttaagacttcgggggactgtagagaagacatcactgtattttgcaaagtgaaagtaacatgagatttggaaggccaggggcagaactatatgatttgtctctgtgccccaaccaaaactcatgtagaattgtgatggggaatgttaaaagtggtgcttggtagatggtgatttaatcacagcggacagttgggattggaagtgagggtgtggtaagtttggggggtttatgctgggggtgggggtgaaagatggggctgggggggcagatctttcacaaatggttaaacagtatctccttaatgctgtctgtgtgaaagtgagttctcgtgatgaatgcgtacatactctcctggcttttgggcttgcattggacctgtgtcccaattgtgttatttttctggaaaatttcttcccattggactgagaaagcttacccaatgcctgtaccatcattgtatcgtgaaagagaagcactcccttttacattcagggactcagaagcagaagggactgcagcctcgtgttgtttgagactttaatcttttttatatttgagttactgctggaatgagttaagacttttggaaacttctgaaaaggcttgtttgtattttactctgtgagaaggacatgagattcaggggtgtcagggtcagagtaatatggtttggtggtgttttcctacaaaagatcatgggaaattgtattcctgaacgttggaggtggggcctggtgggaggtgattgaatcatggatgggagggggttgcgggtagaaggaaaaagaagtgggtagggtggggaggagtaggttggcagtaagctggtgagagggtggtgggtggtaggatgtgggagtagcctcctgcagaggcagagcctcatggaaaacctctactagggcggtgcacctgtggctttgcagggtttagtaccttggcggctc

SEQ ID NO: 48291 - DNA, 1021 bp, Homo sapiens
agcccccatacagggaggcgccattttccagaccccagattcatagacccaccaacagcttgcactcttagtgttgaaaagctattggcactcaacagcagcccagccattgagggcagctttggggaaagaccctgccatgccacaggtgctgagctgcccaaagccttgggagcccagccatctcaccaccctgtgctctggatgtgagatgtagtttcaaaaaagattatttggagctgtaggatagaatgaatggcctgctaggtttttgacttgcatggagtctgtaagtcccatctgtgttttgcacttctttctggcaaatttcttctttttgtctgggaatgcttacccaatgcctggacaagcattataccttggaagtagttaacttgctttgtatttcagaggctcagggatagaagggactgtagccttgtctcagatgagactttgggctttggacatttgagtaaatgctgggatgagttaagactttggggggctgtagagaaggcatcattgtatcttgcagtgtgagagggacatgagatttggggggccaggggcagaataatatgatttggctctgtgcctctaccaaaactcatgtgtaattgtaatggggaatgttaaagctggggcttggtggaaggtgatttattcatggtggacagtgggggttggaagtgtgggtgtgagaagaatgggggttcatggtgggggtggtcgtgaaacatggagaccggggcagatccttcacaaatggttaaacactatctccttaatcctgtctgtgtgatagtgagttctcatgataaatgaatactctcctgctggcttctgggcttgcactgggcctgtgtcccaattgtgttatttttctgggaaaatcttccctttggattgagaaagcttacccatcactgtaacttgaaagaaaagaactcccgtttcccttcagagactcataggcagaagggactgcagcattgtcctggatgaaacttgaacttat

SEQ ID NO: 48292 - DNA, 1177 bp, Homo sapiens
actagttcagaggcttgagatcctccatatatattttggaagatatatgaaagtgcctgggtgtccagacagaaggctgccaaaaaggcagagcctcatgggaaacctctactagggcagtgcagaaggaaaatatggggttggagcccccacactggaggccaccatcatgaagaccccagattcatagacccaccaagagctttgcaccctccatgggttagaaaccccaggcactcaacaccagcacagcccatgagggcagctgcacaggctgaacactgcaaagccacaggtgagctgcccaaggccttgggagcccagccctcacgcccttgtgccctggatgtgggacaaggattaaaaaaggatgactttggagctgtgggtttgaataactggcctgctgggttttggacttttcatggagcctgtaagtcccatttatgttttgttctctcaggcaaaaatcttccttttggctgggaactcaatgcctggacaatcattgtaccttggaagtagttaacttgtttgtatttcagaggctcaggggcagaagagactgccttttctcagatgagacattgggctttggacatttgagtaaatgctggaatgagttaagaccttgtgggactgtaggtaaggcatcattgtattttgcaaagtgagaagtacatgagattgggggaggcagggacagaataagatttggctgtgtgtccctacagaaactcatttggaattgtaattggaaacgttaaaagtggggccaggtggaagatgatttaatcatggaggacagtgggggttggaaggtggggattggggaggatggggggattatggtgggggtgaggggtgaaaggtgggtgttggggaggatccctcacaaatggttaaacaccgtctccttaatgctttcctcatgatggtgagttctcgtgatgattctggagctgtaagattgaatagatactgtcctgcttggttttggacttgtactgggcctgtgatcccatttgtgttactttcctgacaaatatcttccctttggattgagaaaatttacccaatgcctgtaccatcatcgtaccttgaaaaaaagacctccctttgaaattcagggactcataggcaaaagggactgtagacttttctcagatgagatgtt

SEQ ID NO: 48293 - DNA, 1411 bp, Homo sapiens
cctggtgggaggtgatttaatcctggatggaaggagggtgggggtgtaaggaaaaaggggtggggagggtggggacgagtaggctggccataggatggtgggtagtaggaagggggagtagcctgctgcagaggcagaggctcatggaaaacctctactaggacagtgcccctgtggctttgcaggctttagccccgtggctgctctcatgggctgggctgttgtttaatgcctgtaccttttccatactgagagtatgagctgttgttgggtctatgaatctggggtctggaggatggtggcctcctgcataggggctccaagcccatattttccttctgcactgccctagtagaggttttccaagaggctctgcctctgcagcaggcttctgcctggcaacagtgaggggtggaagtgtgttggggggtggatctttcaccaatggttaagcaccatcttcttgatgctgaccttgtgatactgagttctcatgagatctggttgtataacaggctgtgacacctctttcctctctctgtcttgctcctactctggccatatgcaacattttattgctgcttgtccttctggtataattgagaggcttcctgagtcctcccagaagcagaagttactatgctttctttacagcctactgcagaactataagccaattaaacccctttttgttatgatcttacagaaaattagtactgcgaattgaagctatgaaatgtcttcaatgacttttccccatcacattggctattaatactggtcttccttttagtgcaaatatctgaagccttcttgaagtttgcccctgaaaatggactttttttccttctacattgccaggctgtgacaaagatagctgaaaatataaaagcaggttcagaagtggctaacagccagaggtcggagagtttggaggacttggaagaagacaggaagatgaaggaaagtttggaccattgtagagacttgttaaatacttgtgattaaaatgctgacagaaggagggacagtgaaggccaggcttatgaggtctcagatgaaaatgaggaacttactgggaacaggagccaaggttacttttgttttgctgtaacaaagaacatggctgcagggtgaccttgccctggagatctgtgaaactttaaacttgaggttgatgattcagggtgtatctggtggaatgaacatctaggcagcaaatctcaagacgtgtcctccctgtgtcaaacagcctgtgcctttatgtgtgaccgaggaaatgacctcaagttgcaacttatatttaaatgacaagcagagctcaaaagtttggaacatttgcagcctggccaagtggtcaaaacaaaagctgattttcagagggaaaattcatgatggctttaaaaatttg

SEQ ID NO: 48294 - DNA, 2049 bp, Homo sapiens
tctactgctgccacatgaagcatttccttgccccttggccttctggtatgattgggaggcttcctgagtcctcccggaagcagaagccactatgcttcctttacagcctgcagaaccgtgagccaattacacctctttctttatgattgtacacaaaattagtgctgtgaagtggagctatgaaatgccttcaaggccttttccccattgtgttggtaaccagtactcagctgcttttcatgaagatatctgaagcctttgtgaatttttcccctgaaaatggacttttcttcttttaccacattaccaggctgtgacaaagatatctgagaatgtagaagcaggttcagaagtgggtaaaacagagaggtcaggagagttgggaatgcttagaagacagcatgatgaggaaaaatttggaccactgaaaataattgttaaatacttgtgatcagaaggctgacagaaagatggacagtgaaggccagaattaaaaggtctcagatgaaaatgaggaacatcttgtgaacaggagccaaggttacatttgattggccttagccctggagatctctgaaactgtgaacatgggggtaacgatttaggatgtatctggtggaatgagcatctaggcagcatagctcaagaggtgtcctctctacatccaacagcctgtgttcttatgtgtgacctaagaaattacctcaagttgcaacttctatttaaatgagaagtagagctcaaaaatttgaaaaatttgcagcctagccaagtggtcaaaaaggaaagctgattttcagggggaaaattcaagagcacttaaagtatttgcataaaaaaagagcccagtgcaaatagccaagactatggggaaaaggccttgaaggcatttcagagacctttgcagcagcccttgctgtcataggccctggggaagaggagagaattgtttcctgggccagctccatggcctggctgctgtgtgcatcctcaggacactgctgcctgtatccctgcagatccggctccagccatggctgaaagatgcacaggtacagcttgggtcactgcttcagaggtggctccaagccttgatggcttccacatagtgttaagccaggaggtgcacagagcaagagactagaggcttgggagcctctgtctagactccagaggatgtacagaaaagcctgggtgtccaggcagaagcctttccaagaggcagagcctcatgggaaacctttactagggcgggaaagaagggatgtatcaggtggaagccctcacacagggaggcaccatccttcaaaccccagattcatagacccaccaacagcttgccccctcaatgtgggaaagctacagtcactcaacaccagccccgtccatgagggcagctgcggggactgatcactgcaaacccacaggtggagatctgcccaaagcctttggagcccagccctcacactcctgtgccgtggatgtgggacaaggattccaaaaggatgactttggagctgtaggattgaatgactggcctactgggttttggacgttcatgtatcctgtgagtcccatcggtgttttgtttttgtttctggcaatttttcttttgttggctgggaatgcttacccattgcctgtacaatcattgtaccttggaagtagttaacttgctttataattcagagactcatgggcggaagggactgtatccttgtctcagatgaaactttgggctttacacatttgagtaaatgctggaatgagttaagatttgggggactgtaggagaggcatcattgtattttgcaatgtgagaaagacaaatttgcaggggcaggcacagaataatacaatctggctctgtgtcccactgatgtggaactgtaatgggaaatgttaaaggtggggtgcaggtggaaggtgatttaatcatggtggagagtggaggttggaaggtgggggtggtggggcgaattggggaaaattatggtggggttgggggtgaaaggcgggtggggggcagatccttcacaaatggttaaa

SEQ ID NO: 48295 - DNA, 1760 bp, Homo sapiens
agatggcactggggccctacctccagggcagaataactgatttaccctgactggcagcgagtgaggttggtggctggtccacctgctcctggcacacccttgcagaggtggctggttgctctttgagccagcttggccttgcctggcatgcacaggcctcaatgcaaccactgtgctgcagatggagccacatagaggaaatgagcagcaggctcaggagcaggctgtgcgctgcctttggggctccagtccatgcatgagggctcctacagcactgtgggcttcttgggtgccaagaggcagaccgcaggccatcttgagaaggactccatgttcaagtgcagaaagggcccaatctcgtggatgaaccacatggccagcttctgggtgcaggcacagtgccacgtcttccatcacttcgtgatgtgccacaccagcactgaagagacagcctggagacagggcaagaggaaggctgcgaaggatgaggtggtgaattccagcttcttcctgaccctgagcccacccccaaggtggccctcaacctttaagagtgggagagcaaaattgacggcttcgagcgcttcaccaagaagatggaccacagggcactcagctcaacttctcagccaatgagttgacatgcaagcagattatggtgacgggctttaagaaagagcatcagaaggtggccagctcttcagcctcagccaggtcttggagctggaccaggccatcacttcaccagagatgccttcaacaccgtcggtgagctctttgccaatcagcccagccaggaactggacccagtcatggacctgttagtgctgtctctgggacaccaggtcatcatcctggacatcatccacatacacaaggaagctcttaccaaagtcatggagagcaggcaacatgtggcagaagggaagacagagatgcagaggctgatgacatcagaatcacaggaacaggatttctttggacactgtggctgaaattcaccacttccatccaattccagtgagaaacatggactcacagatgcagcatttcttgcaacaagagatactattttttcaaaaggtcacccaggaattgatagtgttgaatgactagatactcgattgtgcactgtttccagttcaaggatgctttctacagcagaataataacactagcaaagagatagtgccaggtattggcggtagtacaaggatggctttgttctcaattgaaactcggctgaacatagaattgtgtaggaaacagttaatatggcgatagaatagaaacagtagcaaacatgacctaaaccatgctatgaattcctacactaccattgtaacttttggaagaatgataccacttactttattgctttttgaagtatgaatattttcgtgtatatgctgtagacctcaaaccctgtgaagagtctcaaagaagctggctggataaagcctgctgtggatgtctttatattcaaagattgatgatgcaatttgaatatgtgtcctcaccaaatctcatgttgaattatatttcctaacgttgaaggtggatcctggtctaaggtgattgaatcctgaaggcaaatttctcatgaatggttcagcaccatccccttgctactgtcctcacaatcatgagtgacttctcatgacacctggtcattgaaaactctatgtcacctccctactctgcatgttttcctcttgccgtgtgagacaactgactctttctttgccttgcacaaagat

SEQ ID NO: 48296 - DNA, 1163 bp, Homo sapiens
aaggcctcacccagtgggtatcttgtgacctagtcattggaagcctagtcagtggggacctggtcagtggtgctcttattagtggggcctgatcggttggaacataaacaataaaaaactggtcggtggggtgtattcagtgtattaggggtctggtcagtgtggggccttagtggcttggagcctggtcagtgagagcctggtcagagggggctcagtcagctggggactgatccatggagaattattcaatgggggtgaggtgagcagcaacctggtaaattgtggtcttgtcagtgcgaacccagtcagtggggaccaggtcagtgggaaattggtcagtggggtctggtccatgaggcctactaatgggggcctggttagggagacatggtccgtggggacttggtcagtggggcctggtcaatgggggagtgctcattaggggcctcgttggggccacctggtcagtaggaacctggccagttagccgatgtgtgacctcaggcagggggtttgtctgtggagcctctttgcctccatctgtagggaaggtgagtcagggcaccctggagggtggctggaaagagaacgtgagaagatgtgttgaattcagcactgcttggcagacctccaactttacacagtacctgggttccacctagaaagggtgccagccctctctgctctgctcggcacccctcctctgtctgcatccccaggaccaccctcagtggagagggaagaaattggggagcacctgtgggaggctctaatcctggccctgggccctggtggtgacagtgatgaggacctgggtgcacctgtgagtggagcagctaggcctggccagagaagcaagacaaacaaacacacccatatgtacacacacacacgcatacacaaacacaatgcatgcacacatgtcagttcaggggatagaggacaccgactctgggccctcttgacccaagcaggctcctgttgtggtgggttgtgtcaccccacaatgtcactcttgctgagtccccatcgcctctgtgttgtggagcagttagagacacgcagcagtctctgtgagtggctctgcatgaaggattgttttctaggtgaaaggcacatctcaacacagctgactgatcggactcaggtgagtgggacct

SEQ ID NO: 48297 - DNA, 1082 bp, Homo sapiens
cacgtggctgttgagtacatgaatgaagaatgaaaaagctgtgatatttaaccacaattggaattaacgccatgtgtaaatgatttaatagtaattttgtattgtaattgcacgtacatatttctcattcttattaactctgataacgttctcaactccacattttaaacttacacttcgttaactgaaatgttttaggtaaagaacataatcctttctttttctttccaggttttgctatgttgagcacttgctcccgtctactttcttttgtagaatccactggtaagccacatctaatgaagagattaaccataaaatcttaaggaaaagttgtatgatttaaaagatcataaaactttattactgggctatttacatgaaattttaattgtttctcatataatataaaacatcataatctttactaaagtagaatattttcatgtcacatatggtgtatatttatatgttattttaaatgatgttttttagcctccttaagttttaagtggatcttgcaaatgaacaccagcgttattgagtttggcctactcaaattgcctgaatgtcagctgtttaaacagccaaacaaccaagtcatcattgatactttagtaaaggtcatcgagggcttctttgcattttacagtttttattaccatatgtagtaggagacttaaagagtatctgccaggtttgtccatactagtgttacggttttcttcttgtagctcaatagtattttgtgtggagatactttgaagctctgtaaatatctggttactcctcaaaacccactagatttagcatttcatggatgacttgtgtttgaacaagtattactgtgatggttgccagatgattgtttttcttattttcttctttgttctacatggagaaataaaaccaataaataaaggagaagggaaagctcatgattctggtgctccagttccccaagattaggccagtggtagacatttcaagctgactttatgtctttttgaattgtccccattattctgtcagcacttttttactttctggcacaaggtgttctaaactaatgtattttctct

SEQ ID NO: 48298 - DNA, 1062 bp, Homo sapiens
catttaaggaggaacaaaaatgaattatcagaaaaataaaagtaaaagcaagtgcaaaagttctgtggcaaagatgatgacagtaaagcacatttttgtgactcatggtagctttaactttgttcttaaaattctgagtaatttaagggttcacatttgaagaatctactacattatagataacattttatttcaagtcaatgcatttcaaaatttgctattggttttgtattggattattctcagcctacttcattatcaagctctattattttcttaatgcagtttaatgatcttgtggccgagaaggaagctgtgtcttcagaatgtgtcaatttggccaaagacaatgaagttcttcatcaggagttattatctatgagaaatgtacaagagaaatgtgaaaaacttgagaaggataaaaagatgttggaagaagaagtattaaatcttaagacacatatggaaaaagatatggtagaacttggtaaactacaagaatataaatcggagctggatgaaagggcagtgcaggaaatagaaaaattagaagaaatccatttacaggttagtttttaaaatcaggtaagtttatctgtaatgggctttcatttatttcactgcaaactatattttggatatgtatatattgtgtttcctctgcctctcttacagcaatttccttcgtagagttctagaaaaaaagtgacttttttccttttaaatatttaaatttccattattattataacaaaatcaatctttcaaagtaatgattctcactatagagtaaaagggggaatttgatgattaagaccaggtggcataagagaaaactgtgatttagaaattatatgatacttttgaattggtcttaagctacgttgttcattgttcactttttaaaattataaatggattctattactttttataggacaagattacattaatactaacataagtatgatttcaaatttttttaaatcagacaattctgaattcagttattagttttgttgatattgctgataaatattttaagcttcagcctcttttcaa

SEQ ID NO: 48299 - DNA, 1052 bp, Homo sapiens
acagctgcctggcaactcccaagatggctggcgctcccagcctggcagaaccggggctacatgtcgccctggctgcggccaagccaggcggtctacccggcggcggctgcaccgggacaggaaccgaccccccagtcccatccccggtggctgcggagggcccctgtcagcggccccgatctctcttcggaggaggagcgggtcgggagtcagggccaggcaggccctcaggcgggaagggatgcactcctgggattccgggacgtcccgcgggagcccaggagaacccgcaagccagcgacgcgtgcgcccgtgctgcaggtgccccctgccggccacgagggcttgggagcggcttccggagtcccggctggcgctgagttgtaggcgcgcgcctaactggcatcgcggggactcactcggtctgagagttcggagcgctgaggttcaggcgcgcgcctaacggcttagctgggctcactcggtctgagaggtcggagtctgcgagtgtcgctgctgaaggctgtggtggaccgggctggatcgcggattctgagctacattgcgggtttgggggtggatcttggatttgggggtggatcgcgggttgcgggggggatcgcgggttgcgggggagatcgcggatttggggcggagtgggggtggaaaggccacgaggagccgccgcggctcaggagcgggtggtgggcgtctgagaagtcgccaccatgaggaagctcttcagcttcgggagacgcctgggccaggcgctcctgagctccatggaccaagagtatgcgggtccgggttacgacattcgggactgggaactgcggaagatccacagggctgccatcaagggcgacgccgcggaggtggagcgctgcctgacgcgcaggttccgggacttggacgcccgcgacagaaaagacaggtagctcggggactcagcccgcggtgggagggggccgcaggcccggcttccctgcagcccggcagcccctggggcggggaccttggagggcgccgggcaccctcggagcagcggagcc

SEQ ID NO: 48300 - DNA, 1039 bp, Homo sapiens
gctgcctggtcgttcctatggaagcttcgtctcagagggacaccctgccgtatgaggtgtcagtctgcccctacttggaggtgcctcccagttaggctactcgggggtcagggacccacttgtggaggcagtctgtccattctcagatctcaaattccgtgctgggagaaccactactctcttcaaagctgtcagacagggacgtttaagtctgtagaagtttctgctgccttttattcagctatgccctgcccccagaggtggagtctacagaggcaggcaggcctccttgagctgtggtgggctctacccagtttgagcttcctggctgctttgtttacctactcaagcctcagcaatggcgggcgctcctcccctagtctcgctgctgccttgcagttcgatcttacaaagtattagtgagacccaaattcatagaaagatttccatgacatatatcatttaagtgaaaaaagaagttggagaaaacgtgcactgtgcaaaaataaagtacgtgtgaatataatgttaaagaactcaaagtgcattcactgatctggttattctagggaggagaacagattggcaaaagatgacttactcattttattccatatatttagatatttgaatttttacaaggacacattcatgtacataaatacataggctgttaggattgctcatgcctgtagtcccatgcttttagaaaccaaaatgggaagagtgcttgaggtcagcagttttcatttgttttgttttttgagacggagtctccctgtgatgcccaggctggagtgcagtggtgcgatcttggctcaccgcaacctctgcctcccaggttcaagcgattctcctgcctcagcctcccgagtagctgggactacaggcatgcgccaccatgcccagctaatttttatatttttagtagagatgtggttttaccatattggccaggctgggctcgaactccgaggtcaggagttttagaccaaccagggcaacatagcaagacctcatctcaagaacaacaacaaaa

SEQ ID NO: 48301 - DNA, 1064 bp, Homo sapiens
ctgcatcaattgaaataatcacgtgcttattcattttactgttagagtatattacactgattgattttttatatgttgagccacccttgcattttggggataaatctcacagggtgatagtttacaatcctttgattatacagtattgctgctagtattttgctgagatttttgcttatatattcataagggatattgtgctgtagttctctttttgtgctctctttggctttggtataaggataatgctgttatcaaaaaatgaattagcaagtattccttcttcatatattatgtcagaagagtttgagaagaaatggtattaattcttctttaaatgttaggttgactcaccagttaatgcagctatttggtcataaatgtttctttgttaatcactttcgattactaattcaatctgctaggttataggtctattcagattttctctttcttcttgagccactttggtagtttgtgtctttctagtgattcgtccatttcatccaggacagctaatttgttgttagacagttgttcacagtatactcctgtaatccttttgtatttctgtaaagttggtagtaatggctctgctttcatttattattttaataattagtcttccatcttttgctcagtcaatatagtgaaaggcttgatctttcaaataatctatgtttattcattctactgctctccaaacttctattttattgatttatgctctaattatgctctctattatttctttcatactgctagctttggatttagtcttattttgtcttcttccactgcctttaggtatagagtgaggatgttgatttcagatttttcttaaatgtagttatttatatccataaattttcctttgaactctactttcactgcattcaataagttttggtatgttttgtttttattttaatttatctcaagatattttataattttgcttgtgatttatttttttcactcactggtagttgaagactgtattgtttaatttccacattttcgtgaattttccagttttcacttatttatctgttgtttcttcc

SEQ ID NO: 48302 - DNA, 1066 bp, Homo sapiens
ccacttggggcctaatgttcatcgggaatctgatatccacctggggccttgtaattacctgggttctgggcatccacctagggcttgagtatcctcctggggccttgagttttactagggactcgtgtctgccttggacctgagtgtatatctgttgcctaatgtacaccttgagagtgatgtcaacctggggacagatgtcctcttggggtctgagtgtgcacctggtgcctgacgtctgcctagggacttgtgttcacctgacacctgatatccacctggggcctgggtgtccacgaggggctgatgttcagctggagactggatatccacctggggcttggggatccatccagaaactgatgtcaaactggggcctgatgtctacctgcggactaggtatccatgtgaggcttgatgttcatccatggccagacgtccatctgatgcttgatgtccaccttactcctgggtgtctactggagacctcatgtccaactagagcttaggaacctactgggggcctcgtgtaaacctggggactggtatgaagctgggtcctaatgatcccctgggtcatattattcacctagggcctcatgtccacttggggcttcagtgtcaaccttaggtcttgtgttcatctttgacctggtgtacacctgggacacctacggacttggtgtccagttgaggtgtcatgaccacctggggactgaatgtcaatctggggtctgatgtaaacctctagttcagtatccacctgggcctggtcttcgcctggggcctgcggtctacctgggccttgctgtcaacctagggcctgatgtaaacctctagttcagtatccacctggggccagatgtcttcctagagacttatattcacttttgacctgatgtccacctggggacttgctatccatccatggtctgatattcacctggagacagatgttcaactgtggccagaagtgctcctggggtctgggcttccacctggagcctgatgtttagctggggctagagttcacatggagaatgatgtccacctgaagtttgatgtt

SEQ ID NO: 48303 - DNA, 1050 bp, Homo sapiens
taaaaagagactactgagatgtgcagaggacagacaataaagcgtcttcgaatggtagataaatgtgtttggacttttcactcagggctgttgaagtttttgaaggtcagtggtctcagagttttggtgttttcaagccctgctaagcactttctttctagctgatgattggccaccattactgatcatctattggctctgtctgattcagcaatcccaccactgagtatttatgcaaaggaaaagaaatcaatgtatcagaaagataactgtacttgtgtatttgttgcaacactattcacagtagcacagacataaaatgaaactaaatacccatcaacaaatgattggagaaagaaaatgtagaaaatatacacaatgaaataccattcaggcataaaaaacaatagaattataacttttgcagacacatggatggaactggaggccattgttgtaagtgaagcaagccagacacagagtaaacatcatattgtatcactcataagcgggtgctaaaagatgtgtagatattgacgtagagagtggaatgataatggagactcagcagggtgaggggatggaaggggtgaacagtgagaaattacttaatgggtacaatgtgcattattctggtgatggatacctaaaagccctgacttcaccactatgccatccatgcttacagcaaaattacacttggaacccataaatttatacacaaaaagtcttagacctctctctcttctctcataagactcagagctcagtgatccccttggatccctcagcctgctgagttttgattttcctacctaaggtgattttgggcagagacaagggagtgtttctggaagatgttctcaggcacacgcttctaaagaaacattggagactcttctagtggcctttatctagtcactgctttaagcaaggaataaaacatctgtggctaaaatttgtaaaactgtgtttcccacccacccttcagacctgacagaagagattttaggattttaagggaacagctttttcctgacctaaaagggc

SEQ ID NO: 48304 - DNA, 1033 bp, Homo sapiens
atggaaccaagttggaaaacactccttaggatgttattcaggagaattttcccaatgtagcaaggcaggccagcattcaaattcaggaaatacagacaacaccacaaagttacttctggataagagcaaccccaagatactaattgtcagattcaccagggttgaaatgaaggaaaaaatgttaagggcagccagagagaaaggtcgggttacccacaaggggaaacccatcagactaatagcagatctctcagcagaaaccctagaagccagaagagagtgggggtcaatattcaacattcttaaagataagaattttcagcccagaatttcatatccagctaaactaagcttcataagtgagggagaagtaaaatcctttacagacaagcaaatgctgagagattttgagacctcctggcctgccttaaaagagctcctgaaggaagcactaagcgtggaaaggaactaccagtaccagccactgcaaaaaatatgccaaattgtaaagaccatcgatactatgaagaagctgcatcaattaacaggaaaaacagtgagctaacataacaatgacaggatcaaattcacacataacagtattgaccttaaatgtaaatgggctaaatgactcaataaaaagacatagactgtcaaattggataaagagtcaagacccatcagtgtgctgtattcaggagacccatctcacatgcagagacacacataggctcaaaataaagggatggaggaagatctaccaagaaaatggaaagcaaaaaaattaaaaattaaaaaaaagcaggggttgcaatcctagtctctgataaaacagaatttaaaccaacaaagatcaaaagacacaaagaaggccattacataatggtaaaaggatcaattcagcaagaagcgctaactaccctaaatatatatgcactcaatacaggagcacccagattcgtaaagtaagtccttagatacctacaaacagacttagactcccacacaataataatgggagactttaacactc

SEQ ID NO: 48305 - DNA, 1032 bp, Homo sapiens
ctctccaaatgtccactttgagatactacaaaatgagtgtttcaaacctgctctatgaaaggaatgttcaactctgtgtcttaaatgcaaacatcaccaagaaatttctgagaatgcttatgtctactttctaaatgaagctattcccgtttccaacgaaatcctcaaagctatgcaaatatccacatgaagattctacaaaaagagtgtttcaaaactgatgtctcaaaagaaagtttcaattccattagctgagtacacacaaaacaaacaagtttctgagaatgcttctgtcaactttttatgggaagatatttgctttttcaccataggcttcaaagcgccccaattgtttacttacagatactacaaaaagagtgtttcaaacctgctctatgaaaggaaatgtccaactctggagcttgtatgcaaacatcacaaagatgtttctgagaatccttctgtgtagattttacatgaagatattcccgtttccgacgaaattctcaaatctatgcaaatatccacatgcagattctacaaaaagagtgtttcaaaactgctctatgaaaagacatgttcaactccgttacttgagtacacacatcacagacaagtttctgagaatgcttctgtctagttttcatgggatgatatatcctttttcaaaataggcctcaaagtgctccaaatgtccacttccagatactacaaaaagagtgtttcaaacctgctctatgaaaggaaggttcaactctgtgacttgcatggaaacgtcacaaagaagtttctgagaatgcttctgtctactttttaaacgaagatattcccatttccaacgaaatcctcaaagctatgcaaacatccacttgcagattctacaaaaagagtgattcaaaactgctctatcaaaagaaaggttcaactctgttagttgagtacaaacatgacaaacaagtttctgagaatgattctgtctagtttttatgggaagatgtttcctcattcaccacaggcctcaaagcgctccaa

SEQ ID NO: 48306 - DNA, 1068 bp, Homo sapiens
tctggaatcccatgtgatggacaaccactcagaacccagcagcagtgttctgtaactatatgtgaggggcaaacattcagaacacagcaggattgttctgtaatcccatgtgagggacaatcattcagaccctcgtggctgtgttctggaatcctaagtgagggacaaacattcagacaatcatagcagtgttctggaatcccatgtgagggaaaaacattcagaccctcccagcagtgttctggaatcctatgtgagggacaaacattcagacaaacgtagcagtgttctggaaacctatgtaagggaaaaacattcaaacaacaccgagattgttctggaatcctatgttacggacaaccattaataatctcttcacagtgttatggaattctacgtgagggagaaacacacagaacccagcagcagtgttccagaaacctatgtgagggactcacattcagaccacggcaggattgttctggaatcccatgtgagggacaaacactcggaacacagcaggagtgttttggattcctatgtgcggaacaaacattcagaacctcgtgacagtgttcgtgaatcctataggaggaactaacattcagaacacagcaggagtgttctggaatcctatgtgaagaacaaacattcagacccccgtagcaatgttttggaatcctatgtgaaggacaaacattcagacgatcgtagcagtgttctggaatccaatgtgagggacaaacatttaagctacggggagggggcgttctggaatcctatgttacggacaaacattcagaacctcgtcgcagtgttcttgaattctatgtcagggaaaaacagtcagaacccagcagcagtgttttggaatcctatgtgacagacacacatgtagaccccagcaacagtgttctaggatcctatgtgagggaaaaacattcagaccccagcagcagtgtcctcgaatcctatgtgagggacaatcattcagaccctcgtagcagtgttctggaattctgtgtgagggacaatcattcgactgtcatagcagtgttctggaatcct

SEQ ID NO: 48307 - DNA, 1007 bp, Homo sapiens
caggagaatcacttcagcctgggaggcagaggttgcagtgagccaagactgtgtcactgcactccagcctgggcaacagagtgagactctctatcaaaatataaataaatataaaaatacaaaaaagccgggcacagtggctcatgcctgtaatcccagcactttgggaggccaagacaggcagatgacttgagatcaggtgttccagaccagcctgtccaacatggcaaaaccctgtctctactaaaaatataaaaattagtcaggtgtggtgactcactctctaatcccagctacttgggaggctgaagcaggagaattgcttgaacctgggaggcagaagttgcagtgagcagagttcatgccattgcactccagcctgggcaacaagagcgaaactgcatctcaaagaaaaaaaaaaaagaaagaatacaaaaaattagcggggtgtagtggcacatgcctgtaatctaggctactctggaggctgaggcaggagaattgcctgaacctggaaggtgaagattacagtgatgagactgcaccactgcactccagcctgggtcacaagagccaagagcgagaatccatctaaaaaaaaaaaaaaagaatttctatttgggggacaaaataaaaggagtgaaagggatgtaaagaaattgaaagtcaacaggctaataatgacaataaataatgagggagcaaagaaatcagtattggccaaataaaaccaacgtgttttttaatattttttcaaaatttagacaaagcattccagtacactgagacacttctattatcaagactttaatattgcctgagcacagtggcttatgcctataatcccagcactttgggatgccaaggcaggaggatcgcttgagcccagaagttcaagtcaagcctgggaaatatagggagacatcatctctgcaaaaataaaataaaataaaataaaataaaattaaaatataaaataaaataaaataaaatataaaataaaataa

SEQ ID NO: 48308 - DNA, 1123 bp, Homo sapiens
acaggacgagacacccgcggccccctctcccacgccgccccaaacaggacccaggatccagccgccgccgcggcggcagcgatatttaaaggggacgcagcctatctgtcaggagcggagcgcgagtcggctcagccaatgcgcatgcgcgaggcgcgagcggtttctcccgtcacagtggttcccacggttgtcttagaaaccagaccccgaggcttggcagagcaggagccctcggtggcagtgcttgggtgtcgaggctctgaggctccggcctcacctctccacggggtcgaagggaacgtctccggatgccaggagtcgcaaagggccgaccatgatgatgaaaccccaggcagagacgggggaagcagcacgggatcccagcctcaggcctgcacggacggtgttggttggggtgagtctccctaaaagtcgtgccgccgtccgtgatctcgaggacgggtcggcctgcgtgcccctgggctgctctctcacccgagggtcgttctcctccagagcagaaccccgcagcctcaggggttgcctgggggtgtgtgtttcaatgcctctgctgtatgactctgcgtgtgtgtgtgtgtgtgtgtgtgtgtgtgtgtgtgtctcccattctctcttctctctctgtctctcagtctctgtgtgtttctttcccactctctgtgcgtttgtgccagccgaagttgcgtcagggctaccaggtcggtggaggattgggggtgttgcgaattttgcagaaacctctttgctcctccggtagacatttgaaaacgtggcttgggtcaggcacaggcggccccccacccccgggtcccaggtgttctttgattttccttggcattgatggaaaggtcacccgtttcccccttccactggcacatgcctggaccccaccctttgtttcgccgtcgccccgtatgcctccggtgagacgcattcacaccaactgctgtgggattggccagtgccacgcgtggtcacatggtctccccctcggattcgcctgttttcctctttgcaggtgtggtgtaaagcgtggtcggctttctggaaccccagggcctttagaagtggggcaggccactgctctttcaaaggagga

SEQ ID NO: 48309 - DNA, 1047 bp, Homo sapiens
ctgtaacatgcacaagattcccgtgatgatggtgactatgagagcctgtcacatatgatgtagggccccactgcttcctctgaaacatgcgcaagattcccgtgatgatggtgactatgagagcctgtcacatacgatgtaggacagtgcttccctgtaacatgcagaagattcccgtgatgatggtgactatgagagcccgtcacatatgatgtaggacagtgcttccctgtaacatgtacaagattcccgtgatgatggtgagtatgagagcctgtcacatatgatgtaggacagtgcttcctctgtaacatgcacaagattcacccgtggatcttattaaaatggaaactcatagaccacactttgactagctaagataggagcatttaaatggatgtcttggtgacagtgctaagatgctactgttcatgtgggcactggctcaccatattaatgaagcttaggacctccagtcccggctggaaaagaaatacagatacataggatgtgactgtgcatatggaatgtctgttgtgttctggacattgtactagacaatagagataaaaagtcaaatatcccttgcctctatctgaaaggagcttcctactcagtggcttctgactgcagtgtatatgttcttttctgtcctgggtgggtgagctctatctcaatgttggtaactgaacactgcccaatgggtttgatgagggagatcatagctagctgtgctcccacaaagctatgaccatagcatatctcgtgatgccatttcccccttgtcagaagggtccctccagtatcatacatgctccccatgattataaattcttcctctttgcactaaatgttcctaaatcttgcaaagataaaaacataaaccacattctcatcatattagttatataaatatatatgcacccaatacaggagcaccaagattcataaagcaagtcctgagtgacctacaaagagacttagactcccacacattaataatgggagactttaacaccccactgtcaacattagacagatcaacga

SEQ ID NO: 48310 - DNA, 1050 bp, Homo sapiens
ctactaacttagaaaattgtatgaaaacagcaagatatatacatggccctcaggccagctgcctgttttaataaagttttattggagcacatccatggatctatggggctttcctgctacaatggtagagttgaatggttgctatagagaccgtatggtttgcaaagcctaaaatatttttcatctggtcctttatagcaaaagtgaacccagttttagaacattcactttacaaattaagatacagtggatgctgccttaactgacctccacttaactgatttacaatcagcactttcttgtacccctgtacaacttattgactgatgtccactgcaaatggaaagcctttgagctacttttaatgcctgtacatttctccttccatcacagaaactgtacagtttctaagaggaagctgtgttcattcctaaatatgtttacgccatttgttcttgttcttgtagttacgcaatttaattaaatatgatgttgagaggctgagatgggcggatcactaggtcaggagatcgagaccatcctggctaactcggtgaaaccccgtctctactgaaaatacaaaaaaaatagctgtgcgtggtggcgggtgcctgtactcccagctactggggaggctgaggcaggagaatggcaagaacccgggaggcggagcttgcagtgagcagacatcgcactactgcactccagcctgggtgacagagcgagactccgtctcaaaataaataaataaataaataaatattacgtaaactgagaaaatgagtataacaagagtagtattgttgtttctctgagaaataaactaaatatgttggaaaaatgagaaactcaacagttgctgtcagcttaactgttggcaagacaactagaaacaaatgggaaaaattgtgtaatctaggatttcagattgctttaccccagttgtcttcacagaaagtgaacaagaaatcaatgacaacatatcattggcatagtttccacaagaaactccactccgaatccgtgcaagggtttgaccttgtcatgaaa

SEQ ID NO: 48311 - DNA, 1027 bp, Homo sapiens
caccaatcagacgtagatttggtcttttcacatagtcgcatatttcttggaggctttgttcatttctttctattcttttttctctaaacttcccttctcgcttcatttcattcatttcatcttccatctctgataccctttcttccagttaatcgcattggctcctgaggcttctgcgttcttcacgtagttctcgagccttggctttcagctccatcagatcctttaagcacttctctgtattggttattctagttatacattcgtctaaatttttttcaaagttttcaacttctttgcctttggtttgaagttccttctgtagcttggagtagtttgatcatctgaagccttcttctctcaactcgtcaaagtcattccctgtccatctttgttccattgctgttgaggaactgcattcctttggcggaggagaggtgctctgctttttagagtttccagtttttctgctctgtttttttccccatctttgtggttttatctacttgtggtctctgatgatggtgatgtacagatgggtttttggtgtggatgtcctttctgtttgttagttttccttctaacagacaggaccttcagctgcaggtctgttggagtttgctacacgtccactccagaccctgtttgcctgggtaacagcagtgttggctgcagaacagtggattttcatgaaccgcgaatgctgctgtctgatcgttcctctggaaattttgtctcagaggattgcccagccatatgaggtgtctgtctgcccctactgggggttgcctccctgttaggctgctagagggtcaggggtcagggacccacttgaggaggcagtctgcccattctcagatctccagctgcgtgttgtgagaaccactgctctcttcaaagctgtcagacagggacatttaagtctgcagaggttactgctgtctttttgtttgtctgtgccctgcccccagaggtggagcctacagaggcaggcaggcctctttgaggtgtggtgggctccacccag

SEQ ID NO: 48312 - DNA, 1062 bp, Homo sapiens
cagacaatcattcagaccacagcaggagtgttcaggaatcccctgagaggaacgaacaatccgaccctcgtaacggtgttctggattcctatgtgagggaaaaacattcagaccctcatagcagtgttctggaatcttaagtgagggacaaacattcagacactcatagcagtgttctggaatcctatgtgagggacaaacattcaaataacagcgggagtgttctagaatcccatgttacagaaaaacattcagaaactggtcacagtgtgctagaattcgatgtgagggagaaacactcagaaccgagcatcagtgttctggtatcctctctgacggacatgcatgtagaccccagcagcactgttctggaatcctatttgagggacaaacattcaaacaacagttagagtgttctggaatcctgtgttacggacaagcattcacaccctcgaggcagtgttctggagttctactttagggagaaacattaagaacccagcaacagtgttctggatccctatgtgagggacaaacattcagatcacagcaggattgctctagaatcatatgtgagggagaaatactcagaacacagcaggaatgtattggaatctgatgtgagggacaaacatgcaggcactcgtagcagtgttcaggaatcctatgtgagggacaaactttcagaccacagcaggagcgttctggaatcccatgtgagggacaaacattcaaacaatagtagcattgttctagaaacctacttgagggacaaatattcagattccagcagcagtgttctggaatcttatgtgagggacaaactttccggccacagcaggagtgttctgcaatcttatgtgaggaacaaacactcagaacacagcaggagtgttttggaatccaatgtgacagacaaacattcagacacttgtagcagtgttctggaatcctatgcgagtgagaaacactcagaacccagcagcagtgttctggaatcctatgtgacggacatacatgtacaccccagcagcagagttctggaatcctatgtgagggaca

SEQ ID NO: 48313 - DNA, 1048 bp, Homo sapiens
aaactgttcaatcaaaagaaaggttcaaatctttgagatgaatatacacatcatgaagaagtttctcagaatgtttctgtccgtgttttatgagaagatatttccttttccaccataggcctcaaagcgcaccaagtgtccacttgtagattctacaaaaagagtgtttcaaaactgctcattgaaaataaatgttcaactctgtgagatgaatgcacacatcacaaagaggtttctcagaatgttctgtctagttcttaagtgaagatatttccttttccactataggcctcaaagtgctccaaatgtccacttgcagattgtacaaaaacagtgtttcaaaactgctcaatggaaagaaaggttcaattctgtgagatgaatgcaaacgacacaaagaagtttgtcaacatgcttctgtctagtttttatgtgaagatatttcctttaccaccatatgccacaaagtgctccaaaggtccctttgcagattctacaaagagagtgtttcaaactgctcaatcaaaagaaagttcaactctgtgagatgcatgcacacatcccaaagaaatttcccagaatacttctgtgtagtttttctgtgaagatatttccttttccaccgtaggcctcaaagaattccaaatgttcacttgcagattctaccaaaagagtgtttcaaaatagattaatgaaaagaaatgttcaactctgtgacatgaaagcacacattccaaagaagtttgtgacaatgcttctgtcaagtttttatgtgaagatatttctttttctgccacaggcctcaaagcgctcctaatgtccacttgcagattctacaaaagagtgtttcaaagctgctcaatcaaaagaaagtttcaactctgtaagatgaatgcacacatcacaaagaagtttctgagaatgctgctgtcttgttgttatgtgaagatatttccttttccacaattggctgcaaagctctccaaatgtccacttgcagattctacaaaaagagtgttccaaaactgctcaatcaaaaggaaggttc

SEQ ID NO: 48314 - DNA, 1079 bp, Homo sapiens
taaaatggggctggtaacagcatcattttactctcacatagatgaatataaaatgtagctcctgccttcattgtaaatgaggaattggactggttaaaaaatgaaacagaaaaatacagacattcctcctatagttaaagtccgcataaagcaaatgaatatatgagagccaataccttgaggaacatgtcctttatgtagcctctgttgacaatgaccccatcttgctcggggattagcaacattcttagggggaaaagaaaagtgctgctcccggtgcaggccaggggcattcctcatgtggctgtgcacattgtgaccacagtggggctgcagtatgtagagtatagggtgctgatgctggctccatgcaggagagttaaaggttggggagacccttcatattgagtcacatgttaacaagcagaggtgcctcagtgaggtatgggttttttgttttaagctgtactcacttatcttaaaaaaaaaactcgttgaaatttctgtaggaaatagaacttggttgttgctggaactgcattcactaaccctcttttactcagtaaaagaatggcttcctgtagtgcagtttttgacaacccaaggtttcttatccatctgttcaacaacagttcagtgcctaatatatgctaacatggtgctgggtacaatggtgtccacaaaggcagagtcactgtccctacaatttgtgaagttgtgataaaattgcaattgttaaaatgcagacatactattgttgcagacagattttgtgtgctaagctagactgttaagactagaaggagaacagcagagatggcaccagttggtggccaggggagggggctccccactcctgtaaaatctgccacatcttccctggccacccttctacataatgacattcccaaagatagatcatttatttctcaatctttgtaaagtatgaataaaattgttttgagaaaccgtgattttttaatttaaagtctgtaaaacattgtttttaagtggcaaccagattgccacctcaaagccccttttatccagaaattcagggtggtatttagagaggagaa

SEQ ID NO: 48315 - DNA, 2954 bp, Homo sapiens
aattccttattgtcacatagtgtcttttaaaaaataactgtagagactgtgttaattcgagtgcctttcttacttttttgggagcaagattatatttaatgtttaagaaaacaggatggaagttttatcaaacagttgattgtggcccattgttttatttattcccatcgctaggcatggccccgtagggtattttatccttcagtgagagactgatataagcaggcaggatgctttgattattccattagttatcattttaagcaccctaccaagatttagttctttctttctggcaactaacgttttgggggttggaggcatcccatttagaggatggtgtgtgcacaaatagattagcctgaaacctgcgtccaaagggaaacagtggcactctgccctaaaataaaggccagaacgttgtcctaaatgaatcctttgccttactttaggaccttccttccctctcaaattcaggcataatgtaatatagttgaaagggggaaaacagtacttgctttctctcaggtattggaggaaaagaagtaaatgcgtagatgaaattttaaatgtatcattttatctgtttgtatatggagaagggagggataggaattccatatttcaagatagcaaatataatttcatagaaatatatagctaaagattccaaagtgcttttacagagaactgttgaataatatattcctaaagggcagcaatatgccatgttcatggtgaagacagaaaaccaatgaatcagttgtggatctcaggtgggagaggaaacctcaggctcccaactttgacttctctactctcaccaggccatgttaacactgtaaaaccaaactctttgctaagaacaatacagggcagtagtttagtctgctgatgaaaccttgtgcttccaagaatattagctatatataatttgtgctttctggatgattctattgtccagaaagctaaccctgacgttacttttattagtctgttgttattcctcagggtgtagaagatttagtaaattcaggacaaattttatattcagtggcaaaaagaaaaggcaaaaatatgctaaatatattattagctcttaaattttagtatagatcgtattttttataaactattaccagtacagtagctagtagatattctgtgactgcctcattgtttatcttgctgctttggtccctatggctctagtatgaacattctcgtgtcttctgtggaaatgatttctgtgttatagttccatctttggtagaggtggggatgattgtattttgttttagttgacatcattctcaacttttagaaatactgttgaggaaaatgattaccgttggttttcaaattgacaactattttgcttccaaagacttcagtttccctttgttttatgtgtagacctcatatatgttcaacacattgcatactgccttgcacattgtaggaattcaacaagtcaagagttgataaaagctagaaagataaaactagcttagctatcatatcatcattgtccatattcttagctttgggaaaaatataccattttgcataaaatacataatcagtttcaaatgcataaggcaaagatatacagttgcacaacattgcaagtgaaatttacaaaggatttttatttttgtgtatgctaaaagtgctcctacttaaagcagttttctttattagaccaacaccttccagcaaagttagaaaccaaacacaagtgctcatttgcccaaattaaccagatagttatgtaaactgttcatattaagtctttagtggtttacaaacaataacattctggcttttcttccataccttttaggaatcagccttaattttaagtatagcagtcactttcctcaaggtactatgcagcatactttagattgcttatttatcattataaggtgataggtaataaatttgaggtttacttgtcatataatttcatatggcagatattgattcaaggagcattctattagaaaaagttgataaattatcctcccttacaaatatcatcttgcatttggagcaggtatttttttcttattagttaaagactgggtacagttatagtagatgctcaataaatgcttagtcagtgattgatctaacatcaaactaacagctttcagaaaggagactgttgacatcttttcaccaaggagtatatttgtagagtaatatatgtgtggaattttgaaattatatcatttgacatgatttatgaggcttatttaagctggagttagtaacgtaatagaagtattatttatacagaacatagttgaaagataggagatgtgaaagattaagtagtattttcttgtgcaaggcatattaataaatgtaattaaatgtcttaataagcagctggctgaactctagagagaactgctgtagtcttctgcaatcagtctctgtattggtatatccagtactatcgggtttaggttctttttatttttccttaaatcttacttgtttctagcgtcttaagagtggtaatggtaaaatgtgaagttacaataaacttctgcttgttttctcagaacatctttggcatgaggaagaactttttgtgaatgatacagtagtctcagcatctgttaatttgtggttttcaaagcatttttgacagagtttacctaatgtaaaaagattaaacagttttataaaacacaaataaacattcctacctgaactgtgaggaacagagtgtatagtacaaatgtaattaggcattgcctcctggcgaggttcttgatgcatgacttcgatgctggctgctgactgaggtgaccactgtcagtattgtactttggcatatgttgtttttaggaaaataatggaatgcattcttagattaacttactgtttttgagttggaaaaaataaaagatgaggtattataagtatgccaaata

SEQ ID NO: 48316 - DNA, 1343 bp, Homo sapiens
ttgtgccctgcacattgtgaggactcattaaatatttattaaattaatgaatgactaacaggaagagaaagattgtttgtgagtgttaagaatgagtgatgattgagaaattgatggattagtgcaatggattgggaatgaatgatgctttctagtttcgtaatacttgggaagagctattgcatatagagtaagttgatttagactttttttttcttcatttcattaccttgtttaaacttgttaaatcccagccaagaaatgcagctctgtaattgtcaattaactgtattataatatatattaaaaatttgtagagctaaagaacccacttgcattaagaacaccactttctgttcatttgtgatactagaggacagatcctgcatacagagccgaaactgcttttaatcatctgaagaaattctttgatttcagtgacttactgatctgtacctgtgcacatatcattttatgcttctccttttttccccgcaacttgaactgtgactctttcagatatttcttaaatctgtatgagtcattttttaagcttagggatttgatatgtattaatgtcccctttgtcttctgtagattttagcattttattacctcttaagaaactctgggcccagactttcagtcatatttcttattcctatggtacagttctcacttaaaggcttaattattagtagggttaaatatatacaggttatctctaaaagtacttaaatttttaaataagggcttatgtgatacaagatacggaaacaaaagtttttggatttttatgcagtagtttgcaggaaagcaaatacatagtagatcgtatgccacttaggtatgttcaggtcatgccagtttattcttgttgggccacacacacatgtatgtgtgtgtaaaaggaatttttagtattgaagcaaacaaattgtcagtttaataattttctcttacatagcacaagatggcagataccacctactgtacaacaatctaataatccctaccttagttcccctgagttatagaagatgctaaagatttagttgtaaagggaagtaacatgattttttttttctaaaaagctgttttaagctaactattattttgctactggaaaattatattttaaaacttacagatatttaaagtatgctagaaaatttgaacctgataacaactgaaccttttgtcttgaataaatttctcaaatagaactgtgcaaaccctagcactttatgtgttgctgcctccccatacctaggtatgctctgtaataagctcccatttaatggagagatgtgtggaggcactgagaagttaatgaagaaaaa

SEQ ID NO: 48317 - DNA, 1049 bp, Homo sapiens
aatctaaattattgaggatacactatggaaactataaaattatcatgaagtgactgttaaagtttactggcaaatgccaagggaaggaatagtatgtgcaaaacaaaacactttgatactgaacttaatcagggatgaggtaccaaagtatccacattatagccgtatcttatgtttccaataacaagggctgagtttttcaggtaggtgggatgagggtggggaatgggccatgtaatgtctgctttcttatatttgcccttttgtaagtggtctgtttcttcttttcatatactttgttttgccaatccattacgtattttttgtcacttttgtgtgtcatttttgtatacctttcctttcttacttcaggggtgtgtcttcaagatttctaccccctatttgcaatgaatttcatacctcatctaaaatacattcatataccagaaatatgaagagtggcccttctaaaagtttccctaatgatggaagctgtcagttgtcctatctgtgcagaatgtgagtaatagtggcagaaataagtgtgacaacaatgctttgcctgttgttctttttacttgctaggtaatttgtaaagtggggataaagatgtagggaaagtaaacctctctctcactgttacggaaagcctggacttgagttaggtagactgccttaaagaagaagaaatatgtccttttctttggcatcatggttttgttgagtggcagactgttgaagtgagttgagacttaagaacgccagaaaagttgtctagcctggccccagtagacagaatttgttcttctctcaagtaaaaaattacctttttatagcttttatattatttagatgaaaaaataccattatgaacataattccatggccctttgtgtacaaagcatattttgaattaaatacctcaaggtccacctagacctctatggataaaatcataagtttatgatttttagctcctgtgagtgtttgggggcaaactacacagagaagacatgggtggttcagcccattccactaaaatatgttgc

SEQ ID NO: 48318 - DNA, 1139 bp, Homo sapiens
tcggaacgtggagcaagccaggtttgccagtgcatacaggaaatggctggttactttgagtcaatgaaagaggtgaattagtcctacaaggttccccttttagtgcaatattgctttcttttattatttacatagttgcatgaactgtttactattattggctaaccatatgttcttcgtctttaggttgaaagtccatagtaaatctttcattttatttattttgttaataactggcattcctgtggggataaaataatcgtatagttccttcctgctgaacagcgagtcttaaattttctgtttaacttctcaccctttgtatttctatatgtggggcttctcatttggttttcctgattggttcacacacacacacctctacccccctcagtccaattgctgcataggcaaattcttttaaaaattaaaaatttaaggcctaggcaggaggattgcctgagcccaggactttgagaccaacctgggccacatagcaagacccgatttctacaaaaagtaaaacaaaatagctaggcatggtgctatgcaactgtgttcctagctatgcaggaagctgaggcagaaggattgcttgagccccaggtgtttgtggctgtagtgagccatgattgcaccactgtactcagcctgggcaatagagttgagaccctgtctctaaaacaaattgaaaataaacatttatgttgcagttcaactgaagaatgttggtatgaatgccgaataacttgatgtaattgttttgagaatcaaatggctagatgggcgaatgtttaaaaatgtaaactagttctctttctctagcatgttctacccaattaccaaagtcagaagtattggaatttatatgaaaaaaatgcttccaatgtaatccattttttaaatggttatttaagaaaaaactaacttaagagtttatgtaattgcagtaaaggaaaattatttttattgctagttttgatagattatttttacctcaaatttggtatatgccaaaacacatcagtccttataaaattgatttttttttcctgaaaacctggaatgccatttttagctattactactttttaatttcaaattcacttatgacaaatgggagaaatatataaagaaat

SEQ ID NO: 48319 - DNA, 1029 bp, Homo sapiens
aaaaatgcttcaacaaaaaatgatctcactagcatagtgtatatacctacatacatacatacacacacacacctatatacatatatgtatacacacatgttattcattgtatatcctataaaccagttgagcataggagaaaaaatcctggccttaagattcatggaacttagtcctgtttcataagttaactagcggctgactttgagtataacttttaattatcaagagttttggtttttttatctatgaaataaaagatttgaattaggtgaatttttttatgattctattaaacttttaaaaaaatatgtctggttggtcttatgaagggaagttgctccataaatctaacttgagggatgtttatgacagttaatcttgaaaattgttctagttagatgattagtaaggttttgtgctagatgagtagaaagggaatcttgatttttaaaaaatcctttgtggatatgtgttctagtaaattttaattcatatcagtaagattgattgacatagaaagacatcaaatcataggtacattttgagcaacaaactaccaacttcaaagtaaattctaaccctataaggtctctattgcgtatcaaatacacagaactttatttttaattgttagtggatctcttctgtactaaccctggaaggcattgagtgattttttaatgcatttttcaaactgctaaagaataatgcaatagacgtctagttcaatttgtgggtattgcagtcttaggggaaagaaatagaggcaaaaataagtttttgaactgatctcctgtaattacagtgagtgatacacataatttagaatttcagctgtcttttttttttttaaagaaaactgctttttttttttgctttggaaatttgtgaattacctgatgaaagaggttgacttagtaataatgtcctattttcttcatcagtctatgtacttagagtaagcaaaacacctttgagcaactagaatagttgatgccaaactccagtgattcatgttctgaactc

SEQ ID NO: 48320 - DNA, 1048 bp, Homo sapiens
tcttatccagcaagttattgttttttctattaaatattgaactcactgtttatgaagtgttgtgggtaccatctttactgtgtgaaatagaagtttaaaatacagttcttgaacccaaggcactaacagaaatttctgtaatggtggaaattttctgtgtctgtgctgttccatatggtagccactagccatagtagctattgagcaattgaagtgtccctaatatgaacagggaccacattttaaattttatttaatttaaatggatttgtacgtagtggctccatgtgcctagtgactactgtgatgcatagtgcaggtgtagatgagacctaagactaactgcatgaacagtaaattaaccctccaaagtagtttatagtaaaagttggataggagcatgatgagcaagtgctatgggagtctaatagaagtggagaggaggctggttatgtctcggataggggtgctagtggaggtgggttttaagccaagtattaaagtctgggtaggatttgtagtctcagagggagccagagacctccacagggagcagtgaattgacctaaacaagcaaagtgtggctgagaaggtacagtagggccagattatggagatccttgactctcatttaatttctttcattccattcatacattctgcaaaagagtacctccatttgacaggcacaatgctggtctctgggtatacagggttaaaaactgggtggtttaatgaacaaaccacacatggtccctatcctaatggaactttaatcagtcaacatacagattatgaaaagagtcataaaaagtaagaagggtacttagaataaaaacagggagacccaatttagattataaggtcaagaggttctttctgaggcaatagcatttaaactgagtgagacatgaggggtgaagaaaagctggctcaaggatgtacacttctaaggcaatgggtaggcaccagtgaacattttttagtaaagaatgatgaaaggcaattttagatcgtctgcaaggtgaactgaagaatagaaagccag

SEQ ID NO: 48321 - DNA, 1035 bp, Homo sapiens
gagcttatagctctagaggccagcaaatacttatttggtctatgagctcagaaaaccagaggatccccagagaatctcaatgcgagcatcaaaaaataatgtggcatcacctagaatttgggaaaatatttctttaaaatgcaatgactgtacggctgtgaaatattcacaagatagaagtttggaagtggggaagggaagtggtattttcaggttcataaacaaactttggaataaatgtttgcctaattaagcttattagtaaaactatagggaaagaatgcctggtctgtcttttcggatgtctccatattgctgggagaacaaattgctgatccaacaatgttccatgaaattactcagaaaactcacgaaagaatggactgacataaacactatgttcgtgtaaagtatgtgtcagcaactaccagttgtgctaatctatcttcccagtaattttctcataagttggcatgaaacacagaaggtctcaacaaataactgaaaggaaatgaaacagaaggaaaacaagagtatctcagcctgccttactcatatttaaagcaatgtagaattcatgaactcacaaatgatgctgagtttagcttgaaaaactcaagagtaggttccttttccatacttagctccttattctttgacatgaaaacttattccacttgacagtataattttccttgttctgtgtacaaagccaccttaatctgctctataatgtgttgattatcttgtcagtaattaatgacctttctatttctactttgctctcagctgctctgctttaataatgctgggacattaatatcctgaagcagttctcttccagtgttcccagacatcatgaaatgtgataggaaattcacctcctctcatgtgtcttgtctacacattggttttctgcttccttaatctctttatagcagggtgtctggctgttaaatagccaactatttataaatctctacagaaactttctagacttgctcttctattcgagtgaacttctagagctgcctt

SEQ ID NO: 48322 - DNA, 1022 bp, Homo sapiens
ttagtattcttcaagatgctttccaccttgggggacttgcctgtttcagtttagatgctattcagagaacagctgccaagtggcagagaaaccaacagatctcactgggttgggaaggcaataaccgaatttcagggctaccaaagcagacaaaacattcagggacaagttttctgagaaaagggaggtatgaaaaagtgatcccatcacttggcaatcttctaaggcatttgtgaaattcttaaattacggagagtaagaggacaagaagccaaatgcaaaacaaagtgggattttcagcaatctcatcagctgaagaggcaaaaattgaagtttagtacatactaaggaggagagtccctagttaaatccgagagtatatttttggagggtatatcctaggtttagggtagaagcagaagtaggctagcaaaacagaactacaacactacctcaggttagcttagttctgattggactgaggtgacttgctctattctagttgtctactggagaacaggttgaactctctctagtgggaaataccatcaccccaggattctataatttttcactgacaagtccattattcagtcaaattcacctgatattatcaagaaacaggaccagaggggatgggggtgggggtaacagatgacagaaacagaaccacaagtggcccacatatggagttatcacacaagtactgtaaataattatgattaataattcaataatatgagcatttaattatatgtttaaaaaaatagataaaacagttacaccaacaaactcaaatctgttcaaaagcaaaaaaatcagggaggaatatggaacctttgaaatggtggagtaaggacttctgaaaatcttctccataaaagcaatgagaacacttgcaaaaaaactgtcacaataaactttttcagaattctgggaattaatcaaaggcttttcacaatccaagagtgcttttcccaagcactctttgcttgactgaacttcagtcaggctcctaaacc

SEQ ID NO: 48323 - DNA, 1041 bp, Homo sapiens
gtaaccaaaacagcatggtactggtaccaaaacagagatatagaccaatggaacagaacagagccctcagaaataataccacacatctacaaccatctgatctttgacaaacctgacaaaaacaagaaatggggaaaggtttccctatttaataaatagtgctgggaaaactggttagccatatgtggaaagctgtaactggatcccttccttacaccttatacaaaaattaattcaagatggattaaaaacttaaatgttagacctaaaaccataaaaaccctagaagaaaacctaggcaataccattcaggacataggcatgggcaaggacttcatgtcgaaaacaccaaaagcaatgacaacaaaagccaaaattgacaaatgggatctaattaaactaaagagcttctgcacagcaaaagaaactaccatcagagtgaacaggcaacctacagaatgggagaaaatttttacaatcttcccatctgacaaagggctaatatccagaatctacaaagaacttaaaacaaattaacaagaaaaaaatcaaacagccccatcaaaaagtgggcaaaggatatgaacggacacttctcaaaagaagacatttatgcagtcaacagacacatgaataatgctcatcagcactggccatcagagaaatgcaaatcaaaaccacaatgagataccatctcacaccagttagaatgacgatcattaaaaagtcaggaaacaaaaggtgctggagaggatgtggagaaataggaacacttttacactgctggtggttctgtaaactagttcagccattgtggaagacagtgtggtgattccttaaggatctagaactagaaataccatttgatccagccatcccattactgggtatatacccaaaggattataaagcatgctgctataaagacacctgcatatgtatgtttatttcagcactattcacaatagcaaagccttggaaccaacccaaatgtccatcaatgatagactggattaagaaaatgtggcacatatacaccat

SEQ ID NO: 48324 - DNA, 1059 bp, Homo sapiens
acatccagtcaacttcaacttttcatctcattggcagtagtttcatccagatgcatgcttaagggaaatggcatagctgccaactttcccatgatctgctcaaaaataatagcaaaaaaacctgtcagtgttctgcagtgctcaccagtgacatcctcattacgaactcgagtggtcagttttcagtctttgtcatttttgtaacattggacatagtggtttaccacttcagaaagtagaattacattcttacgttggcttgcaagacactgtattctcctgctttttctccttcctcactggtgactcctttgctggtcacttttttcacaattccactctctctttcctgaccttttgaccctggagtgccccaaggtccagtttttacttcgctattcttacttccttgatgatctcatcttgtttcagggctttaaataccaaatatgttatatctcaaactcaaattttcaacctttttgctgaaatctagacttgttcaaactgtctaatggacatctccacttactgtcaggtagacatctcacactgagcatattcaaaactcaacttcctgacagcctgaagtagactaaatatccagtcgttgacacccaaaacctgtgagtcgcacaccactactctctttttctgattctccacatcaaggctatcaggaattcccactggctctacctttaaaatatatccagaatccagtcacttctcttcttaccgcctccactgctatcaccctggtccaagctgctatcatttctcgcttggattaatgcaacagcttcccaactactctgtctgcttctactctggtcccctgcaatctcatctcaaaattgtattcatagtgctccttctaaagcaaaagcaaaatcataccactcatttaaaaccttccactgggttagcatttcagagtgaaagctaaagtccttacaattggctttagaaccccatacagtctcccacctattctcttacctgtctcattcctactggctttctcctcacttactgtgttgcttggccacactggcc

SEQ ID NO: 48325 - DNA, 1049 bp, Homo sapiens
tcagactccacattctatacataagaagtctcgtgggcttctgatgacatctcctcacctctgctgcatagcctaagccatcactcctcttgccagggctactgcagcagcccccaaagtctccttgtcccattgcagtatactttacacgcagtagctggagtgatcatttcaaaatcagataatattaccttaaagctgtatgatggcttcttactgcttttggaacaaatttcaaactctttaccacaccttctaaggattttcatgattatcacaatacttctttgacctcaccacttgatcaacttgacttcttcttcctcttattttccttcctcttcttaatattatttttaattgataaatcacaattttatacctttatggggtacaatgtgatatacacacacacacacacaaaatgtgggatgattaactcaagctaattaacatatctgtcacctcacttatttatcacttttttgtgataagatgtgaaatttactctcttagttattttgaaatatacaatacattattgactgtagtcatcctgtgttcaacaaatctcaaaaacatattcctcttgtctatctgaaactttgtagcctttgaccaacaactccccattccctgctcctgcttcccccagcctctggtaaccatcattctactctctacttccatgagctcagcttgacttcttcatagcacttgttatctgatgttactctctctctctctctctctctctctctatatatatatatatatatatatatttgttgtttggcttgcttttttttttagagacagggtctcaatatgttgccaggctgatctcaaacctcaaactcctggcctcaggcaatcctcccacctcggcctcccgaagtgctgggattacagatgtgagccactgtgcccggccttggcttgcattttctacgtcctccccactagaatgtaaattccaaacaaataagaactttatatattacattcattgcagtatcttcagcacctagaatagtaaatggacaata

SEQ ID NO: 48326 - DNA, 1035 bp, Homo sapiens
cctgagaaacctataatgtgcttactgtccttccatgtattcatccatgtgaaatatagttaaaatgaaggtgaaatatagttgaaatgaatgccaaaggcaacttggaaagggaaaagaagcatcaaacaatcgaattttgtcgaagaagcataaatgagggaaggggagttaagcagctcactttccacctcctttttttctcttagattaacttcaggttgtttcttagcaacaactggtaagaattacctccttttctgctctaagccaatatccagtaccccaacccccaccctcttttcccccaatttccaaagttggcatccctagtaggattcccagtttagcaaccttagaggcaattttggtagccaataaatcctgttgaaagagggaaacttggaatctttgcctagagtgtaaattgacattgaggatggagctggtaggagagctggcacgttcaggaggtgaccttgtaaggataaaaacacagctgtgtcagcgaaacagactctttgaacaatgtctgaaaatagtattcaacaaatgttagctgtgattattactatggatttatgttaccagcaaggaggctggtgaatgactttattcactcaccacatattataacccccttactaggtaccagatactgtgttgagtcctgaatatgcaatcttcactccttaattcagcaaatacagtaattcagcaaataacagtatttttattatagaaaaatatttaatttgtattcttgtagtttgagacagtatcgcaaagtccgttttcagtcaagcttatatgattgggaaaaaatattacctccacagggtcctgcctgaaatttaacatcatcaatggcaatatcacttcttattgatagctctggacaggaataatgctttggaggaattatgatgcctagcctagtacgcagctgaataggtcaacatcttgaaatcttccttccccaatgtttcagctctgtttagggatttcctccactataggcagttaatcataaat

SEQ ID NO: 48327 - DNA, 1008 bp, Homo sapiens
tgttatttatctattcagagattccccttcttcctcgtttagtcttgggagggtgtatgtgtccaggaatttacccatttcttcttgagtttctagtttatttgcatagaggtgtttatagtattctctgatggtagtttgtatttctgtgggatcggtggtgatatcccctttatcattttttattgtgtctatttgatttttctgtcttttcttctttattagtcttgctagaggtctataaatcttgttgatcttttcaaaaaaccagctcctggattcattgattttttgaagggttttttgtgtctctatctccttcagttctgctctgatcttagttgtttcttgccttctgctagattttgaatttgtttgctcctgcctgtctagttgttttaattgtgatgttagggtgtcaatattagatctttccttctttctcttgtgggcatttagtgctataaatttccctctacacactgctttaaatgtgtcccagagattatggtacgttgtgtctttgttctcattggttttaaggaacatctttatttctgccttcatttcattatttacacagtagtcatttaggagcaagttgttcagtttccatgtagttatgcagttttgagtgagtttcttaaccctaagttctaatttcattgcactgtggtctgagagacagtttgttgtgatttctgttgttttacatttgctgaggagtgctgtatttgcaattatgtggtcagttttagaataagtgcgatgtggtgctgagaagaatgtatattctgttgatttggggtggagggttctgtaggtatctattaggtctgcttgttgcagagctgggttcaagtcctggatacccttttttaaccttctgtctcatcgatctgtctaatactgacaatggggtgttaaattctcccattattattgtgtgagagtctaagtctcttcgtaggtctctaaggacttgctttatgaatctggttgttcctg

SEQ ID NO: 48328 - DNA, 1058 bp, Homo sapiens
atagacagtgccttctcactgtgtcctcccatggtggagaggaagaactcatctctgtagcctcttgtaagggcactgatcctatttatgggggctctgccctcatgacctaatcacttcccaaagcccccacctcctaataccatcataatgggggttaagtttcaacatataaattttgaagggatgcaaacatttagaccataacaactatcttctgtgttctcttttttggctttactccaagcttttgataatggtgccacaagaaattggaacaaggtgcaggtaatagaaccctgtgagaccgtctctaactgagggcatattacttttgcttttggcaaattcataaagtaaataagtgaaccttcatggcctgaaagggagggaagaaggcagatggtaaaactcaagtccttggtacccaggaccaagtcccattctatccccccaaacgctgagcaaaaccacacactttctaatcaatcttgttaaagaattggtggaacagatctaggcagggattagggatctgaggaaaaccagtgcccctcccacggaggaactaaaaccccatacagcaggcttctgctggagatatgaaaaccttcttgagagaatgtttaaaaatgtttttcgtttttaaacatttgtttcaaacatcatacaaaagtttaaaatgatcaaaatgtctgctgcttcttactgtagtagtattaacattggaactgcatagtagtagctgtagaattggtagtaatagctaatacaacagcatttaccacacaccagctatggttctaagcacctttactgatttcatttctatatgctggatcagtgtctcaacagactggcctctttctaaaatttctatttattgggtgcaaaaactgacggaaagattcaaaaaaataatcacaattaatgtaacatttcaagtgttctttgtgatgtgttacaatagagagcctaaagatgaatgggccttcatcgctttcaaggatgtaaaatgagaaaacagtattaaattgttccagaagaactgaccttca

SEQ ID NO: 48329 - DNA, 1168 bp, Homo sapiens
aaagaggaggcagcacaccgaggcctgtctagaacttctttcatttaaccaacagtgaatatctaatctacaagaaactggagccgtggcagtttaggagcctgccaaggttgcatccctgggagcttattttctattgtgggagacaggaaaagaacaagtgaatcaactgtgaaattaaataattcaaacttaaagctgttggaactttaaattattctgagccttgcgaagaatgtggcgatggggcctgagtcccatggcatacagctgcaatgtctgccttgttttttcctataatcaggaagaccaaacagagacagaggtaagaccccctcagatcactacccccttcataaattaatatagttatcttccttggaatgtagctatctataactaatctaatcgctgtaatttatgcactgctcttgtattgaaaatgtactcctgctgaaccttctctgtttctgcctgtgtaaatgaaaccttaacttcactttggaacattgaccctatttgtttggagttggtgtttccaggtggctgtcctcaagctttgcgttagaataaactctatacttaatgatattttctgaatttcactacttaaggctgacacaacaaatgattagcataatgtcagactgtgacaggtgttaggaagaaaacaaaatgaacctgatgggtgggaggtacggaaggcctcttagagaggtggtggtgtttaagataaactctgaaggacgagaagaaactgtgacgatctgagaaaagagcaccccaggcaaaagaattttgctggaacataccagtaaggacaaaagctctgaggtgggaaggccagtgttgctgcagagcagtgaacaaggttgcagagcagaaccttgtccatcgtggaaaagcctgaattttatttttaaagcaatgggaagccattgcaaagttttaagcaggagagggccatgttctgactaaagcttttaatttttttatttgattttttttatttgatttttttgagacagagtctcacccagtcgcccaggctggagtgcagtagtgccacctcagttcactgcaaactctgcctccctcgttcaagcggttcttctgcctcagcctcccgagtagctgggattacaggtgcatgccaccacacctggct

SEQ ID NO: 48330 - DNA, 2438 bp, Homo sapiens
gtctataatggctgaaaccactacatccatctatgccatttacctgaaaacttaactgtggcctttatgaggccagaaaagtgaactgagttttcgtagttaagacctcaaatgaggggagtcagcagtgatcatgggggaaatgtttacattttttttttcttcagaagtaacgctttctgatgattttatctgatatttaaaacagggagctatggtgcactctagtttatacttgcgctctgaaatgtgtaaacatagggtgcctacctatttcacctgacccatactcgtttctgattcagaatcagtgtgggctcctgcagtgggcgcgggtcacggctgactccaacttccaatacaacagccatcactagcacagtgtttttttgtttaaccaacgtagttgtattagtagttctataaagagaactgcttttaacattagggactgggagcagtccatgggataaaaaggaaagtgttttctcacgagaaaacatgtcaggaaaaataaagaacactttctacctctgtttcagatttttgaaacacttattttaaaccaaattttaatttctgtgtccaaaataagttttaaggacatctgttcttccatacgaaataggttaggctgcctatttctcactgagctcatggaatggttctgcttatgatactctgcacgctgccttttagtgagtgaggagtttggggttgcctagcaacttgctaacttgtaaaaagtcatctttccctcacagaaagaaacgaaagaaagcaaagcaaagtcagtgaaagacaatctttatagtttcaggagtaaatctaaatgtggcttttgtcaagcacttagatggatataaatgcagcaacttgttttaaaaaaatgcacaatttacttcccaaaaaagttgttacttgccttttcaagttgttgacaaacacacatttgatattctcttatatgttatagtaatgtaacgtataaactcaagcctttttattctttgtgattaaatcctgttttaaaatgtcacaaaacaggaaccagcattctaattagatttactatatcaagatatggttcaaataggactactagagttcattgaacactaaaactatgaaacaattactttttatattaaaaagaccatggatttaacttatgaaaatccaaatgcaggatagtaatttttgtttacttttttaaccaaactgaatttttgaaagactattgcaggtgtttaaaaagaaagaaaagttgttttatctaatactgtaagtagttgtcatattctggaaaatttaatagttttagagttaagatatctcctctctttggttagggaagaagaaagcccttcaccattgtggaatgatgccctggctttaaggtttagctccacatcatgcttctcttgagaattctatttggtagttacaattacagaaactgattagtttgtcagtttgcagatagatttagcacagtactcatcactcggatagattgagatgttctttcacatcagatgatctgtaacactgtaagatactgatctttacaactgtttaatcagttttatttttgtacagtattagtgacctaagttattttgctgtcccgtttttgtaaatcaaatgaaattataaaagaggattctgacagtaggtattttgtacatatgtatatatgttgtccaaataaaaataataaatgataaagactgaattgttctagccattatgtgttgtaaaagggggctatttcaccataatgaaagttacttctttaacctgtgttcgcaggattttgggatgagtgcaaagatgattttaccctgtacctttcaacacatgcaatagttatatagacttgtgtgtatttactattcacagacctctgaggaagtagatgcaatagaggtcacttgaaaccattgtgttatgctggaggggaatatttatattttgggagataaatcactttaagaggcttttagagctcataactgtgcagggtgtactaggaactggtcagagaaagttgtaagctcagattgtgctcttgagatacgatattaataagaacacacaagttgaggtttcattggctcaacagtagaaacataacaccaagcaaagacaagcatcaaagtgtgtgtgtgtgtgtgtgtgtgtgtgagatttatgcagacatgtactagctattatgtattaattaagcttttattgtaaactactcatggcgttgggtgtttaggtttttcacatttaatccttacagcagctcagtacagtagataattattattatgtacatatttctgatgaggaaattgaggattggataacttgccaagaggcacatctaataagtggcacagacagtgtttaaatttggatctgctgaatccaaccctgcatctttg

SEQ ID NO: 48331 - DNA, 1021 bp, Homo sapiens
gaaataataatatgtgcatctagttaatataaagagatatgaaaaatattagaaacatttgaactgttgtacacatgtaaagggtggtgaaatataaaaatgatttcctttgagcaaagaactcggtctgggaaaagtcatgcttgcacagcattttagaaaatctaataatttcagaatgaattatcataatttcaagaaagcctttaaaaatatgaactctgtctaatgaaggctcttttgataaagcaaatgatcaccccttttaaaaaaatctgattttatatgagacgtttttgtcacataactacacatataattgcaatcagtaaagataaccagcctcagccagtcctgccttgtctccctaattgatgtcctttcttcttccagtatgtgcgagtatcttttgatacaaaacctgatctcctcttacacctgatgaccaaggaatggcagttggagcttcccaagcttctcatctctgtccatgggggcctgcagaactttgaactccagccaaaactcaagcaagtctttgggaaagggctcatcaaagcagcaatgacaactggagcgtggatattcactggaggggttaacacaggtaattgcaagtggaacagagaaagtcaacataggccatgggaatgttgtgcctgatgtaattttctgctaagattaattatttctatatcaccccacttcatccctacccatgggtccatagttgctggttatcactccctcctttatctaaatgagaactgtaaagttatttcttaaccaagaagaattacttacacataagaaatgggttgggatatttaatagttgactatacagaattcataaacatgactaatggaatttcacaggatatttttaaatagctcaagttgccaataattctttagggaatgacttctgctttaaattggaagccctacctctgtcctttacacaatttcaagtttggtaccaaatagctttaatttttacaaaatgacgtttccatctg

SEQ ID NO: 48332 - DNA, 1032 bp, Homo sapiens
atgatacacaaagtgctgttcaaaccacatttacattactaatgttattccaggatgcagtgaaaggatatttacaaattagagcaaatcctgaggtatttgccaagttggaaaaggtaccgtaaactgaaactcccaaaccagctgaaagatgtgactaaggagtaatagctaccttcaaatatttgagaggcatgtacaatgtattttatctggctctcagagcaggactgggtgaaaattacacaataccagattaaagctcagtatgagaaataactttatggctatttgtccataaaggaaagggattgcttcctaagcattaatgagtatcttatcactagagacagagcagaagctgaatgacatctgtcataggtgtcacagaagaaattccagatttaaatgaaaagtcgaactagatgtactgtgtgtaaggtcgtttgagactttgtattccattttgatttcccctacttactcctgagagcttacctatggtttttagaagacagtatgatgtagaattaaattggcagtcagatctgggcctcttgtcagctaacagtgactagatctgcaacattgggcaagttatttctggacctcagttttctcactagaaattaatggaactaattgaataataatatcccttacatttctaatgtaatgtgaaaatttcagccctactcacacgtaatggctcatatcagtttttagccttaactgatgactaaaatggtcccaatttgtttgttttgatatttggcttttgtacatactaacatagtacaattttgatagtaacacaaatccttggtcttgtgccatatcctccaagtacaaaaaagaatgatgaagaagaactttcatgaactagtttgtcatcttcatacttttccaggtttcttacacaaatttaccagttctgtatcctacatgaatatataccatagattttttttttctcggtgatttctataaatatataggtagtgttcactttaagagagcttcataagtgaa

SEQ ID NO: 48333 - DNA, 1024 bp, Homo sapiens
tataacaactataagaaagtattataattaaaaaaatagctttattgagtgataaggttcacacttttaaaggttaacttcagtggaataatgaagttttaaagggtgctaagttaaaactgatagccagctttcattattagtgcttcccagtaacgcaaaagggtcactttactcaaacaaaacatgttagtattcagttcagtgttctgtgtctatatgaaaaaatcccattttttaagtggtcaactttactgtttttttcttttcttttcttttaatcttggcatttaccaatttgaagaaaactttgaaaaatgattttcagccttaatttttttaacatatttgatagccagtgttaatcaggaatgggcagatttcatcaataatcccacatactattttagcacttatattttagaattttagacctgtgttttctttcgtgttgaaaccaaaatatagttggagtttcataagtgtaggtactttaggaaatattacttctctgagcctgtgtttcctcatctgtttaatgaagagattgaattaaatgatccccaagatcttttccaattctggaattctgtcatctaatgaaatgtgtgtaattagaatacatgccttttattttatttgcctgattaaaagttaggacttaagtaaccaggagagagaaaataaataatgaacttaaataatgttcatttttgggatgaatgaacattggaatgtcctttttgggaaaattggatatccataataactccaatttctgaccttctgatggaccaaaagaaactcggggcctggcattcactatgcacctttcccacaaagtccttgagttcctcatctgtgtgcttcagaggtaaaaaacactgaactgggagtcagtatacctgggttctaattatagagctgtcatctactggtgactttgaagatctgctcattaggcagctggactctagattagatggtctctaaactcctttctagctcatactgttaggcagtt

SEQ ID NO: 48334 - DNA, 1030 bp, Homo sapiens
aaccccatctctactaaaaatacaaaattaaccgggtgtggtggcgcatgcctgtaatcccagctacttaggaggctgaggcaggagaaccacttgaacccgggaggcgtaggttatgatgagctgagattgcgccattgcactccagcctgggcaacaagagtgaaactccgtctcaaaaaaaaaaaagaagccaaaaatctgtttggaatcatacctaaaatagtaatagtcattaaccaccaataaaatttacccatgtctgtgttttaactttttattgtatgagtctacattcagttattaaaatatttgctatctccttttctttttcagagcatgaataatctttcatttagtgagctatgttgcctcttctgctgtccaccttgtccagggaagattgcttcaaaattagcgtttttgccacctgatccaacttacacactgatgtgtgatgaaagcggaagccgttggactttacatctgtctgaacgagcagactggcagtattcttctagagaaaaagatgctattgagtgtttcatgactagaaccagtaaaggcaacagaattgcttgtatgtttgtacgttgttcacccaatgcgaaatacactttactcttctcacatggaaatgctgttgatcttggtcaaatgagcagcttttacataggactaggatcacggattaattgtaatatattctcatatgattattctggatatggtgccagttccgggaaacccacagagaagaacctctatgcagacattgaagctgcttggcttgctcttaggacaaggtaaattgtggttggaatttatttttcatactcgtggtggttagctaaaaatatcttgtgtaagaatagaataaaagctgtttttattatacataactgctatatagaggttatatttactattatatacctgtgaataaatattttagacagcaattttaaatttcacataatagcaaaacaaagtttttaaagacagtttcaggtttgtttgtctacattaa

SEQ ID NO: 48335 - DNA, 1037 bp, Homo sapiens
tttggactatgttcagaaattcattagctaatagtcacaagtgttttttacactttctcatggtttacttgcaacttcagcttacaaggaacctctcaagaacatgaatccttttgattcatcaaaccgtggattaaaacatatagatagcctaattgagttgcactgctcatttttaataaaatggcttttatgttagaattgggttagaaataagtctgtgtcataaagataaaattttccagaatagtcttgtgtaggcaatctcacttagttctgtgtgttttatcaatgttcaacagaaagatctatgagatttacgtatatgtactttgatggaaaagccaggaaggaaggtgctctttagcatttgaagctagtatgaatttaaagcatggaactgtttgttctggattgtctgggtttcaaaggttttcgttcagcactgcccattagggctttctgtagtgaaagaaatattcatactatgctgtgtaacttgtagccacagtggctggtgggattgaagaagtgaatatttaattttaggtaatttaaatttaaataatcatatgtggagagtgagtgcttagctagtgcagtgtctagcagtatcaagaaactgagggaaaacaaaagtaataaaaagcactgcattaaaataaataggacttctgacccaaattagtttgcttggcacagcttatagactctttacccttaattttcatcttctactataatgtcatcatagatctaacatcttcatttctgaaccttactagctttttttttactaggatagtaagttcacaacttacactagaactgacactattttgatgtctctggttgatgcctcctatcttcacctcaactttcttttttcgtctaactccagtactttccaccagtgagaaaggactcttatttgcacattgcccagtacatttttttttccatttgagaaactcctctaaatttttctaaactcaaattattaaggcgtttgttcagtttaccccaacaaaacccac

SEQ ID NO: 48336 - DNA, 1055 bp, Homo sapiens
gaattttaagaaacaacctataattctgaagcagacctagtttgctgtaagtgtggaagtatacataacagtgtagtttacttcgccagacctttgggtaagggggtggggggtagtgcttgggagttgtagtacagcaaaatcaaacaaaaaaatcttacaaaaaggagcttgagattcagaatcaacagaggtatgtgatgaaaagaagtactaggtaggcaggcaactgggctgtgaactaacccagaacataattatttcaaattaaaacagaaatcactggggtctaaacatgtctttaagaacaacatggattttgttgaacaaattctaataaattggaatatgttaaatgtaataaaaaggcaaaaacttcagaaaattaaagcctcttctgaaagtccaaatgtgaagcaaacgaaaatgtgccttatttttgaacagtgaggtgtaattgagtatcaagaatgtaaacaccttgacacttggaatttagtgacataaaattgctgtttattctctgagttttaccatgccccttggatgggcagtgaatgacactgtaagtactttttattatccaattaatgagaatcaaccaatagataaaaacttaataaattgcaaatgatataaaacttaatgtgaaacttaattgtatagtcagcaataatggtatatgattacatgggggagccagaagaaacttcctaaagttgatagaataagaaatacaggttcagctataatatctaaagttataactaatacaaactaaaataaatcagaatgagcatagaaggtgggaattagggtaaatcttctcagtctttcgtgtgtgtgtgtgtctgtgtgacagagtccagctctgtcacccaggctggaatgctgtggcacaaacttggctcactgcaacctctgtctcctgggctcaagctattctcctgtctcaacctcccgactagctgggattgcagacatgcaccgtcactcccagctaatatttatttatttatttatttatttatttatttttatttttagtagaaaca

SEQ ID NO: 48337 - DNA, 1033 bp, Homo sapiens
cttttgttgcccaggctggagtgcaaaggcacgatcttggctcaccgcagccttcgcttcctgggttcaagcgattctcctgcctcagcctcctgagtagttgggattacaggcatgcaccgccatgcccagctaattttttttttttttttttttagtagagatggagtttcgccatgttggtcaggctggtctcgaactcccaacctcaggtgatctgcccacctcggcctcccaaagtgcttggattacaggcgtgagccaccatgcccagcctcccatgtttttacttcctttccaccatgcaccctatgcttttcttctttctcactttacacattatcctcctagcctggaggattttccctccgttttgggaagtcatatctaaatgaagttctaattctctcacaaaggctttcctaattcttgatctctgctgtcttctgatttctgaaagcttaaaatctactccacattaaatagcccttaattttttattggatgaaaagaccctacagaacattaattcccaatctgttaaatatattgttcttattttcttatattaggcatctagtctattctttgaaatctttattccatttcttcttaagcactactgaaaaaaaatgtatgaaaagacaaaatttccatatttgaagaaggtggtgaaatgtaaactttttgaggctggaaaagttttattaagcacaagtaacaagtgtttgttacacatctaagagtagtgctatttcttcaaacctttacttacagatgcatatgattaagggaaaacagctgcagccagaggaaaaggaagtggtagagatgacagtttatgcagctagccaaactgggtagacaaactgaaggccacattagtaaggattgactgacatgttacaacatctatgtaaagagagttaaagagtattacatttatattgagagtgcataaatgttataattcccccatatctctactaaaaaggtattatatatagtatatggaaaagggattgatagttaa

SEQ ID NO: 48338 - DNA, 1042 bp, Homo sapiens
gtgttgtggtaatgcctgttttcatctgtaaatagttaagtatgtacacgaggcactacttctgatttattgcaatgttcagtcctagtttttacttttattcttaaagcattcagttttgctttcaattttatgtaccttagttctgagttagacctgcagatgtgtacagatagttcatatttatgtattgcacataatcatgctattcagcattgatgctatattgtattatgtaaataataaaagccatgtacagagggaaacttcacttgttcattgggtttttaagccatagttggagtcctaaagggggaaaattagaaaatgttactttacatggctatataattttttttcctttgccatcgctgaacttgttcaagtgataatcaagagatattagaagcatttgcaggtatgatacctgataggcagtttatttttgaagaattcaataggcacctttgggattaaaacaattttaaaatttgagaaagatgaaatttgaacaattatggcctacctcgcttctccatgttgtaaaagatgatgttttatgacaattctgaagaagaaagtaggtatgacttagtttacaaaaagagttctgttttatttctgttttgggtttggctctaatacagagattcacccatggacttggtctctgtagcgtttatgccagatcataaagaacaaggggtgacaggtacatgttgactttacctggggtaaatgattaccagagtgcaactgttgcttctctgtgatggagtttggggtggaaataccctagttttatctgtcagttctttgcatgctgctacttttgcttcaagttagggaggtacatatgtatgtcaaagttcctatactgacatagggtagtatttctctgaatatgaaaagtcacaattgagttgaaaatttagaagttgaagatttagaagggcaacttaatttttcaagttaaaaatggaagtaagagtggtatagagaaggtaagatgagccctcggactccatcactctgaaggtct

SEQ ID NO: 48339 - DNA, 1105 bp, Homo sapiens
aaattttgttatttttgtgttaaagaactagtggcagtgtgggctttagtacagtaatgtattttttgttcattgtgagaaattttattgatgccatgtgtacactgaaacttaaagcctttttaggtggagaaacggtgggactgtttgtagatgctatctctgtcgatagtggatgcccattttagataagattcttgttctgcctgtggaatccttaatagtttaaaatcaatacttctcgagtagtttctaaagactgtttgccgatctgtttttaaaaccaaggtttaaaaaaatctttcaagtcttcctatgatgtttagtgcacctgtgaaaatggtaaaatgattgttttggaatttttggatctgacgttgatttagggatgaatggtttgagttttatttgtcaaaatttgctgtttttatatctacaggattttttttcctataagcataaaatcaaagttggctactgttatttactgtgatgtaatgaatttgaactgccctgattgaaaagtttgcatttaggaaattataacgtggaaaaactgagcatatgattaacatctcccagctctttaaaacagaattaggattttgtttttagtactggctgttaccagtgttttaaaggaatttcttgagtgaagcgatcattttacaaaattagagaagcaagtagtatggtgattggcaggaatttctcagatttgaatcaagttctgatgttaaaatggaagattctgtttaaagcttgtattttcaaggaatacttataaacatttttatcaggcatcttcctgtttctcttaaatacttccttttttgacttaaaaatgttagccagtgaatgcttgacaaatttgtgtttttgtccttttcagttgtcactcagcccagtccatcagtttctcagcccagtacttctcagagtgaagaaaaagctcctgaattgcccaaaccaaagaaaaacagatgtttcatgtgcagaaagaaagttggtcttacaggtattacaaaacacaagacaatgtatgttttacttctgcagttaacaaggagcttttggtcactccctaagagactagttggtctta

SEQ ID NO: 48340 - DNA, 1029 bp, Homo sapiens
aatctggaaagtaaggacttgcccaaggtcactgacttagtggcagactagagacttgaactcaggtctccattcccaggtgagtgggaattcatgccatctcatcacatcatgtgcacctgaaagaactgtattccataggtgtaaaagctctttgttcagaattggaattggagaattgttcagttacactcgggtgtttttttaagctgtaagttagaggaagccataaactttataaaatctgcattctagctatacctgatagagctgacacgtgcatgctcaagttgctaattactttaaaggcaataaatagtaatggtatttttttctaaaatacaaggggaatgcaatacctaatgggaacacacatcccccacttcatcccctaaatcctcactaaatgaggattcttttttacactgtctccactgtgcttagttttttatcaacaaccttgaccattttagctttgactatgctttcatcttctagattgagattgttctgtagtttttcctacattaggaaaaaactagcagccctttttttgttttcttatgttagatatatgaacgctgcatccttagttcttggggttgtgtaggagttggcaggctttgagatataaatagaagctgatttcagaggcccctgttgactaggctttatgtgagagcctccatccagctcagcttgtcacattgcagccttgtgacaggctgaagcgccctcccatgtgatctgagcttctgagaaatattaaagcaagctgtgcacatgtgatggcatttaaaagctggctttctaggggaaaaaaatctaaaagatgggaacccatgtagaagactcatgtcctggtacctcttgtgtgtctcgcagttgaaagttatttataatgaaatgaaggtagacatgttctctgaagcaaagttggaatactttgttatctctgagtgtgtgaaatctttagatggagtatcctccattttatctaaaacaaatattttaagaatcagattaact

SEQ ID NO: 48341 - DNA, 1031 bp, Homo sapiens
tattgttaaatgtatagaatgtgtgataatcaatttagggtatttggggtatcaatcaccttgaatatttatttctatatattaggaacattccaagtcctcttttctagttattttgaaatatacattgttgttaactattaactatagtcacccaactttgtaacaaacattagaacttactctatctaactgtatgtttgtacccattaaccaacctctcttcatagccactcccacccatatgcccttcccatcctctgatggctatcattctactcactacctccctgagatcaactttcttagctcccacatatgagtgagaacatgcagtatttgtctttctctgcctggcttatttaacttaatgtcctccagatccatcaatgttgccgtaaatgacatgatttcactctcttttatgactgaatagtactccattgtgtatctagaccacatttcctttgtctgttcatctgttgatggacacttaggttgattccttatctttgctgtcagtagagctgtcaaaaacatgggagtgcatgtatccttctggtatactgatttcctttggataaatgcccagtagaagaattgctaggtggtatggtagttctatttttagtttttttctctattgttttccatagtggctgaactaatttacatttccaccaacagtttgagttcccttttctgtacatcctcaccagcatctgtaatttttttttgctttttaataatacgtattctaatgtaaagtgagacctcattatgatttattattattgcatcagtcaacctttaatgtccaaaggaggcatggatgcagagcataggagatgtggcagggtctcaggccttgctccggaaatgagggagagacgaacacaaaccagacactttcaactgaccacacagtctgggagggcagggagaaacacagatttggacattcatgaaaaaaataaaacctgaaatcaagcactcccattttgtgcccattgaagggtttgatataggaa

SEQ ID NO: 48342 - DNA, 1060 bp, Homo sapiens
ctgaatgattgtgatctcaggcaagccactctttggcttatttcctcatctgtaagagaggattaataccatctatttcagatggtttattaggtcatatgagcttttatatatatttttgtgtgtatgaaagcacatgatagacgattaccataaatgtaatttcagtctgtgttgactgctatatagtgatggaaaaaatgaggattgttaacaggacattagttttaattatcttacagtgaccctttgaaaaagatttccgtggaatcctggggaaaacagtaaaaaatggtaggtacagatacagattccaaaagtttgttgggaattataatgaagtataatagtaggtaatgggtgagggcataagtaaaatttaatggcatgttactcccacttttattaacctgctagcacatccctcttatatatgtttgattctttctctttgatacctatttagatgtgggatctttcagtcagtgtgtatgtgcattttcagtgaaaagttgcctttcagaaggactgcaccaatttacatgccaggaacagtgtttaaaagtaacgtatatccattctgtggccagtactggatattgctgagcttttcatttttgtcagtacagacatacctcattttattctactttgctttattgcaccttgcagatactgtatttttttttaatttttttattttttacaaattgaaggtttgtggcgaccctgcatcaaacaagtctgtattggtgtcgttttccaacagcatgtgctcatgtcatgtctctgtgtcagcatttttttgcaatcacgtatttttaaattaagtatgtacattgttcttttagacaaaatgttattgcacatttaatacgctacagtatagtataaacatacttttatatgcactgggaaacctcaaaatgtgtgtgactcactttatcatgatggtctggaactgagtctgcagtatctccaaggtatgcctgtataagaagtgttatctaatttgaatattcatttacttaattattgggacagttaagcaatttctctg

SEQ ID NO: 48343 - DNA, 1072 bp, Homo sapiens
agaaaaacagtaacatgttataaaatagtgtgtgggaaaaccttaaatattcatacatttagtcaggggttggcaaactacagcccaatttggcctgtagcctatttttgtatggccctaccactacaagtatttcttacattcttaaagggtaatggggaaaaacacaaataagaatatatgctagacactgtaagtgggacacaaagcctcaactatttgccatctgtcctgttacataattaatccactattacctatgtttattagattaattatacttctagaagtctgtcagaggcaaataatcagatatgggcggactaaagactgatgaaatggacagacatactcagcaagaacttagagtgaacttatatttctaacagtaatggagtggacagtcataagacattcatacagtaaaactattttctagaaataatgaaatagagaaatgttcctaatgaagtataagatgtaaaactgtatatggaatatactgtacatcaaggaaagactgcaaggagataaatattcaagtgcttactctgaatgttagacttataggtgattttttaattttttaatgctttttcatgttatctcagcttcctagttttgatcttataatcaaagaaaaaaacatatctttgctccttctgttatggccactaaaagaatatgaagaaagctgcgtgtggtgttgcatgcctgtagtcccagctatttgggagactgaggcaagaggattgcttgagcccaggaattctaatccagcttgggtaatataacaagacactgtctctaaaaaaaaagttaaataattaaaaattaaaaaagaaaaaaagaacgaagagacatgagagttgagaaaataaagaaccctttgaggaatgtgtctctgttattcatcttcatatatatccagtgccagacattagctaggtgcttggtaaacatttgtttaaagaatgggcaactaggtcgtgaatatgaaaaactgctcagcctcaaagagatgcaaattcaaattatatataattttccccatatcaaattagcaaatatt

SEQ ID NO: 48344 - DNA, 1033 bp, Homo sapiens
taaagttatttggaatctgattgtatatgtgataggaacttttgaacttcgaagatcttgatgaaataatttactgattaaacccagaaatagggaccagggacagcattactttacggagcccaaaagagaagtttggatattttatttctccaggtttagtagtaacagagggagcaaggcgtcagaccatcagagaattgaatttgatgcaggaattgtgacggaaagaaccataaagttaggaaaggcagctaacatcagatagctaagagtgggagatacagaaaagtctggtacattttgctcttgaaaaatctagaaagaatattgggaaatgtcttgggaatatggtggacccatttagttaagtgcgtagttgtacttacttttaatatattaggaccaatttaaaattgatatttatgggtaagtatgggatgggactttgttggggtaggggttgatcaggaactgaagtgtggcaatatagagaagagatcttgtgtgaatattctagtggttgtgatactatttcctatactctcttctttaccagcgtaatgttggattcaggacatttcattttttaaaaaaaacagtttttatttgtatatactctcttgaaacacttcaaatacttgggctgaaaatagtataacatcaaaaatatgctttttaaaatgtcacttaaagcctaggggtacagaaagtttatgtagcagagaacagtggattgttacattctaatattttgtgatcttctagacttaaactgtagccactaatcatatctggataaatttaagctaaaattaattagtatttaataagctttaaaatttagttgctcagtttcactacccatatttcaggtgctcaatagctacatgtggctagagtctgctgtactggacagtgcaaataaaagcttttccattatcgaagtaggttgtgatggacaatccggttctacacatttagcaagtacagttgacccttaaacaatatggatctgaactgcacgggtcca

SEQ ID NO: 48345 - DNA, 1010 bp, Homo sapiens
tcgatgtcttagctgatgtctcccaggcgaaaagtacccagaaaatcatgagagtgcagttcctggaaattcagttatttctttctcgctgggcttgctctgcctttagaattgttgtgactctggattcctgcggaggaactagggcctggggtgacctcatggctcctcagctatgatgcaccttctcttttcttcccttatctcaagtaggtcctgagcagcccagcccaggtggtctcttctgctcaccaggggtggcctggagtcaattgataagagccctcttttcttggcccttacaaaacaaatttctgcctaaagacagctaaagggaagaaaaacaccaccaaaccaacaactcctttgtacctccattatccccaaaattagataaagaaaaattagaataccaggaggcagcagacacctccacaatgcagctcggaaacagaatttctatagatctgctgtcctttttttaaaatcacatagaagagtttgtacaaatctcatttgttttcacttccttcatttttgtgtcttaacacattattttgaggaaaatgcctctgaattttatccttgctcttcaattacggttgaacaggaactgttaattgagtttagccactcaaaagaagaacaaagtatttcatcattcttacatattctggttggactcatggttaaagaagacaaatagaaaaactcacacatcagcctggtgtggggataaaaccaaaaacagtgatgctcacaggcatgcctgagagtggaatggtggtgttggtgggggagtgcctgtttactggtagtaggagtaactctcgtcatcatattccagctcatctatgtcatcgtcatccagcagcccatatttaaatttccggtagactgtgccatcctggcccatgtagacgatgtcatcatcatcatcctcatcatagtcccgatccctgtactcaatcacctgatcctcttcaaagctggtgctctctctatagctg

SEQ ID NO: 48346 - DNA, 1017 bp, Homo sapiens
ctcctcagacaccgagttaaagaaggagcagtttattcggccaggagcatcggcaagactcctgtctcaagagccgagctccccgagtgagcaattcctgtcccttttaagggctcacaactctaagggggtccacgtgagagggtcatgatcgattgagcaagcagggggtacgtgactggggactgcatgcaccagtaatcagaacgaaacagcacaggacagggatttttacaatgctcttccatacaatgtctggaatctatagataacataaccggttaggtcagaggtcgatctttaactgccaggcccagggcgtagcgccgggctgtctgcctgtggatttcatttttgccttttagtttttacttcttctttctttggaggcagaaattgggcataagacaatatgaggggtggtttcctcccttagattgaggcagtgctgatgaggcagaaagacagattgagctgatttttaggagagaaaattcagaattgataaagctagcttggtctttgagtgtaggaagataaaaagaagaaaaaatagcactcttgttgtgtatctcttacttggaaaatgtaatgctaagcacataaaaatgctcagaaagttatttaataagtaagtctccatagcattatctggtcttgatttaattttatttccaattttaaaattactttctattaactggaacctcccatgctttacccagccttttggtgtgtttccagtctacaaggattctcttaatatttccaagtagaaaactaaaaggtgactttgttttccaatcacatatttatctatttagatagtcattagcatagtattcaaaagccatctaagaatgacgttgcatgactaaaaacaaagaaggaaagatgtcaaacctcaatacacaagcatgagccttcttttcattgcaggccacacagaggaacaccacaatttttcttagtattgaagttcatctcaacctcaaccaatctttaactgtgtatcat

SEQ ID NO: 48347 - DNA, 1039 bp, Homo sapiens
atacagaactcagaaattgcatctttttttttttttttaaagatggggtctcactatgttgcccagactgaagtgcagtagctgttcacaggccaggttgtagcacactgtagcttcaaactcatgggctcaagtaatcctcctccagcctccagagagctgggactataggtacatgccactgcctgcatctggctcagattacatccttatacattgtggtacccaataacaaagattaataattggtttttttatgcatttattttttaaattatgtagaaaataaagagtggagttacaaaccaaaattataatactgactttgataattgctgtctgtgaaagactcacttgaccaaagataaaaatgatttaaaagcctgtttcataaaattgagcttgccacaattaatgcacttcattcaccatttacttcatgcatcaattgcgcttggtcaccctcttaagataaaacagtttactacatggatggtggatggaggatggtgcttattgatacagtcccacattggtgcttttctctttcctttttaaaccacctgagggtatacttttctgccctactctttacaggaccccacaacttcagtgttttatctgttagatttggctgaatcttttgtcagctcaaatgtgtggcaaaaacaaattacagtgaagctaaattttgttctgtgtggagttaatagaagtgaagtgtgtcactgctggaaaactacagagctaaatgctggcgtaagcaatagtaatgacgcagaagtacttaacattttgctcagtatttcagttatttttcagtattaatgatttgaaaattattttttggagacaaggaaaacaatcgaaagatcacaaaataccattctgttgaatgaggaaggaaaagaaggggaggggacaatagcccataactaatttgtctttagctacttagataacaaaaatgttattatacagccagttaaggaatgccttttgagtgttaggaaaaattgaatttgaaacataggcatat

SEQ ID NO: 48348 - DNA, 1076 bp, Homo sapiens
ggttcaagtagatagctggtatggattttaattgtcttctaaatcatcctttatgcagggaaagcctaacatgtttgagtgattactttttgtttggcatccaatagtgccaaaatggactttggcatcagactgatttggttaattttaggtgctttttttttttttttttttttgagacagaagcttgttcttgttgctcaggctaggtgcaatggcatgatctcgactcactgcaacctccacctcctgggttcaagagagtctcctgcctcagcctcccgagtagctgagattacaggcacccaccaccacccctggctaatttttgtatttttactagagtcggggtttcaccatcttggccaggcttcagtcttgaactcctgaccttgtgatccacccacctcagcctcccaaagtgctgggattacaggcgtgagccaccgagcctggccctaggctcttattatttagtgagtgaccttgggtatgggacctaacttttatagcctcaaattactcatatgtaaaatggggatgatagaacctgaaatagagtgattttgatgattacatgagatactggacctaaaatgcacacggcgaatgcatcataaatgttagcaacctgtcacttactcaggagatttctggggtaaattgctgttgtattttcacttgttgatcactactttggaaaggttaaaagtgtacttttaaaaatctcagttggcagggtcttaagatgacttgaatctatcaggttgtacctgaagaatctggagtatccttcctcatctaattctccagtttttctcccctcgaattcctctgtcagaagcacaactgtaagaacaccaccacttctctgctcagaaattttcaatagcagtttggagatgaccttaggcaagtgcacacctcttagcttcacattcaaaaagccttctacaattgggcctctgggtctatccttctagatttatcacattccctctgctcctaccaaaggaggtcagttgcatgctcttccgaatacatagccgcattttcccccctgacttcactcccat

SEQ ID NO: 48349 - DNA, 1045 bp, Homo sapiens
gcccttgaaagccgggtattgtccaaggtttctccccatatgatagtctgaaatatggcctcgtgggatgagaaagacctgaccgtcccccagtccgacactcgtaaagggtctgtgctgaggtggattagtaaaagaggaaagcctcttgcagttgagatagaggaaggccactgtctcctgcctgcccctggtaactgaatgtctcggtataaaacccaattgtacatttgttcaattctgagataggagaaaaaccgccctatggtgggaggcgagacatgtttgcagtaatgctgctttgttattctttactccactgagatgtttgggtggagagaaacataaatctggcttacgtgcacgtccactcatggtaccttcccttgaacttaattatgacatagattcttttgctcacacgttttttgctgaccttctccttattaccaccctgctttcctactacattcctttttgctgaaataatgaaaataataatcaataaaaactgacggaactcagaggccggtgccagtgcaggtccttggtgtgctgagtgctggtcccctgggtccactgttgtttctctatactttgtctctgtgtcttatttcttttctcagtctctcatcccacccgactagaaatacccacaggtgtggaggtgcaggccaccccttcacttcattaaatttaccacaatttataactattttaattatgtgtctgattacttttttactatctaactactactataccttccagatcaccatcaccaccaacccctgcattagactggcaagttccatgaagtcagagacaatgtcattgcttccttgccactttatctccagtaatatttgttaaaagaataaatcaagaccattttaaaatgaattctagtttaatataatcactatttcaattctgaccaaggtgattatgtatatacaaattccactcaaatgatgccttatgtccccaagcagtatttttcaacaagcaaaacaaaaattgataagtatccaaaaaaagttac

SEQ ID NO: 48350 - DNA, 1090 bp, Homo sapiens
aattcattctgaagatgttcgtggacctgaacccagacagtgacaaaattatctactcccacttcacgtgcgccacagacaccgagaatatccgctttgtctttgctgccgtcaaggacaccatcctccagttgaacctgaaggagtacaatctggtctaattgtgcctcctagacacccgccctgcccttccctggtgggctattgaagatacacaagagggactgtatttctgtggaaaacaatttgcataatactaatttattgccgtcctggactctgtgtgagcgtgtccacagagtttgtagtaaatattatgattttatttaaactattcagaggaaaaacagaggatgctgaagtacagtcccagcacatttcctctctatcttttttttaggcaaaaccttgtgactcagtgtattttaaattctcagtcatgcactcacaaagataagacttgtttctttctgtctctctctctttttcttttctatggagcaaaacaaagctgatttcccttttttcttcccccgctaattcatacctccctcctgatgtttttcccaggttacaatggcctttatcctagttccattcttggtcaagtttttctctcaaatgatacagtcaggacacatcgttcgatttaagccatcatcagcttaatttaagtttgtagtttttgctgaaggattatatgtattaatacttacggttttaaatgtgttgctttggatacacacatagtttcttttttaatagaatatactgtcttgtctcactttggactgggacagtggatgcccatctaaaagttaagtgtcatttcttttagatgtttaccttcagccatagcttgattgctcagagaaatatgcagaaggcaggatcaaagacacacaggagtcctttcttttgaaatgccacgtgccattgtctttcctcccttctttgcttctttttcttaccctctctttcaattgcagatgccaaaaaagatgccaacagacactacattaccctaatggctgctacccagaacctttttataggttgttcttaatttttttgttgttgttgttcaagc

SEQ ID NO: 48351 - DNA, 1032 bp, Homo sapiens
attgcaaaattacatttttagtttatcttgctagatatgtcacaatcctttttcaaagcatctaggagaattcttggtacataagagactccttcttaaatcaatgtaagaaaatataggttgggcacagtggctcacacctgtaatcccagcactttgggaggccaaggcgggtggatcacctgagattaggagtttgagaacagcctggccaacatggcaaaaccttgtctctactaaaaatataaaaattagccaagcatgatggcaggcaccagtaatcccagctgctcaggaggctgaggcaagagaatcgcttgaacctgggaggcagaggttgcagtgagctgagatcttatcactgcactcttacctgggcaacagaatgagactccatctcaaaaaaaaaaaaagaaaagaaaatataaaccaattgttttatcatcacacatgaactgaatgctacacaaatgtagtgtgctcagaaataccagaaatctatggaagtgagactgttacagaggcccattgtagatagacctgaccttacaaacaggtgttctaagagagatgtcagtctggaagatgtaaaatgatccataatattgggtcgtttggaggacagattgacaggagagcccgaggcagctgtatctttgtgcacacttattatatagctgaaacaagcatacttaactcagttgaacagaagtaagctatcactcccctgatgaagagcctacagtggctcccaatcactcagggaatcagagtgaaggccaagctaagaaataaacttagccttggctttcaagtcatctgtctgctttcacctatccacattttgtgaatgggtgggtgcctgggtgggtggatggatggtcagacatagcagtgttagggaaaatgattataacagatcaaatctgcagtgcagatgtaggcttcatgagcaatgacacagtatttattgaaccaatgatgattgaatacattagcagattaggtaacaaagtgtccctcttgtctctt

SEQ ID NO: 48352 - DNA, 1026 bp, Homo sapiens
tctgtatccgaaatatggaatggcaagatggtctcatggtcaccatggggtgcattcaaaatgtacttttaagggtaatttagactatgtatgatttcttccttgcactctgatccgaattgctattacattcctaaagtcagaggaaatatataaatctgtgtaccttttattttatgccagctgttatgagcacatggtcactgccagaattccttctactttgagtttctgacttccagtgggaagctgagagttagaccaggagcagcagttccttaatcacttattcaaaccttaaggaagatattggtggagggtggcagaaacagtttggggaatttcagatgtttttgtagttgaataaaaccgtacagcttataaactcacaaaacctcagaaatgtactatttaacaagtatggcatagctatcagtcagtttaaaaaaaaaagatcagccaatccaaatggatattagccataaactgaatgtcagccagctcataacacacattgttcctgaatagttgaactcttactgcctcactctgcctctgtggcagctttgagatcttcagtgctcatttccctcatctggtctatttcagcaatagaattggttctgatcccttctcccttaatccttatttaaatactccactcttcaagacacttgtaagttcaaaaattttcccacctatttccattctctggatacctgaagagttacttcaccccagaggttttaagtgtgatacactctttcatggctctgtgccgactgtggaccctctcctgctgatgttgtttgttttttttgtttgtttgtttgttttttgttttttgtttgagatggagtctcactctgtcatgaggctggagtgcagtggcatgatcttggctcactgcaacctccgcctcccgggttcaagctattctcctgcctcagcctcctgagtagctgggactacaggctcatgcccctacgcccggctaatttttgtatttttagtagagacggggtt

SEQ ID NO: 48353 - DNA, 1023 bp, Homo sapiens
tgacagaccaagactccttctcaaagaaaaaaaaaaaaacaacttctaaatgcttcattaccgtttttcataggataaagaggtattgtttttgtttctttatttttattaatggaacagtttctggctctgttaaaggggcatttaagcaaggtattctaaaagctctattccttccccaagattctaggaaagtgagccttttactttcagtttttcctaacacaatttcttgaatgtctgaagcttcagtggtcagatttcacatgggatgttccagaaagatgatattccctatgtaagactctgaaattcttgggagcatttgggccttttttttttttttttaatcaaaaagcttgttctttttattttttcgcctgtctgaattctaccaactgaacagggaaatcttctttatctgtttttcctgttgtcaaataaaataaaattccaaaccagcagcaacatactcctctggttaatgagattgtaggagcacagacattacaaaggactaaaatgattaggctttttctgaggtataatatcaggaaatgaaccacataacattatgtgatctcagaaatgaagatgatatgaatctataaagcaggcatttacctattatgccagggtggggagaaatcagtcaatgagttgttttgttggtataaaatcaacctacagttggttgttaggggtctcagtctctagtcagtgttttcaaaacatgatttaattcaccaacagtctcgtcaacagatctggaggcaaaaaaagcttccatggtcaaacaagtttggaaaattcaataatatccccaatgctaggctcatggatttatagcacctttctaggtaagggccattgcctttttataacttctgtgttctgcagcacagacctctgtttgactatttataaccattattctccccattctcttacttggacttcagaatccatttgtcaaatacctattaacattccaattaacttagttttccattaacttaattt

SEQ ID NO: 48354 - DNA, 1043 bp, Homo sapiens
ccagtgtgagatgctggataattgtttatttaaatgcttccaatgtctatttttactgcaagcctctcaccacaaagcagttaagaaagcttctctaatatatgtgttatacattcggagttttctttttttcttttataggtaagcataaactcccatgggggcagaaaatattacgaaaattctttgtatgtgtgtctgtgcttcaatacaatttggttgggctggggtttttttgtttgtttgtttttttaacatgaatacatgaggtgtgatatctgggcttcacgtgtaacagtatgagctcagcagtgactggtagagggagtgctgtttcttctaccatgtgtcttccccagagtccagttaatactccttgtatagtgctcaggagtggcctatcggtctgctttccctacctgtgtccctttcatctctctccagtgctctccctgaagggaagagtatgaattgtgaccctgggctcagataaaggaactgccccacgaacttaaggtctatgcccaaatcatcatcttctcaccccttccctagagacaaacacattgtcatgatctagactataaaatcaacaatggaagactgataattcatttattctttttttcttttttgttttaaagtatttgattcagatgtaagaccaaacatgttatatatgttataaaacaatcaaatgcagccaggtgcagtggctcactcctgtaatcccagcactttgggaggccgaggcaaacggttcacctgaggtcaggagttccagaccagcctggccaacatggtgaaaccccatctctactaaaaatacaaaagttagccaggtgtggtggcgcatgcctgtaatcccagctacttgggaggctgaggcaggagaattgcttgaacctgggagacagaggttacagtgagccaagattatgccactgtactccgactccgactccgtctaaaaaaaaaaaaaaacaaaaagtaatcaaatgcacacatctgcaccaaatacccatttgagaatgaggacagag

SEQ ID NO: 48355 - DNA, 1028 bp, Homo sapiens
ttggcacctgctctgtttacttaagcactcaattgataagaactggaatctttgctgatttttacctaaagctagaaaagaaaacctttcaagccagcaaaaataaccttcctctgaaaaaatacatcaaaggagtggtgccagctcagttggtattaggttgtgcattgcatgggttggaaacgatggactgtaaagaaaaggggtctttgcagcaggcagaagtaaagcaacaacaattaaagtaaacagagcaaactttccatgacatgctgctaccagcatttgtaataacccccaggataggaccctactggaagacgggttagctagtgggaaactgacaggagggatcaggagtggggaggcaggacacagttactagagcagagatacgtaataaaggcttggagatagaaacaaaagcaaaacatttagaatggttaagactcacttgatgtcacttacctgtcccagtgattgggttcttttcagtgccctctgtgaagacaagaatgacatcagagcatacgtccagctctactttctcaggagccacagattttggctcttcatgcagaaatactcagaatatgcagataatgacacatatcagaaaccttatcactgaacattttaaattccatggtgggggaaggaggcatgtcctacacaataggcatcctgttttgggggaggtttatcacaaaaactttttattgatcactgaggggaaaaaatggggttttcatctgaaaccttgggtgtctcagtctttttctttccgattttgtgtaagctagacaattatgttggatttactttctccatcttcagtggaagaaatgaccttgttgagtaaaacaagtatgttaagtgtcaattcataaacacaggtttgtatggaaagagaggatatgaaattagacacacctgtgaagatctggggatgggtgacatcttttttttccagtaaacatttattgatcctttatgaggtaccaagcactttagtaagagctgggaag

SEQ ID NO: 48356 - DNA, 1007 bp, Homo sapiens
cttgccaggaccgataagaccttcacttttttgagaccaagaataactgtaaggtagggtcaagcaattactcttcatcctacatagccagcctcatattttactgcattctgtatggctgatgctagtctaaaggtactttaaaataccatgttaaaatcttggcttccattgaaaagctgctgttatgcagtctgtccaaatctataaacaaatgaacatcctgaatggagctaattttcttgagcttcagatcttcttacaactccgggtcttatggttaccagggcttagagttggtgtgtttaagttgaaaggcaaccgttgtttctttactttaaagcaaaaattccaatttacgctaatggagataattctttttaaatcatattttcaggtttcatactgatggcttactaagcttcatatgctttttactatacatagtgtatccaaacagatatgtggatctaaatgtaggattgatttaatgaaattattaaatttatcattatttcacatctatctccttctgtagttaaagcaaaacaaatccattaagggagtgaataggataattcttctaaatgtactgtaagaatatactttcattagctcttcgtttctgggtttcattttgttattcatcagcagagtatgaggtgttacaattacgttatagaatagtactggaaagaatagagttcttgcattcaaaggagaccagagaaaatttccaggagttagcatttagagcaggtattggtactcccacaggcgatgtgaaattgggggtgtcaacatgggaagatcattttaggtaggaacaggcaggactctgctcctgtgtttgatgtgttaggcaaagaagtaaaaacagtccaagaagctgacatttatagctagtgtgatggggcctaagtatggagatggaaagacacgaatggaaataggaaagtacagaggcaccaacggaaggagtgagttgaggtgaggtgccttcaggc

SEQ ID NO: 48357 - DNA, 1041 bp, Homo sapiens
atctagaggaatttgcattctctgcctgagctggcttggggccagctttgtggaatcctggtgccagttctttttctgcttcaggggctattttttaaaaaaatcagtagttacattttatgtttaccaatagatttatatagcaaatgatatttgttttttatttaaagccacaatatcaagtgtctttttaaaaatataaataataatcctcatggtatgcagatgtagcagaaaattgtgcaggtggtatgtgggcaactggatttggggaaatgctgctgcatgtcatgcacctctccataggtaggtttttcccctttattttctccctcttttcagcaaaactctcccctctactttcccactgaaaaatagcaatggtgagttaaactagttagtctgatcatggtgtgggcaatgggtggttgggttaagattcttatttcatttgacttgtccatcaaggccttcttgttatgtcactgactttgagcaattcccattgggtgcatgattgaagtataaagggatgcctttaggattgtggcttctgtgattctcctaatttccaggaaaagggcgaccaactcatgagctcaaattctgaagctctttagtggcattaaacctggctctgatctgtgaaagttgacattcccaaggtgtttttcccattcctgagagctctgcagagatcttatttgcgtgaagcaaatccataaagtcattagcagataagtagatggacctgcctgtggtgaacacccaggctttcaacctaatagtttgttggcctggctggtggttcctgctgaaaatctttggggataattagcacagctgactgttgctgagccaggtaaaaagttaaattatatttatgtttacacttattccagtggcaaagatgtggactcatgtaacttcttgcctttgactaaagaggttcatttagtttgtgtaaaggatttaatttcttaaaaaattgtgttgtttaatttcattctattagttctaggatgcagggtaaccagccga

SEQ ID NO: 48358 - DNA, 1015 bp, Homo sapiens
gcaaacttgttggaggtactagaacttgaactgcagggccataaataattacagtaacagagaaatgagcattgcagatgggtctgcgttgtttgccatgcaatttaaacccattttctcctgcccttgtctcataaaaatgggtcattcctgttagccaagaagagattatgctattcaatcaaattcttatgaattagttattttaagtacagaatgggatcatatacttgtacgtgaaagtcagtaattaaagtaggttacggtaattgttttcacactcctcctcaaataaaaagcataatttggtggaagatatacatttattacccacctatattttttccctaatttgaaaaataatacaggagtctcaataaatgtgcagaatctatgtttgaaaatacgtgaacttgtctgtcagcaattcagcttcgattttcaagtgtccttgaaaagaactgatgagtttttacctattctcgtcattacatggggtggtgaaggagctacttctgtttctgagactactatacttagtatttataatgctaaaacaaagttcatgaaaaaccaatgatacccttataatgatagtttctatgacatggaatagggattataaacaaattatatgagtacagaatatttgaatattcttcggggagagttggtttacaagacaagcattggagccattattaggtgtagaaaaatgtgacagagtaattgcagctgcccattcattcgtaggactttctaatcattcttgggaacatccctattgaaaatggctagtctcaaatgactccaaatatgagttttttggctactatgttgaaaatcaatctagttgaatggatttgttatattatatttaattgatgataataatagatatggccgtctgttttaattgatttttcctcagttactctgtgtggagaattttgaccttttaaggttctattttgtggctaagagataaagaaagtcaagttgagactatcgctgt

SEQ ID NO: 48359 - DNA, 1092 bp, Homo sapiens
tatcaaaactactttggtgggcaatgaacagggaacagagactagacagtttggatttggagtaagtggaggaagcaaagatagggtgtgaccacatgggacagagcacattttcctagagaccaaaaactctgattgtaccctggtccacagactcagtgcagaagcaggtatattaaaacccaagccttataatagatactgggaatgccaaaagcgaggagagtgggggcgggggcaagggttgaaaaattacctataggttcaatgttcactagctggggaatggatacactagaagcccagtccccgccagtatgccatatacccatgtaaaaacatgcacatgtactgcctgagtctaaaattaaaacaacaacaacacagaacctaaggtttggaaaaaaaaaaaaaaaactacccccttttttctctgtcagaagtaaccactgttcctcagcctacctagaaaagcactctactctgattcataagtttcttttctctaaatcaggcaatgagaatgaaggtacatgaggtgtctggatgtttttgatgctgctgtaaccatctggagactctcatatagggcacagtgtcacttccctggccactggcagaggctaggctagctggggacacactggagagagtcagggtaaagacttatttatagagagaaatggagagatgggacatcagttatatttcagttaactgctggaacatgtccctacttaaacttccagcgactatgtttttccccgtaacttaaacaatttatttcactaatcacatctgttctcttgtaagatggtttcttgggttagtaagctgtgaactgaagtgtttgcattttgattttaagaatttgctttttttctcagaagggtgctaactcttttagacatggctttgatatatgtgtttggtaacaacaatagacttattggtatggaaatcatgagaataagttaaatgctcagatagtttccctcagaaacagtaacatattcctgtgtatctcatctgcacaaaggcactttaaaaatagtttattacaaaaataatttagacaatacagacaagtga

SEQ ID NO: 48360 - DNA, 1051 bp, Homo sapiens
gcttagtccttagtagtgtagataacttctggaggacaaaacacagctgcccatgcaatgtgtcatatgttgtcattttcctcttttatgacaaatagtgaaggaacagaaataagtatttgaagctagaaggtgtcagccagatccactatgttctgaagtgcatagtaaataattagggtcatgaaatgaatgaaaatggtttgtaaaattgagctagtgccttcattgagctaatggcatgataaaaggggaagttgaggaggagctgttctgtattaaaatctagaagagacaaaatgttgttagtgcatgtcctttgtttgtatcctgattggaacaaagaaatgagaaaaaagaaaagaaatataatttttaggtaactggtgaaatgtgaatatggaccaggcttgataccaagaaattattctttcttttgttaggcatgacagttggcattgtcgttgtataaaaaaagtttttattttattgctgcatattaaagcaggtagggatgagtgacagctttaggacagataggacttcctctgaaatacttcagtaaaacagttttaaaacgtagaataaatgaagcaaatagtatagtatggtaaaatcttggtgatttttgaaaggtttatgggagtttattttataattctccaaacttttatgtatgtttgaaattattcctggtgagtgttttaaagtaactgagttctagaaggaaatagctactgaagtttattaagtaattcacaagtgttccaatttagcttcttttgttgtaaatttctacttttaaaaatggggatcatgtattaactaggtaagtgctaataaactgccccctgcccccagatttgtaaataaaatctgtgatcaggcttctatccagcatgtcttctaccactttgtaactaaatgcaaaattttaggtattttctaatttaggaattgtatgagtccattttcatgctgctggtaaagacatacccgagactgggcaatttacaaaagaaagagcttttattggactcagttccacgtg

SEQ ID NO: 48361 - DNA, 1030 bp, Homo sapiens
ggttattttatttagaaattattttttttttaactttaagttccgggatacatgtgcagaatgtgcaggtttgttacataggtatacatgtgccatggtggtttgctgcaccaaccaacctgtcatctaggttttaagccccatgtgcattaggtatttgtcctaatgctcttcttccccttgtctcccaccccctgacagctcccagtttgtgatgttccccttcctgtgtccatgtgttctcattgttcaactcctacttatgagagagaacatgcggtgcttggttttctgttcctgtgttagtttgctgaggatgatggcttccagcttagaaagtaagttttgttgaagagcaaatgtttccgtaagtgctggcaatcctgaaggactctttcaagaatcatttggacagaattttcctgaatatgaaagcagtatttaatggcattgacagctaaaggcttcaggttgaattatctccaagtgtatgatcgacttttaagtgagaataagcaagtttatgccccatgttcctgtgcagttatctcatgcagttttctgacagtgtaaaatattacagccccactgcatgctttaaaagagaaattttgaaattttattctttcattttgtagagtctgaaaagatttcccctaagcctgaagcagtgataagctttggaatcacctggggggcttaattaccatgcagacacctgagcccagccaccagagactctaatccagtaagccttagactgtcttttgagaaaggtagcccagctctgattttaatcagattattagaacaatagtaatactcataggcgtggttttgtagttgtaaaaacaggaattgttactataatagcagtactaataattgtaaaaatttctattaatggtaatgttatgaatcttttaagtatatctgataactcagcgatgttccaagttccacattcaatgaatgggcaacttctggatttgcctttcttaacatctaacttaattttatttcttggtaa

SEQ ID NO: 48362 - DNA, 1030 bp, Homo sapiens
attttatggcttccttttttttttaagtttattattttaaaacttttactttaggttcaggggcacatgtgcaggtttgtttataggtaaactcgtgtcatgggggtttggtgtacagattattttgtcactcaggtactaagcctagtacccagtagttattttttcttaccttcttcccccccaccctccttccgccctctttataccgatgtgcttttctgatggatctttgctttggtgttgaaatcagctcttaattaaaaaggaaaggatataaagtgcctgtgtttatgtggccaaggaactgtctttgagttacagctgagggagtggatctcagggtttggaatccttgattttttactgtctgaacttggcagttggggttcttcctgcgttgcctgttactagttatttcatatttgtttgccttattttctcagattgaaaattatcttacagtaagcaagcttcttcctttataattctttatctcctccgtaacatgccagacatgttgtagaagcttttgtttattgagtgaattactccagatagcggatcatagtatcctttgatagttggcttataatctctatgaactgtgaaataagggtggtattgtggcaatttcaaagtattgataggccattgctctctttgccagtcctgggaagagaaaagaatctgatacaatgcttcttcatgtagtgaattttaagacagttgtctaagagaactccgcctcaccttgggccaatgttgagtggacagttgcacctttttttttttgtaaaccagtttttccttttagacttgaaagtcctgataaccagggcttatttagcaccttggctgcagctgtctctgacaaactagccaggcgttttgaggcctgacacctgtgtttccctttcgcctagcatggaggggttatgagaggatgtattgctacagtgccttttgtcctctctaagcaattctgagaaagaacttgtcacaggaaagtacctcgttaaacacattt

SEQ ID NO: 48363 - DNA, 1038 bp, Homo sapiens
caagtagctgggactacaggcgtgcaccaccatgcccagctaatttttatatttttagtagagacggggtttcaccatgttgaccaggtgatcttgatctcttgatttcatgatccgcctgcttcggcctcccaaagtgttgggattacaggcatgagccacctctcccggcctcatgtcaattctaattaagtagacattactgtgttgaatactattcagttataaattgacatcataaaacgttacaatatatgagttttcctcagataccataattatcctcataaatcctcctacatatcatgactttagtgtgatgacctcccagtttcccatgtttaaccacctttcattcatattacaaatgactttcacgtttgtttctttttctctatatcatatacatgttctaaagcgtcattttcaccttgcttcatccattaactttctgaactctgcccacttgttgcctttgtttatgcttgttaaggacatcatgtctactccttcctgttcagctcagctgcctcttcttccgagagttctctgatagcttcccagcccctcatagtgctaagtaatcctactgttctttagcatatccatagcgaagtgtttgtaattgcctagcttgtattgattatggtgacttggatgttgatcttattttcctcactagattctgagctccttgaaagtcagtcttcatcagttccatctttgcattcattcttcattgtccctggcattatatcttgtacatagtaagtgctcaaaaaatacatctttttgaataggtaaattatttgtggccaggtatggtgactcatacctgtaatcctagcacttacggaggctaaggcgggctggtagcctgaggtcaggagtttgagaccagcctggctagcatggtgaaatcctgtctctactaaaaatacaaaaattagccaggcgtggtggcacatgcctgtaatcccagctacttgggaggctgaggcaggagaatcgcttgaaccctggaggtggaggttgcag

SEQ ID NO: 48364 - DNA, 1027 bp, Homo sapiens
cccgttaatcaatacatcccccatggatgcagtctttgctcctcagggattttagatatgctgatcctataagtgagccttgccttttgttgataaaacactgcatttatacctataattattttagagccttcaataagaaattttcattctctcagtacttttgataaatctactgtgaaggatatttccattttccaagatcagtaagcaatagcaagaagttgcaatgtccagtgggactcatagatttaactcacaaagtgaacccactgctaaaataaggcaattctgtatacctttgcctctgttaccatcccaaggcttctataataaaataccaaatcatcttaaaatcaggcatttgtttttcttagatggttccttgaaattaacactggtttcttacctaattgatactttcatacctggttttccggtggcaacaggaatctttccacaaataacaaaaagaccctccacaaataattcctcctgcttttattttcaagggtgaaaaagaactgtgcaagtttgtgagcccaggaacatggtaattgagccagagtaagctgcatggatatatctaagtagtctgaatttgaaaggatcagggttctccctgccccaagaaatctcagtggtttctgaaatcgttagcatgcttgtttccttgtagttgtaattgtgttgagtttgtttgttgtttatttttttaataccagcgagttttccagtttacggtcagttaataatatgatgatctgatgaattctgcctgacttaccatgtgtgtgctatttgttttttatatatacacaccacactgccagtttacacactaaaatataatctccctgaattttatcccccaaaatcttatttcttagatgttccagaagaatccttcaggaccttgccctgttttaagacaggaccttgcccatatgaagatcatttattatacagtcatgtagatgttaaagatggggtggaatttatgccttattcatgtaacacattgaag

SEQ ID NO: 48365 - DNA, 1098 bp, Homo sapiens
agatctagaatattgtagcagtcattcatttaatatgtagtatattgacaggctctaaaaaaaagttgatggtgagtatacttgggagagccttaagtacacaacaggacaagaaaggaatcattctagggtcagcgttaggctacagcttttggtttttgaagccctgccccaactcatgtgtggtgtgagtgcgggggtatgggtgtgatttcacaaacccctggaaatatcacccaacttagtgatgcctagtgattcaatattttctttttttgatttgttaaagtattttgcatttagttggtttaatttctgttaacttccttactggttcaagtaagcaagtacagtctatgtgaggcactgttttcactagatgccttaatgacttttttatcttttctatgatgaaacatttcagggggaaggttgcatataagacagttggtttctgatcgtttttttaaagactaaaaccatgtttattatgcttcctccaatgttatttttatgtattattgggtcggtgtattaaaaataaggtctgagtatatactgctataattcagacagcatttgttgggtcatgaggcctaaaccaagaactaatccaagagccatacattatatcttgggttatgatatctcttcccctttaactctagtttttgcttcttggatcacttcatgggttgtagaacaagaggagaggctcaatttaaattaagaggcaaattggtttcacttcctcgtttttcaggcaaatggtaggaagtcatcatatgtgcaggctttactaaacattaataaaatgcaccgatgtactttctttaactttactttctcaaggagtaattctggttgtaagagtgtcctttcttatttcctgcctgcttgttatacatttcaaggtgtgatacttccgagcaaagagatccttccctttgcaggaagaaggcatatttccatgtgcaatttacttagtagtaaggaaacccgcatttatttattttaggcttaggttgactattgctgtttctgaagaaactgaaggggaaagatgggaagagagactcctgctctgttaccattttg

SEQ ID NO: 48366 - DNA, 1034 bp, Homo sapiens
tttgtagcagtcgtttggaaaggagactcttctgattttttttatactttgagtattggtaaaatattaaatattgtgcaaggtaggaagagaaaaactcaatgatttttagcaattatagagataaaaataattgaaggaataaaacagtgagtgaacaaaatatactgtgctataatgttttgataaaaatattcaaaacggacttgttatttcccaaaaaacatactttcatgcagattgaaatttgcaaatgatagtttagaaaatttatctacagaattatttctataaaatcctgacttgcaatggcagtctgtttttatttaaagatttatttgtattttatggatatttagaatatcacacatttactaataaatttcacattatctgtaagtatgaaggatgaactaaaacatataaaaataaaagttatatatgaaaacagatgattgcaaactaatgattctttggattaaaatacaccagaagaaaagaaaatattttatcatagactgaaagttgggatatgtaaatgaagcaagagactttggaatgacaggacaatgtgagtagaacagaaaaactttacaaggtaaattaattattttagggagaaatgggttctctttaatgcgtgaagaatcacctggaagcttactaaatattgaactctggggccctctccttgcgtgattctaatggagatgtttatataccacacctttcaaatggaccacacctttgaagaacagtgatattgaggcttatatgcacaataaaatgctcatttctttctttatctccttttcaatgaattgtcttagtactaagtattatactaataacagtttggggtacctctgagttgggaaaaggggaaaatcatgaaagaattgaggagtttgccaagggttgcaaactgctagttttggggttgaaatcagtctgcaaatgtattttgttttgcatagctggtggtactccccaacccccattgcatttgattggccacagtcggtactgctccc

SEQ ID NO: 48367 - DNA, 1033 bp, Homo sapiens
ggtaagatgccagacattgtgaatcttacattgttgattgctggatattttggattcctttgaaaagtggtggactttgttctgtcatgcagctgatttacttgggatcacttcagtaatttgtagtcttgcttttaggctttgttagggtaagtttagagcagcctctctttcatagttacttaaacttcactattacgttgatacccttatgaaaactcactgattccttctttgtggtgcagtgaacctgtgtgaaccttgggaattgttcagactatgtgttcccatgtttctttctcaccccactcacgtgtagatcattattattgagcttcaggttcaagggcacccttctgcacatctcaagagctttctctctgttcagctctttcctttccagcattctgtcatgcacattctaggattctaagcctttctcgattctgatctctgtttttcaacccagtgagagcactgggttctttttgggatcctccttgccatgttgttgtgtggaaactgaagccgtgtggttatgtggaggcagtcctaggatttaccttatttgtatccctgtgctccttgttgtcgtgtgttaaaacaattgtatattttatttgacttcctgggcttttccccccattttataagtgaatgagtataaattcaaagtctggtaatatccattaggttctaaaagcatctacttttgttattttaattttaaatataaaagtgttaccagacattacttttaaaggaaagagtaaatggctagaatttgaactgttctgtttgttggaatccaaactatgtgtttcaaataatgaaatgtattaaagatatgtcatacagggaatgatctcatatatcatttatgaaatggttgcttgtacaaaatgatttccaggcctcctgtgctcgttagtatttcattttaaagatagccatgaaaaatacaggaaaggatgtaaactcttaagtttcttatttttctgtttattctagtgtagtgaatagatcatttttt

SEQ ID NO: 48368 - DNA, 1028 bp, Homo sapiens
agtggcatgatacccttttcctgagatgcattcagggttaaagaagatagttcacctacacgttagatttcccgtgaagataaaaagtcccaagttttgaaaagcagaaggaattctaaaaagaactgaaaaacaaaagcccatggggagagtgatgaaatgagtttctgagaaagactgtgaagaggggttcaaagcggccgctgacggactgcccgaacctagggcaatgaaagacctggggcaggaattgatgttgaccgtggcagaggcagtggacctggtgggcagcccagaggaaaaggcctttggcttgctgagagagctcttccagaactgagcaagagcatagtttgttgaagaatggagaggtccacagtccatctcctgtgccaaggattagtatttcatttcaagaagcgatttggtagtcacagagtgaatattattatttttccacaaattcattacctctttcccctcatgagtatcttagcattgaatttcctgactttatgatgaataaactttgttttagtgtttattaatgccctatttactttcccctgggtgaagttttggctagtaataagattttgtgtctctgctgtagtgaggcattgctgtagaaagccaggtctaagaaaaatgaattttgttcctttggggaagcataattaccttaaaaaagtttaaagtgtggttttcaacttagtaaaatcctattataaagaaaaacgtacatagcaaaaattttgcttgtaggtaatacgatcctagtaaaatagaatttacattgtctcttatagtttgttgtaataacattttgtaataacagtttttttgcgatgtaattgatactcagtaagctgcacatatttaatatgtagaatttgatgttttgtcacttacatgtgtctatgaaatcatcaccaccatgaagataacaaatatattcatcaaacctgaaggttgcctgtgcctcttttttatcctccctcccacctatctccccctccaaacactga

SEQ ID NO: 48369 - DNA, 1034 bp, Homo sapiens
tggccacctccaatatcagttcttccctgagtctcacagtcagaactgcttcacaggctcagctcagtcactagggaatttggacttgcagcaatggtccaattcaggattcaacattcgagtctgaactgagggccaccaccccttgatgcacatgaggggatgggtgccctaactgatttgggcctttgctggcaaatgtttaatggagaggggatgttgggtaggcagccagaggtacttgcttttataaacagaaaatgacggatgagaatgggtttttgaaaagatcataaaacgtgtctgtcaaataaaacatttggttttcaagatttttaaaaaacatacttcatttctgtaaagagaatgttgctaataagaactaaagataattttactaaaaaaaagttttgccagcagagaatttatttttaaaaaataaacaaaatagttatccaggaattcttatgtaatctctggcatggggcttgaattgaacagcgttttatctttaggaataatggagttctaagtccatagctgacactcatctctgatcatcttaggagttactgccatccttactaaatcttatgaagtaatagtctgatgaaatatgagtatttagacttgcattagctttcaaaaaagtccccagtatttgaagagggtacttcctgtggctggtttggcaattgagattagtaaattaggaagatgctactgtcttcattgaccttttataacatgtgtttgacaaagccttgagtcttctataataacaacaatggtaatagccattctttatttgtcacttgcacacactgccaggccctgtgcttcacaggtagtatgttaatcatatgtttattttaaggggaaaacctaatatgtaccatgcttcctatcccataagtggtgcaagatgagagttggaatcagatctgtctgtcccctgaatcctgttttcgataatacttcttcaaaagaagaaagatgagaaaacagcaattacgtgctccattgatggaaga

SEQ ID NO: 48370 - DNA, 1067 bp, Homo sapiens
gataggaagggaaaattggttcatattaagcacagggagaaagaatacctttgagtgtggagcattgttagtgattgaggtggatcataagtgaatacagcagtaggagttgatgaaagttaaattaatatggctgccggaaaccagtaatacaccatgaaatggatgaatctgagatactagtaacccagtaggaaggatggataaagtgttccacaaagttctgaaggaatagtaacagattcataaagcaaatagaatgatagggctaattaaagaacattcacatattcctggtatcaaaaaataactatagatatatcttgtttgtttaaaatacacgtggctagatgaggtggctcacgcttgttatcccagcactttgggaggccaaggtggaaggatcacttgagcccaggagttaagagaccagcctggacaacatagtgacaccccatctccacaaaacattttaaaagaattagctttggcaaaaaaagttagctgggcatggtgatgtgcacctgtagtcccagctactctggaggtagaggtgggaggatcacttgagcccaggagatcaaagctgcagtgagctatgatcgtgccactacactccagcctgggcaacagagtaagaccttgtctcaaaaacaaacagacaaacaaaaaacccaaagcccctcaatatatttgggtttacaaagcagcttcagtaagggaaaattatgagatggtttttcatttcttaaggattttactctagatttttttatacctgactagttaaaacatcattttattacctattttagctctatataaatcatttcaaaatgatattttacagttatgtgttcatatatttaaagtagtcttgaaatgtcattttttatttttccttttggaagatttcaagcaatattgtgagtacctttataataaattataatttagctgcaccttttttttttcttcccctgagatggagtcttgctctgttgcccatgctggagtgcagtggcccaatcttggtttactgaaacctctgcctcccaggtttaagc

SEQ ID NO: 48371 - DNA, 1034 bp, Homo sapiens
ttctgtttggttattaaatattttgaatctcactggggattacatacttttaaacatttttttctgtgagggtttttggatgtgccatttaagagaaaaggttattttagtaagttctaccaaattaaaagatgaatagtaagaacttgctagtatcctgtttatggctgaatctgagcaggcgtttacagttattttctaaaataatcttgagttaacgttaatggaactatgtattatcagtcccacactggaaagctaattattggtatgtaatcttagcagaattactatgcttgttggtgtaatccatgtcagcaaggtgacacattataattttatattcattttccacttacttttctcatcttctgcatgtatcatcagacaagctttctttattacagatgtggttattttaggggcaaccacttttacttgaattgacataaaaaccatccctcatctctgggccacatggtctttcctgagacgtaaatgtgatgtagcatctgccacataatctttcttaatgatatgtgtgtagacacctgaaagttccttttgtttctgtgtctgaactgttaggtcatcagcttacttaccagaggactgatgtgtttcttcaggttctgctggcataacatttggggcctatttttcaccgctctacatttgatttccctatagttttaaattcaggaaaaaaaattgaatttttgatgctaattaccctctttttaattctatcatttgtaatttaagatgatagattagattttggacatttatagtttatgttctctaatattttaacctttattagatggctttctaaaataagtgtctcgtacaagtaaatttctcttttaatgtgtggttttagtactttctaagcatattaacttcatattttcttaagttatgatctaaaactgatgagaaattaacctgttttggctcaaggaagcctagatactccctaaatgttaccctaacttagagctttaataacattttttcctactagggaa

SEQ ID NO: 48372 - DNA, 1035 bp, Homo sapiens
ctttttggacattctcctttatatttggatggatttcctgtaatacagacacaaatttggttttgaattataaggctaaaacaaatcttttaacttggttgctaaatttcctctacattatcaaagctctttttattttgaataccgttttccaaatttcattttttctttgactcataaaatctagtgttttgaaaacttcttatatggagctttcttttgatttttaatatgaaataactactatgtatttgtttgagacctcctgtgtatctcgttctgtactagatgctatggtagactgaaaggaaatgtgacattttctaccggccctcaaagaattagtcatttaggtggggagaaaaggtagttgatatgatgatagaaaaccaattgtaagtattaagggatattcaatgacagttggatgtctttgatttttttccattcagtcctaatttcatgtattccttcatgctatcatattgtataagttgtgggttcagattcctagttgaaaagatgcagtccctgtcagatgtagaaatttacctgcgggtaagattgtgggtcagtgtggttagggaatatcacagagaatgtacagttttctaggtcatcctttgaaaagtcagctgacttagaaaaggccacgcggagatcaaggaccttgtagacattgtttggctctgtaccaagggctggtttggtgtctggaggggccctgaagttaatgggagaggccactgtctgctagtaaaactagcaaccagatgagaattcttgattctttttcagcgtatctttcttgtggttgtgtgtctctgtgtgggggtgtgttcttctctttgtgtctgtaaatattttaaatattaatttcacaatcctcttgactttgactcctttcaatctttgacaactggtataatctctgtgcatagattctttctgtgaggtggcttaggggagtaaatgataagggggttatttctcagttagttcacatggggaggaaatatgtcttcctctgattaa

SEQ ID NO: 48373 - DNA, 1054 bp, Homo sapiens
gggtggcttgcttgagcaagggaatgcagtgaataagtttatcagcgttagaatctgtggttatgaaattatatcacttattaaaaactaaatattttagtcaaggtttttaagtgtcctttgcaaaaaaaaaaaaagcttttagattgctctttacttgtactttcccagctgaaaatgaaagataagggacaaatattagtatcaattcttttatttgcatgccttttctctaatggttgttccttgccttttagtccttgtgtaatgaatacgttagaggcaaatgtcacctatcttgaaaccataaagacttagtttctgtactactactttttaggtacaagtgcagtctgacttctgaatgtagaaccagtcatcagaatagccctagattgcacagtgggaagaacttgcattggctaagtactctggtgaagctgaacaattccaggttgcaaagagtacttggctcatctctcattttcatgaggactaacatcacacacaatgctaaacctcactagcaaagaactgaaatgaactcctgacaggccaagaaatgcatccagtaacctcatgtgatcttttaccccatcaagccaaggccatatctctgaggttaagaaaattgtgcattacattgcaaaatcttctatttgtgagttagaagtctcaaactcgactttgttacatttagacagttctaaacacacatatgaaaacaactcaatttccatcataactttgcagtaaatttccaaaaggcgtatttcaggagaccttaagataagcattgtttctgaaagcatgatcaaatgaaggaaatgaaagaacaaacactatcctagtttgaatgatgcttggaaaggttttagtcctgggattgcagataatttattttttttggtagtaccaattagggatatgctgagaacagtggggaaagcaacagtaggtttacttcttattgcctgatagagtatttttctctaagattttttggtatgtgtgtacaagacagtgtttttggttgatcctatgtctcagttga

SEQ ID NO: 48374 - DNA, 1348 bp, Homo sapiens
ttccctcaacattgtactgtttttacaagcagaagagctgtgtgtagactcagccgcttctgtttggtccatttgtattacttctggttgataggtccgttgctattattaatgtagataaggtttttctttctacattttttttcttcttgttcatcttgagggatagaaaggaagttgctgtttttagagggctgccgtctttccaggaagtgtgctttatgagtcttgatgactgtaattaacacatgtgaagtctttcatagagagttataattatagaatctcagttaagaatgtgctttaaagtccaagcatgcaccccatacttgagtggcgtctgtgacatccccaatttgtcgttaagtctgttcccctctaaattcagtgatgagaacattatcccccaattaattccatcttcagtcatctgtttattagaaatctttcattgagctgaaatctgtcctgtaactagcttcagattctattcctggggaacacggagagactggaacccactggaacacatttgtttctcccagtaattgaagttggcctcatgacacccttggggatggctttcttccttttatgaaccatcgtgagttcttgccatcatttctcataaagcaggaatgaaatcttgttccttaatatcctgattgttctcatcttttaaaaattacctgtaatgaaacccagcacttgatgtgtgccttgatgaagtcagagtagataattctgtctttcctccctgacattcgtgtgactctagaaatctttgtctttttgtctaaataaattatcccaacaattacagcaattttagtgcaaagggcactcaataactttctctaccagtaccagttcatgtttgtttcatttttcttgatacagcattgcactgctagtcctgtttttgatctgtggtcatctgtgatgtgtacatagtcttctgcatttttccttttccctttatcatgtatttgcttggattttttttcaattctgagagtttttactgctattgaatttcatcctaattctgggaacatccttccaagatcagattcatttaaactttattcccaatttctagcatttgtaattctaccctgttcattctctaaaggaaagtagaggaacctgttacaataagatttgtagttagatcagggaaaaacaactatttttgttaatactgtcagtaaagatagggaagtttttagatttcaagacagattgccatagtctgtcattctgtatctccagttgattccaagtctttattactttgttgtttacttacttaatgggcatgaagccaataataggctacccacat

SEQ ID NO: 48375 - DNA, 1048 bp, Homo sapiens
attgtgtgagccttgtagagtgtacttacacaaatctagattgtatagcctacaacacacatataggctatgtggtaaagcctattgttcccaggctgcaaacctgtaaagcatgttattgtactgaacgctgcgggcttttgtagcacagtggtaagtatttgtgtatccaaacatatcttaacatagaaaaggttcagtaataaaagataaaatatgatacacatagagcgcacttaccataaatggagcttgcaggctggaaattgctctgggtgtcagtgagtggtgagtgaatgtgagggtctaggacatgactgtacacttttgtacaactggcagcttggtaggtttgttacacaagtattaccacaaacatgtgactaatgtgttgcattatgataactacgatgtcagtaggcgataggaatttttcagctccattataatcttgtgggaccacagttatttacgtggtctgttgttgactgaaacattgttaatgtggtgtaggactgtactcttttatgaggtacctaaaaaacgtcgatgagaattaaaattttgtcattaccgcattaccttttatgtaagttaatgctattatatcttgaactcagcatcgttattaatattgttctgttgtttacatttacttgatgtatgtctctcatttattttcaactattctttgttttagctaccctcacaagtttgttttgttttgttttgagacggagtttggctctgtcacccaggctggagtgcagtggcgctatctcggctcacagcaacctctgcttcccgggttcaagcaattctcctgcctcagcctcctaagtagctgggattataggcatgcaccaccacacccagctaatttttgtatttttagtaggggggtttcaccatgttggtcgggctggtctcgtgatctgcccgtctaggcctgccaaaatgttgggattacaggagtgagccaccacgcctggcctaaagtttttgtttttttaaacctcagcctgagtgaatcttttcttaaaatagt

SEQ ID NO: 48376 - DNA, 1049 bp, Homo sapiens
ccatctaagatgttatccagatcacgttagaaacgattacaaattttgggcacataccacttcttgtagtaatgagtcccatgcattttctcatcttatatgggagaaaatacctgtatattgctttatcattttcagagaaacagtttgtgtttccttatccaatacatcttggtaaagagtggcattttaatggaggaaattacaggacttcatcaatatttctttagggaaatcctgattcaaagtatattttcatgaaaatcactagctctgtcctttgagaaacgtattttttgtagggctttctactctaggccatgcttgttatgagaacagattcttctgcagcgggtgggaggatgtttctaaacccctggagtctacctatgaattgctactcaaattacagtgtatccatctcagaattaatgtgttgtgcatgcctagtccttacttgtgggttgacacaatgatttctattaaaaatattctttatgttttatactataatgtatccttaagcagtatgctgtggcctgaatttaccttgtcttttattctctttttggaatgaaataagagcacttgagatactgtcatttggtggtttggttgtttgtaaaatagtaaaaaaaaaagtttggtaaggagaaaagctattgtgcttaatagacagtccaagtttgagtcgagaagaaatgtttattttcttccacttaatgttctgacattcttaagaaatacattatgttgttttcatgctagtctttgaaagaatgacaacccacattctgttatttaattacattattttttatagcctgtttttcagtgattttgaaattttacaaataatgcaagttttttgcacaaaatttaataaaactttttaaaatattcataaatttatcaaaaatataccagtctaaactaagaaccatgctctttttgcacattcctttatagtctgttttatttttatgttttttacatagatgtgatcatactgtacaacttaacattaggttgtaagcattttttatgtg

SEQ ID NO: 48377 - DNA, 1034 bp, Homo sapiens
ttgaaactccatctgagtttagcaactccagctgagagcaaagaaaataagaagtgaggatggtgagaataagagaccataatttcttttagattttaatttcaaccaaaggagatagattctgtttctcagctttaatttctctctagtgaattaaatgggagaatgttcatattgtttcaagtttggggcattctttattgcattacttaggcttgtggaataaactccagtgagccagtctgaacatcatgattgtgcacaggaaatagaaaatagaataggagtgaattttttcccttaaataatctgcaacctttaagttaacttaatatactgttgtgactcacttcagggacttctgggggcaatagttaaacagattctaggagggttctaagggataagagacgacataatataatgtcatctagtgggtagaagccaggtataatattggggaaatttctccaagtctggtggaaccaagctactttacaatactgtagggctctgaccaactgatcctgtttgcctgggactttttcctttttttttttttttttttttttgagatggagtctcgctctgtctccaggctggagtacagtgacgcggtcttggctcactgcaacctccgtctcctgggttcaagagattctcctacctcaaactcccaagtagctgggattacaggcatgcggcaccacgcccagctaatttttgtacttttttagtagagatggggtttcaccatgttggccaggctggtcttaaactcctgacctcgtgatccacccacctcggtttctcaaagtgctgggattacaggcatgagccaccacgcccagccgcctgggactttcttaattttagtgtcccaggaaccctcaccctatccctgtatgagtggaggatatcccactgtccatggaccttaatctgtttgccatccctgggggatgagaggcaataggaaatgaagatgaacgtggaggggactctttagctatctctgcccacctgttccctca

SEQ ID NO: 48378 - DNA, 1028 bp, Homo sapiens
cctgcaaattaggaagcttgccttgccaaccaattataaaatcttaatgattttacctccccaactccccataactaaaacaaaaaacaaaaactctcttaaatatggcaattttcctccatttttgttaacatttttctagttcagaaatgatttcctttcaccaagatgattccaacagcctccactggtcttctgatcttcagtcttggcccctcctccagcattctcttttgtatgatgtggccacagtcatcttcctaaatagcagctcttgttctattgtcactgtaaaatgatcccaatccccatcccaaatagcctctattgatcttaggataaatgtcaaactccttaacaagtttaacaaggtcatttataagtgttttttactacctgttcatggccaattttatgtgtcaacctgaccaggtcatggtactcagatatttggacaaacatgtgtctagatattgctgtgaaggctttttgaaaagatgagattaacataaatcagtagactggactaaaaccaactgccctctctaaagtgggcaagtcataaagtggagttcttaagagaaaaaactaaggtcctctgaggaaggtagaattgagctttggactcaagttgcagtatcgactcttccctggctgtctagcctgctggccagacccactgcatttggacatgccagcccctgcaatcacataagccagtttcttaaagccctcattcacttctctctaggaatacacatagtactggttctctttctctctcaaaccctgactaacacactacatctgctgcctctgtctcactactcccatcctttaaccacttcgaactgtcttaaattctttgaaagtaccatgtctctctcactcaggatatttgccatgttgttttttagaatggaatacatttctccattattctccatcttattaatatttacctccagatctaggccacaggattctcccaatcactatacattaccctctccttaaacattatattg

SEQ ID NO: 48379 - DNA, 1050 bp, Homo sapiens
ttattattgccatgtgggtattagtttaatttctgtttttctaccttctgatataggaatatgtagcttaattttttgaaattaagttgaggtgaggccgttcctttttaaaaagaaaaatgagatggggatctccagggtgacctcaaactcctgagctcaggggatcctcctgcctcagcctcctgagtagctgggaggaccttccttttgatgtcagttgtgtttagctataataattcctcactttacttctctctctccctcttcaccttgtcagaaatgacttttggtttatgggatataaatgtagtgtgtatatttcttgcttggataatgctcgtttttgtctgtagtgatagttcctttgctggaattttttagtttagctttgaaatagcaatatattaagcctctttttgttttactttccatccaagaatttctccatttgtatctttgtcctgtttaggagccttgttcctgccccagcacattgagaagtttggaaacgtgtaattgatagaggaagttaggtcctagaactcagaatcttaaatgttgactttggctggaatacttcctcatttatcaacttaggtcatctgtttcttgttttctttgcttgtaatcttcttttacatatccattttaagaagttttgtatttgcctttaaaaaaaataaatgaaaatagagtgtatgcctctaaataaggaaacaaagagtctcccaacctaatgctttgaagtttgctactttcaagttagttgttaataaagccctccgttaacacagaaatgctgtcttccaaataaggtgggaattataccctgttctgcatattttctatttggaagaatacgcaaatggccaaactggaaaaattttgtagatgtcatgggttagatgtgcagacccttaaaaaaaattgacagaggaaggttttacccatagcaggtaaattatactttcttctaaagtcttagaataataagactgattttcttatgagccccatgtcactattcctcccagccaccgcctttat

SEQ ID NO: 48380 - DNA, 1032 bp, Homo sapiens
ttagcttttagcggacatgtatctaggtaattagttcggggatccagccggctcacctttcatccccaaacactgtggtaaagacattacttagagcttctctatattgaattgcgttggtccctcccagctgcttttatctaagcctcctggcatttgtgtagcttgaacagtcatgaataaaagagcccagctcctctagagtcagtccctgaggcgggccaagaggcttgggattgccttccggtcctcagttttgatttcctcctgcatatggttgagctggagacaaccctcccatggtggggtccatggttttcaggggagctttgagggctggccacctggctgattacctctggctggttaggaatgaaactcagggcttttaaaaagataccataaaatatttgctcctgttgtatactgttgcattagatgtggtctaacttaaaggtatcccccagccccttctattttaaattgtggcagagaaaggtaacataattgtctgttggccctggacactgtcctcttagtgctcaaacatctttcagagattggggttatctgggctttgtgaaaggaggtttttgcacagctcattcaacattgttcagggcagtaacacatcactgaacaaattgcccccttgcatatgctaatcccacacttaaaagaactcattgtaacatgttctgatgctttagcctgaggggagatgggaattgaagagatgtcagatcatgtcatgtgaccccaaaatatctaaaatgcctgttttctttgggtcaacagttcctactcggcatatgcgaatgaaagtatcctgtgtcatttgtggaaaagattagtccttgttcctgcttttgtgtgtgggagctggccttgctattgaagattcactggctgaaattccccccttagatcttaaatttcagtgctattggcgaggaacaccaagtcttattttcaacaataaattaaaagaattcaaaagagttccttcattgttgctgtggaaaatgtgat

SEQ ID NO: 48381 - DNA, 1050 bp, Homo sapiens
cctggagccataagcaacacacagtagggagtgcacgaggagaaatcacaacatgagggaaaaacacctcaagaaatgcagtacccacaaagtcacttttgggtttctgggaacaaatgagggaatcatgaaggtaagggtcccccaggcagtagtttaaaaaccagaatgtttgctgttgctgccagcgaagctcattaggctggaactgtttgcttatatcaagaacaacaatgaaagcagcgtcagggctggaagaagtcaggggcaattatacacagaaaactgggttcatgggagcaagagtaaaaggaagcggtctgtttttggtggggtagactttaggtggaaagcctgccgggcgtccggcagctgcgtgggccagggatccctgggtctgagtgtggtgtttctgggcctttccagcccacactctgctgccttgttttgagtcagttttacagcatcaaaggtatgatgaggcatcttgttttgtaacttgttgaagtctgctgttgaatggggcccattttcagataagcaggggtgctaattactagccctgtccaccacatttagaggaactttcagagcttttcaaaacctattcagattataagcttcatttaagccgctcaagcggaaattacagtagtaactttgaacacatagacgcagaggcctcaaagcttgacagtcttaaaggtccagccacggaaaggttattgtttctaacagaaattgtattgtttctaacagaagtgtagtttacttttacgttcacagtaccatttgacatcattaaacgacaacaacaaaaaaaaacaagacattaagaagctgtcttggaatggccctgtggcttggatgcgcagtgctgatgacagcaggagggcttggaaggctgtggagagagacttgaacttaaaactggtcagcacacccagcctctgtgccccattttgctgggcacttgggcggatttaaagttgaataagatacagccctgccgtggatgctgcacagagtctggaggaggagacctcgggg

SEQ ID NO: 48382 - DNA, 1065 bp, Homo sapiens
gctgcagtgatcttcctgccttggcctccaaagtgttgggattataggattatagtgagccactgtgcctgaccctaaacatttttagaaaagttggagtgcttgaaaattcattgtaaaatttccacagacactgatttctgccttaagatggtgttttctctaacttttgaggctgggaactgtgtttgggattccattaaaaatcagtgggctgggtagaaatgactgaagatctggcatgaagatttaatatgttcagtgcacgcaaagggataataaataaaatgagtaattgagtcccaaggaagtgagcacaaatcagaatctggagaattttctaacattgcaccttagaaattgagccttaatcatttttactgtctcatcaaaaataagttttatattggacagctgaaatgtggccagattcatggtacaggggccatttcttggatactttttcatttcatacaatgtgcttttaaatataatgtataagagcaatgatactgtgtaatgagaacagacttagaacttctggaatgggttaagcaatgggggcaaagtgcagtcatggaaaaggcatttgggaacgggggcttggctcgctggctggagtcccacacataagtgctttcctcatccacggtcctacccattctaggtctcagtattttcatcagtcacaatgaaagagtgggtttgagttgtggagcttggtaggaaggaaaggataaacaaagtttcgtttctaatgtttcttccagcggccacaagcctggctccctgagatcctctcccctgtctgtggcagcatggtaaacagcagccttaagagttgctcctgtactgactgcagtcccctcttgcctagggatagagtttcagcaatttagtcagtgcctttgagccttcattccttctgggaaatgggaattgcaatacttcctcacagtactgagagggattgatggaataagggggcataagtgcctgggtggtgcatgagacacccacccagattactgggtcttcctttccaaattctattccttagtgata

SEQ ID NO: 48383 - DNA, 1050 bp, Homo sapiens
caattctcctgcctcaacctcctgagtagctgggattgcaggcatgcgccaccacacctggctaattttgtatttttagtagacactgggtttctccatgttggttgggctggtctcaaactcccaaactcaggtgatccgtccacctcggcctcccaaagtgctgggattacaggcgtgagccactgcgcccagcctgaggtgatatttcattgtggctctgatttgcgtttccttcatgattaatgatattgagcatttttttgtatatctgttggccatttgtgtgtcttctttgagaaatgtctgttcaggaggtcctttgcccatttttaaattaggatacttattttttaatttttgtactattgagttttttggatgttaactcttatttgaggtatggtttgcaaatattttctcccattccttaggttgcccatgcatcattttctgtgtgctcctgcattgagatggggcctttagtggattgttattttagtttttgttattgtcttcaagtggctggagaattcttggccccataagcagtttcttcctgttgatcacccttgcccctctttacgtgagaggccattcacataatgggaggttttgcgataactcctgcagtagtgtccttgatgttttctgctgccagacagctcttttgcacgtgtttacgtagcataccagttttcttctttatttttatttatttatttatttattttgctgtctcccaagataggaattgagtgttttaaagaacagggaaatagcagaaatcaaggaagagtgatttggagagaactgtcaacaaatgctctttttcacgtttttgtccccttaaaagaaagtgtttaaataccgggtgctataaatgccacttactgtcactcttagcatcagaggtgccacttaggggcatggttttagtttgggttgggttaagtctgtgatttttatgacatagtttttcttggggttacaaagcgggtgaagtttcagaaattaaagttgattccatggttggtggtaaggagctta

SEQ ID NO: 48384 - DNA, 1067 bp, Homo sapiens
ccttggaaatccagatcttctttatcttgggtaactgaaaccttgtaccctttgaccaattgctcctcattttcccctaccccgcaaggcagccgccattctactctctgcttctgtgagttgtactcttagattccacatagaaaggagattatgcattatttgtctttctgaatctgcttatttcgcttagcctactgttctgcacatctgcccatgttgtcgtaagtggtaggattttcttctttttcaaggctgaatggtattccattgtgtttataggtaccacattttctttatctgttcatccatcaacagacatttgggttgttcggtatcttggctctcgtgaatagcactgcagtggtcatggattgcagatgtatctttgatatactgatttcattttctctctctttctttctttctttcctttctttcttttctttcattttttgagacggagtctcactctgtcacccaggctggagtgcagtggcaccgtgttggctcactgcaacctctatctcttgggttcaagcagttctcctgcctcagcctctggagtagctgggattataggcacccaccaccatgcctggctaattttttttttttttaagtagagacggggtttcaccatgttggccaggctggtctcgaactcctgacctcaggtgatccaccttcctcggcctcccaaaggctgggattacaggcatgagccactgtgcccggacctcggaccccaatttcattttctttagatatatacccagaagtgggattgctggatcatgtacagattgagcagccctaattctcagccagtaagaatattgcaaatatttaaaaatctgaaaaaaatccagaatccaaacattgctggtcccaagcacttcagaaaagggataattaacctttttgagaaagtagttctatttttaactttttgagaaacctctatactgttgttttgcatcagggctgtaccaatttacattcctaagaacagtgtacaaaggtttccttttctccacaccatcactaacactatctttgtcttt

SEQ ID NO: 48385 - DNA, 1062 bp, Homo sapiens
cagggcttaaaattacatcccaactggagatggagaaaaaacataagagccaaggaggattaaagaatgagcctcagcttgaaaactctcctttcatcagtttctcaattgcagatctgcagttgagttgtctgtggtaagctattggcagtcaattaggtgaaataaactaggagggtgaccttcatttccttttaatagctttttcctccctgaaatggggagcttcagtggattttcagcttaaattttattcaagctgctttattacacttgacagcttagctctgcataaacaattctccctcctcttccccccagatccaggcactgccttccccctccttcagtatcacatttttgactgttacttagtgggctctctaatcacattcaacaaaaaacacaattacatctgcatttgtctgctgccttctgtacccttttcttgtgtaatgaattgctttatttcagagatcaaatcaaatattcactggtacttttgcatgtactgtgtttgattagcaaagactaatagtgaattgtacttgtagctcaagcacagaattttttcacccaaatgaatgaggatggaaaagcctgttttgattaaaagaaaacatatgcaaagcagttctcaagtacccggttaaactttgtggaacatgtttgttttctgatagactctacattacgacatataatttcatgatggcaaaactctgacgtttaaattctcaaaggcaccgcccagctcttgtgaatctcctttgcacctacactttaggaaggaggaaatcgcattaaccagatgttcataggtaatacccattttgagctgaatcagagaataaaaatagcagatctttttagaagggcaaatgaatttctaattttacgaatggctttagtccaggaaaaatgttgtggaggttattataaaggcaggttagctctggatgccttggcaacagtaaaccaaagtggtgaatcaggcgcaatgcaagcgagacttaggcccattgtgtgtcttgggcatactggcatgtgcggtttttatca

SEQ ID NO: 48386 - DNA, 1045 bp, Homo sapiens
ttttaaaattgctgtaaacttatgaaccccttttgtgaacaagggtgatcttccaaattctgttctatttattttttaaggtcctatgttatcattctttatgtccttttttgttttctaccattccaagccgaaatttacagccagaagtagtgactggtgttgtttagaaataaagggcagcgccattctcagtttttctttccctatctatgttctgtgaaaataaagtgtggttgagaaattctgcatttaaacccttctacttcagcctgcattgcacacagcatttgactttttgttgttagaatatacagtgaagtttttggctgttgctaatgccctttcttctccttgttttcaaagcatcaacaacaggtggcccaggctgttgaacgtgccaaacaggtgaccatggcagaattgaatgccatcatcggggtacgtggcctaccaggtctacctcctacagtgtgtataaccagctttcatttcttattaatttgatggctttacgtgtgtgtgtgtgtgtgtgtgtgtgtgtgtgtatcttaacgttgacctatttgataagggtgggaggaggagaggaagagacttgggatgtgctaaggtatatggaggaagagggcttagcataaggaagatgacaggagaagcattttaggaggggacaaaaaatctattaattaaaaaaattctttttaaacagaccggggtcttggtattttgcctactctggcctggaactcaagtgatcctcctgccttagcctcctgagtagctgggtccaaaggcaggcacccccttgcccgtccctaaatctacttttaagtgggaaaataaatgtagttcatcctgtgacacctaaaccacccttgcttcattagtctagtaaaagctttaggttagaattttaaatactttcctcacttctgtcttacaatgttagatcacagtgaggtcaaaatgggtctctgaattatcatttcatttagttatccttgctttttgccttttgctttctggggtattcgaacctata

SEQ ID NO: 48387 - DNA, 1013 bp, Homo sapiens
cttacttagattcctctgtggattgtataatgatgcagtgattggggttttttttggtaaagaagtaatttgtatttaaaatgttattcctgtttgcctccacatgcatgggtgagtcaatattctgtgaatccatacaccatggcacctgtcatctaggatccttttgcttactctcttctaaatacttaaaataatcttttccaaaggttatgctttgaaaaatttagctagcatcccagatttcattttaatcgtgactaaaatgcttttgagaaaataaaacttcttgactgttaactgttcacaggttctttttctgcctcagtggctccaaattttaatccctacccttgcccaccacaacttccaacttcctttacatatccttctttttttttttttcgagatgcagtcttgttctgtcgcccaggctgctggagtgcagtggcgcgatctcggctcatcgcgacctccgtctcctgggttcaagcaattcttatgcctcagcctcctgatgtagctgggattataggcatgtgccaccacgcccggctaatttttgtaattttaatagagacagggtttcaccatgttggccaggctgatctcgaactcttggcctcaggcaatccaccctcctcagcctcccaaaatgctggggttacaggtgtgagccatcacgcccgggtctgagtatccttctggctactttgagagtgagttgcggaacattgcaggttttttggcatgtgatattgattaaaaacataattccaggttccatccgggaaggcagcaaccttatcttccttcccaaaggaccacctctccccagccactcagcttgggggggagcaggaatacagctcaagggctgggacttccccgctgaagtttcagcactgagtttgaggggccaggaatggctttgatacatatatcaaaattggagccattatgtggcactgggggcctagatctccttgtagagagctgttttccctaagaag

SEQ ID NO: 48388 - DNA, 1032 bp, Homo sapiens
aaaaaaaaaaaggacttgttggcagtctgttttttttttttttttttttttaaatgaagtctcgctcttgtcccccaggctggagtgcaatggcgcaatcttggttcactgcaacctccacctcccaggttcaagcgattctgttgcctcagcctcccgagtagctgggattacaggcgtgcaccaccatgcccagctgatttttgtatttttagtagagtcgggatttcaccatgttggccaggctggtcacaaactcctgacctcaagtaatctgcctccctcagcctcccaaagtgctgggattacaggcgtgagccaccgcgtccggccttgttggcagtctttattgtctaagtaaaatgtcttactttggccaaacagcagaatgtgtccttggaaggcaatagctttaagtaatgtaactatcagtaagaataaagttgtgttgagttttttcatttaaagggatggaagaacaacaaaggatttggttcattctatcaaagtaagttttggcagaataaggactaggaggtatatttcagagtttttctttcgaatgtaacatggaaaatttgtcattttgaaaacaagcagggtatggaattagagggtcaagttgttgcttggttacagaaagaaaaaatttcattttgatgagggatatgtacacctgtggggagtgtgtgcatgtagttttctttttgctctgtaaagtactgtgcaaaagttgtgagtagagtagttgtggtgctgtctttcttcgtctactccatgggcttgagatttttgttgacagtcaaggttcacagctgctgctgatgtactaatatttggggaagcaaaaaaaaaaaaaattgttgggaggctgaggcgggacaatcacttgaacctgggaggcggaggttgcagtgagccaagatcgcaccatcacactccagcctgggcaaaaagagtgaaactccatctcaaataataataataataataataataatttattgcaggggagaaaggcagagccattgg

SEQ ID NO: 48389 - DNA, 1030 bp, Homo sapiens
ccccctaagtcaacatctcacacagggaaatgactagctagagtataggcacttagagttaagctccagcaggtgttaataatcttgtcatacaaagagggtagctgtcatcaagattggagtggtcctcaacttcattagccaggcctgttctttgcaagcataagttaaaagagagaaagctctctgcatttagagcctagattccgaggtgcaagattagcctttgtttcttatcagcaagcaggactgatctctcacctctcagtcaccttccccacccttcagcagtgggccagtggctggtttttgtcctggacttgcactggagtaaggcaagggagtccctgggcatggattttaagaaaatcacaaaacatagttatcatgatcaatattttgaaaattcaaacggaatgcccccaaaatcttcaaggaacaacatgtccaaattttgtattagggcaggatccaacagggggagttgggaatagggtgaggacaggaggtagagtcaggccattgcagggccacagcacctcccttgcctccccctctttctgcctttggttacctgtcctgtggggagtggccatgaactataggctctgacttggttccgttgtagttcattgaagtcatttaattggggatttccattcgggactgggcaagtcatgaacacgttccctggcttcagttcccctctctgtataatgagggttagactagacaaaagtctgtttgttccctcgcatggtgggagccatcccagcatacacccgcagaacccagcacctcgtgcgtgcaaattgaggagcgtccttcgccagaggacttaagatgttctcccaaatagtgtttattaagaaacagaaagaaaatctgtttctttagtaaatatttaaataaatcatcttgagtggtagttaaactaaaaatatattcagttactggctcatggaaccattttaagtttccatggatctgagtctttgctgttttattattaaaccttttgtggtctcca

SEQ ID NO: 48390 - DNA, 1122 bp, Homo sapiens
acttgacatattttggcagggatttaaaaaccaaaggttttgaaagggaccagcaattgtaggagtaacttaacagataggattttcaaacctagagaccgtttgagttggcaaagatggcacagcctatgcctaagagtgaagattgtgcaagggccggattttggtggagtacagagaaacaaactgatgcaggaaggtagggagcagatgaccatgaggaggaatcagttagaggttctgacagatttttttcattcttgtcatctaaccagataggcaccaagaagaatggtagctgaatggacaccttgtattgttcacattattccttttccctattaaatgcaaggacaaagcttttgggtgtttacctagatagtttatggcttttccaaattggtctgtgtttttacttgaagtgcaaatatgtgaggcagatgttaaaacaagtgacataatgtttacattaagttgcctgttttgttttcctagccttaaattggaatgtgagaaactggcaagtgaaaagacagaaatgcagaggcactatgtgatggtaggtatcaaagattggactttttcctttttcatatgatattagcaaacgtgttagcagagtgtaaaaaacatgagttaatgaaatgcttgattcttttttctctttacagtattatgaaatgtcatatggattaaacattgaaatgcacaaacaggtaagctttagttgaacttcaagctgaaatgagacatcagttcatatgatttaataatactggctttgttctcagtagtgggctctaggggtgggggtttgtatgctatttttctgccttggtttcctgtcctgtggattgatggtagtattctgcatcaagggttgcttcttgataattacaagtgtttaaatgactaggagagggagaggtgttttggaaatataaactagcctctttattgacagataggaattaagacttgagtttactttttcacctgtatagatttatcctcttgaaagggctgggtatcttctacagttgctgaagtttagaatagttaatgtttttgtgctgttttgcaaggaagtgtggacctgttggggggaaagaagggtattca

SEQ ID NO: 48391 - DNA, 1048 bp, Homo sapiens
atatatatatatatatatatatatatatatatgatgagaacttcaaatttagttgggaaaaaaagcaaaaagattatagggtttaacaacagaagagctaaaaaatatcagaagtagtgccactaacgtagtcatggtttgggttaattgctgtgtgatcacagaaaaggttttgttttagttcagaagaggtgaagaactgtattgaagaggtgatgctggaggtgagcctaggtagaaagatagctctgtgctgggaaaggggagagaggcagccaggatggcaacatcagcaactcagagctggtggcactgctgcctgccaggcactgtcctggtccttcgcaagcattaactgatccagtccacagaacatctggtgagacagggaccttcattatgtccattttacagatgggaaaagagagtctcagagatgttccaggtaaggcagtaaccaaagcagggaccagaacatagggaaggatacggcttggggaaaggtggtcagaccacagggcagaaagagacattttgaatagaaaagcaaaagtttaaaaaaaaaattaaaaagtttaaaagctagtttaaggttatcatagaaggcccccgaattttggtttaaggaacttaaattcctatagacaattaggaaatgtgtacttttatcatccagggagcagatggacaggttattgtgaaccaaacttgatagcctgggcattttgggaagctagtgatgaggtttgtatgctcaggggaataggggctggaggagagggccagtgttctgagcagtttggggaagaagccagagcttccatcataaagcaacagagggattgccacagaatgagtgtctcacgagcttagcaagcctggttctttggggatctctgtggtttaggtaaggagaggagggagagcaggagtagtgtgagatggaaagaggaaggaatcacaggaaaggagaaaatagatggagttgggattatataaggctttagatgagcagggaaggttcagaggattgaaggcacagtttctg

SEQ ID NO: 48392 - DNA, 1048 bp, Homo sapiens
tttcactgatgtagtctattccacagtgtgaaaataccgcaattgatttatccagtttactaaaaatgtccatttggataatttctgtgtcatggatgtcacacatagtactgcagtgatcatctgtcacaagtcttttggtaagcatatggacatgggcaacacattggtcagaaaaattgtttgcaaaatcactgaagctttccgtgctaactcagggtcatcatatgaagtctagctttatcccgggaggtagtagaatgatatccccagggatttgtggagatggtggttcagcttagcattttaagttaccgtgtggagtgtttgtccttgccgtcaggctgccaaatgacattttactattctcagtacttccttccttcctgggtcttttgtctgttgaagttttggaaaacaaattatcagatacattagaattgtgttttaaaagcactgtttgaatgtagattatttctaaaccaagcaggggtgtctcagaggctgtttttctttttttttctgactttccaacctccttttggattcttcttagtcagatacctgagtttcagatagctggagtgctgccatcattttgaaattataatattatttgtagttttactcctgttccatttttattcatacattaactcctttttcaattttgtttattttggagattcctcaagtagatgctgtagttctaaattatctttttagaaattcagccacttagagagataagcacaaaacatggagttatattattttgaatacaaataagaagtaggtgcccagccaggagtgggcatggttcatgctgaatgaatccactggagtctgtcagtcacttcatatgttggtcactgaaattatttttaatcctttctcttttgagtcttaggggaatgcttaaaaaactacacaccaagataaacaaatactactgctttgtggattctccttgtccactcaagcaaattattgtaataactttatgacaactttctatatagttcttgcatttaaagcaacaattagg

SEQ ID NO: 48393 - DNA, 1083 bp, Homo sapiens
gtgactgtggaggctggtaagtccaaactctgcagggcaggatggcaggctggagacccagggaggggttgaagttgcagtcccggtgaaaaggtcatctgctagcagaattccctcttcctcctgggagatcagtctttgttctgttaaggtctttactgaatggatgagactcacctacccacattatggagggtaaactgctttactcgaagtctactgatttaagtgttaatctcatgtacagagtaccttcacagcaacatactcacatgtttaagcaaatatctggctaccgtggcctagacaagttgacataaataaaattcaccatcatagccactaagaaagtttttcaaatattctcagttttgagatcacagagcgtttttgaatgcttctagcttgtaagtaacagaaaattcaaactatttgaatcaggaaaaattcctatacatatattatattcccccaccttccaaatgcctaaacactccacaacaaagtaccaaatttctatgtcaactttaaagttattaattttttttttatttcccaagaaaaggcttgccctacatctgcttatggctctgagatgcccctctgggaggtcttattattcagccttgttcctacccctctgtcttcaccctacaatcccactcttcatcaaaatactcataacttcaaactgagcacctcacagaagatacatcttggatttgggcagccatagccgtccagcaagccacacaaacattttgctttgctggactttcctgggcaaattcactgctttctggcttcccttcttcttctccttccttctcactccttccttccctcctttctgcagatgctctgtgaaaggaagacattgtgccaagaagtccaaaggctgacattttaatgaggaacaggaagaaattttttccagtaggaatgggttctatctgctatgcccaactactagtttttgtccccgagttggaagttactaacagggatgtaatagagagcacagggaagccagaagtattccatcaggtataggtcctaaagcagccacaagagagctgctag

SEQ ID NO: 48394 - DNA, 1046 bp, Homo sapiens
gggatgatttgggatcaaatgcgttcactgtaaaaatgaagtcctggcattttgtggcctagggtaaaggacatttctagggagggatgggctggggcaagtggtgtgcatgtccaagccattcatgttttttatacaggtgaaatctagctacgatgaccttaagggggaaaaagcaatgttaccaaagtgcaatgtggccatgaagaaggagagagggttatattattgaaagtaggagtcagccattacttaatacattgtctgattatatctcacatgtgattctaacttatgcatagagctaaagattctttgaactttcaatgagactataacagtgaatttatccagaggatatttatccatccttctatccatttatatttcatccatccatccatgcatctttccatccatccattcataccactaatatttatcgaagagcagccttttgtggggcactgtagtagtgtgggatggcctagcccagattttcggccatttcatccccaagctggggtctccttcatcatccacactcccctatgacctcatggtttgaaagattttatctacaaaataattcatgaagcaacaattaatttgcctcctaatttttattagtcaaagacagttttgactatcatttagcgccttcgactatcaagaggtcactagccaacagcaaagaaatttgacagccaatttctatgcttaagggatccttggagtccaaagcagtagttataaaatgacagtccttggactacactgtgacccagatgtatgtagtttgagccaaataatagctgtaaaaaatggaaccagttgccataaagttctggcttcagttgcgactggggttttggtcacatggctccctgacttctgtgtggcaacactcagcagcagtgcctctttaaaagaatcctttgtctctgaattgccaccatccctgctctgccaacttaccttctccttccattgagtttgcagccaccatttttttttttttttacagataaggaaacagagttctg

SEQ ID NO: 48395 - DNA, 1103 bp, Homo sapiens
gggtgctcagagatgtgtaggcatttctctttttacccttgaagatcctctggaggtgccctttgttagtgtcagctgaagaatcatgaagtacataaatttggaaagaagagctttatttctcacaaagggttgcagcttgcagggtggccattctgacaggtggggaaacgtagactctggccagaagctggaaacaagcacttcaagggtgggaagaataagacaaagatttatgctgaatggggtggccaagtatacgtattcaacaggttattataggggctgtgaatagtcacaaaaggaaggcacaggcatgcatagtaggctagcacataagcaacatgcatcccatgttcacttttgggtggagacttaacatttaaatgtattatcattagggcctatacaacaaaaggtgaggcagaggacacaaaggccctctgtgcacagcctccatagactggccagaaccactttgtagtcagtggtctcttaccaggaaggaatgctgatcagttactgtgtcaaaaccacaaaagggaggggcagcatcggcaattggttgatatcagtggtgcagtctttcagaagggctggtttctgtttaacccttggtgtaggaaacctaatagcaattaatgagggagggggtataatgaggtctgacctcatcatgtctgggaactcagtttttaagggttctctggggcctcttggccaagtgggggcaatgttcagtctgttggggggcttaggattttatttttatttctcattagactccagcaacaactttaatctagtatgctcttctgttttagatgtatactccttaatttcaagagcaatcaatttgtttttaagtgcaatcccgctgggttccttctagtgatttttcaatgaataagccacacctgcataagcctcagagcaggcagctccagtcagggaattcctgacacagagaatattagctgtgaatggaaccccgaggaatgtccactggtttccatctaaaggtggtaccacctcctatcctggggagcatttggaaatactggggcgggggcattaaatttttaaaaaatgtaaaacatttt

SEQ ID NO: 48396 - DNA, 1056 bp, Homo sapiens
ttttacataggcccttgggtacttcttggacaaatatgttggctggagttgggtgagatgggataacttctcaaggtcttcagttccacataggttaaccacaagaggccaagtgatggaaggggaagtggtatatgtactgggacattagtccactagtccatgtcactcaaccatctggcctcggggtagaggtcagctactacaacctggcccttgggtgggaaacctaccaaattctaatttttttgagaagggaagttaaatcctcccatctgaactcctggtgattctaaagataatgtgtcccaaactttcaaattgaggcctaaaagatcttagtgacagtgacaatgatatctgacagtaagaaaaatgtagttcctgtcatccagatgctggcctggtgttaaaagctaggccttcatgtcctgctaagcatacacaatttcacaggacacctacatcagaacaagactgcttttcagccgtggtgggtcaagacaaaggaacatttctttagtcatgtcaacaccgaaaaacatgagcattttccaagatgcaaaaatgaccagacatctccctgtccttgttaatgtgcttcttaaccagttatagctttagcttcacttccttcttcacactttacttttttttttttttttttttgagacggagtctctctctgtcaccaggctggagtgcagtggcacaatcttggctcactgcaacctccgcctcccaggttcaagcaattctcctgcctcagcctcgcgagcacctgggattacaggcacccgtcaccatgcccagctaatttttgtatttttagtagagatggggtttcagcatgttggccaggatggtctctatctctcaaccttgtgatccgcccgccttggcctcccaaagtgctgggattacaggcgtgaaccaccgcacccggcatattttcttaagataaccagttatcccccactttctgacagcatccatttagagagccctgcttccttgaaccctactcaggactacctatcatgcaaccaaacctta

SEQ ID NO: 48397 - DNA, 1092 bp, Homo sapiens
atagttaaatattgtgcttttcagagcctcagagaaagggggacggggtgggggggtggggcagcggaatctgtcctggatggggccagcttaaataatactggcaaccaagattctgttaggatttctgtgcatatagtgtagtaaagaagtatcattcaggggtgaaaaacaaagagccgttttaatgatgttgagtacatttggctgttttatagcctttttcttccctcccccaaagaattctgtttgcctaactcccaaactgttggggtggtacattcctttaggaccaattaaaacataattgagggtcagtgatacatttggctgactctggttcagtattctcttaggtgattatattctctcatgtacagttacaggaaattaaaatgttaaagtaacctaaaatgaattcagaccaataaaatcaagggaaatacaagttgattgcattacttctgtatgttgcttgctattaaaaaggttaagaggccaggttacccaccagtccttgcactgttctgacactttccccaggaggaaaacaagtacaaaggttacggtggaggcataagtagaagagattgttaagaagggtattcatgtgtctttgctctttctgctttatgcctcagtttggtttaaaaacttctgtactggcaaatggtggtattcagtgtgggatagtgtcataactaatttgacaatttattaatcataaaataacaataaatctctagcttttacacttgatttgtcttgcctcttttgtagaaagaaaaaaagtctttaacttttgctaaccatgtgttttaaaggctattggagttgatttaccccagattttgtcacattttacattctttatttttcaggttttccaattaaaacgtcacagtcttttgtggtgtgataaaaagatagcacactgggaaggtaggtgacttgagctccacttttgatcttggtacttgactagttatgtgacattgaggcgtcatggtttctttattatacatgtggtggtgaggcttataggtgtgctggactgggcgataagctctgaagtacctttaagctactgca

SEQ ID NO: 48398 - DNA, 2021 bp, Homo sapiens
ggaggaaaagttggctcagtccttttcactttatggaatttttcagcagtaattttgaccatacgtaatttttgccttaagttgacttcagaagctagctcttcattagacaagattttactgtaaatgcagaatgtttaaactcatcagtcctcttttcctggtatatgttgggcatgtacttttagagatgttttagttttaaagttctttcgtagttcagttgatacataatatgtataatcatttgtacttggtgaaattaaacacagtgcatattatattttaaagctttaacttttgtttaagtatttttccttaatatgtcttttttaaaaacaaactttcagctagtatgttcaacacaccaggaatgcagagcttgttgcaacaaataactgaaaacccacaactgatgcaaaacatgttgtctgccccctacatgagaagcatgatgcagtcactaagccagaatcctgaccttgctgcacaggtgagtttgtaattgtattgaaaaagactgtgcagtgtgaattaaaataacctaatcttgtaattgtgattttggcacatttgtgttgtgtatgatatcttaatacactagaaaaataagtaaactgtgtctccaattttttagaccgtgtgtttctttgcagtaaattaatacttcatatgtaattaaaacaactttatctctgccattcattgactagaaagaagtgcaggtttagtttgtttctacatatgttgagttaggagacaagtacagagttctggaatgcccactcttttgaagataaactacttaatgaaatgtaaatcttgaaagcaattaagagcaatgttaatacatttgaaatacttttatttagtagatcactcagattataatagtcatgctcagaatggcagttgtaaaatagcatttattaaagacgggaatttgtcagaacaatgttctccttctttcaactattgattcccctgctgaaaatcgtatacaggtcccttattaatgtattcctttttctaatttgtttctaaagagaccacagctaagaaaattggggatcttaatgctggctgaacactcaggatcacttgggaagctttatagacagtaccgatggttggggcctcatccttagagattttgagataattgcgtccgataaccctttctccctcaagttgcctaggtactatctaggttccataccacagggcttgaaaaaccacggagaatgtgaaataaaccttgataatctgtagtttatatttgctgttcgttaaaaatggcttctgtagtgtgtcaggaatttggaagactttatagttaatctcatcccttaaattttaaaagctttaagtcaaatgaatggtttttattttctaaattctaaaactatattgattcaggtatctttgtgtataattctcagtaataacttatgccctcaccaaatttgtggaattggaaataacaaattttaagaagaatttttgtgtctgtgattctgtatattggaggtacattttatggaagattgatttatgcatatgaaacttatcagactgagttgttagtattaaatgcttcaatttaccataataagccattttaagtgtgtatttggctaatactgaatgtgcatcttgcttttaaaatttgactttaacaagcacatgcgtagcaattttgtaataatcttactttagtaaagtgacttgagcactcacatactatttttttactctaaaacaaaatgttgctagtactagattggcatgtcttttattacagataatttagaaacttttacaatgttcttgttatctgcagattaaaatttgtggtttttctattcttttgatttttaaatatttaaaaagactcttgagtgtaaaaacttgtggtataagcactcaggtaagttataagaagtatctaataagatgattatctgtgaaaggatacgtttaagatgacatgcttttttaagatgaaatgaagtgaattc

SEQ ID NO: 48399 - DNA, 1050 bp, Homo sapiens
caagagtgaaactccgtctcaaaaaaaaaaaagcagtgtaaacgattgagcaacataaaactataataatcaagacaatctggtactggcataagaatagacatttacagattgatagaataggattaagagttcagaaacaaactattgattttggacaagagtcccaacgcagttaaaagggcaaaagaataatcttctcaacacatgatgctggatattgtcatgcagaagagtgaatttcgaccctttcttcacaccgtgtacaaaaattaactcaaaatggatcacagaactaaacacatgagctaaatctgtaaaacttttagaagaaaatataggagtaaatttttgagttaagcaatggtttcttggataaaattggacttcatcaaatttaaaaacttctgtgatacaaagaataccatcaagaatatgccaagacaagccatgaaatggtagtaaatgtttgtaaatcatattcaataagatatagacatttagaatatataaagaactgttacaactcaaaaaaacaagtaacccagttaaaaaatgggcaaaggatctgagaagacatttctccaaaaagatatacaaatcttcaataagcacacaaaagggatgttcagcaccattcgctgtcagggaaatgcgactgaaaaccgcaatgagatagcacttcacacccggtggctatcatgaaaaaggcagataacaacaagtgttgatgagaatgtggagaaattgcaacccacttgactgctgatgggattgtaaaatgatgggctgctttggaaaattatctagcgatacctcaaaaggttaaacatagagtcaccagcagttctactcttaggtatatacccaagagaattgaaaatacgtccacacaaaatcttgtgcatgaatattatagcagcacaattcgtaatagccaaaaagtagcaacaacccaaatgtctatcaaccaacaaatggagaaataaaatgtagaatgggatatttggcaataaaaaggaatgaagtgctgatacaagccatatatgg

SEQ ID NO: 48400 - DNA, 1049 bp, Homo sapiens
tagctaaacttgttctcaggttaatttcattatttcttttttcttctgtctagagtaggtgcttgtacatacctctttataaaatctcaacaaatcatgccttttcaggagttttatttgattcttagtcttttttcttctgttggactgaagttgttttgttttttaatatgttgctttttaaatgccagaactgttaggaagggtatctcatagatactcatttctctctagtcccaattttatctggccttccaaactccagtccttctagtatggttttagttttaaaaatcttagtgatcatcatatgtcttgaagtctaaatgatccagtcttcaatatgcttgaatgcactatcattggaggagtacccaagaaactgtaacagtggttgtcaaaggtggcagtgggggagatattggacagagggataggagaaatagcctgcctgctttttacagtataagcttctgaattttctatcatgtccgtgtactacttatgtaaaaattatattaaaaataaaaagaactgtgtgaagaaaggaaccagggaacaaacccagtcctatctgtctctacaacctacttccttcttatagcactgtgctttagcactaatgctccacatgtctacctttagctgattatgagcgtggacaaataatttattcactttaggccctagttatattatgaaaagtaatgttggatctgttgatttctaaaattatgataaatgatcagagtgcaattgaaataaagaataaagaaaaatacgctaaaaaaatgaaccctattgttaatgctaccaacacacaggagtgtagcagtaatcaaattagactattaattttatttttctttctgagatggagtctcgctatcttgccaagctggaatgcagtggtgcaacctccacctccagggttcaagcgattctcgtgcctcagtctcccgagtagctggggtctacagatgtgcaccaccatgcccagctaatttttgtatttttaatagaggtggggtttcaccatgttggccagg

SEQ ID NO: 48401 - DNA, 1041 bp, Homo sapiens
ctgctgaaatgagcaggtaatgatgaaaaggaaatagtgtgacttggccctgatcctatataaggatgccgttgaaggcccaggaactttgacgaatttctgctgagtatactactgatgggtcacttaggaagacctggagccttatgtgggagactcacttggaagaaaataatgtgtggaagtagagtagatcttgggataattacactgagaggtgaggaagagataagggcaagccttgcaactgatggacaatatactgtctggaatctatcttattaatagagtaataatagatttcaaaagtagctacatttacagggatcaggcaatgactatatactaggcagaaagcatacaatgtagggggtgttcttcctgacacagtatgagaaatttcggggatggagggctgagccagacagaaagctggacatggaaaacttagctgttacttggctgcttatgtcaaacacgaaagagaaattatggtaagaacaaagtttcctactcctaaatcaccatatagataatgcaaatttacatcaactaagccttagcatacaatctgagagctagaattaaacacctaaccagatggacagtaggaaagcactcagttcgcctgtttatgagcaaacactggatctcagttgatcttgtatcaatggaagaaaagtttctgccacatgaaggaaaagcacattgtacttagtgtctggagtgaaagcacacctcgaaaaagatttgctgcaggaaatggaagtttattttagatagcatctatgttttgctttaataaaaatcaagaggctagaacgttttgtaaaagtcaaggggatagtaatgttatataagaaagtaagataaaataatgcactaaaatgaaaaagtgactgagagaaattaaaagggagacgggtgaattaaaactgagatggggccgggtgcggtggctcacacctgtaatcccagcactttgggaggcctaggtgggcggatcagctgaggtcgggagttcgagaccagcctgaccaa

SEQ ID NO: 48402 - DNA, 1034 bp, Homo sapiens
ggagggaatgtttaacttcaggaacaggtcagagaacgcttcatagatatgctagcacctgagcaggattttgaggaataaatggaagttttcagtggaagagatagatggcattgtagacaaaagagaacagcatagttaaagatatgaacaagtaaactaattgtgtgttcaagaaatttcaagttgttttttcttggagtacatgcaaaatctgaagaaagagggttgctagagaaagccctaacgcatgctattacatttaataagtcaaataattggctttttgggtatgaagtatatgtaaaataaagactttgttatatttttgacattgctgccatcttttttttttctttttcttctttgacaaagggtctcaggctgtaacccaaggtgtagtgcagtggcacaatcactgctcactacagcctcgacccccaggctcaggtgatcctaccaccttagcctcccaagtagctgggaccacagtcatgcaccactatgcctgctaactgttgtacattttgtagagaaggggttttgccatgtttccctagctgatcttgaactcctgggctcaagcaatctgcccacctcagcccttccaaagtaccaggattacaggtgtgaaccaccatgtgtggcctgctgccatcttaagtataaattaatagtttgtactagtggtagtcattacattatggaagatagtagaagatatatttatttatggtgaactgcctgcatattgagaatgtgtgtttatttcacattttgccctgaaacatttctgtttttaaaattatcgtgtgaatttattttgtcttccttcaactatacattatccttgaaattagttttatcatttattttatgagatacggttttgctatgttgcctgggctggtcccaaactcctggacttaagtgatctcctgcttcagtctcccaagttgctgaaattacaggtgtgcaccactgagcccagatatccttgaaattatttttaaaaggaactcaaagggaggagg

SEQ ID NO: 48403 - DNA, 1024 bp, Homo sapiens
gttctttgttacttttccaaaacacttgtaaaccgaagttgagtttcttaaactaattaatgttttgttgggggctgtagcaaaaccatcctgacatggatgcttactcagagtcacccacttccttgctgaatccatttttttctgatgtagtgctgctacagaccttttccttttgtcctttcctctgttgctgtggatttgatcatctcacataggacccaaactgtcaccctgtgctcaaagacttaaggcttcctttctctcattgctagcccctagggagtagagtttcttggtctccttgctaaaaaccagttcctttaggaaacaaaccaaaacaaaacaaacttataaaaaggaaaatatctcttaagcatggtactaaaatttatttaaattaaatagatttctgtggacttacctgggaatgaaacaatttataaatattggtccaatgagatactattttctaaatttcaaaaaactaatttacaaacttaactgggaaattttatttttaccaggaactgtttgaagtcagattctggtttccagctagtcttccatttttataaatttatgtacatttatatataaatataaatcatacaaaccaaaggtaaaacatacacattataaatatgtataaatgcactgaccttttgccattattatatatatttcatatatatatatgtatatacacttgtacatatacaagtatataaggaaatgtgtttgtatttccataagtaaaacaagtatgtgtaaattaattatttctaactaaggcatagcacataatcttacaaggaacttataattaggatctttgttaataaatacatatttatttaaatatattattgctgtgctttgttgaaggcactgaccttttaccattatatatacttgtatataaacacttgtatatatatagtattatatatatacttgtatatagatataggttatacattttacattatttcactttatattatttcatatcatattttat

SEQ ID NO: 48404 - DNA, 1029 bp, Homo sapiens
tctttagcagaatctcaccagggaagggatttcttttctccctgttttgtttattggtggattgcagagtcctagaaaagtgcctggcacatagtagatactaaataaatacttgttcaatgaatacatgaataaattcttggtaaggggatacatgtgaaaactgttacttgttaattttatagttgtggtttaaaagagttataatagcctggtggtgggcatctgtaatcccagctactcaggaggctgaggcaggagaattgcttgaatttgatagtcggaggttgcagtgagctgagattgcaccactgcactccagcctgggcaacagagcaagactccgtccccccgccaaaaaaaaaaaaagttataatatatagaaatgtagtaaaataaattaactataaatttggggttgtagctttgcttttgttttaagttccagatgtgctttctttttctaaattttcagcttcagttgtggagggccaaaagggtatcattcctcgagctattcaagaaatatttcaaagcatctctgaacatcctagcattgactttaatgtaaaagtatcttatatagaagtgtacaaggaagacctaagagatcttctagaattggagacatccatgaaggatcttcacatccgagaagatgaaaaaggaaacacaggtaaagtagcacacttaatcagttgccttcattagcaaacagacatgctttaatgctttaattaagtttctggatatattccaaggaatctttaaaaacagatgcagaagcaaaatgaatttatttttacttttaaattgaacagctttattattaatccctctctctctctttttttttttttttttttgagatggagtttcgctccatcagccaggctagagtgtagtggtgcgatcttggctcactgcaacctctacctcctgggttcaagtgattctcctgccttagcctcccgagtagctggtattacaggtgtgcaccaccatgcctggctaatttttgtattttta

SEQ ID NO: 48405 - DNA, 1055 bp, Homo sapiens
gtttttgtttgtttaatgagatattatacctgtgattctgtaactttctttttgcatttaacaatgtaaaatatcatttcagaccaggcgtggtggctcacgcctgtaatcccagcactttgggaggccgaggcaggcagatcacttgaggccaggagtttgagaccagcctggtcaacatgatgaaaccctgtctctactaaaaatacaaaaattagctgggcgtcgtggcacatgcctctaatcccagctacttgggaggctgaggcagagaatcgcttgaacctgggaggcggaggctacagtgagccaagatcgtgccactgcattccagcctgggcaacagaccaaactctgtctcaaaaaaaaaaaagttggatttattttttgatgttttagtgagcattttatgtttcccagaatgtctctataggacaccaattctgggtcagctttttggttatagaccatgcaaataatgttttctttttacccctccagtgaatatttattgagcatctgcagtgtctaggttaccgtgctgggcactagggcagaatgaaactctcttattttaaaatgtattttactttattttaaaaacctttttgtagagacagtctcactttgttttttgtttttgattttgctttcagatagggccttggtctgtcaccctggctggagtgcagtggcacaatcacagctcactgcagcctcaaccttctgggcttacgagattcttccaccttggcctcctaagtatctgggactacagggacatatcaccactcccgactaattttttttttttttaattttttgcagagacagggttttgccatgttgtccaggctggtcttgaacacctgagatcaagtgatccgccctgcctcagtctcccaaagtgctgggattacaggtgtgaaccaccacgcctggctttatttttaaatatgatgcttatttagctaatattcattttcctgcttttcagaacgttggaattacctttacaaggtatagccttttccaaaaacttttgtgtactcttt

SEQ ID NO: 48406 - DNA, 1046 bp, Homo sapiens
taattttcagctcctctgttggacatataagtgcatctcttgttggacataggcaaaataacttggcaaacttagttctggtgatttcttgatggtttggaagtctattgctgggaagaaattccatcatacatattcatgcttataataagctggggattttttgtttgtttttgcaaatgcttgcccctacttttcaacaattttctatgttagttgtgaagaactaaggtggggagcagtactacaagttgagtaatggtatgagtatataccagaattctgattggcagcaagttttattaatcagaataacacttggttatggaagtgactaatgctgaaaaaattgattatttttattagataatttctcacctatagacttaaactgtcaatttgctctagtgtcttattagttaaactttgtaaaatatatatatacttgtttttccattgtatgcaaattgaaagaaaaagatgtaccatttctctgttgtatgttggattatgtaggaaatgtttgtgtacaattcaaaaaaaaaaaagatgaaaaaagttcctgtggatgttttgtgtagtatcttggcatttgtattgatagttaaaattcacttccaaataaataaaacacccatgatgctagatttgatgtgtgcccgatttgaacaagggttgattgacacctgtaaaatttgttgaaacgttcctcttaaaaggaaatatagtaatcttatgtatttttttgtgtgaagtgtttttctagcatttataagtgaaagctggcaggggtggtagttgggctcataattaacgtggtaatttagcaaaatgagagcctagtcatccaattttttttttcttatagtcagccagagctttcctcattacctatgagaaattttgagtgagttacttggttcctttctctaaaatagctttagtttgatgtttgagaatatcggagataatgtaaaataactgcagagtatggttcccggctcatatttctgaagtactacttattaacctccagctgtccagaa

SEQ ID NO: 48407 - DNA, 1044 bp, Homo sapiens
gctgcagaacaggtcagtttaagtttagctttgtgttagcttatacatactaaaacctttaaaaagcttttcttctcaattgatttttttcttttagaagccatggtgtctcaaccttttggggacctaacttctaaacattctaatagtttgccttaatttttcttctgctttcttactaaaaatgaagacattcaatactaatcttgctggaagaagccttaaccaagcaaacttctcatttctctggtgaaaactgctgccaaaaccacttgttaaaaattgtacagagcctgtagaaaatatagaagattcattggatgttggcctagttctgtgtggaagactagtgattttgttgtttttagataactaaatcgacaacaaatcacagtctgccatatggcacaggccatgcctctacaggacaaatgattggtgctgtaaaatgcagcatttcacaccttactagcattctttgtcttttctaccaaatattaacaactttcaattccgttttcttaattctgttctactaatgtccgatttactactcatcatttttcttgacacttaacattgctttaatttgtaattgctaatggtttttgaactcttctaattgtaatggacgtgtttatcattttaatttagcattgaaattgtcttgatgttgattaagatgttacgagcaaaaattctaattcgcacttttttttcttttcttttatagtgtgaagcagtatgcagatgttgaaggattctaatgcaagatattttttcttttttatagtgtgaagcagtattctggaaagtttttctaagactagtgaagaactgaaggagtcctgcatctttttttttttatctgcttctgtttaaaaagccaacattcctctgcttcataggtgttctgcatttgaggtgtagtgaaatctttgctgttcaccagatgtaatgttttagttccttacaaacagggttgggggggggaagggcgtgcaaaaactaacattgaaattttgaaacagcagcagagtgagt

SEQ ID NO: 48408 - DNA, 1050 bp, Homo sapiens
cttaattagaaatagcgacaaagtgtaaaaatccttgattgcaccatttcctgtgtgtgaatcaattacagtattactgaaaaccattgcaggtggctggttaaatccagaaaaatttttttgttttctttgggaagaaaaatgtccatctgttctttaacagcttgcacatggagcacaaagaatttaatgttgaggttgcatgatttaaatatgggtaaagaatagagtaggcacttaatcttataattgggaaactgttcgtcaatgcctatgatttgtttgagtcttcattttacagtgggttgactcttgtgattagacacattaaatgttggcagtgccagaagtgagcacatttataggacttggctacaccaaaatttctaaattttttttctcatagtgtacacatttcttaatgtttttcttgctaaaaatgaggcaaataactttgtgtcgagtacttatttgacagtatttcatttctctcttggtcgcagatctttgtatgttcctcttgattactgtaaactgaacttgaaaatttgtttaaaattttacaaacttgcctgttaggatctaggaatgcatttcaaaacctccagaaaaccaaaccagtcttattagttagggtttttggtggtgtgggaatttttgttttgtcttttataaacctctctcctcttaatccagatgttctgtataattatctgggttattaatttccccatttcctcaagaatttcagtaaactttgagtcaggttttgtgtctaccctcatgagccagcctgctactgaaacatcgtttgtttttcttaaaaaataaaaaaggctagaaccatcatttgaggtccttaatgttaagccacagtcagatttagagaagtccattattgtgttagtcttcagaacaacttaagcttgtttcattgagagtatgagtatagtttgtattaaattaaaatttattgcttttcccccttttccctctccttgtttttttggccatatatctccgttgcccatgtactggatcgacttaccc

SEQ ID NO: 48409 - DNA, 1049 bp, Homo sapiens
tgtaacttttcataaatgtatgctttgtggatgacatttatcttttcagggttttgggaatgtgccgtataaaacaattcattgctgtggtgggacttaatccagtggctaaaagttattgttctaacttagcaaaaaatgaaaccaggctcccttgaattttgtattttttaggcagtcatttgaattgtgaaaccctaaaatgaagaatcaagttttagaaacagctggttttttgggttcaaatcagtattcactgtgatcggaaacaaatattcagtaataagaataaacaaaagcaaaactgatttgtgttggttcttataggctactgcagcactggggtgtcagttgttggtccgacccagaacgcttcagttctgctctgcaaggatatataataactggtacgttctagaagcaatgtcttttttttttttttttttttacagcttgctttccaataagccaaatgtactagctgctttatttttccacagattggtgtgcccgtttaataaaagaatatggaaactgaacagccagaagaaaccttccctaacactgaaaccaatggtgaatttggtgagaagaaattttagttttaacagtatttttttatcctgttaataaattgcctttttctgttaattattgccttaggagtgtgtggtgaatttttggtattactgtttatgtaattctgcgattatcagtagttacatcttagcttttatttatgaagtagaagtaactgatttgcatataaagaatttttcttgcattttgggatttcaaatcctttgaagtattttgtggcagtattttgtgtttggtgcattttactagatggaagcataacgttcaagtctgtagcaatgcctttggtcttttcaaaacatgcctaagattagcaacaagtctcttgaaacagaatggagttactttggagacttcgctgctttctttgaaatgtgaactgttaatttttaggtaaacgccctgcagaagatatggaagaggaacaagcatttaaaagatctagaaac

SEQ ID NO: 48410 - DNA, 1071 bp, Homo sapiens
cctcactttttcctatagtgtttttaacctgttataattggaatgatagagatgtatttcagaattttgcatggtccaaatcaatgatttttctttttaatatgtaaagtatttcattaacagtgtagattctttctgatgtttggggagccatgtttaaaaatgtagtatggagcaattgaaaaaggggtctttttccctagcctaattcttactaatctcagaaaacaaagatcaaatagactgtgaagttgaactagtcctcttagtgtagtaaccaaatttaggaaagatcaggataatttaggaaggaaagtaatcatttatttaattatttataattataaacaattattttatgttttgtatattttatgtataaaacaattacatgttttattatagttatacttcttcagagagtagattatggagccaccatgtccatacagttagttgttccttggtattcttggattgattccaggaccccccacagttacccaaatccacagatgctgaagtctctgatataaaatggagtagtatttgcatttaacctatggacatcctcctgtatgctttaaatcatctctagattacttataatacctaatacaatataaatataaatgctctgtaaatagttttattgtatagtgtgtgtgtgtgttttaagagacgaggactcacaatgggacactttgaccaggctggtctcgaactcctgggcctacacaatcctcccacctcagcgtcgcaagtagctaggactacaggtactcaccactatgcctggcagttttttaaatttgcgtttttaaaaattgtttattatttattgaatattttctacctgagattgacttaatctgtggatatggaacctatagatatggagggctggctgtatatgaatttgtttttggcttttacaaaattagaaattaaaagtaactacagttactataatgtgcagaatgactcaaatatttccatttattatgttagtgtaaaaactcctaactacgtattataatattttatattaatgaagtactttagcataca

SEQ ID NO: 48411 - DNA, 1056 bp, Homo sapiens
acacagtgattttagtagaattaaaaaataaatcttagcctgcaaattgatgaaatcattcaaagaaataacctgatgagagagttcactgttttttaagctatctatctaattttaggatatatattgatactcttgtaatacaattaatgattcacatttcactgcttattgtcaatacaaggaactttcacctattataaatttcaacttgttcatttggataagatttttaaagttaatgcagcttatattatattggaatcaaagttagtccagtatggtgaaataatcttatattaggaccttaagacctcacaaagtcttgtatgttctgtgtgttttggctgcagccctaccacttatgtcttggatgaagatgaacctcgattccttgaagaagttgattacagtgcagaaagtaatgatgagttagatattgagttggctgaaaatgtaggagattatgaaccttctgctcaagaagaagtactttctgactctgaattatcaagaacatacctaccttgagcccgctgccatctcttgttaactgcaaagaataaatgaaatatcttggtttttatttcccaggaagcttgagagaaatgagtttatacagagctgactcaaaaagacaaaaagtaacttgggccagtttggtttcaagataataaatgtgttattaattaatgataaaattggcgcttgttttattttcgatattcaatgcactttatgtagcattgaatgatcaaatattggatttacctttaaaaaaaaaacctgagtatcattgcatgaatttttatctccctatggttatatcctgcatcaagtggataattttgaagtgtgttcagaatataaaattgaaattttagagttgttgaaaatcctgacttgttgaaaactaatatatatgtacatggatttctatagatgtgtttgtttagaagtgggtagatattgcagataagactgttcttcagaatcatgttaactattgggttgtgactgaagtagtccagggtttgccttgaaaccattacattc

SEQ ID NO: 48412 - DNA, 1050 bp, Homo sapiens
ctttgatagacagtggtcatctcactgtaacctcatatggcagaagggttgagggatctttatggggtctcttttataagggcactaatcccattcaagagggctctgctgttgtgacctgatcacctcccaaaggcccgcctcctaataccatcaccttgggaattaggatttcaacatatgaattgggatgggaggggggatgtaaatattcgcccaatttcagatattatataattactctttacaatactgtgaaccatcaggttttttgcatataacatttaagttttgtttaaataaactaagaaaaaggtaagagacttattcaaagtgaatttgtgataattatgaaaaataagttgccagtcgttccatttagtttctacaccattgctttggtgaaagataaatttagttttataaataacaatggagatttaaagattagatgtaaattaaacagagcttaaaactactaatctataaaattattttaattggaaaagcttgaaacttctgagtgtgtgagttaatattacaaatttgacagaatcttaaccctgctggtgttactatgtatgtaagcgtaagctatctttttgtttagtatttgtttttagccttttgtgtctttatatttaaatatgtcttttaagcagaatatagttattctttatcagagcatttagttcacctacatttattgtaattattaacatatttaggtttaaatctaccagattattatttgctttctatttgttccatctgtcctgtatttttttttttttggctttcttttagattggtagattttagattgattttagatttatattggttttattctcttaactgattttaacggacacttggcattacttcatgcagtctcactttatcaaactcttaatataaaagtgtatttttgggaggccaaggtgggtggattaggaggtgaggagttcaagagcatcctggccaagatggtgaaaccccatctctactaaaaatatgaaaattagctgggcgtggtggcaggtgcct

SEQ ID NO: 48413 - DNA, 1091 bp, Homo sapiens
ttattcaacctgtctgcagtgtggatcgtgttattccacaacttagccctcaattcagttttatccttcttggttttaactatttcccgagatacagtatctgttataaattaatttattttcatttgtaggcaatgtatatcaaataagcttgaatacttgcagcaataagaataaatatttacattaaatgtctttttcaacataagtagtaactcattgacagatgttgtcctagtcagctcaggctgccataatgaaatacaataggctggatggcttataaatgacagaaatttatgtctcacagttctggagattgtgaagtccaagagcaaggcaatggctgatttggtgtttggtgagggcctgcttcctcataggtggccttcttctcactgtaacctcatgtgacataaacattcagttcattacccttcatccctgttcccatcccaaaattcatgtccttctcacaagcaaaatacatcatttccatctcaatagtcccaaaatgttcgcttattccaacattaactcaaaagtttaaagtccaaagactcatctgaatatagtcatgcatcgtttaacaataggaatacattctgagaaatgtgttgttaggtgatttcatcatcgtatgaatatcatatagtgtatttgtagtaacctagatggtatagcccattacacacctcggctatatggtatagcctattgctcctaggctacaagcctgtacagcatgtgaccgtatggaatactatatataattgtaacacaatgggaagtatttctgtatttgaacatatttgaatatagaaaaagcacagtaaaaatatggtattataattgggaccactgtcatatatgcattacatcgttgactgaaacatcattggagcatatgactgtgtcatttaaatcagatatgggtgagattcaaggtataatttgtcctgaggcaaattttcctttagctgtgagcctgtggaatcaaccaagttaggtgcttctaaaatacaatggtaggacaagaacaggacagacatttttattccaaaaagaaaaagaagtgacaattcttgagc

SEQ ID NO: 48414 - DNA, 1034 bp, Homo sapiens
agtctaaatactcccttcgtgaacaccggctgagttctgcctagtgttgccttctgctgtgacattgacagcactgagttccaatgcaaagtcccacagtcactgcatgttctctccctgaagcacacagattctctgctccatgtggccactggggctggactgcgggagtggtgtgagcaattccagattgtctttcctaccctcttcagtgcatttccttggtatgatcgctcacctaatttttggttcttaaaaaggtgctttcttgcgtggatagttgttcaatttggtgttcctattgtggggcatggagtggggggcggtgatcactggaggcttctatttggccatcttgttctgcctctcagctgtttattttgttaaataggtttactttccctcacatcttctctttgcttcctgcaacaccaaaaaattgaatatgtgtttgctttatggtgtgccatatgtcatgtaggctttgttcattcttttttattctttttttctttatttgtgtctgactgggttatttgaaaacacctgtctttaagttctgaaattctgtcctctgctttagtctattgtcaaagctctctaatatatttttttctatcatttaatgaatattcttcagttccagtatttgtttgctttttaaaaaatgatatctgttttgttaaatttctcacttatcatctgaattgtttttctgatttctttgtattgtttatctgtgttctcttgtatctcactgagcttctttgataccattattttgaattacttttccagcatttcatgtatttctttctcgttggaatctgttgctggagaattattggttgctttggaggtgtcatattttcttgttttttcgtgtttcttgtgtccttatgttattattggcacatctggtataacagtcgcatcttccaatttttttatttactttcatggggaggacttttttctgaaggcaagtctatgatactggctggatagggcactgtggctttgattctgggtgg

SEQ ID NO: 48415 - DNA, 1049 bp, Homo sapiens
gaaatgtaagttaagatgtactgagatatcattttccacatatcagattggctaaaatctaattgagcataacattctattgatgaggttatggaaaaacagcctctctcatacattaattgaaagaattcatgtatgagagaatctcaattgagggaatgtcagttgagaataccactggtagagggtgatcagacagattctatcaagattaatgtgcatgtttcctttgacatgtcagtcccacatctgggaatttgtgagatatgtttatttcacaaatctcacatgtctgtgtgcacacatagtttgcatacgtgtgaagtggcattcaaagtttttcattgcagtattgttttgagattggatacaactcaagtgcctatttgtcaaggactagttaaattatggtgtaacctttttatgaataatgtgcagtggttgaaaaaacaaaaagctgtctataccctgatagaggtgtaagatgtattataaaatgaaataaacaaggtgcttgttttatgacgttttagacttcgtatcagaaggagggaaaagcagtctacatttatgttttcatcaagtaaaatctggaagaaaagtaataaaagtagttccttgattatgtggatggaagatacaggttgtgttaataagtgagacttttcattttttgcttttatatcatacttgattttgtgtaatgccagcatattaccttttcagaaattttaaattaaaaagtagataaagaattgtggcaaaggcaaaataaagaaaacaaaactctggatttcttatatgaagtttagaatggcttggaaaacacaggtacttctggaattgaggcaatagtggaagtattggtaggaataaaagcagcagatagcttttattaaagacattttaggcattttgtgggccagacacacaattcagtaacaagcattttatatgcagtgtatatatgcatataaagtgtgccatttaatactatagcacctctatgaggaaggtgctattatttttcttattttacagaagagtag

SEQ ID NO: 48416 - DNA, 1050 bp, Homo sapiens
ggcaatgggttgactatgtgtggaacataggcaatccagtgattagcctgttgcctactcccttcctcaattttaactgtgaatggacatgttacagccggcctggaatgagaatgattaccaggggctcacactgctcaggaatgagagtttggattgcttaatcagataagctatcaagacctgcagaggtgatagctgagggtgagagggatttaaatagatcctggggcctgggtgcagtagctcacccctctaatcccagcactttgtcaggccaaggtggatggatcatttgaggtcaggagtttgagaccagtctggccagtatagtgaaaccccatctctactaaaaacacaaaaattagccaggtgtgatggcacacacctgtagtccaaactattcaggaggctgagggaggagcatcgcttgaacccaggaggcagaggctgcagtgagccgtgatcgtgccactgcactccagcctgggtgacagagcaagactctgtctcaatcaatcaatcaatcaatcaatcaatcaatcaatcgtgccactgcactccagcctgggtgacagagcaagactctgtctcaataaataaataactaaataaataagtaagtaagtaagtaagtcaatcctgtaagtaagtaaattgatcctgggggatagaggtgagggcttgcaaccctgagaacagttgcagtgattgaggatgaactctgtcccactgtttttcttccaagtttccccttaggagaggcccacaggagcatatctcattgtgccttggcatctgctttttgaagaatctgaacgacccacctggagtgagtcagagtcaggcagcaacttgatatttcttcttttcagcatcatctcttaggctctttacctctccaaagtcaaagatgtcatcttgactacagaaggcacttcctgaattttaagtgctctttaagccctgaaagcaagttttgttattaaattgcctcaaactgaaagtattttctcttactagcctgtaatatttgaggtaaggttagaa

SEQ ID NO: 48417 - DNA, 2878 bp, Homo sapiens
tggctttctaaaaaagataaaaaattttaaatcttttaaatttatttctagcatatagttgtagaataagaagacacagtctttgtaatcataaccttttaaaaattttgagactcgttttatggccttggatatgatcaacttttgttactctttcttatgtgtttgaaaagaattctatattcgttagtcacagttgtctatttgcctattaggacaagattgttaattgtgttgagaagttaagttctcttttatccttatggatttttattcttattctattaatcactgtgaaaagtattttaaaaatttctcacaatgaaaaaatttctcacttgtgattatgattatgagtgtgtttctatttgcaggtctgttagttttttgttatatattttttgagggttattatttattgtatatacatgtagattgagttttcttcctttttgagttggactttttatcattatgaagttactatctttacctctaagattctaagacaaaaagtactttaaaaaatattaatatacttatattaacttttaacttttcagtatccttcgatgtgtattttttaaacagcgtatagttggattttaaaaataccaaatctgagttttgtcatttaactggagcatttagatcatttacatataattacttctatatttggatttatatttatgaaatcttattttaatagttttatctctttatgtttatctctttttcttgccttcatttggattatctttctcttactccaccttttccctattactagtttgaaaactgtatatacagtcttttttttattttaatcaacttttttgaggtatagtttacataaactgtatccatttaaagtattagtttgattattgacaaatacgcaaaaattctagttactctagattttccaacatatttatcaaagtctaaagtaaatcaggacctttctttcctctttccctcagccataaatggaaacttcgagtattctaactaccatgacttcccaaatcaacatatatatatacacactttttttttactaaacataaaaagcaaagcagtaacgtcaagtgggttttctaaaaactagagttaagatatataaaaaacctatttgacattactgctttgcttttttatgtttagtgtagacttacccacatttttaccactttaaaatttttcattaccttttgtgtctcagaccttctgttgggatcacgtcgtttagtggcgtgtacttgcatgtgcacttgtgcacatgctgtcttgctctccctccccgaaagtgtctttattttgtaaacattcttaaaattagtctctttctctggttacttttaaaaaatcaactttattgagttaaaatttgcatacagtaagtttcacttaagttcagtgagttttgacacatttatacacctatgtgactaccacccattgagacagaaatatttcttgtcattccagaaagtctccttgggccccttgtagtctcttcatctcctgcgcagatgactgctgatctgctctctgtcactgtgactagtcttgactgttttagaacttcttataaattgaatcatacagcatttactttttagggtcaggcttttgctgagcatatgtttttgaggtttacccatgttgctgcatataacagtggttctttccttattgcttgatagtattttattttgtaaatacaccacaatttctttgtggatgcgtgttggaatgtctgaagttttagacttcattggactttaatatgagtaaagttgataacattttgtgcacaaaattttttggggtggccaggcatggtggctcatgcctgtaatcccagcactttcagaggctgaagcgggtggatcacctgaggtcaggagttcaagaccagtcaggccaacatggtgaaaccccttttctactaaaaatacaaaaaattagctgggcatggtgatgggcacctgtaatcccagctgtttgggaggctgaggcaggagaatcgcttaatcccgggagctggaggttgcagtgagctgagatcatgccattgcactccagcctgggcaacaagagcgaaactctgtctaaaaaaaaaaaaaaaaaaactttttggggagatatgctttcatttctcttgggtaaatacctatcagtgaacttgctgggtggtatgtatggtaagtgtatgtttttattttataagagactatttttggtggcttttaacatatactttttttgctttaatgctacagttcctagtaatgttgactaagtgtggattttcttttttaaaatcctgtttgggatttattgtatttggattctgtgagttgttttctcataagatttggaaaaactctgcgttctcttcttcagttactgcgttttgtttttgccctccctcttttgcaattctaattgaacgtagacctttttactccctttcatgtcttttaacctcttttttctgttttccttttctttgcctctctgtgctgccttcagattatttcattagaactatctgtcagtttcctaattctctttttggctttgtctcatctgtcattagaaatatctactaggggccaggtgcggtggctcaagcctgtaatcccagcactttgggaggccaagaggggggatcacaaagtcaggagatcgagaccatggccaatatgatgaaaccccgtctctactaaaaatacaaaaagtagctgggtgtggtggtgcgtgcctgtaatcctagctactcgggaagctaaggcagagagaattgcttgaaccagggagttggagcttgcagtgagctgagattgcgccactgcactccagcctg

SEQ ID NO: 48418 - DNA, 1100 bp, Homo sapiens
ttaccttagttttttcttttctagatcaatcatatgtacttgtttttactattcctagtatagacattgatggatattttatatatgagaaagagttaggtcacttggtttatgccacttaacatttctgagccttaatttctcatttgttttgacaggtcagatgtgaaaatgtatatggaaacttttacagtgtatcatagtaccatctaaatgtcaaatgtcactaataatactgttgttatatgacggtttcatatcccatgtcccttaacccttctccagattagataccaggacagcaagtcagactcttaaaactttatattgtgggccaggcgcagtggctcatgcctgtaatcccagcactttgggaggccaaggcgggcggatcacgaggtcagaagatcgagaccatcctggctaacatggtgaaacctcgtctctactaaaaatacaaaaaattagccgggcgtggtgtcgggcacctgtagtcccagctactcgggaggctgaggcaggagaatggtatgaacccaggaggcggagcttgcagtgagccgagatagctctacttcactccagcctgggtgacagagcgagattccatctcaaaaccaaaaacaaagaaacaaaaaaacctttatattgtgatattcaggctatccttttataaggtgaatagccaacttatgagaggtattattgcatgataactgatacagttctgaggaaggtttggtcaaatgcgtgtttttttttttgttttttaatttcttacaccttttaaattttcttgcttaatccttttcccccttttcccttaaattatcttttttattttatgccctaggcttgccaagtgtccccccaagtcactccaaagatggtactgatttctgcttagtgaaaatatttaaggaaaagttcttctgaatttgccacatggggttcttacttacagatagataattctgaatagtaaagctattttgtaattattctgtgttaaaatattggtttttgagatatttgtttctagaaaattattaatgtatgacactttttgaactaaagtaaaattggttcagttattcatc

SEQ ID NO: 48419 - DNA, 1049 bp, Homo sapiens
ttcacataagaaatcttttccgtagctctagtgagtgtcttctgcctgtctaatgtcagaacatagttctgaaagggaattaataagtttatctcagtgttatgttttaggtttgtactagcacatttagaaactgtaataattcaggcagctaaaatcagtggaggcttactactgcattatcttagtgtccatactgtgaacctggtgggtattttataggtgtatttgagattaagaagagattagtatttccttgtaattaaacaacctcagatgggtattgcacattatcttgcaccccttataattaacccaccagagcagcattgggtgacttgatatgttgctctgatatgattcccttgccactatcttagtaaaatgtgccctatggttaataattttaaatactaatacttttaaaaataataaaattaggtcaaacatggatttatttgttaattctactccaataaaattgagtatttacaaaaacctttagtgtagttcttattgcaataaaaatctaatgactagaaagccagaaagcactattttctaatcatgtaatgctccttaaatttcatttactaaaaaagttacggaagtattttttaatgagcattgttatagtatgaatatttatataattgtggagtaattagagcaattaattttagtggaaacacaaagtttgcaatagaagctacaattcaatagggtttatttcagtgggaacataaagtttgtaatagaaattataaaaatgatagcagatcttctaaaaatcacattcacaactagcaagtagaaagcttatacatttcatttggtgtaacaaaaatcagtatattcataaattgtaaaatacctgaagcttttgttagtaaacaaaagcctttaaaaagatgttcctctaattttagtaaagagattttgatatttataaatcgtgaaacattacacaggcagattttggaagaggttgtaattttctctctggaacttcatatttattttgttagaaaaaatataaatatgtgctt

SEQ ID NO: 48420 - DNA, 1032 bp, Homo sapiens
aagcaaaaacaaaaaacactatttcttcatgtggttagcttagatggactttaaggtgacttgagttgacatttactaaacaatttgtatatgtttttgcctatgtatcactaagtatacacatttttggttgtcaaaccttaaaataattttgcatctctttctccccctctcagctgtgaattcagtatccttagggaaaaatggagttgtggaactgatgtttaaaatcattggaccatttagtaagaagaattccagtcttataaagtgagtaaatgttttgaatgtaaacataggtatagcctttgttactctgggcctcattatcttgatatgtacaatgagcaggttgaattaaattgtctccagggttatttcatttcttagttcttaaataatgattttatcatgataaagattttctttagtataaaatttaatcttcacaaatatctcaaaattggacagttttgacttcattgaatataatgtttatagtaacttagactgaacatttctagatactgtaaaaggaaaaaagattatctatagagtattcattcagaaacatttattgagtgcctactatatttctcacccaattttacaatcttgtaatgactttttcattcttatgaatacctgaacaatcttaaattgatacatttctattttgtcaaaatcacatcattctttttcccccatcctgagatgtgtgtgtgtgtgtgtgtgtgtgtatgtatacacacacacacacacacacacacacacacacacacacacatgtatgtatgtatgtatttttattcattcctaggcctttcagcctcagaaaatgaaagccatgtctcatttattggttacagtttaatattttcttaagccattttagaggtctttctttaaaatttttttttattgtggaatttttaaaacatacataaaatagagtttatattaaactgattatattgagttatattaattacttgttgtgtttaacaattctgaacattccaccatttttgt

SEQ ID NO: 48421 - DNA, 1050 bp, Homo sapiens
taatgattacaattttacttatatatgattaccaccctcccatttacaaatagtacctaattccagtgctacttgatatagatttttggcaaaaagatatcaagtagcatagaatattggttattatggggtcctcactttgaaattcaggctctactatttagtggttgggtaccttagggaggttattgaatttctaagatgtataatagctgtaccatctctgaagtagaggtaacgaatatcacacggttgtcatgagatttacatgagaagcatgtaaaaagaatatttaaaatgttctataaatgtcagctgtaattagactttttttatattttgtgatggtaatagtactaaattgatatcaaaaccccgatagagtacacaaatagtattgactttgtactcaggaacataatgtgaaaaggctcaaataaaactttagggaattaagtctgtacgtggaaatatgaatatcattgttaaagaacacatttcaggaacgcaagataccaggaaatatatcactataacattatctgaacaggtcaaataaaatccatgtgattaccttaatagatagtaaaaaggactttgatgagactaaaaactgtgcatgatttaaaacacacacacacacacacacacacacacaccctcttttttttttggataagagaaaaccagcactactttaatatttaacagtgcacataaaaggtatttctgttagaattaaggtctaataattataatctttatttaatttttaaaaatttcattattctggaggcttaggtcattcagataagatgtttggcaggcatttagtgtttcaagatctcagtgtctattaacccttcttcttggtcatagacccttatatttattttgataacttcctcccatgtagcccatgcatttggaggatagttgataccaccccattgtttcttgcataatttaaaatacctgtaccttttaattaagaaagccactgtattggattccaggctctggaaatattgtacttatcaactaaggcaa

SEQ ID NO: 48422 - DNA, 1079 bp, Homo sapiens
tatggagagaagtgaatggatttgagatgttttgagatagaacttgtattgggttgcagtgtggaaaagggagtctagatatttatgttgaaccttcaactgaattcatgtgaatttgtaaaggttaagattggaagaggactaggttgagaggaggaacagaagttttatattgggctggttaggttggtgaagctatcagaggttgaggctgctattgaacataggagccaagctgcatacagataataattacagctgtgggattagatgggatcactcaaggcaaaagtgtagtgagtgaagagaagtgggctgggacagagctgttgggggagatgtcagtgtcttagaagtgtgtcagaggggatctcaaagaaggggcaagaggaggaaaatcaggcgagtatagagtcattgaatcccaaagaagaaagtgtgttaagaaaagaggagataactggtttgtatggtgcagagatgtgaatatgttggggttagaagtgaccacaggatgcttttgggagatctcagagttcagaaggcaacctggtggtttgaaaagtgaacagtctgtggggaaatggagagagcagtacatatttctctttggaggaatatcagagaaacagctggtaggagctcctagatcatacttgtgtgcctacaagtcgattaattgaaggggaaagatagatgagggatcagagaaagtataattgaaagagaaagcaagtactttgagaatgaaaggggctgggagcaagtgtacgagtggattgttctttgaatctcaatgtaccagccaaatagagcccgttaaaagtgagaacatgtaactcttctgctcaaaaatttcccatctcactcattgtaaaagccaaagtccttaaaatggcctacaagcctctaagcaatctgctatttttctctgttctctcccatgcctacccccaactctgaccttgttcctcactgtctcctccagccacactggccacctcattgttcatagaacatggcaggtttgctcctgcgcagggatctaggagcttgtgcctccgtttttctggacagct

SEQ ID NO: 48423 - DNA, 1089 bp, Homo sapiens
atgccctaaatcttatcattagaaaaactctaatttcaaaatactaatttattcttttcattctccaactataatctgttatctttctagctcacttgctcaaatatctgttctctaagagttctacctcacccagagctctaatctgttaacttttgttttctctcattcatctcttcctcctcctcttctatacaacagtatagaatctgttgtccattattacacgttcttgctgatatctgagatgtctttaccttgctttaaatttttccatcacatccaagagacaaagtccttaccctggataacctttattgagcagctgaatgacattggaggatgaactcatttagtaggtatcactaaaaaaatggtgacagtggatatccttatcttgttttctggttgtaggagaaaagcattcttttacctttaaacattttgttaactgtgggtttcttaaatgctttttatcaggttgaaaaaattctcttatattctagtatgctgagaattttttatccagtatgaatgtctgattttgtgaaatactttttctgtctgttgagatggttgcaaagtttttctcttttagtttattaataggtgaattatattgaatgatgttcaaatattaaaccaactttgcattcctgtgattgatcttacttggtcatgatatattgttattatccttttcatatatttttggatttgatttgctaaagggttgtttagaacttctgcatctatgttcatgaagcatattgtaatatttttatctggttttggtattaggtactagccacatagaattttggaatcaggaagtatttcctccttttcagttttttggaagagtttgtatataattggtattatttctttgtatgtttggtaatattcatcagttaaggcaccttgtcttggaattttctttgtggcaagttcttaaagtataaattcttggccgggcatggtggctcacgcctgtaatcccagcactttgggaggccgaggctggcagatcacctgaggtcaggagttcaagaccagcctggccaacatggtgaaaccccgtctcta

SEQ ID NO: 48424 - DNA, 1087 bp, Homo sapiens
gaaaaggtgatacttgagcaatggaagtggtggagttagttattgggatatctggcagaagcacattccaggcaaaagaaacagcttatgcaaaggcactaaagtgagagcctggcatgttggaggaaaacatggaggcccagccagtgcatccagagcagagtgactgagaaaagttgtaggtaggatatgaagacagggaggtaaggactgggggtattcctctagggtcttttatgtcattgaaattggcagccgcacagggctttgagcagagtagtgacaaaaatctacttaaggtgttttttccttcttctgtcccccagtgtattaaaaggatcactaagcatgttgtgttgagaatagactgtagggggcatcagaggtagaagggagactagtgacattgtttacttgaccgtggtagatgtggtaaagtgatcagattctggatatattttaaaagtagaattatcaagactttctgatgtattggatgtgggacaggagacaaggatgaagctaaggttttgaattgagcaactggaggcatagaattgtctttaacttagatgggaaagccagagtagagcacacttggaagggaaggtcagatccgttttgcatatgtcgagttggtaatattattagagattcaagtggaaatgttgagtaattacaagactagatgagatcaccaaggaagagactgtagttagaagaggacaagaaaggactaagccctgggcattccgttaaaggaaacttagaagtggtcagtgaggttgggagaaagcaaagtatatagccaaatgaagaaagcatttccaagaagaggatgtggtcagctgtatcaaatgctgctgataggacaaataagatgaggactgagaattgacaattggatttagtaacatggggatcattagttgttgataagaatggtgttggtggagtggggtggggaaagtctcattggaatgtgtttaagagaggattggaagggaggacttgttgacagtgtgcataaacaagtctttgctttcagaaggagagaaatgggacagtagctgaattgggagcgaga

SEQ ID NO: 48425 - DNA, 1044 bp, Homo sapiens
ataattgtcagattcaccaaggctgaaatgaaggaaaaaatattaagggcagccagagagaaaggtcgggttaccctcaaagggaagcccatcagactaacagtggatctctcagcagaaaccctacaagccagaagagagtgggggctaatattcaacattcttaaagaaaagagttttcaacccagaatttcatatctagccaactaagctttataagtgaaggagaaataaaatcctttacagacaagcaaatgctgagagattttgtcaccaccaggcctgccttacaagagctcctgaaggaagcactaaacatggaaaggaacaactggtaccagccactgcaaaaacatgccaaattgtaaagaccatcaatgctatgaagaaactgcatcaattaacaggcaaaataaccagctaacatcataatgacaggattaaattcacacataacaatattaaccttaaatgtaaatgggctaaatgccccaattaaaagacatagactggcaaattggataaagagtcaagacccatttgtgtgctgtattcaggagacccatctcacatgcaaagacacaaatagactaaaaataaagggatggaggaagatctaccaagcaaatggaaagaaaaaaaaaaaaaaaaagcaggggttgcaatcctagtctctgataaaacagactttaaaccaacaaagatcaaaagagaccaagaaggccattacatgatggcaaagggatcaattcaacaagaagagctaactatcctaaatatatatgcacccaatacaggagtacccagattcataaagcaagtccttagagaccaacaaagagacttagactcccacacaataataatgggagactttaacaccccactgtaaatattagatcaatgagacagaaggttaacaaggatatccaggacttgaactcagctctggaccaagtggacctaatagacatctacagaactctctatcccaaatcaacggaatatacattcttttcagcacctcattgcacttattttaaa

SEQ ID NO: 48426 - DNA, 1057 bp, Homo sapiens
agtgactgccccaacttttctaaatctttataccctggaggagctgtgaaataacttttaggtctcttgtctttttgataatagccatcctaacaggtgtgaggtgatgatatttcactgtggtcttgaattccatttctctgataagtgatgtggagcaactttttatatacctgttggctattttaatatattctttggaagagtattcaggtcttttgctgattttttaattgggtcattctttttttttttgctattgagttgtgtttcttatgtatttaagatattaaccccttgtatcttgagataagctatatatctagatgtatggctggcacatactttctccgaacctataggctgtctttcatttgttatttcctttggtgtgcagaactttttagtttgacgtagtagtcccatttgtttttgtttttgttgcccatactttagatcctatgcaaaaaattgccaagaccagtgctgagcaacttgttcactgtgttttcttctaagagttttatggtttaggtcttacatttaggtctttaattcagttagtgtaatgttttcaaggttcatttatgttgtagcgtatattgaacttcattgctttttatggctgaatagtattccattgtatgtttctaccatgtattgttcattcatctattggtgggcacttgggtggttttcatcttctgactgttgtgagtaatgctgcttcattctttggcatgtggatatcaagttgttccagcaccatttgttgaagagactattttttccaactgaatggacttgacatgcatgtcaaaaatcgattggccatagatatatgagtttatttctggactttcattccattggtctgtatgtctgtctttatgctactactagctgattttaattaatgttatttatttaggttggtgtgaaagtaatcacagtttttgccattacttttaattaaaagtacaattaacattaaaagtgatggcaataactgtgattacttttgcacctaatataccatgaaaattattgacaatat

SEQ ID NO: 48427 - DNA, 1047 bp, Homo sapiens
aacggttctctgtcctcatggttcttgggtgatgcctcaaggcgctctgtaaccacctttcggtgcccgctaccacagcacagctccagaactactgccctcctgagctatctggctctgtcaataggtcactggcctcctgctgtcttgttccctcaccgatatcttgcttgcacactccacgtggctacttcttgatcaaagattctctgatacacagaacagcaaagaaatgaaagcaaagaaaggaaccaaaaagcttatgtcattgatactgggactcagtctctaccttatagtttctgaaaagaggaacaagaactaaaatataatgaccaactcacgagtagctctccatctatttatctgtagaaattaaagtacactctgttcttaagtttaaaaataatccacagcacctttcttttttttctttgtttttttactactacggcctttctgctgctcttccattatcctttcctctgccatttgagagccatcggcacgactcaatgttgacatcaaccatgcgtaaaggaattcagagagataccttaaaggatacaaaatgttagttaatggtagatgtctaaatgagacagctttatcaacacatatattaacgatagatatttcaaataatgctttaggtctttaaaaacagatcattcattagataatagattagatcttacaagaaatgaacataaggattaattttccctttctacattttacaactttccagaagatttcttgataattatacatgtacatatgcaaatcaaatgaatgcccattaagtttttattatatcagaacacagttcagttcagtctataaatattttcttttaatcacaaagcaaataaaatcagaaaaagataaaaaattatcggcattatataaaatcattcttaaaaattaagaacattcacatttacaatttacttgagtttatttaataaatgaaatataaaacagaacattctctaccagacactaatttttcagaactttaacactgctaagccagaaaagtct

SEQ ID NO: 48428 - DNA, 1032 bp, Homo sapiens
aacaaggaaaacacccacctctcctgaacttttccaaacagggtgcactttatttaaggcagtatactgtcttagagtcttgtgcaaacaaaacggtgaaacaggcacacttgtcaaagagtggcctcgtatgattttgaggtattcttccctgcagcctgtcccaccacctcagtggcctccccattccctggccctcccaagtctattccttgggacctatctcagtcccttactctaggagctccctgagcaatggcaacccccagaaaattacagtgactatagttactgagtcctcagttcatctccaccccagatggcacctcccagtttgagaccaaactacctgccatcttcaccaggatgtcccaaagatatctcaatgtctaaagcaatctttatcccaaacctggtctcctaccttgcctagatatctacacaagtggcaccaccatcgtctagttgccaaagccaaaaaaatttctgaaaaatcatccttgattttggcagaaactctcattcaccatgtcccattagctgtacctctgaaaacatttgatttcatccactttcttccacctgctctgccactacctttgttaagaccaacattttctctcacgtgactggcttccctgcctcccttttcaaccattctcaggcaagcagatttgacttgatcccatcatgtccctgcatacaagccttcagtagaatctaccaatatcagaataaagtccaaaatctttaacctgtggcctcccagggttttgggtatcggcttctccttgcctctcatctccgccatccttttcctgctctatacttcggccaggctgctaccctctcccctccaagcctgtgcacattctgtctgggacccttttcccagcagtgcctcctgaatagatgcgatggggatttgtcacctaaagtttcacgtggggcagttctcctacccagcatacagcatattcttcactgcattttcaatacctgttgcttttctgtatttgtcgtaagatgata

SEQ ID NO: 48429 - DNA, 1426 bp, Homo sapiens
agggtttttataggcacagaatgggtggcatggcaggccagagtggtcttggaaaatgcaacatttgggcaagaagacaggagtccttgttctcattaggtccatgggcacaagcctgagggtggagcccttgccagtgaccctgcccttctctacccagcacttccctgtccccctcccatatcaccgttgccatcttgtccttgatgaggaatacaactcccaattacagtgttgctgtgggagatgcagtcctctttatgacagtttctagaagttgataagaaaatgggacctgcctagggctagtatctcatttaatactctatagaatattatgtgtttttcctttttagtttttaatgttgaagatcagaaaagagacaccataaatttacttgatcagcgtgaaaagcggaatcatacactctgaattgaactggaatcacatatttcacaacagggccgaagagatgactataaaatgttcatgagggactgaatactgaaaactgtgaaatgtactaaataaaatgtacatctgaagatgattattgtgaaattttagtatgcactttgtgtaggaaaaaatggaatggtcttttaaacagcttttggggggtactttggaagtgtctaataaggtgtcacaatttttggtagtaggtatttcgtgagaagttcaacaccaaaactggaacatagttctccttcaagtgttggcgacagcggggcttcctgattctggaatataactttgtgtaaattaacagccacctatagaagagtccatctgctgtgaaggagagacagagaactctgggttccgtcgtcctgtccacgtgctgtaccaagtgctggtgccagcctgttacctgttctcactgaaaagtctggctaatgctcttgtgtagtcacttctgattctgacaatcaatcaatcaatggcctagagcactgactgttaacacaaacgtcactagcaaagtagcaacagctttaagtctaaatacaaagctgttctgtgtgagaattttttaaaaggctacttgtataataacccttgtcatttttaatgtacaaaacgctattaagtggcttagaatttgaacatttgtggtctttatttactttgcttcgtgtgtgggcaaagcaacatcttccctaaatatatattaccaagaaaagcaagaagcagattaggtttttgacaaaacaaacaggccaaaagggggctgacctggagcagagcatggtgagaggcaaggcatgagagggcaagtttgttgtggacagatctgtgcctactttattactggagtaaaagaaaacaaagttcattgatgtcgaaggatatatacagtgttagaaattaggactgtttagaaaaacaggaatacaatggttgtttttatcatagtgtaca

SEQ ID NO: 48430 - DNA, 1574 bp, Homo sapiens
acctttcttttatcttgagttgattatctctttaaaaaattgagatttgggttgttagtttctccatgttctgcctagaatgcacccttgtatttagggccatgctgtctgtagattccgagtccaagtggagtacacataatgcatgtgcttgtcctggaagccagcccttgcgtccctaccatttccagagaggcagcagacagatctgattgtgagcaagtatggctaacccccagcacttgtgctctgatagtcctgtgacatcaagacagaaatgatgtagcttatgttttatgtgctaattttacagggagaaaccagcagaaactgagaggagaagatgactacaacatggatgaaaatgaagcagaatctgagacagacaagcaagcagccctggcagggaatgacagaaacatagatggtaagaatggggcctacatcggtgacgaggtcacctttcatttctctttcctggtccttcaccgtgattatccaatgaatccccaaaattatattgtaattaatgggtcatttcaaggagatcgtctgttctttaggagcttttaaaccaggggcagtggagggaagtgagggttgagaagcccaaggtgatgaaaaccattcggaaagtctgcatcgtttctagaaacatattcagtgtggctcaactctttaagtaggatgatttttcagtgacatttagggatttcccaacaaaatggctaggtcactacttgatcagtctgcctcccagatgagaagccccagtatgtgcatagagcttccaagcagctatgaaagctgccctttgtattattattttgaatttttgaagagtccaggccagtatcttgtagaatgtatcaaactctggccttgtctgtttgcttgtggtggattcaggctgatgaattcttgcttctccccaggaggcataacagcaggtggtcctacaggtgattggttgatcccttagctaacatggtgcccacaaggtctcagaaggccattttccttttgatattaatacgtcatctagaagaggatgctttgaacttgtgtagctttaccatccattgatgaacattgcccaagtggtgacattttacatgctgccatcacagcacatttattacctgacattttttaaggaactcctctccctcctccaacacacttgtttgttttggtatcactatggactcatagtattctttcttaaaattcatttttctgggccaagtgtggtggctcacacctgtaatcccagcgctttgggagaccaaggcaggcagatcagcgggtcaagagattgagaccatcctggctaacacggtgaaaccccgtctctactaaaaagagaaaaaattagccaggcgtggtggtgggcgcctgtagtcccagctactcgggaggctgaggcaagagaatcgcttgaacccgggaggcagaggttgcagtgagctgagatcgcaccgctgcactccagcctgggcaacaagagtgaaaatccatctcaacaacaacaacaaaagaatccaagccatgtgactgtagtttcccacagc

SEQ ID NO: 48431 - DNA, 1051 bp, Homo sapiens
tgccacttacatgtaagaaaaagccaacctaagtcctcaggaagaaacactgtcacaatctgcatgacctttgtctcagaattgaggatggaggtagtttgttcctggctctcaagttggaacatggaaagccccagttgatctgcaaggctgtgagataaaggctcttcgtacttgattttagcagggctgggagcaggtgcaatcagtacttcccttttgcaggtttaaaggttcagggatagcaaacgacctgctcatttagttctacagtatacagacagctttttgttcgctatgtttcagctcctgtgcactaatctaccacctgtggcttgtatatttgtgagaattgtatttaaatgaaattttcacctgatctgtcagctgttcaaggtcaggaactcggcactgcattatttccatagcacctggttcccttctctgtgtgtggtacattgtgacccagtggtgctttgaactcaagggtatattccaagagtcagaggttgatgtagtactcactcacatttggctctgaaatgcctgcaactcagaaaaggtgagctgtgtggtggagagggcacaacagtaaggagccctggagtctggcttcagtttccacctccctctgaccctggtccatgccagacaaccatgtcaccccttagtattcttatttgcaaaacgagtgggtaattctcttaattacttcatagctctggcacttgtcaaaatactcttaaaataaatccaggcagcaagctgaagcaatgcaatagcaattcaaccgagtgtcctccagttcaagttttgttttgttttttttgagacggagtctcgctctgtcgcccaggctggagtgcagtggcgcgatctcggctcactgcaagctccgcctcccgggttcacgccattctcctgcctcagcctcccgagtagctgggactacaggagcccgccaccatgcccagccaattttttgtgtttttaatagagacagggtttcaccgtgttagccaggatgctctccatctcctgacctcgtgat

SEQ ID NO: 48432 - DNA, 1029 bp, Homo sapiens
atggaaggctcccggcacctgagagtggccggcgtggggctgccgggggctgccaggtctgctcgtcacactggccccaccagactgcattctcctgtggccagatgcaattctcagagggttctggtgtcttctctctgggccagctttgcttgtgcacctgcgaatgtaatgattgtcttctgggggaaccaaagcgatcttgtgcagataaaagtggtgtctttgatttttatcacctttaatcgctgtgattgatgaatccagagttctagagcagcttttctgtttttattctcaccgattttccgggtccagttctgtcagtccgttcagtatttgttctgttctgccctggcctgtgcccagtggtggggaggctgtgttcattgcacatttaccattgagtgctggacaaagatgaggaagtgagtgtagtggggtcagtgtagacagagaaaccacccagatattttaagcaggaaggatttgatacagggaaatagatactgtaagctgtgggaagggcctgcattgaggtggggtggctctcaggcactatctcaggacctgcccctgtgcccagcgtagagcgtgagaccagcggggttctgctgcagtgcaggcccagagtcaggggcaccccactttctctgttctgcacctcccacaccctcactctgttccacattctagcctccagtaagtgcatctgattggaggcagaatcccactggaaatgattctggaaggtgcattttagcttccgagcctttgtggttcaggaaagcacagcaaaaggcgtgtggaaccgacgtggaggagccgatctgctgcatcccccaccaggcaggcggctcaagggccatgggagtcagcagcgctgtcccccacagtgtctaacctggaagggtgcctagggaactgcgagtggctgggcccgagcagagtgtgatgttggggtgcaggagtttggacttgagtttgaaggagtttggacttgagttcaagaccggggaagccgtcata

SEQ ID NO: 48433 - DNA, 1052 bp, Homo sapiens
ttacaggcatgagctaccatgcctgaccaccattgttgcattttatattaaaaaaaataggtgctttgggaggctaaggcgggaggattgcttgaggccaggagttcaagaccagcctgggcaacatactgagaccctgtctctacagaaaattaaaaagtaactgggaatggttgttgcatgcctgtagtcctagctactcaggaagctgaggtgggtggatcaccttgagcccaggagtttgaggttcaatgaactataattgcaccactgtgctccagcctaggtgacagagcgagaccctgtttctaaatatacgtgtgtgtgtgtgtgtgtgtgtgtgtgtacatgtatatatgtgtgtaaatgtttgtactgaatcacaagataaaatttatcattgtgggtcatggtcaaaagagtctggaaagatatagagatacacctggacgttaagtagctggatggttgtacatcctctcatttttattagctgttgccacagaacgttcctgctgttatatttcactttgtacaacttcctggcctgcagatcagatcctttggccctacatttctgtgtgtaatatttcactcttttcttatttcttgcaatctaagttttgcgcctgatcaattagcttatctcatgggtttgagactgttacttagtaaaagttcgagttcgtggtaaatgaatgaatgggaatctcagtccatgtaccagtacttactggatgtctaggatgtgcctggggccctgtgtccttagcagcttgaatgctgttttggaggaagatgagattccctcacatatctagagaataatcaggttttttttgttttttttttttgaggtggagtctcgctctgtcgcccaggctggagtgcagtggcatgatctcagctcactgcaacctccgcctcctgggttcaagcagttatttgcctcagcctcccaagtagctaggattacagtcacgtgccaccacacccggctaatttttgtgtttctagtagagacagggtttcaccatcctggccaggctggt

SEQ ID NO: 48434 - DNA, 1043 bp, Homo sapiens
actccagcagacctgcagcagaggggcctgacagtgagaagggaaactaacagaaaggaatagcatcaacaaaaaggacatccacacagaaaccccatctgaagttcaccaatatcaaagaccaaaggtagatacatccacaaagatgaggaaaaacctgcacaaaaaggctgaaaattccaaaaaccagaatgcctcttctcctccaaaggatcacacctcctcgccagcaagggaacaaaactggacagagaatgagtttgatgaactgacagaagtaggcttcagaaggtgggtaataaactcctccgagctaaaggagcatgttctaacccaatgcaaggaagctaagaaccttgaaaaaagtttagaggaattgctaactagaataaccagtttagagaagaacataaatgacctgatggagctgaaaaacacagcacgagaacttcgtgaagcatatgcaagtatcaatagccaaatcggtcaagcggaagaaaggatatcagaggtcgaagatcaacttaatgaaataaagcgtgaagacaagattagagaaaaaaagaatgaaaaggaatgaacaaagcctccaacaaatatggaactatgtgaaaagaccaaacctatgtttgattggtgtacctgaaagtgagggggggaatggaaccaagttggaaacactcttcaggatattatccaggagaacttccccaacctagcaagacaggccaacattcaaattcaggaaatacagagaacaccacagatactcctcgagaagagcaacctgaagacacataattgtcagattcaccaaggttgaaatgaaggaaaaaatgttaagggcagccagagaaaaaagtcaggttacccacaaagggaagcccatcagactaacagcagatctctctgcagaacccctacaagccagaagagaatgggggctaatattcaacattcttaaaagaactttcaacccggaatttcatatctagccaaactaagcttcataagtgaaggataagtaaaatcctttacagaca

SEQ ID NO: 48435 - DNA, 1050 bp, Homo sapiens
aagtactattccagttgctttacatgtattcgtctaatcttcacaataacttcaagggggcaggtattattgtcctcattttacagataaagaaaatgaggcaccaaatacatgattggtggggtatattttagttttttgaaaatgctatttatatagttttataccttgttttttcatattattatccttctgtgtatacctaatattctattatgtgcatagttcctcatatacttggtcatatcgtaagttttggattttaagttctttgcattgttaattataaggtttttatgaatatttatttagcagaatttctacccacctcctcctgatcttcttccttctaataatttggcaaccaaaaattgatagttttaatttgcatttcattgattacccctgatatagaattttttcatatacttatgccatttttttttctattttatatattaccttttcattacctagttatctattggtgttcattcttttctctggtgacttacaagttcattaagtatggtagtgtgcttaggaaactcttaccctaccccaggattacctacaggattactcactctttcttacgctctgactttcttatagttacatttaattctgtattcacttggaaatgggtagagaagaaggatatggtgtgaggagggaaactacctcctttcttcccctccaaaattacttatttgacataatacagttattgaataattcatactttcccccattggtttgaaatgcaaacttcattatgtattactttgttacatataatcacttaagaatttctcaggtctcttcagttttttcgttgatctatttgttcagactccagaacaaaatttagtaactattctgtggtattggttttaatcagtaatcctcatttgtgtcctccacctgtaaatataataaatttccctttttccttttatatcaataagttattgctacaatgattaccatccacagcttcgtatctgcagagtaatgatctaagatatttatttctggccagataat

SEQ ID NO: 48436 - DNA, 1034 bp, Homo sapiens
tgaagttattttcaggttattcatgtcaaaaaaaaaaaaaaagattttatttaactgtacttaagagaattgcagcatctaaaatgaactttgaaaactagttttaagaaatttgtattggattttgtgcactgttgaattgattttccaagttatgtctgtcttctgcctgtttttaactttagacctttggcatgatggggagggggcacaactatttggagtgtattactatgaaaatttaaggtcaggtatgttcaatgcctgacacaactgctgtcaatccttgatggcaacaaaccccaccccacatcatcccccaacccccactggccattgctgtttaggtaaatggttggaatagcttcatcattctcaattcttgctgtgcatcagaattatctgtgaagccatggacaactatttttacaaagctcgacaagtgattctgatccacagctagggttggaatcattatttatatttgtcaccttataaatcttaaaactgtttgttctactgaaagatcatacatatagtatttgtaacgcatatactttcataagaataagggaaaataatctcattttattatacatgtatttcctgaaaagtcagttgtaattctgatgatttttactgtaaaatttcatgtaaaaatgaatgtactttgttgtggaaaactgctaaaacccaaagaaatcacttgaattttagcaaaccttaaacaaacaagaaaaccaacccctgatgagaaaggatactattttggcatcatagtaaaacactgaaaataaatgctatactatagatagtactcatatacacacacatcttcctctgaagagtgaagtgtctgctacctatgtcagtgatattgtaattatttttcaaaagtttattgggattttgttacagcaaacgctttttgttcataatataatgagaaattcatattaaatatgtcaaaagattatttttattattgttttactaaaacctccttatagtaaattacaccaatgggtgcattc

SEQ ID NO: 48437 - DNA, 1049 bp, Homo sapiens
cgcatggcgacgccagcagccaccaggcgctgcatgctgcccgggacgacgacttcccctccctgcaagccatctccaggatcatcacgtagctcctgccagcgtggccagagctattgcaccatgagcgtccttcctccttcctctccgggctgccaggcagccaggtcaggcccggtgaggccacctggcctcttggttggccaggcccaccaggaagtcaccaggacggtccacctgccctgttggcacactcaggcgggagtccacccctgcctcagtggtgggccagtctcggtttgcattcttgtgcttttgggaggcgccaggggagggaagggctgggatgctgggacctgttgttgctggcaaagccaaaggtcacagtggcctgatctgggccctcccgaagctgagggctgcagcccctgcggcctcagagctgaaagctgcggcgccactggtgccagagtcaagatgtcacatatgtgtgttgtgtaaacagttggctgtttcgtgcttcaagaatgttcaggattaaaagcagacaagaaattgtgctacttgaagttgaatctttttatgagacaagctgaatctgggatctcgaattgcctctgaccttttataagacattttatcttcaaataaatttattttgcaataccacacacacacacacacacacacacacacacacacacacacacacacgctcttcttctaatatcaggacacagcaaaaatgaccaccctttcattcttattcaacaatgtattagagatcctagccattctagccaataaaaataagatatagaaagtgatcttatttaaatggaagaagtaaaattctttaatttgaagattacatgttttatttttatgcagaaaattctatagattcaacaacaaactaccaaaactaataactgagtttaggaagatcacaagacataaggtcacaaaaatcaattgcatttgtattcattagccaaaaaactgaatttaaaaatgtttaagtacaatttataaggtaccaataacat

SEQ ID NO: 48438 - DNA, 1034 bp, Homo sapiens
tgtggtgagacccctgtgggtggtcaaagggtaacatggctcatggatttctgctaggctctgaggtctctgagctgtttggtggtcttttccctggtgggagtttaggcttccttaagggtgtcttccctggttggggtattctgagcactttggggttggggttcctcactatgatgttttcgagctgggtaggggccaggtgggatgagaatggtggtcccaggtgggaagctttctgggctagatggggaggtggtctgagccgatatgtgctggagttagatcctaggatatggcatctctgagctggtcagaggcctgtgtccttggacatgaaagctctgagcttgttttgcagcaagaagatagttggcagtgcccatgggtctgagatttggggcaggtttgcaggtctgccccagaagtgtcctagagcaggagtctccgagaagtcttggaacagctggggctttgctctgggttctagggttgagggctttgagggttcagggactgggcctctggacgtgaggctccagggctggcttgtggggccttgccctggagtgcagtgttagagctgctctgtgggtgggtctgtggtccatggtgggagatctctgacctgcttggggctctgtgtccacaggtctgtgggctgcatcatgggggagctgttgaatgggtccccccttttcccgggcaagaacgatattgaacagctttgctatgtgcttcgcatcttgggcaccccaaaccctcaagtctggccggtttgtaggggcccttggtgaggtgggtgtggggcaggtttactccactcccaacagcaagtaaccactccctcccctgaaccttctctctcctggccccaaccccccttgatggacagggaccactgtcctggcccaactcagggcttcctccttcctgctgtcatttgggttggggtagatcctgtcctttgtcccttttcaccccagtacacacatgtgcagtgtctcagcaagctgtgcacagagtcgtcatct

SEQ ID NO: 48439 - DNA, 1053 bp, Homo sapiens
ggatgctgcctcgggtgtcccacgaggaacatgttatcatccaggtttggaagtgtcttagctcaattatttatagcctcaggcaggaattctatcattacaggcatgaaaatgcaccgcaaaatgatgatgaatttggaatactggaggtactaattttgctcagaatgaagaaagagaggaaaatcaatatgaaagtcagtttgtctgtccctgccctggaggtgggggtgtcaggctgcaactgagccctgtgactgtgcccatagctctcagtgtgtggctttcccgggaataatggtttttttttggcttttacttagttgctacttatttttaagttgtggtaaaatatataccacataaagtttaccattgaaaccatttttcacagtggcattaggaacattcacattgttgtgcaaccatcaccaccctccatctccagaacttttcattttgcaaaactgaaactctgtccccattagacaacaactccccacttccccctccccgtcccgatccagcaactcccactctgcgttctgtctctatgaatttgactgctctagcatcctcatctgagtggagtcatacagtatttgtccttttgtgactgacttatttctgttcgcataatatcctcaaggtttatccatcttgtagcacgtgtcagaatttccttcctttaatattccattgtctgcatggaccacattttgtttgtccattcatcagttaaggatatttgggttgtttctaccttttaaccagtgtgaataatgcttccatgaacatggtgtacatgtatgtgtttgagtccctgctatcacttattttgggtatgtactcagaagtggggttgctggatcatatggcgattatatgtttaatgttttgaggaaccgccatgccgttttccacagtggctgcacaattgtatactccaacaagttcctatttctccacattcttgccaacacttgttgtttcctgttttttgtttgtttgtttggttggttttttttgttgttgttgttagtgaccattctg

SEQ ID NO: 48440 - DNA, 1046 bp, Homo sapiens
agcctgttgccactcgtgaaagaagcactcttcttttttggaagtggatattcaacttaaccctggctgagaaagactgctgtaaatgagcagggaagaccccttgattggcactgtgcagaagttcatatgcagatttttttttttttttttttttgaggaactgcattgccacaaagacacttgtcatcgctgctctgttaatttgaaaagaaaaagcaaaacccaggaaattggtattttacagtcacctgggggtgaatatcctttttgtttttttctatttaaaaattcctgctgccttccaagtcaagattcatcaggattcgctgaagatctgattcttaaaaagccttcgtcacattttaacgcatcgctgttagacacttttacaggctcacacagatgggctgagcagggacgagcaaaacctaacagaataatgggtttcagaaagttcatttgacgatttgaaggaactggattggatttacctttggcacaaatgcagattgcgggggatgggaaggtgaaaaatcaaaggttggaaggaaatatctgggaaggtagaaaaaggaaatttgagaattgattggctatagtgtgctgtcagcgggtggatgtcgtttttttcttctttttttccttttttttcttctgctacaggaagtgatttgcagtgctcaccgagcctttgttgagaagggtctcctctcagagtgagtcatgcttttgctgtgagcagccccaagcagctgggcgctccatcagaggcaactatgacttttgcaaagcaaacgtgcaaccccaagcagcggtctcccgggccggggctgcgcggccgccgctgtgctggcttttaacggtgggagggcaccatcctcttgctctgctctcgttctccagaaggctgtcccggggcccccactctccgtcccgctccggggacagtggctcgcctgctatgcgcggcagcccgcgccggggccggcaccagcagcgcccgggcggatgcagcgagcccacggaggggcatgcttccacgc

SEQ ID NO: 48441 - DNA, 1023 bp, Homo sapiens
atctgccatctttccctcaaaattccagtgagttttactgaaatactccatgtgcaaaatgtttataattaacacctgactataaagtaatgagactgagatagcttatgaagtctatgtttttactttataagcatatatgacttaaaaagatttttgtaagtctaccaattgggtgattgggtcaatgatctatttaccatctatttcctcatcttcttcctcatgagcactcaccatctgaggcagcattgtgcagccagtgtgctgaattttgcagactcccttgtgccggaggtggctccatggcacagtgttggcccttgagacataaacctgctgtaggtttctgggaaaatttggctagcctttcttccttgttgcttccttctcctttctgagtggaatgtggaagtgatggctggaacggcagagccatctttcacccttgacttgagaaaaagaccacgataatacatactcttctgctccttgacctactgatataatgctaggactgcgtggctcctgatggctttttgtataaagaaaaaataactcctaattagtttaaaccttggttttgctaggttttctcttacagctccaaatacattcctcaataatatttttgatgaacacaagacaatatggaagtcttccttagagcctgactgggctctagttgcctgccggctgctgctattgtctgttctcctgaagtcagctgctctctagtatctaacatcaatgtaaagaacctaaaatgatgctctatggctttcagagtcttcagtagcctagagaaaccataacggataatgttttccctgggggaaaaaaaagagtgtggcgattaaaatctgcagtggtcccttctgtcctcagggagatgataatgtctgggaatgcaatggcctgacagggacaggtgaactgtgtttctgaagctgatgcaactggctgtgatatggtactccagtgtgtgggaaagacagcacctacaggaggacctttctgttc

SEQ ID NO: 48442 - DNA, 1072 bp, Homo sapiens
atatctttgatggtggaggcacttgccagcaaaatttcggccatgcatgggccacgtggccaggcggttgcctcttctctgtggagccagctgctctttgtctgtgttggtcagtacaagatgaggatggaacagaaaagaggtgttcaacacctggtgcatggctgccgtggtctcccttcctccttcccccattcttctccagatggcctgttatggcaatttggtgccactgactaggtctagaaattacttatgttttcctttaagatttaaaaaggaacacacatgcacacagacacacttgtagacacacacatatgcacatacacctccatacacacatacacatgtacacacatatgcatgtgcacatgcatactcactcacacgtgtgtacacgcacccaatcactcacccatatgctcacacatgcacactcatatacacatatgcacacgcacatgctcacactacggcaatatcaggtctcagccacagagattctgatctaattagttggagtgagtcctgagcattattatttttaaaaactgggacgcgcgcagtggctcacgcctgtaatcccagcactttgggaggcagaggcgggcaaatcacgaggtcaggagttcgagaccagcctgatcaacacagtgaaaccctgtctgtactaaaaatacaaaaattagccaggagtagtggcatgcgcctgtggtcccagctactcgggaggctgaggcaggagaattgcttgaacctgggaggcagatgttgcagggagccgagattgagccactgcactccagctggggtgacagagagagacttcatctcaaaaacaaaacaaaacaaaaaactgaacacacacacacacacacacacacacaatcctcaaaaccgtagacacaaagttgtggtagttactccattatacacagaacgacaacaacatttcacattgctcacagatgcttttcagaatcgattgacagggaaggcttctaccaactccagaacccacaacttttttttttttttttttttttttttgagacggagtctcgctgtc

SEQ ID NO: 48443 - DNA, 1768 bp, Homo sapiens
cccacccgccatctcccagaactcggtcacatggccacaccagggcagctggccacacagggagcctcgcgcccaggaggaggagccagtgggtttggggaagcgcttgctggtcctactggaccacccgacccgcctgtctctgtaggagcctccattcgtggggacgtggcttagttgcctggacaagcggaaatacatcctgcctgccgtggggtcctgtgccttctccttgggcctcagtaggctccaggtgggggtggaaggcccagctccatggccatggcagcaggaagtggctgttcagtggtaaaaagactgtgccgcctgaccccatcaggctctctcacggtgatcagcaaatggagaaacggccagtaccacgccctccccctgtcctacagctggggaggtgcgctgtgcctccaccctcacctcctctcccctgatgacaagcatggggttttgctttttattttggtaaatacacatcagatgaaatttgccgtcttaaccatttttcattgtgcacgtcagtggcattaagaacattcacgttgttttgcagccattaccactgtctgtctgcagggtgcttttcatcttcccaaacagaagctttttacctgtgaaatacaaactcttcattttcccctcctccagccctgggcagccgccattctgctttctgtttctgtctgggtacctcatatgagtggaatcacacagtatttatccatttgtaactggcttatttcacttaacataaagtcctcaaggttcctccctgctgtagcaggggtcagggttttccaaggctacatactcctctgtcgtatgtgaataccgcattttgtgagtcccgcattttgtgtgtgcgttcatcccttgatggacacggttgctcccaccttctggcttctgtgaacagtgctgctgtgaacgtgggtgtgcagatacctcaagtccttgctttccattccttgggcgcacacagcagatgcggtttgctcggccctctctgagcccaccgagtaggctgtgtctgtattttcaccaggactccttgggatgctgagctacagctagcgtggcagagggcaaggaaggcacttagacagctcagttgcctctgatcacgtccaccgtcactccaacctgccctcggggtctgacgcgcacacacagcagcagagacagagatgggagcatgagagctgcctgcaaggggacaatcctcaggcccagggaaggcggagacagggggcgtcgaggggcaggagtgcacaggacaggcttgctctcagcgggcctcactcatgctgccaggtgcctggtcaggctttttttctttgcctttaaaaattttgtcttgaaataattttaaatttacagaagagttttgatgattgcacagaaggatcttgagcgcccccacctagctccacatgtccgatgtctcacatagccagtgtgcatttatctgagccaaggtgctgtcatggtgcagtgcgttacctgaaccccagaccctggaccctcctacctcccgcccaccacattcctggctcagcacctcaggttgcactggacactgcatctcctcggcttctgctctgttcctgcctccctgacctcagcactcctggagaggagtagtctggtgttttgtggtgtgtctggtgtattcttgtgattatcttggggtcgtggttttagggggagcaccaaagagggcgctttctggggatggggcatctgtatgact

SEQ ID NO: 48444 - DNA, 1028 bp, Homo sapiens
gcaatgtgatgatcatcagagagggagaagtagcattttaaataagtccatgtgaacatggaaaatgaagcacattttctactgtgtatccctggattttaatgagtcctgataaatgtaaaatatgccacagtgaaaagcatcatttgctagaaccctaaattaattggaattaaaatattttccaatcttgagtcagagataaatgacaagacaacgtatggcctcattagagacttgatgaggaagcctggtatttgcacacagacgtctggggtgagattcatagtaggggtctacccagctgcctgtaccacagatgctggcaacgaaacctgatagggggtgggggtgctttggggatagtaagaccctcagtcctcaaagacagtcgtttgtatttacttttgtgcagaaagtacggttggaccagaaacattttgcacaacaaaggatttttctggctaaactcaatcagaagcttaaagttctgtcatttaaacttacattctgtagataggttagctgttgaggttagaggatactgtatttggtttaaatttagacctataatttttcctaatttttttttttttttgagacggagtttcactcttgttgcccaggctggagtacagtgatgcgatctcggctcactgcaacctccatctcctgggttcaagcgattctcctgcctcagcctcccgagtagctggattacaggcatgtgccaccacgtctggctaattttgtatttttagtagagatggggtttctccatgttggtcaggctggtcttgaactcctgacctgaggtgatccacccgccttggcctcccaaagtgctggtattacaggcatgagccaccacgccccgtcaatttttcctaatatttttaataaaagttttcacagctgcagaaaagatgtatcacttgtatatcctggcaacctagattgcacaattgggagtgtgtgtgtgcacgtgtctgtgtgcctgtgcatgtctatgtgtccacatgtgtgtc

SEQ ID NO: 48445 - DNA, 1030 bp, Homo sapiens
catgtctgcgtacacatacacagatgcgcacacagatgcatgcacgtatgtgcacatatagctgtgcacacatacatgtatatgcatacacagatacatatgtatggatatatgtacacaggcagacatgcacaggtgcacacatacattatacacacacatacacagatgcccatgcatacacatatgtatacacatgcagagatccaagcagatgcacatgcactcacacaggtgtacatatgtatgcacacagacatacacatgcatgtgcagacatgcagacatacacatgtacacaacacacctgtacagatgtgtacaaatgtacaaacatggataggtgcacatatctatgcgggttcatgtgcacacatacagaaatacagatgcacatgcgtgcacatacacagatgcatacacacagatgtacatgtgtccacatatatatatacatacacgcagacatgtatgcacagtggttgctgggtactcccattttctctgctgtgatctcctgccttgatttgaagacccctgggggtgggagagctgccttctgacaagtactgacaggcaaaagagtgtggggctcagagcccccttggagttccattctgctgacatttaaagtgggctcgtgcaccctcatgaacagccccaattacgtgtaagtaatgagagtgacatttcacaaccctgtctttctaatgggctcctgtgtcaagtcattctttctgaatgcaaagggcagcaatttcacactgtcagggcaaaatgcacatgcatacagctcagctcccagcgggatacctttgcttctcagaaatggcgaagaaagccagcaaaatggcctttttctccttttgttttaatttaactatttagagtgaggtccttaatgtaacacccatcaatgattatggagccactgttctgaaagaactcgcagggccggcagatctgtgtgagttgtggtgtgtgctttgcttaaagcaactttaaaattatatgaaacaatgcattcttg

SEQ ID NO: 48446 - DNA, 1019 bp, Homo sapiens
gtgattatttcccagttaaaggaagcaaacctgtcagcctgatcagtagaagccctgagcctctgtttaagaaaggcaagagaagaacacattgctgacacattgctgacagtctctaaaatggttatacaggttgtaacgactactaaagatcccagcacttgtgtcttctgtactaactttattaagagatttcatcaaaatggagattttcaagaacagcagacagacatgatggaaccatggaatctcccccgtgcccatctcccagtgccctctgtgtggtgcctagacctctgtaacatcactgtgaacattccagacagaaaagattcttggccgggtactgctggtggttaaagaaaaatgaattgtaagtggagagttggaaaggatcggaatgtcccacattatgatatttaattatggaatattgcacagccgtgacaggctgctgagggcaccacgtaataaacggcacggggatgcgcacgcatggtgctcggggcagggacacacaggacctggacgtgacccacgcgggccctcttcctctaccagcctgtaggctccagcctctctcttggacttcaggtctcctcttgcatggctcccagcctgcctgtcccacttcccatgttacagagccagcagggccccccaaccgtcctgtgcggttgctgtggcctgccctccccaagccagaaagcaggggctgggggtctacagtctatatctgactctcaccttcaccccacaccctccagtagtgactgttgagtgaatgagtcagagtttcttagaatgaggaattcaccaaaatgccagaaagaccagaactgtatgtcatgtctgtctgctgttcttaaaaatttccattttgatgaaatcttcctcttagtaaagttagtacaggagacacccgagctgggatcttactttaaccagcgttataacctgtgtaacctttttagagatcgtcagcaatgtgttctcttgcctttcttgaatttttcaaa

SEQ ID NO: 48447 - DNA, 1076 bp, Homo sapiens
caggaaaatggaaaccacagctgctttttgcctttgtgggaagctgtagaaataagagtacagtggaaactctctgcttcgtaaaataacttcatgttgactcagaggggaaacaggaaaggtgccttctatcttttttatgcgagtttttctctctgttggtggggcctttgcttttaaggagtgtttctacaagaatacttgttggatatttagtgtgaacaggaagtaagatgtgctgactaacttttccattattttaatggcatttttattgctcagaaaatgaagacagaaagcaaagagtgaacgctttcattgtgctgggtaaatgccataaacaacctgcctttctgaatttttttctctgcgattttcagatgcacacacatgcgtgcatgcataagtacacacacatccatagagggggtgtttccccaaagtcgcggtcatgccacgcagaggtatgcaccttgctttatttgctcaccactgtgtcatagatgtgtatgttctgcagtgtgctacgaagccatgtgtgcccttgtgtgtgctgtgtgtccctggggccttcagtggaggtctctccagtctgccacacccttgactgttttccttggtgtacattactcttgtcaaggcattgattagcaggacatgtgatggcccctgtgaatggtggagcccagaaaatgaaattggcagtgttttagtaggccgtgtgtgtttgtgtgtgtgtgggggggtgcatgcatgtgtgtatgtgaatgtgtgtgagcatttgtgtgtgtgtgtgtgtacgtgcatgtaccttgtgcatatatgcatgtgtgtgtgagtgcctgcctgcacatgtgtgctcataggttccagaatagcagtgcacagcatgctggaagtctgcattctgggagagtttcttggatttaggagtctcttctcattaggaggcttactgaacttattttacggaagtcttagttgtatttttagccaaaagataaaactcgccccactctcctccatgcctccagcttgtctaaagtgaaatggcctggggagaatttgacatggta

SEQ ID NO: 48448 - DNA, 1043 bp, Homo sapiens
gaataaagaccagtttctttccagttagaatgccttttactcctttttcttcttttctttcacttctaggactttcagtacaatgattaatagaagtgataaaagtggacattcttgcctgttcccaatatcaggaaggaagaatttcaagttttgttgttgttgttgttaagtatgatgttaggtaaagatatgaagtgccttttacaaggcggtggaagttttttaatttgttgagagcttttatcatgagtaggtgttgaatttcctcatatactttttctgtatctgttgagatgatcatagggtttttcattttttgtttgtaaatatggtgaattacactggttaacttttgaatgttaaatcattcttgcatttctggcacaaatcccacttggtaattatgtatcttttttatatatttgttttatatattatatatatatatttatatattgctggatttgatttgctgcaattttattaaggatatttgtggctatgtcatgagggatattgttttcttttctggtactgtattttatattggtatcaaagtaaagtttgccccacacaatgatttgagaagtggttcctcttactatttttgaatagtctttgtaggattgggcttctcttgccctcccctccccttcccttcctttccctttttggagacaaggtctcactgtgttgtccaggctggagtgcagtggtacaatcatagctcaatcatagctcactgcagccttgacttcctgggctcaagtgatcttcctgcctcagcctccagagtagctgggactacaagcatacaccactatgcctggctaatttttttgaattttagcagagacagagtttcactatgattcccaggctggccttgaattcctaacctcaagccatcttcccgctttggccttctgaagtgctgagcttacaggtgtgagccactgtgcccagcctgtctggggttttctttatggagaggcttttaattatgaattcaattccttaacataggactatgaagattt

SEQ ID NO: 48449 - DNA, 1017 bp, Homo sapiens
tcccactaatttttgcatttttagtagaaacggggtttcatcatgttgcccaggctggtctcgatctcctggtttcatgtggtctacctgcctccacctcccaaagtgctgggattacaggcgtgagccatcgtgcccagccagtctttcctttcctaacaagcaaatatgtggtatgtgtgtgtgagtgtgttaatcaagtaggtcagtttattgctgtctgacaacctcctagaactgactcttacataagcaatgttgaatcctttgggttcaaaaagcatgattctaaatctgaatgattggttttggcctcctttcttttctaagacaagagacagccctctaattatagcataccacaataagaaaatcagcctaattaatttagttgaaaattaattacctttctgtacccaggacagggagtgaaaggctttgctctcaaaagaccacccctcccaccctgactgagggctctagggacaggatgaggaggcacacccccactgggccaggctgccaccccagtaccatatgggctagaatgacttatggggtaaagagacatgaagcacaggagcccatcacagaatgcatggctgggccctgctgggccgttgagcaatattgtgcttgctgtgtgtgcaaagcagcaaggcaagaggaagcttggctgaaatcagcgcaaaatgcaaaaacacttccttagtgacctggcttaccctcatcaacatgtgaattcttattgttagcaaagggttccagggtgctctcaaacatcaaacactgcacagataccaaacccacactttgacaagtgttaaggagaaacaaaccaaaaccatttgctcataaaacacagatggattgaaaagactaagaggaaaataatctgggcaaaatacaattggagttagtaaacacagcacatgcaaaaactgtttgagacactgggaacaaaaagactagggtcagatcacccagccctgttgttaaacctcttatctcctccac

SEQ ID NO: 48450 - DNA, 1014 bp, Homo sapiens
taatggtaaacccaaattagaggcagcaccacggtaaagagctatgttggatgaaatcctgaaccacatttgtgggaaggacacagggctggcccagtgaagtcactcttccagtgaaacagcagagctaacatcatccttccaggaatcctgcaaaagaagccacctgggatgcagtaagatgacagtagctttctggagctaagatgacagacagttttttctttggccacaggttctgattacaaatcagcaagcaaatgtgttcacacagatgaaataagggtatagaaaaggatgatgatttgtcccatttattccagccctttttactggcttttacagtcctttttacgtggctttcattcattcttctttctgcccatgaagcttatcctagagagaatttctgagaataaatgaagcatagtgaagcttctagaaaatagtgtaaaatgctaacattgttattattgtcaagtcatgtttatcaatatgtggatcattgatgataactgaactattcaagaaaagttgttaactaaatggctgtatgacttttggtgggagattgtatcgtagctcaggaaaaatttattccccttgcggtacccgcacccccacgcccaggaggaatgtacatccttgtcccagaagcaatgggctgggtgacttgctttggcttgttggaatgtgagtggatgtggatttgcctgtccaagctaagagccaaacacacatggtgcattgggctcactctgtgtgctcttatcgcatcagagccatgcgtcccagagagtggttgtgccttctgcctggaaatgcaggagaatcagatctctgcccttcccacctgcggacttcagtagaactgccacggcccacctgcaaactcaagagtgagaaataaagaaatgctggcaatttcacacctcactgacaggtgagtccccacgcacaaaggaacttcagtaagcctaatggctgactactcataattgtggaggtgagctg

SEQ ID NO: 48451 - DNA, 1051 bp, Homo sapiens
agacagagctataaacaatggaacagaatacagtctagaaacaactcctcatgtatatgattaaacaatctaacaatctttgacaaaagtaccaagaccacacataggaaaattaacagtttattcaacaaattgtgttgggaaaactaggtatccacatgcaaaagaataaagctggatgtttaccttacagatttacaaaaataaacacaaaattaactacagaactaaaattaatacctaaaagtataaaatttctaaatgaaaaaatgggagaaagcttcatggcattggatttggcagtgagttttttgatataaccccaaaagaagaggcaaaaaagtaaaaatagacaagtgggactgtagaaaactttaacttccgctcatcataagaagcaataaagtgaaatgtcaacctgtggagtatgaaaaaagatttttgcattaagcaagaggtttcagcaatccaaatgtccatcaatgaatgaagggataaacaaaatgtggtatatacatcaagcaggatcaaaggaaagaaacagaaaacttgaatacaggtcctttgaaagtactgcgtcagagggataaaaagaaaaaagaaaagtgaaggaacctatggcacttatgggacaccatcaggcagaccaatagatgcattatggaagtcccagaaagaagacaagctaaagaaaaaagaaacaatattactactcacaaaaatgaatactgcaaaaagaacaaagctggaggcatcatgctacttgacttcaaactatactacaaggctatagtaaccaaaacagcatagtactggtaccaaaacagatatatagaccaatggaacagaacaggggcctcagaaataacaccacacatcttcaaccattggatctttgagaaacctgatcaaaacaagcaatggggagaggattctctatttaataagtggtgctggggaaattggctagccatatgcagaaaatagaaactggacccctttcttacaccttatacaaaaattaattcaagatggattaaagacttaaatg

SEQ ID NO: 48452 - DNA, 1089 bp, Homo sapiens
tattcctaacatcacagtgcgtgtacaccatggatggacaccctgtgatgtttctcatcatatcctagggggatattaaccttaatgtcacagtgggtgtacaccacgtgtgtacacactgagatgttactcgtaatatcctagggagaaattacgcctaaagttacactgggtgtacaccatgtgtttatgttctctgatgctattcataatatcttagaaagttattagtcctagtgccacagtgggtgtataccatgtgtgtacactctgtgatgttattggtattatcctagggagatagttctcgtaacatcaccgtgggtgtacatcatgtctctactccctgtggtgttattggttttgtcctgggttgatattactcctaatatcaccgtgggtgcacaccatgggtgtacattctgtgatgttattcataatatcctagggagatatcactccctgtgtcatagtgggtgcacggccttgtgatattataggtagtatccttgggatgtattactcctgttatcacagtgggtgtacaccctgtgatagtatttgtcatatcctagggagatattactgtataccttgtgatattattcgtgacattttagggagctatttctcctaaagtcagagtggatgtacaccctgtaatattcttcctaatatcacagtgggtgtacaccatgagtgatattttttctaatatccagcggggaagaggatgatattgcttccaatatcacagaaggtgtacagcccctgtgatattgttcctaatatccagggaaggagaggatgacattatgcccaatatcactgggggtgtaccacctcccaccgggatattgttcttaatatccggaggtggagagaatgatgttactcccaatatcacagggggtgtacaccacccctgtttgtaaacatcccctgtgatattgttccaaatggcctgtgaaagagtaaatatgactcccattatcgcggggggtgttcagccctgatgatattgttttctaacatccagggaaggagagtatgctattactcccaatatcgcaggggttgtacaccctt

SEQ ID NO: 48453 - DNA, 1016 bp, Homo sapiens
tgggttaaacactatagataaaaattctacatggactctgcaactaaaatatcaggcagggaaaagaaatgagaaacatgcaataaagtctgacggcaaacaactcaactcccaatctttttagtactttgatgttacaaaatttatattaacagacatgtactatcctgggtggattcacctactgtgaaagtgaggcaatgggtggaattcaatagctgcctttacaagtatgtggcatgcgtaccagtcctgtttcctacatctcataaagacagcagtgatagctgcggtgtgtgcttcataacagactcagggattcctcaaactccaagcagctctgatctgccctgggcagtacttcagacactctgcccaaagaaacatgcaaatcatttctgtgaaatatctgaaatctactttcttaaaatctacagaacatgagaagacagtccataatgtccctatttttttctgatgtgttgtaagatccaaagtgcaaaatcactgtgaactccagaaattcctcagtactctgtaactcttcatatgagaattaagcacaagatagaaattttccttttcaactacttcatgcaaaaaaaaaattattgtcaccttaaggagtaaagactataatagatttttctggctgggcatggtggctcaagcctgtaatcccagcactttgagaggctgaggcgggcagatcacttgaggtaaggagttcaagaccagcctggccaatatggtggaatcctgtctttactaaaaatacaaacgttagccaggcatggtggcaggcacctgtagtcctagctactccagaggctgaggcaggagaatctcttgagtccgggaggcagaggttgtactaagccaagatcgtgccattgcactccagcctaggagacagagagagactctgtctcaacaaaaaaaaaaaaaaaaaaaagagtaaaataaatttttctgccaaatgactattccactatttcttcctctttgaaaccccc

SEQ ID NO: 48454 - DNA, 1047 bp, Homo sapiens
ccaagtactggttactaagattcctagcctcttccgaaggcggtccttcctccacacaactgcaagaagaggccttttcagtgtagacccttactttacccctccaccccagggcccattttagggaatagaaaagcaatttggaaggattagactgagggacccgtgcctccagcagataggccagcggaagagcagtcagtgctgtgggagatgctgcggggaggagcgtgtctgcgaggaaggactgctggcttcagcacttcccgattggaacttcatgatggaatccttggcacaccaatgctaaaaaccaagtgtgaaaaaaatcaccctagaacctgctagagtgatactgtggaggatctgtgggctgcaccgcccacagggactgccctgtatcagcatggagaactgatatcccatggcagggccactgggtagcggctgctgctaagtgggggtgccggatgcgttccttggttcatcttccactgatgttttggaaattgggctccgtaagagcacccagaagtgcttattaagaaccacccgtgctctgctggttcctgaggtgccagattccctccagggaaatgttgacctttgtgatagactatcttatgaccaaaagcttcgcagcattaaaatgtgatccatctcattaggttgtcatatgaagcctataaataactccagaaatgagatcctgtgacagctatttattttcactcttattatttaacataaatattggctatttatagccaggtcgtcaaggcagtcattgcttcccccatcttattatttctctcactctgacttgggaagtggggacttgaacctggaagagggagagaggtccagtgggggtggcccccgcttcttggaacctggtctccttagggacagaaattttcctaccccatttatactctggttatcttgctgagaagcttattgcgtcttctccatcttggtattcttatacgtgcatgttttctctcccagtacgtttgaatttgaaagaaccgtgaaggctctgag

SEQ ID NO: 48455 - DNA, 1043 bp, Homo sapiens
gaagtggtgcctcaagatgtgactgaattgccgcaatctcatgatcaaacttgaatggatgaggagttgcttcttatggatgagcaaagaaaatggcttcttgaaatggattctactcctggtgaagatgctgtgaacgttgttgaagtgacaacaaaggacttagaatattacataaatgtagttgataaagcagcagcagggtttgagaggactgactccaatttgaaagaagttctactgtgggtataatgctgtcaaacagcatcacattctatggagaagtcttttgtgaaaggaaaagtcaatcaatatgacaaagttcactgttgtcttattttgagaaattgccacagccaccccagccttcagcaatcatcaacatcaaagcaagaccctccattagcaacaagattatggctcgctgaaggctcagatgatcattagcattttttagaaataaagtatttttaaattaaggtatgtacatttttttaagacataatgctattgcatgcttaatagactatagaacactataaacataatgtttgtatgcattggaaaaccaaaatattagtgtaactagccatattctgatatttgctttattgcggttatctagaaccaaacctgaaatatttctgaggtatgtttgcaacattctcaaaaaatgcaaaccttaaaccctgaatttgagttacagaaagccagagacacatatatacttacatatgtacatttattcagatttatcgaagaccgagttattctgcataaagttccaagtggcattaaatttcatttagaaataagaatttttgaaacaaatgtttataagccatatcataattttccttctctttttaaaaaacattttctgaaaacaacttgaccttttgcttagtgacttagcatttttttttcccaggagaggtgcccgatgagctcccagtcatgtggttcagggcgggctctggaagactcacagaggagactcctccgagaaaccaagaaggtttctgtccaagtcgggatctgct

SEQ ID NO: 48456 - DNA, 1072 bp, Homo sapiens
aaccgtggaatgtcaaatatgtgggggaaaactaatggaagataaggtttatttagtaagtttgtttatgcagattgaagccagtatcatgtcaagggataagcattgtctccttttcctggcagagggggaccccttcacaaagggaaatttatgccctcctttacacaggtgggaaataatagagagattttcctgcttctgctatttctcatttgccttcagctcaaaataatccttatgccaaagtggtatattctggggtggcatgctctgactcccttcagggatgactgcagaagggcagttacaaggatttggggttcttggggccatctttggagacacatggcacaggggagtgagagatgtaaggtcactctttggtgtttgattttaaggaaacattagtgtatgcaaactttgtgtttaaaccaaagagcagaatttatcatttgaaatgaaaattttatagctactaaagtaaaaataggtgagtttagttattttctgttgagtgctactccaccaaggttaacaaaaggactgaagtgcaaggatttcgtggtgggaacgcttgtctcctttgcctgcttcccctcattcattatttttgtatccggatacaggaaacagaaatgctacatgacaattactctcagatgcaacggtctttcggacatcatgttttgctggggtcagatggggaccttattttctgtgtgttctggttctcctctctggtaaaggggtgtccctaggggcagcttttaaagggctgagtggcttcaggcacaggcaggggccctcctgctggggtgatcccctggtgagacagagcccctttactctggtctgcactgttttacaaaccttgacttcccaaactcaggttctcccaccttagttccagccacgaacctgtttctataatacaatggatcatgttactgccttttgggaaaacccccgactgctcctcctgatcctcctgactgactgcagtggaagcatcatctatattccagctgaaccatcttcctgcccacccagcacacactgcgcaagaccc

SEQ ID NO: 48457 - DNA, 1092 bp, Homo sapiens
aaggtaatggcctctagctccatccatgttggtggaaaagatatgatttcattattttatggctgaatagtattcaattatatatatgtgtgtgtgtgtgtgtgtgtgtgtgtgcatatatatatatatatatatatatatatatatatatatatgacattttctttatccagtcatctactgatggatacttaggttgattccacatctttgctattgtgaatagtgctgagagaaacaagagtgcaggtgtctttttgatacaatgatttattgtcctttgagtagatcccagtagtgagattactgaattgaatggtagttctattttcagttctttgagaaatctccatgctgttttccatagagcacttactaatttacattcccaccaatagtatataagttcccttttctctgcatccttgctaacatctgttattttttgtctttttaataatagccattctgtctggtgtaagatgatatttcattgtgtttttaatttgcgtttctctgatgattaatgattttgagcattctttcttatgtttgttggccatttgtatgtcttcttttgaaaaatgtctattcatgttctttgcccactttttaatgggattatttgaggtttttttgttgagttgtttgagtttcttataaattctgactgtcagtccctgtcaaaatgcatagtttgcaaatattttctcccatttcactagttgtttgttcactcagctgattatttcctttgctgtgcagaagctttttagtttaattaaatcccatttgtctgtttttgtttctgttgcctgtgcttttgaggtcttggtgatgaattttttgcctagaccaatgttgagaagttttccctaggttttcttttagtacttttatagtttcagatcttacatttaattcatcttgagttgactttttttatctggtgagagaatacgatccactttcattcttctgcaaatgacaatccagtttttctagcacaatttactaaaaagagtgtccttcccccagtatatgttcttgttgactttatcaaagatcagttggctataaatatgtgatttt

SEQ ID NO: 48458 - DNA, 1756 bp, Homo sapiens
aagaaattagattctgttctgaagtagttttccagctactaattttaacatataaacttctggccctggtttatttttataaatgaagatatgaaacactgaagtgttaaaactaacaggtgtcaaatcattgccttttctctctctttcacccctcaggggggacacagcgattgccacgcgccattggaatgtccctggccaaggagctcatattctctgcgcgagtcctcgatggcaaagaagccaaagcagtgggcttaatcagccacgttctggaacagaaccaggagggagacgcggcctacaggaaggccttggacctggcgagagagtttttacctcaggtatttctcattaaatgagtttattttttctcattttaggaaacattataacactttgactaaaacagcagtcatcttgcctatggaagaagtccctggcttgcttccaagtaaagggatgcgtgggctctgtaaaactagagcagttacacaagataaacactatgatcctgtggaattctgatgacgctttgaagatgctccaagggtcttattgtagccacactttgataaaatatcccttgacaatgcttgtcacatgtgcacaacttcctagcaaggtgttttaatttgctcaccagctgagcactctaatggaagccatagccatggaaagaaagagtgatagggctggctgtcacactgggccaccccaagtcaaaatacattgaaatatgctgttttctagtaagggactgtagtctgttgtgccagagtggacttccattgcagtggcttcacttgaaaagtgaaaagcctgcttgaaaagcagcagttgtttgtctttctgtgtgtttgcctatggtggtgtaggcgttgttttgactccattgtgcttcctcacaactacactttcaaatctagaacatgatgcgtatggctgactcaggagtgatatcagtggccgtgcactgacagtcctgctttaagcaattctttttgtcacccgttcagatatatttttcaaatatgcctttggtctgaaatcacaagattaaagggctttaaattgagagaaagagtcttcttttgctgtgtaagcagtagtgatcttctttattcctagtggagtttgaagttttataaccccctaaccatttctagagtcaaaataatttttctctctaactcagggttgcttaactcaaacaggtttcataaccttttttgtgggctgtggatctttttgggaatgccatgagattccaaattcatgcatttgattctttttaaaaatgcatgaatgctcacatttgttcagagtcttgcatccagtttcagaaagtgttcttggcactcagcacaggagcctttgctgacaaaccagtccccactctgctggtatgcacctgctgaatcggtttttaaaaccacactgcctggcattgatgcttctggtccttcttaattaacttaggagctgttagctcttttagggaaggaccattatataatttattccccacataaggtagtgcagagccatacattcagtagatgctcaataagtatttgttggattgatggaaacagagcaaataaaaaaagatttttgccttaaaaagataagattctcactacaaacttatttattcttcccaaatatgagagaagtctctacctaaagacaaattaaaggtacaagtatcaggagagtataatctgactgaatattggtgttataactt

SEQ ID NO: 48459 - DNA, 1562 bp, Homo sapiens
tacgtcggtaacccctggtctggaccctaggctggtgccctatctcttctgctgcagccgtgtgtggtgggctcacagctcacccatgtgctgaaggaagctgccactccacccacgagtggtttcttctctttatcaaatacttacttgcctttacaacacccaggggatgtgctgatgtgtaatattagaagtcctctagagcagaaatctgtatccctctctaagttgaaggaaacagggagctcacacttggtcatccgcagtctgacagaggcttgtcttgagggcgactctctgccgtcaaaagacggaggacatcagtgattcattaaatattggaaactagaagtttctgtttactgagctttaaatgatgggtgctgtactccagagagaagaaaacataatgagtatgtcctcaacattttcttagggttttagttgcctgagcaataaaatacgggtatgcagattacatagttgctgcaaatatgtagcagtggcaaaaaatactctgtagtgatttagaatcacatactagcaaaaatactgcttaagctaataggtcacacatctggcagctccctgggaatataagagactcacctgtctccgtgtgtggaaaaggcaaggggcaagttctcctgctgtaactgatcctcagtcaggacatgcagtgaacaagaaaatgtaataaatagacactgtgtttgctgagtgatacagtggcctttagggccctttacagaatgctttggtatgagtgtggtatcaagagaatttttcagaggagtgagaaaaacttgcacaccatggcaagctgggatgggtgagtcgtgaggagtgggtgaggtgggtgtgcactgggagggctgccatgtgctgggcagcaggtgcggtctcagacctccgggactccaggctcgccctggcaggtggaggccaggttcttgacagctcctctgtccttctgcctggagacaattttttaagtttttcattttttttccttctttctaaaagaagaatttagtggagaatacaactggaacccctgattttttttttttttcttgagacggagtctcactctgtctccaggctggagtgcaggggcactatctcagctcactgcagcctccacctcccaggttcaagcaattctcctgcctcagcctcctgaatagctgggactacaggcacgcaccaccgtgcccagctaatttttttgtatttgtagtagagatggggtttcaccatgttggcaaggatggtcttgatctcttgaccttgtgatctgcctgcctcagcttctgcaagtactgggattataggtgtgagccactgcacccggccagaacccctgatttaaaaacaattgcaaagcctttttgtttaaaatgaacacaaacagtagttgatgaatacctttttgaacatggtctttaagtgtacttttacctgctgtattcatagtcatgagcaaaggtacagaagatatttgagtattaagtatgctttgaaagtatctcttatattgctgatcttatgtcggtgtt

SEQ ID NO: 48460 - DNA, 1042 bp, Homo sapiens
ttcatttcatcaacataatttccactgccctggaatcaatttattccttgacctgttaataattacacttgatcactagcatttcagtggcagagaaagcctctggaaatggccatagtcatccttttgggtgataagttatgggatttctgttcggcttggagatttggcctgttgaagtggttgacattttatgaaaacaaaggagcaaacttttacctgatgccgtgttaagattcactctgtcaagtggttgagaacacttatttaattatctaactgtacttttgcattacctttttttatggccaactttaaacatgcctagggaagttcccgttctattcccagccagaagcaagtgtttgaaaaatgagaaatcaccatagagctcctctaagattaatttttcacaggtccaagaatgcctaatatttaaaatgagctactttgaaatcagtcatgtatcacatcagtgtttcaaaaagagattgagaaaatatgggctgttacaaaaccactaacctcacctgttgctccgtggtgatttggagccctggagcagggctgcctggatctgaaactttgctctgtggccttttgggaaagtgacttgcctctctgtgtttctgtcctaatccttaagtgcaagagtggtcatgcatattttatagtggcattgggaggatgacaggaatgaatacatgtagaaggctttgaaagggttctggtagatcaccacccagtgtgtgttgtactagtcatcattgttactgtaacttaatgtgttttagtgttaatggatgtccttttttctcttttgctatcccagccccttccttgcctaattgttactctcttctgtgtggttaggagcaactagttcagtttaatttcccttagagagcaagtttcagatatagcatcattttgaactactaaggaagtttaattctcctaggattggtcatatagccttctttagcaaaattgaacaggaaccttaggtgaagcttggttagccaggtttatggatctgggg

SEQ ID NO: 48461 - DNA, 1076 bp, Homo sapiens
ctgagatttgaacccagactgtttggccacagcccacacacctgttacctcatgagagcaacgtagactgatctcccatattcatcgttgtggacactatatccatagagactcagctctgcctgtgtcctcgggctctgagactgagaactgggcacagcagacggcacagagttgtcactgttcttctcttgctttccattatcgtttctgatgtggctgcatgttaaaagcagagctgccaaggcagaaggattgattgaggccaggagttcaagactagcctgggcagcataaggagacctcatctttataaaagattttttaaatttttagaacaatgtagcgtcaacatgattcagtttcttgggatttctggttgctagtccatgtgtcctttttcctccttttcacttcattttaggaacctattttcttgtaatgaaatcattggattttaaattgaaaagctaaggtacatgtaatccatttctgaaagaatacaggttttggaaattagaatatgggaagtagtctaagtatatttggatatgcaaataaagaagttattaagatgttttaaagtagccatgaaaacagacatgaaaagaggaaccctgtccacctgtcagaatagtaaaactatttgtcagaaggtaactaaagacttggtcttgaaaagttgccatatctgatatgacctattaagctctttggtctgggggactatattcaggcaactgaagaatttgggcttgtcagatactgacaagtctgctgatcctgaataattaatagatctatgcctccaaatatgtcttggcaatattgggtctaataatggagttacagtcctggtcttgtgaatcaaaaattaattcactgccaagcagtttttaacagaaaatgttgtgggactctcctaatacatgtcatttagagtgcttacttatttccataacaatgccttttaagtgattttttttaagaatttgtgatatcaatttaattagtaaacaatattttagtatatctcataactttttcaagttgtcatatttgaatgtgatgatatg

SEQ ID NO: 48462 - DNA, 1059 bp, Homo sapiens
aaaacaaacaaacaaacaaacaaacaaacaaaaaaccctcttaactgggtgtggtggcacattcctgtaatcccagctacttgagggggctgaggtgcaaggattgcttgagcctgagatattgaggctgcagtgagctgtgattgtgccactgtgctccagcgtgggtgacaaagtgagaccctgtctcaaaaaaacaaaacaaaaaatggggctcagggagcttctaggttggtgaacacattgattttctaggaggttggcactcctaaagagggcatggaagctctgtactccctcttcccataccttgccctatgcatctgttccattggtctgttcctgagttgcatatagtaaataaagtgttttttttttttttttaaattctgagtcattctagtgaattaagtaacctgaggagtttaggggaatccccaaatctatagctggttgtttcagacatatgggttgcccctgggacttgtgagttgcatctgaagtgagggcagccttgtgggaccccttaacttgtgggatcccactaattttggatggtggcagaatttaactgaattgttggatacccgcttgatgttgaagaattggtgtggaaaccctcagacatttggtgtcagaagtggtgttagaaaaaaagacgtcataattggtctcaggaatgggatttgctagagcatctcacgaaactcaggaaagtgctttatttactattaccagtttattataaaagagaaaactgaggaacagtcaagtggaggaggtacttagagcaaagttagggtggagggttgcagagcttccataccctctccaggtgtgccacttacccagcacatccatgtgttcactaacctgggagctccctaagccctgtttcagggattttttatggaggcctctttacataatgattgattacatcattagccattggcgactgagctcaatctccagctcctctcactccctgaaggtgtgggtagggcactgaaagttctaaccctctgatcatggcttgatatttctggtgaccagcgc

SEQ ID NO: 48463 - DNA, 1022 bp, Homo sapiens
gccacctcattccagcccgggtgacagtgtgagactccggctcaaaaaaaaaagaaacctcaaaaacacagtgtaccgtttattgattatccttttagcctcttctccatcccttgaaagtcatcattttccctcttctttttcttctcccacaaaggtttctctgtatatattaatactgtattccagtgataccttgctcatttctaaatatttaaagcttagcaaatggtcttgcctcaaatttcttgagcataggaactcctcttattctttgagaatcatcttttacattctcagaacacagcaaacaacagggactcagcatttatttgctggaattaatcagcctttaaactgtgctttaattcactgatttttttcaggaatggttgggatataataagcagcttctctgaattgtctcataccactctcctatttactgatagtaaatttggctacatcttttttctaaaatgctaggaaaacagataaacattaaagagattcctacattgcattggaggttgggccaagtgatttctgacttctcagaaatctattatttagcattattaagtacttcacttacattttaagttttttaatcaatttttagtttaaaaaagtagcatggtaggtcaaaatgtatgaaaatgtatacagagagaactctctctaaccctacttcctctactttattcatcccctaatataaataattattatttttgtcctagtattttactttattttatatatatgtatatatatacacaaatacagtcatgtgctccataacaacattttggttaacagtagcctgcattatacaatgctggtcccataagattatttgtttttatttttttgagacggggtctccctgtcacccatgcaggagtgcaatggtgtgatcttgtctcactgcaacttccgcctccagtgttcaagcgattctcgtgcctcagtctcctgagtagctgggatacaggtgtgtgccaccatgcccagctaaa

SEQ ID NO: 48464 - DNA, 1039 bp, Homo sapiens
tatacctacgtaaactccttcaatggttattaggatgaagaccagactttttagaaggtctgtaaggatatttctggcttgtgctgacctctttactttcattggtcactctcttctccccctcgtaggttacaggacattcagtgggaccatgactagtttatgcttttcctgtttcctctgcctggcagtcagcccctctccttcactctcaccttgactcctacttatccttctaaccttcactgtctggggtaagctttccctaaccatctccttttgccccagaccattatcaattctggttacaagttactgtagcaccacttacagcttgtaaagcagtttgaatggattattaatgatatttatgattattaatgatttctatgattattaatgtttgtatttccctcctagactctagttccatggctgctgatcactatagtacgtactcagtatgtttgaatgaatggacacatctagtcttagctgcttgattttcttcctgaggaaactgaagcttgaacagtgtaacacagttttattcaagtatagagttagattaccacttaatagctgaaggaagttacttcacctctccaagtctccatttctttatccgttaactattgataaaagtagtgcccacctcttgggttgtggtggggattacatgagttaattcgcttaaagcacctggagcagtgcctgaggcctactggtggtagctgttgtcagtagtattgggacctacccaaagtcattcagctgtttaatacagatcctgtcagatagcagtcctttatgcttttctctgtactgagagcatttggaattcttgcaaatttactcttgtgagcagaagttcatctttatactttaaagaatgggtctgcacagtttcttgcacagcgaaggcatgtgtacattttgttgtcttcagtttagctcagttgcaaataagaaacatacccaccctgactcagtggaaggtatttctgatacactgtgaaaatttgtctactccaagaac

SEQ ID NO: 48465 - DNA, 1050 bp, Homo sapiens
ctccaggcccttcagtaaccagctccaggagaaaacatgttttaaaaatcttgactttgtatagctggttccagttcaaatttcatattcaaatgttggcctctttacatttccatcacttcatggatttctctcatcccgatttgggtcaactgccgtgtttacaatttgttttgaagcgcctttttttctagccttttcttggtttttgtttaactgtgaggcttttttgtatatatatattttagctgtcttccttccatctttcctttgcttgtgtccacctttcactaaacatacattcagcatcagttttatccaagaaataggaagccttgaaagacaaggaccctcggtcccagtgcctgggaactgctgagtagatgccttggacctgctgagtagatagtatagtgggcatgatgagtgctgtgtaatgacgccggggctggagtccttgtctaaggcagagacgtgaggatcttcgccagggcagtaatatttgtgtcctggggtgaatgtctgagccaagatgatgtttgaggatagcagaaagactaagggttggcactgacaatggttgactcacatttggaagggctggagaacgaggacagggggagtaagtgactcacaggtgagcatgtgggcctttcaggggtgcatggctgtggaggggagctgtggggcagggggtactactgtatggggcagtctgatctgcaggtgttgctgagggagcaggctgctgggaagaccaggcagccaatgtggaaaggagaccaccaggaagggtacagacagcagaatggtggttccatggtggaggggaggtgctttttaactaaaggagttgggcaataataacgaagcaatgcatgcctatcacatactgtatttatttgcacaggctgctgtaataaaatgccacagactgggtggcttaaacaaccgaaatttgctttctcctaattctgggggccagaagtccaagatcaaggtgtgggcagggttggttctcctgagcctctccatggattgcagatgctg

SEQ ID NO: 48466 - DNA, 1025 bp, Homo sapiens
tggagtgcagtggcgcgatctcagctcactgcaagctccgcctcccgggttcacgccattctcgtgcctcagcctcccgagtagctgggactacaggctcccaccaccacgcccggctaatttctttttgtatttttagtagagacggggtttcactgtgttagccaggatggtctcgatctcctgaccttgtgatccgcccgcctcagcctcccaaagtggtgggattacgggtgtgaggcaccacgcccagccacatttatttaacccagtaactaaccactgatttctgcatagttatgctggtacaatggcaggatcatgtaattaaccagtatatttctttttgttgttgttgttttttaaggaacacaaataaaaatgtaaggtttacgtcaaggttaaaaacacgatgaaataagaaagggggtctggagtatgtgtggagatatacctgggtataacaatgaaatggcgtgattgctggtagaatgttcactatgccgcaccatgttctatgctccatacattcagtcctatgaatgggaagggctcatttcccccattctgtagatgagaaaactgaagcctggtagtcacgcttcttgggagtatcctgggtagccctggccaaggtgggctttgaacccagggagcctgggctgttaactacaaaaccacaggatacgtacaacataagacatcgacattccttgtccaaatcgccagcaggcaggggggcgaagccacccagtgagagttcctaagagccagaaaggaggagacccacactcctgctggatcaaagctgatgtaagtcagcattaaagcttttcattggtttattcgccgatggaaggaccttctctttctttctcttgcctcagaatcagtgtttgcccaagacagcaatttgtggaaatggagaaaatctgagaattcttctgtggctttgctaaattgaggcttgtcctccacagtccatcctaccctcccccactttttttccagcaaaataagtgata

SEQ ID NO: 48467 - DNA, 1051 bp, Homo sapiens
cacacacacacacacacacacacacccccgatctgacagcaccaggaatcaggccaggatattggaggaggtgttttggtaaacacgaaatacacccagcctcctgctgccccccagaaccccttcatcttgttaattggtgaattctttcctaagctgctgtcatcccacgcttgtgttgctatgtgcctgcgcgtagccagtgcggagggccttgcatgttgtgtagtgtgtgctttttgtgtctttattttaatgccatttttgactcgttgcccaggattccgttgttagatttccctctctcccaaactgaaatttatctaattctcccttagagtccaccgggaacttctctctagtttctgctgaagcagacttctactgtgtgccgaaagacgattttcttgttctttgtgcccgtttatttaaaactccagaatggagcactgcttttatgaatgctgggtttcacgataactcataacatctgtcatggttaatgcttggacacacaatgcctttactcttttaaaaagggtctaacgggagagatcctattttccgactgcagcggggtctcctgcgccggccgtggtgctcggggtctctattcccaaggggccgagacagccatgctggggtggctgcctgcgagcctggtgagggacccattccccagtggtaacatcagaagcagagggttctgaagatgagatcttaactcggaatgaaaccccgcagtccgatctcagggtgttttcgtgtcttgtctatacaaaagatagcttatgccaaggagagaaaagatagcggctgtgaccaggcgtggcatgactggtgagtcaggaatgtttcaggtgccaggaggggaggggctgcaggagatgcagaagggcgtctcagcccttcactcaacactgtgtgcgcacttggccctggtcccagctctcggggccttcaggttaatccatagtctgagtggctcacttggttcagaaatggcctggtggtgcctggtttaatttgcttttataagctaataggctaa

SEQ ID NO: 48468 - DNA, 1034 bp, Homo sapiens
gttttggtctccggactcaggcctggcaatcccaggggcaaaggcccaaccccaggcatagatcagacccctcatgcctcagccccagtccccagccagtctcccacagcctggctgcctcatcgccttgctctggggctggtcctccacgctccatggtggttatttttaccctcacccccgcccacaacctcgcgctccgccagcctttctggagtgtgctcacagagcatgcgctgaagagggagcaaggaaggtggcgaacgcaggaggggcagccgtgtccagtgctgcactgtgtccggtggcagaggcctgtgccagtgggaaggtcagaaatctcccttctcttcactctcttcagaggagaaagaagtcttcagaaggggaatcccccaagttcttggtccattttcctataggcatccttgtcctcttctttcctgttaggataggaatgatttctttaactttttgaagacagtgccttggcctgttacacggaccctattttttaccgacttcttatggacttacattgtgtgtgtgggtgtgtgtgtgtgtgtgtgtgtgtgtttgtgtgttttccatttatttgtaactctgccctttcaactgaatccagatgggctcaagttccctggtgtgaagagaagacaaaatgctgccctccgcacctctttcaggaaatcctcctgtattatattttgaatgcagctccctccaccatctgggatggagtcattgctttacagcagtcatagctgctgtcatgaaagatgaagctggtctccaggacactaggaggttgcaaagagccacatgagtttattggatatgacagaatttctccaagtggggaagctaaattaagcaaatggtaagtatacattttgtaaaatgataaaactctcattagttgtggttggttcagttgtctatttagaaaatgcaagggactcaactgaaaatgttagcaccaatacagagatgtagtatgttggctggaggattcaggaccaacttagaaacat

SEQ ID NO: 48469 - DNA, 1031 bp, Homo sapiens
aaatgcagtcacattctgagctatgggaggttacagcttcaacatacgaattttggaggtcacaattcagccgataataattaggagctatgctttgtattgtagtaacatctgttgacttctactgtgatgaaaaacttagtattgacctccttaacatttctgagaatcttctcagaaaaaatgagtgcaagcagaggcaaaaagctctgattttaagcaaagatggacacgtggaaggagttggaactagactttctgcagttcttgtctaagttaataggactgtctagatacacgatgaggtgttcacttagtctgctgcacccagactttggttagaccctgggcttttcctgggatttgtttcttggtgggcataccttgatgttgcattacttaatatatagaaggaagagagtgggctcttccaaggcccagctgacctcctgctcaggtacctgcataagtgcgtgagtgtatatcaaaagtgttgaagggtttatgaattatttaaagaaagctgaagttattgcctctgcagtgggggacatgggtggctggggaaaaagagtagaagaaagtctttcactcttgtgacttttgaattttgtttcatgtgtccacacacacacacacccccccacacccacacacccacacccactcccactcagaaaataaataaaagataactttggaaaaaggaagtagagaagaaaaagggatcagcattctctcttactgcttgtcctctgtctttaacattataaggacatcatcactttccctgaacctccaaggccctaccaaggtggaggtcttcctgggccaggcccttggtgtggtgcagtggcccagtctgttccgattactcatctcccttcctggaaatggagccctatgtccgtttggtgatgcacccattaagagatccttttcccatgtttgaccaatttctgtggcttttgggaacaatgttgtttggatttgtcttttttttttttattgtttgttttgttttgtttttt

SEQ ID NO: 48470 - DNA, 1034 bp, Homo sapiens
ttgaaatatggccacgttatgcttggctgggaataagctatcaaccaagtgataggatggccccgtggctcgaagggaagcgcctttgtacttgagttcttagcttacacacagtataaggtggccagacagtggagcgtggcccagcaagcacacgggggcattggcacttggcagcggtggtcagacttggggaataacagcatgagatttttttttggttggcaagagtttctggctggaaactctccagagagactttaccatcttattttgtaaaagtcttttttaacattaaaaaagttaatattcatgcaattgaccaaggggccatttttcagtgtgtacactgggtggcattaagtacagtgttggacagccatcacaaccatccatctcccgaacttttcatgttgggaaactgagactctgtccccattaaacacaactccccacttttcccttcccccaggccctggaaaccacccctctactttctgtatgcatttgattgctgtagatacctcgtatgtgaaagctttttgaaaatcagattttttaaactgtcaagattggtgaaagtacagactggccggaacagaggaggatttggggagtagtttagagagtaaatccattagaggttgaagtagtcccttcccatgccaactatgggtacctgggtttgtcccagttgatgtcaaagtttttattaacggtggatccaggggcagctgttggtaattctgtcttctacctgggcagttttgggtttgagtctccagaaaaattggcaagttcttatctcagctgatacaacatagaattttttgttgttttcatttattagcaaagcaagaatctttttgtctcttctctggaacaaagagagaaaaaaaatcaaattttggaaagactgaaagtgtgattcattccaaagaataaaaatctgctcaaccggtatctactgtgaatcactgttagtggtgcatttgaaggctttgtatcagatactgctgtctgacctgtttttg

SEQ ID NO: 48471 - DNA, 1058 bp, Homo sapiens
ggtgtggcccaggggtgccctctcagtgaggacacacgagcttccctgccctctgcataatgtgtcagcgtccacacctccagtctgggtccttttttgtgacatggatcgtacttccccatgaactccagtctctttcttggcgttgtttctctgcacgtatcttcttctcgcacgtgtctgggtttgagattatttttcctatgttgatttttagatggtattggccaaagtgtttagaactaagaaacctacagacccagcgtaagggggtaaatgacagcacaaaaaatagaacagagagtctgtttgaagagggaatttgaaattcatgccagaccaaaaatggttgagctgaagcattgctcttaaattgtttaagggagtgggaagagtgcagtggggtcaggaggaaattaatgaacttcaacgaaatggttggtgatggaaaacatataagcaacacgtgaataaacacggggaattaattttggagctgctgggaaggagtaaaactaaagaataagcaaggaaaagcagagcgtctgtgggggcagggaacattttccactccagcatgggacaacctcgaccatctagtgaagcctcttctttgaaagctcttgagagaatctttctaccatgttggtggccgacttcacctttcttcctcctttgccagtttcttgggagaaaatggtagttaagtatttttgtatgataaggcttcagattctaagagcgattccaagatttttttcttaaattaccaggaaaaaagtccatatatgaaatcccagtgtcaggacctggaaaagggtcccaaacacattggcatccacttagatgctttgctagcagtctgaattaccataaggaaaaaaccgtacataatggaaccagatgggagtggctggctaatatttggaattctttccacttaagaattatcttaatttgaggaggatctttgaagtccaggggaagttgccaggtggggaagagggagttctgtgggtaaaggtgaggggcagggtgggagcccagggtttccctca

SEQ ID NO: 48472 - DNA, 1076 bp, Homo sapiens
gagaggcaggctgccccagtgtgcacccagaaaggagggcaaaaggctgagcagctggactggggttggatgcagcagctatgcagctgatttggagagcctgacatgagaggacactgaggagtcgacaggttttggagaagattcccatctaatagttttaaaaaatattcttggtcgggcgcggtggctcctgcctgtaatcacagcacttcaagaggccaaggcaggtggatcacgaggtcaggagatcgagaccatcctgactaacatggtgaaatcctgtctctactaaaaatacaaaaaattagccgggcatggtggtacgcgcctgtagtcccagctacttcggaggctgaggccggagaatcgcttgaacctgggtggtagaggttgcagtgagctgagatcatgccactgcactccagcctgggcagcagagtgagactccatctcaaaaaataaaaaataaaaaaattatttaagtagaacaacattcagtatggacatcaaactgttgatatttaacctgtttcttatttgattgcaaggaagatgggactcagagaagacgctgttgatttccaagtaacatttcattcacaagtcttcaatttcttttgggtacatacctagcagtagaatttcggatcacatggtcattccatgtttttttttttggggaactgccagacttttccacagtggctgcaccattttgtattctcaccagcagtattccagggttttaatttctctacgttctcaacagtacttgttttctgtttttgttgttgttgtttgttgttgttgttgttgttgttgttgctgttgtttggttttttggtaatagtcgtcctagtcctaatggctgtggagtggtctctcattgtgattttgatttgcattttcccagtgactaatgatgacatcttttcatgctctttttggccagttgtgtattttttttttttggagaaatgtctattcagatcctttgcccaatctcaccttgggttgtctttttattattgttgttagagtttcatttacttttttttttttttttttgagac

SEQ ID NO: 48473 - DNA, 1050 bp, Homo sapiens
tcagtgagaaaaagatgaacgccccagttaaacgagggacaaaaggtacagtcaggcagtttgcagaagaacaaatacaaaaggccacaaacttgtgaaaagtgtggccttattaggattcaagaaaatgcagattataaaacagttatcccaagctctttgactcattggatcactgaaatcagaagtgggtaataaggagcacgaaaaccatgatgcgggagcatggcattaatggtgcaggactggccacaggtagggccatttggcattacttgttaacatttaatttaatttaattttttttttttgagatggagtctcgctttgtcgccaggctggagtgcagtggcgcaatcttggctcactgcaacctctgccttccgggttcaggcaattcccctgcctcagcctcctgagtagctgggactacaggcacgtgccaccacccctggctaattttttgtatttttagtagagacagggtttcaccatgttggccaggatgctccagatctcctgatcttgtgatccacccgccttggcctcccacagtgctggaattacagacatgagccactgcgcctggccacttgttaacatttaaaatgcacatactccatggcccactctaaggaaatactcatgctcttccttggcaacaccatttgcaggagtgaaacatggaaacatctatgtgtcttttaatgggagccaaataagtggtgctaattctcaactgtgggttattctacaaatgcaagtcaatatggggatctactgatgcaaatagaggaagatttcaaagaagagattctgagtggggagaatgatacagaaggagagatgtgtacttacctatttaaaaactctcgccttcctgctctcatttctgtggagataccaatctctagaataagatccccttcttcctttttgagatgaagtcttgctctgttgcccaggctggagtgcagtggcacaatcatagctcactgtagcctccacctcctgggctcaagtgatcctcctgcctcactctcccacata

SEQ ID NO: 48474 - DNA, 1217 bp, Homo sapiens
gcgggaggggcggggcccggctcctaggtgggtttcctcccggggccccacttcccccgagtccctgcgcggtttcggctgcttggatccggggcgcagaggaacggcggggaggttcggaagtgcagcttgggacctgcctaggttgcctggaggaggcggcgttagctctggcggtgcagactccgggagcacctcccgcccgcgcgcctcgggccggattctcggcaccctgcgggggtggaggagggcgggcggggccttcaggcccaggagcgccagagacctatggggttcgcctgaagcccccggaatgtgtgagacacttcttactagtaaatgggcttcagtatcccccatccctgcactcctgcaggaaggtgagaatcgggacagtcgcaggctgggagacgctctgcttttcctgcgtcctgctgggagctgcgcgctccaggtatcctggcctgccgccctagccggcccaaggtacgcgagtcagaaaggctgcacagtctttcctgggggggggttttagtttaagcagatgttgattacgtcagacattcctaattacttgatttgggaagggagcttgcgtttatctcactgtgcattaaagcataaaccgctcagagtgcacaataaaataagtagaccacattctaagttggtatccatcactcaagacctctgtcgatttctgcaacccctcccccaagaatctcccaggagatccctttgctgggggagaggggtggcggggaggcggcttaaacacgttgctggacgtgctgttgggcggcttttgctgttcaccctgcggttaattgtcctacaaaaactctgccttgcagaccatgagggttgagcgcagcctttgaggggcggtgctgtggtgggggtttttagatgggtgatgaggaaagcatgatgggtccattgcttaagccaaggtggttgtaacaggaaagttccttgagttttgggtgaaggaatttaaacactcatagtttccagtgaatgtacaaatgtcttatatgaacaaagcaattggagtcgttttctttaatttttgaaccctgttctttttctagtgaaatactcataatctttataggagagggcataggatataattctcttcgttctgtatggctaggttaacaaaatccaaagagtatgataatttttattcaaaataataataaaattatatg

SEQ ID NO: 48475 - DNA, 1037 bp, Homo sapiens
atcatgctttttttcacatctgctcctgagtcaaataacatcttctgactgtaattagcactttttaatgtaagtttttcatggtgaagcttgagattctgatataggaggaaattttaagaggagctgtattatacagagaaaatactaaaatagagaaaacaattagccctatatttcagattatgaatattatgatgtttgttttgcaacattgagatttcctaccattacatgtcattaaaggctggttttatagaaaaggcaatgtctcttgataaacagaaattaagtggaaagcattatcgtaaaaagatacatgatagttaaataggaaaaattgaatgacttcagttttgaatttgttcgttaaccctgaaagaattgttgttgttatttttagaaatacaaaaccaaactgacttactgagtcttagtggaaaaacactttgtgtgactgcaggatcggctccctctctgatcaacagttctagtactcttctttgtcagtatatcaacctacagctcctgaatgcaaagccacaaggtatgtgcctccccacagcaggcagactgtggggtgctgggcattgaagttgtctttaatattcaaatatgtgtgtatttctagtcggcttcaaagtattgctttaaagtgtgggctctcacgcaactttggggagcaaccacaggcttttcttttggtgtgttatagagaccctcatccatctggcatggttaggaaatgaaaaaattggttaggtaaaaattacaactaaattgtttgagtgccaaaacattttaatctcaaattttactttcttttctgaggaaaaatgttctgaaaacttctatacctccatgccttaatcaacagactagattgatagtgatttttttcctgatattttaggatcctcattgtgcacatttgtactgaagtcttcgggctcctcacttcactgtgtactgagtatctgctccccaagctgctgggcttttatataagttttttttttttctttttccccttcccc

SEQ ID NO: 48476 - DNA, 1051 bp, Homo sapiens
tgcagaataaatcaacatcaggggtcagatagtatttttaaccatcgtgacctgtgggaatatacatatggcacaaaatgaaaaatgacaatcataaataagaatcatgaatacaaaggtttaaatctagaaaaagacaagaacagattgcctggtagagttctatgcctggaccatagctaccaaggattgccaaaacacatgccaaggatggagatgtgtgtgtgtgtgtgtgtgtgtgtgtgtgtagtgtatatattgcatatacactatatatgtatatatatgtatatatatccatccttggtatgcttttatatgtatataataagctatatatacacatatatatagtgtatagttgggggaaaaggaaaaatattagggcttgaacccctttgtatcccttttcctccaaatgtaacattttctttttagttttatttgtctgattgaggtgttatttttgtggctttttaggtggagtattgctcctggaaaatccaaaaggtgacaataggttggaccttttaaagctgaagagtgttgtcactagcatttttggtgtgaaaaatacagagctggctgtcttccatgatgaaacaggtatgtggaaagtgagaggagcctacgtcctttgactcaagatggattggtgaaggtcttaatttgctgtcagttgtactatacaacttttgcatttttcctaactctcttgagtcagggcccaactcttcagcagtgcctgcctgcagtgtctattcatgcctcctcattgtgtcatgtgactgaaaaccctgggcttaatggatctaatctttccctctcacctgttagctagctggtggacttcaggcttcagagtcctctgttgtgaggttgtttttgtttttgagacagggtctcactctgtcacccatgctggagtacagtgatgcagtcatggctcactgcaccctcggcctcctgggctcaagtaatcctcctgccttgacctcccaagtaactgggactacaggcatgccaccaccatgcttggctaattttattt

SEQ ID NO: 48477 - DNA, 1023 bp, Homo sapiens
aaaatagcagaatataaattatttttgagctctcacagaactttgctgagatacattataacctgggccataaaacaaacctcaaccaattaatacagttgaaaccagagtgtgctctctgaccacagtagaatcaaactattaattagtaatataataatgaaaatctccacactcttaaaaataaacaacatgcttttaaattatccatgattagggaagaagtctcaagagggaaagaaacatagaactgagtgtaaaggaaaatacgacatcaaaatatgtggaatgtggctaaagcagtcctgagacggaaatctgttgcactaaaaactgaaagaaagatggtttcaagtcataacctaaggtctaaactcaagaaactagataggaaaaaaaggcagaataaatgcaaagtaagaagaaggaaaaacataaaaataagagatcagtgcaattgaaaacaaaaacgatagagaaaattaatgatacagaaatctggttcttacccaaaaattcagcaaaattaataaacctctagtgagactaataaagaaaaagaagacacagttgcatatcaggaataaaaagaattattgatacagattgccaaaatcaaaaacgcaaatactatgaataaatctccatatgtaagtttgacaacttggatgcttgtcgcccaggctggacagtgcagtgatgccaactcagctcactgcaacctccacctcctgggttcaagtgattctcatgcctcagcctcccgagtagctgggattccaggtgtgccacaccacgcctgatgaatttttgtatttttttgtagagacggggtttcaccctgttggccagtctggtctcaaactcctggcctcaagtggtctggccttctttggcctcccaaaatgctgggattacaggtttgagccactgttcctggcctgaagtgaaccctgtttctaaaaaacacaaactactacaactcacacaatatcaaacagataattttaatggccctataat

SEQ ID NO: 48478 - DNA, 1496 bp, Homo sapiens
ctcttgaggaaggtagccaggagggtacatgagctttgcccggaaataaaatggcctgttttttctaaaactagaaaaggcagtgtgtggattctggtaattatcattaaaagtaaatagcaattggcttgaaaaacatttaactcttctggtagtgggttctccataaaagtacagtacaaaaaaagaaagattacaatagcatttctgttgttacatctaggaattttagatatacttatgaaagtatgatattaaggtagggaagatattggcttataacttagaagtagatcatttagactgggcacagtggctcacacctgtaatcccagcactttgggaggccaaggcgagcagatcgcttgaggtcaagagtgcgagaccagcctgggctggtgaaaccccatctctactaaaaatacgaaaattagctgggcatggtggtacacgcctgtaatcccagctactcgggaggctgaggcagaagaatcgcttgaacacaggaggtggaggttgcagtgagccgagattgcatcactgcactcgatcctgggcgacagagcaagaccctgtctcaaaaaaaaaaagttgatcatttaaaatatacctcagtcacttgcttaatcatttgctccggtctcattctatgagacaagtaggacaagacaaggaggggctgatgatggctgtttattttttcagtgaggcgagttgcagtgtagtttcattttgtattttgcatattgtgtaattatttgactttttttaagtgagcatatatttttaagaaaccaggataagaagagaagaaaaatgggatataaattgtagcttttgatactttgagtaatgagattgaatatgttatcaattgtgtacagctcttgttgttactgagaagtcactgtgttacacgatggtgtggcacattgcagtcaggtgccacagttactcagtcatacgttctcatgtgctcagttgaagggatctgaactggaaattacactcaccagaggatcttcccttcctggtcctgcttgtgcatatgtcaatcttaacatttgtgcaaatggcagtgaacaaggtaagagtaaattccatgatttgtgtgacttttttttagttatacttatggatgtgaaaaaacaaccaaaaaaacttatggatgtttttaagagaattggaataattatttaatcatgtttaatagataactttttcttcttgtcatcaaaatgaattcactaggcgagatgcagtggatcattcctgaaatctaccacttttggaagccaaggtgagaggattgcttgaggccaagagttcaagactaaccttgccaacataataagatcctgcctcaattaaaaaaaaaaaaagggccaggcatggtagctcacacctgtaatcccagcactttggaaggcggaggctggtggattacttgaggtcaggagttcaagacctgataaacatggtgaaaccctgtctct

SEQ ID NO: 48479 - DNA, 1050 bp, Homo sapiens
aacaagcattttcttcttaccatacaaatcactggtttttaagcatatttatagaatggtacaactatcaccatagttttagaacattttcctcgtcccagaaagaaagccagtattcattaacattcacaaaccattttcccctcaatatctgaccatttcctggcatccacgaacctatttgctatctctggatttgccttctctggacatttcatataagtggaatcatacaatttgtaatctttatgtctggcgtgtttcacctagcataatgtttcacattaatttatgttgtagcacatatgagtgcttcagtccttcatattgccaaatactctattgcatgtgtatgctgcattttgtttatccattcacagttgatggacacttgaagtgttcttgctttctggcagttaggaataatgctgctgtggacctacatttttgtgtgaacatatgttttcatttctcatttttgtttcctcttgtgcattaactgtaggaactcaatgttcgaaaagttacactgtctacagataaaaacaagtatggcattcggctaagggcagaaccagatcacatggtcctggggaagcgtctgaagggagcctttaaggcagtgatgacgtccatcaagcagttgagcagtgaggagctggagcagttccagaagactggtaggtgtctacacagacaagggcaccatttatgtcctgagtctgagggatactttttaggctactgtttgacttttaatatcacatcctttcctttcctgtcctgtcgtgtcccgtcgtgtcctgtcctttcctttcctttccttactctcttctcttttctctcttctctcttctcttttcttgacagaatctcgctctgtcatccatcctggagcacagtggcgcgatcttggctcactgcaacctctgcctcccaggttcaagtgattctcctgcctcagcctcccaagtagctgggattacaggcacgtagtaccatgcctggctaatttttgtatttttggtagaaacagggtttcaccatgtt

SEQ ID NO: 48480 - DNA, 2632 bp, Homo sapiens
atacaatggaaagaagttgggcattgttgatgctgtcaaattgcacagctccgtgtaaatggcacttcctacagttgtgtagtgggcagtcttggactttgatccacacatactggagtttttggcttttctcactgaccaatgggaattcgcatgtggctcacatggtgatttttttgtgtgcacccctaaacactctgactgccatgtagcacatcctcaacaaacagtcattatgtgattgattcattttggttcttttctccttagtaagtggaggcacttggatggaaggagctgccccttctttgttgtatccaaccctctccccaccccagatgcctggtaacccacttgctgcctgattgacttgtcttacttttagcttataggctttatactgtggtgcctcgcctggtcaagtttgtagatattctgaccaattggtatgttagaatgaaccgcagaagattaaaggtaagtgcagactgctgttgggaaaagcaaaaagtgtatgaagtttgaaagtagaagaaatatgagaatagccagaagggagaggaacattttcagttgctctccgtttttgaagctttgtttttcttttccttttacattgcattttaactatatttgtcatttgagggatagggatctataagttctaaaagtcattttgcattattttcacaacacaattatgtacatgtcatattggagggagaatgtcaaggcacaaacaggactacactgagcagacctcttaaaattcaaaataaaatcatgcaaatattttataaaaatactggtagatatggcattaatattgagaggggtacttccttctaccacaagggagtcagatattatttactgtggacagaactcctctgtagctgttgggggtttaggatgagcagagcataggtcctggtctcaggacttaagccaggtacataaataacaatgatgcttaatagagagagcgaggtctctttactgcaggcccaatgaaggctcccactacccattagtcatgtctttttttttttttttttttttttttttttttttgagaaggagtttcactcttgtcacccaggctggagtgcagtggcatgatcttggctcactacaacctttgcctcccaggttcaagcagttctccctcaacctccccagtagctgggattacaagtgtgcaccaccacgcctggccaatttttgtatttttggcagagacagggtttcaccacgttggccaggctggtctcaaactcctgacctcaggtgatccactggcctcagcctctcaaagcagtggtgttacaggtgtgaaccaccgtgcctggccagtcatgtcttaaaaggcattaataataaaagcctgcaacacaactgtaatttcatttttgtgcagatgtatctcacacacacgtatctagaaggacatatgctaagatgcttacagtagttgtctctggataaattaattatgattgtaggaaaaacaaagataatgaaaaaatttcaatgaattggtattttttttaatacacattatatacttttttaacataaatcttatttaaaggtactttaaagtttttggttagcaactgtttttgtctgttgtgggtagatccattctaccttcagccttcgggtcctacagttaggctctacttccctgtcagctcgcctcaggtggggatagtcagtgggacagcaggtgcacatcctggccaggcctcctgcactgccctgaagggccaccctggtggcactgaccgtggatggcctgtggtcgtggccctttctcctttctctgtctcatgtcttgtctgtatgctgcatgttctttgaagattgcctctttttaataaacttatttttttaatgataaacacttatttaacagtttaatgtttatgtttcctttttactcattagggtgaaaatgggatggaggattgtgtcatggccctagaaaccttgtttagtgttctgctttctctttgcagacttatggtaagatgattggcttctttctagtaccctttggcctatgggctgccttcagcacctacttgctgcagcatcctccatttatatccattctgtattattctgccaaaaatagatatagaagttttataacaccttatagctctagttccttatcagaaatcttgttagcttatacatgttaagtaaggactaagaaatactagattctttcttacagtctctggcagtacaatatatgtcagggcccttggctctagaatgaggatctacagttcaaagtaagacatacctcatcttaatgtggattgccataattgtgagtaatgggggaggttcttcagctaatacctgtctgagtaaatatatatatatcacaaaaaatactttaacttagcattgagaggaaaacgtgcaagtaattgtttgatatatgttcttatcagttcagatattagttaaataatataaaagtggaacggctccaactttaattctttttatcctgtttcctttactccatatgttataaggctcctatttattccttaaccgaaggaaaatctgctttgtacaaggtgctgtgcctggtgctctccatgcc

SEQ ID NO: 48481 - DNA, 4909 bp, Homo sapiens
tgtctaatttttctccctcttccagattatatctgattaactcccctgtggtgagagcagaaaacctccgctttaaagaagagggtgtgcgggacgtccttaaggatgtactgctcccatggtacaatgcctatcgcttcttaatccagaacgttctgaggctccagaaggtatgggctgtagggggctgcacatgtacctgccgtgtctccacagcgctcccttcaccaagctgtgaggtggagctctgtgtgagactttagggctgctgttctctgctgcctgatgctggggtaacttagagccatggggaggccatacatgcaggtgcggaaggtatctagggtccgggctatgccaagaccatgggccctagcctgcaaaagagttatgtcatatagttgtttagtcgccagttgttgtttttgtttttgaggtggagtctcagtcttgtcacccagactggattgcaatagcacgatctcggctcactgtaacctctgcctcctgggttgaggcactgcctcagcctccccagtagctgggattacaggcacccaccaccatgcctggctaattgttttatatttttagtggagacttggtttcatcatgttggtcaggctgatcttgaactccagacctcaggtgatccgcccttcttggcctcccaaaagtgctgggattacaggcatgagccacggcacccagcttcgtcagccagttcttggtaccaggaacaccatgttgagtgagacacccctccccttatggaaccaatggagtgggaattgggagatacagtaaagagtcagcaacttttagagagagcacccagtgaaggcggagtcacaggcaagctagggctggccacttgagatgggtggtcagagaaggcccctcagtggggtggcatttgggctaatctgagagtgacagcagttctcgatggagttttcagtgggttgttagggtcacatataatagttgtgatgtatgtggaagtgtacttcaatggcagttacctccacgcccaggagttactttctcacctgagaagcccttgctctagagccaccttccatgccccacaactgaccattgtcagcgtccatcaccttcattgaacatgttcctgtatgggctttcaagacctgatttggggtcagagttccgatactgcacatctgatctccagcaccttacaagtaaaattgcttgtaagtaaataactgttgaatgaaaatgagatattattcctgcttgagcagatgaaaaagctggttggaaaaatgaactcttgttatcccactccagcaggcaggtcaattacttctgctccccttgggctctggttgttctgctaatgaggacacatcatgttcacctgaggctctcagagtagcctttccccaggaattgagaagggcagtcatcttccccaggctcccagcattcctcctctctgcagcctgccacctgtcctgcatgtggttctctgccaagtagggcaaacagtccttgggcaggtgcactctgcaggtctccactggtgtgggactcaggaatacaggcggggtcaaagctccccacagccagggcccatctgaatataccagcaagacacagactccatgatcagggccttaaacacagaggaagagtcacattatcactgccccgctagcctggttgtggtgctgccagagaaacaaagcaggacatgagttctgtttgtagagcaaggacttaagatcaaggaggattttgcaaagcaaaaagagtgggatagaactttctgggtaaaatgaacagccttagcatggaaattatttcccagtactcattttcagtttgtggacaatcattcaatcctagacagttctactgtccttccttcctgaggtttaaagtaactaaaccctacacttttctgacaagattttagaatatctttcaattcataattactctttggtgcagagaagtaatgttttcctaaactctcttcagtttactcaaaaacataataaattaattgaggacttaatgtgccacgttggtgcttatcttgaaaatattgctgaaaatcagaaattcacattgccagtagggtctgggattttttctttttgtttttgtttaagtgatttaagaagtttatttcctcatagtaactttcttcccaagtgtgccagtgtttcattaattgttccttcctaggaggaagaaatagaatttctctacaatgagaacacggttagagaaagccccaacattacagaccggtggatcctgtccttcatgcagtctctcattggcttctttgagactgaaatggcaggtgagtctctcttggtctgtcctcccaggaataaggactattctctttgtaactgcccttttgatatttaatagtggaaatattgagagatacagaaaattaaataattgtttccttttacctctcatatagttttgttaaggcttgttaattgtcgtgatatctttgtttcaagaccctggggacttctggcctggtgtggtggctcacgcctgtaatccccagcattttgggagaccaaggcaggcaggtcaccttaggtcaggagttcgagaccagcctggccaacatggcgaaaccctgtctctactaaaaatatatttaaaaaaaaaaaaaaagttagctggccatggaggcgggcgcctgtaatcccagctattcaggagactgaggcaggagaattgcttgaacctgggaggcggaggctgcagtaagttgagattgcaccactgcctgggcaataagagcgaaactccatcttaaaaaaaaaaaaaaagccctggggaattctgtctttagggggtgtcctcgtggtctcaatgctccacagaagagctttagagctggatagccatgggttcagagcccaactctaccacttgttcccaatccagagagttgcctgaagtctgaccgtcaatttccttttttttttttatgggtacatagtagatgtatatatttatggggtacaggagatatttttatataggcatacagtgtgtaatagtcatatcagggtaaatgggatatccatcacctcaagcatttatcatatctttgtgttgcaaacatctcggttataccctttttcttgtttttaaatgtacaagaaattattgttgactgaaatcaccccattgtgccatcagatgccactcttattcagcctatcttgaccttcagtttctttatctgcagaatgcccagtagtgtttgtaaggcttaagtagagacgatttacataaagtagctggcagatgataggtactcaataaataatacttgttattaatgcatttataacttatttttagttctattttcattactaaatagtccccttcttttccagaaaaattagaaaagtcagaagagcaataatgaaatggacattttgctgttatttctattaactaacaacagtgagttcgttgggtaattttacagagattcaaaaagtacattatgttggcttccttaaggtttgagataatcacaactgtaggtccaggtgagaaatctgggacacctcagacagtcagttaaagtgggtggacagaggccctgggtcacagtgagggcaaaagagggcaaggcaaatccaccctcacagggctctgcggttcctgctgctgttgggcaggagcagcggccgccacagacctgggattcaccattagcctagatacgggcacatgctgctccctggagtaggcgctgctgccccatttagcacagaaggactgctacaggatttgtccaccttgttaaacatgtagaaggatcacgacagtccagctgttgctcagatagacacagatgaagatggaagtgagtgtgaggctgagtgctgccctggcgagggcagcactgggagcccagcacactccccagacatgctcacacctgtgtctgcttttccctcctgagtgatacaagtgggtgggaaacgtggggattgttgcccggacccccttcaatatttgggcaccagctgccatgacctcctgtgaagctgggtctggagatgcgcattctggctggagcctggtctgcctggaaactggagatcggcagccacgttttgtgggccgtgtttaagtcccggttctgccggcctgtcagcttcatgtcctccactccctcaggagcactgtgggtatgagaggacctgcctcacagggtggtggtggcctgggtagtggctgctgctgctgcccctgtgtgttgtatgtttatccattgtatgtggagttctatttgggttcatttactccctcagagttgaaaccagaacatagaaaacctgagcttcctggaaggtaaaaagtgccgtgaaccctagaaatcatttagacaggtctcagttactgaaatcacatgtctaagaaagtgtgaccagctaacgactctggcctggggctcagcccactgacatctgagttctggtctttgtgaaaagcagcagagagcagctctgccggttgcaacttctcgtctcttagcttagaccagaagcctcattaacagtccctggactcttttcattattataaattgtatttgtttctaagtatcggtcttattctttttgttttttgtgtttgtttttatgtaacaaagagtattaattaaatgggaggtgaatgagaatccttaaaataagccttgcctcagacaattggctaaacaccctttctttcctacttgatctctgagtttctcagggaactcttcaaatcctcctaattcctcaagaccttcactacctctgatgctgtttttactcgactgttttaatgtttagaaggccagttctattttattcatagcctgtgccag

SEQ ID NO: 48482 - DNA, 1023 bp, Homo sapiens
ttgtcgtttccagaatgttatataaatagaattatacagtaactaacttgggggaattggctttttttttcttttttttgagacagagtctcactctatcacccaggctggagtgtagtggcgtgatctcggctcactgcagcctccacctcctgggctcaagcgattctcccatctcagcctcccgagtagctgggaccacaggcatgaaccaccacacccagctaatattttgtatttttggtagagacagggtttcaccatgttgacaggctggtctcgagctcctgagctcaggcgatccacctgcctcggcctcccaaagtgctagtattacaggcatgagccaccgcacccagctggctttttttaaatccacataattccattgagattttagatgactgcacctaccaatagttccttcctttccatggataaatagcattctgtattatgggtatgccatggtttgtttgatcatccacctcttgaaggacatctgggttgcttctaacatttggcaattgtgaataaagctgttgtgaacaattgataataggtttttatgataatgtaagttttcatttctttgggatatattctgacacatctttcttcttcagtctaccctgaagcttcctcatggacttagtatgatattcaaaaagaagtttgcaaatattaacaaaatatcttaccattgtaccttaacactgtttgtttcttttttgagacagagtcttgctctgctgcccaggctagagtgtagtggcgcgatcttggctcacttcaatctctgcctctcaggttcaggcaattctcctgcctcagcctccccagtagtggggattacaagtgtgcgcccccacgcccagctaatttttgtatttttagtagaaacaggtttcaccattttggccaggctggtcttgaactcctgacctcaggtgatctgcctgcctcagcctcccaaagtgctgggattacaggagtgagccaccgcgcccggcctattagcac

SEQ ID NO: 48483 - DNA, 1046 bp, Homo sapiens
tagcaattaaactgcaagttctgttatgcttacagttaatagaaatgactacttttctgtttgttagtgttgaccacctgaccattccttcacgctgtgggaagggatccttgcaccgcatctctgaagtgtttgactgttggtttgagagtggcagcatgccctatgctcaggttcattacccgtttgaaaacaagagggagtttgaggatgcttttcctgcagatttcattgccgagggcatcgaccaaaccagaggatggtatgcctccttgttctttcatcacgtgttttattgattttattttatttagggagtattttactaagtcactgccatttatctactgggtgatggagagattgtggcaaataagacaggctacattcctgccctctcccctccaccaccaagcacggacattaaagtgccttttgagtaggactctcccactacaatagggctgtagttttacaatttcaatgatctcactggcattttggaatatatgtgttacactggatgttaaaatgataaaaaaagttatgtgttcttagcttacgtcagatcatttactcaaatgtttgagtatttgcataaaagacagtagtttgggtgctagaaatttgagggatagttggtaatgtgctcagatattgaggctagccttataaatcaacattctaaaaaaatccagatttttaaaaaatatacatatgagagaggatttgggcattgatttttatctggtgccttatgtaaaacagttccttaattggaagaaggtgaattactttctttccatggattggctttgctggcccaggctttatttacttttttttttttttttgagacagaatcttgcactctgctgcccaggctggagtgcaggggtgtgatctcggctcactgcacccttcgcctcctgggttcaagcaattcttctgcctcaccctcctaagtagctgggtctacaggcatgcaccaccatgcccagctaatttttgtagttttagtagagactgggtttcaccatgttggc

SEQ ID NO: 48484 - DNA, 1052 bp, Homo sapiens
ggaagattctagattaatgagccagattcaggtgccaggaggaaactaaaatgccttagagaaataatctaagatgtttcacttatgccagttactttgacaatttgcacataataaacccttaatatccattgagagtatggctatgaatgtttaagattctctctaggtagggactccctctgatactggggtggaaacagaggagcagtggcaaccctggcctcttcagagactaagagtaggctgtgtctttcatgagagagaagccacattagcaaatactatccttcggcccagattggtgtgttaatgtgcctttaaatcatcagtctcaggctgggtggctcacgcctgtaatcgcagcactttgggaggctgagggtggctgatagctcgagtccaagagtttgagaccagcctgggcagcatggcgaaaccctgtctttactaaaaatacaaaaaattagctgggtgaggtggtgcctgcctgtagccccaggtacttgggaggcttaggtgagaggatcacctgagcccaggaagctgaggctgcagtgagctgtgattgtgccactgcactccagcctgggcaatggtagtgagaccctatctcaaaaaaaaaggaaaaagaaaatcatcagtctctcaaagtaaacatgcatgctatataaattaactcagtatgctctgtttggctctaaggagctcctgctattgaactttgtttttgacaggtggtatgcattgggtcagtggcggaacttgaagaactgtcaggagcaaagatctcagatctccacagagagaggtcagtttctaaatgttcgattcacttcagttttacgattctcctattaagacctggtctctagcagattacagagccacacatggaagtgactagcttgctgaattactttgctgatgactcatgtcatattgcagtattgtggcctctgtccttgtgaaatgtgaggtgaatggtgcataacctttcagatggaggattcatggtgctctctgaaagcctttgagaattgctgatattt

SEQ ID NO: 48485 - DNA, 1172 bp, Homo sapiens
caatgacatcaggcgaggacttactatacagatagatctgtgtgtttggccttctgtccaaagctgacagcattgttgcagtgatgagcggcagcaccctggggaccttggtgaatctcccatagggacctgaaaggcaacagtgaagtagctgaatcagaagacttttcaggactgaacaggaagggcagagaaagaggccaccagtgttcactaggatcagaagctccctgggtgagaacgcacagcagttcctactggtgtggcccttgtcagatgatccctccattctgagtgccccagctagccccatctctcagctctttacctggatataatcctagcatcctgtggctttgtctgattgctttaatcgggtccaagcataatatagtcatgcaccacataatgtcattcagtcaatgacagaccgcatatacgacagtggtcccacaagattatgataccatatggttactgtgccttttctgtgttttgtaatgtttagaaactcaaatacttcctgttttagtctgtttagtgtagctacaaaggaatacctgaggctggataatttataaagaaaagtagtttatttggcttatgattctgcatgactggaaagttgaagactagacatctgcatgtggggaggacctcaggctacatccacttatgatggaaggctggacaggagccagagtatgcagaaatcacatggcaagagaagaaacgggcggtggggtgggggcaggctcttttcaacagtcagctctcacaggagctaatagagagagaactaactcactgcagaaggagagcattggtctcttcacgagggatccaccctgtgacccagatgcctcccatcgggctccatctgtcaatactgccacactggggattaaatttcaacttgagatttgctggggacaaaccatatgaaaactagagcatttaccattgtgttacagttgcctgcagaattcagtacagccacatgctgtacaggtttgtagcttagaagtaataggctccaccatatagcctagctgtgttttaggccatcccatctaggtctgtgatgtttgcctaaggaaatcaccctaacaatgcatttctcagaatgtattcccaccattaagcactgtatgactataatttagctctag

SEQ ID NO: 48486 - DNA, 1495 bp, Homo sapiens
tatcaggtggcatgtgttgcggctatgtcacattgatggtgataactttgttcacttggttaaagtgctgtcagctttctgctttgtaaagttgtagtttttcctttgtaattaataagtatcttgtggggagattctttccaaatattcttttttttgtcatacattcacttattaattttaacatccatggatggtttttgccagtaataattatgcctgtgatatttgccaagtggtggttttggtagacttttataagtgaatatttatacttgtaaataacattttgtgcatgtaggatgaatgccgagaaaactggttcttaaccttacataatatgttgttggcagtatagatttacttgtaccattgattattctgttttcccaaaattttcatttgtgatgacaacagaaataaacacacattgatgtacaattataaatatcattgtctaatactgttctaatattaatattttaaagtctactgttagcagacttggccgatggattgactttgacaatgactataaaactctgtatccacaattcatggaatcagtctggtaggtttatttaaaattgtaaatatggtaaatattctattctgttgtattgataattggaaaaatgcactagcatgaatcagtttatttttgagtccatcgttatttctctgaaaatctttgggaacaggtttgtttttgaatgtagaacttttatttttatttttttgagactgagtctcgctcagttgcccaggctggagggcagtggcacagtcttggcccactgcaacctccgcctctcaggttcaagcgattctcttgcttcagcctcccaagtagctgggattacaggcgcccgccaccatgcttggctaatttttgtctttttagtagagatggggtttcaccttgttggccagggtggtctcgaacttctgacctaggtgatccatccaccttgatctctcaaagtgctacgattacagacgtgagccactgcgcccagcctgccagttgcttttcttaacattatgtgttaaatatcattcgatatcagtagatattagcattttaatgtctgcctgatgtcttactatattgatctgttataatttaccagccagtctcccaatgaaagacattgttttttcacttatttggcagacagaaactctaaaaagaaaatggcataaatgtttgcattttcagaaatagaattttgttctgtaattgtgaaactccatctcttaccaggtgggtcttcaaacaactctatgataaaggccttgtttatagaggtgtgaaagtcatgcccttctctacggcatgtaacactccactttccaacttcgagtcacaccagaattataaggtacgtgaaatgtagagacattattcagcattgagttttgtaggtggaagctgagtagttatgatcacagtaggtattcccaagtagacccagtgtggaatgttgcccac

SEQ ID NO: 48487 - DNA, 1027 bp, Homo sapiens
catggcttacctgtggtatgtttgagtatccagctttataattttctgattttttttataagcattagattttgtcatataatatgttcaagtatgatgaacgttgactgtcagaccttctagttcatttctataatatttgtagtttgatttgttttgttttctagagttgcatagttgcagttgttttcatagggcagcgtggtaacagtcttatcacaaattttcaggaatatgaaattgataagacactgggaatcagaggaccagaggatgtggccaaaatggggattacagagtataacaatcagtgccgagcaattgtgatgagatattctgctgagtggaaggtatgttgggtttttttcagtagaatgaacagcaaatgtagttactaaatgggcattgaaatggtttatggtcccttgtgctttttttattaatttattttttgtagaaaaagtgttagcttccaccttcaaccctattacttaaacggttagcttaaactgaaccatctctcttctgacttctgtgtgcttaattggtctaactttcttgcatgatcaccaatagggaaaaattctaataagtataacatgatatataggccttttctttttttctcaaatacttttttcaatttttttaacttttcattttgaaataatttgacttattaaacaattgaaaaagtagtatgatgggttcccctatatccttcatccatctttcccagctgctaacatcttcggtaaccataatattaatagaattttcaaaagcagttgccccattaatttttatttctgaccaatcacatattgcatttggttgtcatgtctttttagtcttcttaagtatggaacatttatttagtcctttgtatttcatggccttctcacttttgaagattgcagaacagctattttctataatgtctctcaatgtgtgaggtttcctgatttaatttaggttatgcatttttggtgacaatgccacagaagtgatgctatgcccttctcaa

SEQ ID NO: 48488 - DNA, 1047 bp, Homo sapiens
gctttcctaccacctctagggattcaactctatctttcctacctcataactttacctagtttataaagcatcttttgattcagttaaacactatctcaacttcctttgaacccttagaaactttgggggcatccctgtagagtacttaaattagcattttattctagtttctgttagttggttatttatatcctgcagtaagttgaaagagtcatacaggcttagactacttttgtatttctgtaatccaaactagctgtttaactttattctgtgatattttgtctgtttgtagtagttgaggatagtagcttgtaaaagtccatgatgccttagtatgtgtagggcatatggtttttttcccataatacttgttattgaatcaaagactgaaacaactatccactaatatcttatattgtcagatataccattaccatttttcactctttatcatttttagatttacgtaatttagattatgtttagaatgttaaaaaaatcaaagagtctataatcactgtagttattagtatcttgctctattacatttgtcgatctttaccttaaaagttttagacttgctactgaaagccattaaattcagactttcataattaggaacagaagtaggacttttcattgtctggtcacgcagactttctgagtttgctatgactgagggtctttggttatggaggttagtgaaatgaggttaaagtttcttcttcctgtcttaatggattttgaacatgtttaggtacttggtaaatatttgatgattgagacttctcaggctgtgttttccaagagagtattaattatcccttttcctcaaagaggtaaatgaaaagaaaactgctgaggaagaagagcttgctgaagaaaaaaagaaagccctgaatgttgtacaaagtgttttgcaaatcaacttaagcaattctacaaacagaggatcagtagctgctaagaaatttaagtatgttttatgttccatcccattctaccatatcatcctttgccataaatgtcttcttgaactcaatt

SEQ ID NO: 48489 - DNA, 1014 bp, Homo sapiens
agaaaataaaacaaccccaagataaatgttagctctgaacaccaaaagttttaagtgatgttgtggaggtataatgtgtgatgtggaacttgaccagaatttgtttctgaaataagaaaaaattccaaattctaaaacatctgatttcagaaacatattaacttccagttttgagaactagaattttctaacatggattaagtgtcccgttaagtagactatcactagcatacaatcaaaatgtttccttatctgactactggacattttcttctttttttttttggaatattttgataattatgcttatttttatagccaataaaaaacaaggtttatctttgaaataataagttttcaagagctatttttttttttaatttagaaacaaccgtttttacattgctctctggataagaatttaaataaattgttttgtttgtttgtttgtttgttttttaggaaacccacagaaagtttttgcatatatcaacatcagtgtagcagaagcggacctgaaaaaatgtaagatcatcatatattttctatactgtttgccagtttgtatgactctgtaacttggaataactggttctaaatctaaacctccacagccatttttcacgttatccagagggacagcagtgatgaagagaattccagtatcgtataactcagcaggtttaggtccattccatttggcatcagcagacatggtagcactttactggtgggtttacttaaaactgctattctcaaatattttggacaagggaccaaactttcatagaaactgcctgttacatatatcccactgaatatcatgccacattccccctcagtctgatcatttctttgacagctaatccttgtcactaaacactcttgagggggctttaaaatacacccttgtaagaccgtatccttgaaattgtgaaatctcttgttgataagtttagtaaagtcaagggcaaacagtggccttcaatgaagaatgggagataatccatactg

SEQ ID NO: 48490 - DNA, 1069 bp, Homo sapiens
cccatggtcttgtcaggtgctgcttctgagaaattggggtgtcctttaaaatacgtaaccctagtcatgggctggggatgtgactgttccagcccaggtgcacccagcttgggtctcaggcctcagaactgagcagtaccttgggcttctgaggttctcccaataaaatgtggccccttgggatgagctgcaggcacactccagcttctggagcgagactcatgaccttaatttgtaaatgagttatttgctgtttactcttcagatgagaatagttacttaccccagcagcttagtcagggatttgttttttctacaaacaggattctggggcagggcagcagtgagcgccaaggccatggtgagcagcgtcagagcagggacgtgctgatcagtatttcctctcctcggcaggagcttttgaagttggggtttggcttgttgatttctaaatctcaaagcgtagtaaacattgggacaccagaacccaggatacttctcttggactgaactgagcttaggtcacttgtttagccagtgtcttgagtgctgtgcgctgagtgcccggagacgaaaagcgggacacacagcagtcagagctcaggactcggagtaatcctaaatgtgtttttcagggcaaataattaatcacatcttgttataagcacacgacttctgaggttaaaaccacaaaactaagccctgagaagcaaaatacaaaggactgaagataaaatttgagaataaaatgagaaaccagatctcttcaaatgtgaaccaaaggagcttgcgtttctcagcagacaggagaggcaaagaagaaggcttgtcgacattccatccatttggcgctggaatggccagatctactttttactttttgttgggttttgtaatacttggctcatgataaagtgatttttcagcgttcgtttataccactgggctgggggaacatcgctcacatgttccacataattacttttccatctttcagtcctttaaccctctctcgcctggtatggtggggtgcactggcctgaggaagctttgcacgctggtgcacaca

SEQ ID NO: 48491 - DNA, 1050 bp, Homo sapiens
cgtgatcacacgggtgctgctgagtggctcggacaagggccgggcaggcaccctgagtccggggctcgggcctcagggcccgcgagtctgcgaagccagccctttcagtaggagccttcgctgccaaggtagggcccagccttccccaggtaggcggtgggggccgcaggggccttgggactctgcagtccccatgggtggccaggcggtcagcacagcctcctgggggctctgggggatgccacctggttacgccagggctcccagcacggggcctcgctgcctctcacccccagatgcagactccctttcttgccttttatctgcatctgtaaattgcaggacacatttgggctgtaggattttcccccagaatatcatccatatgttgtggtcctctctggtttgttgaatgttttcaaccatgttatatatcctgttggatcctcattgcaacccgggggacaggttttccttggcttgttccttagacagagagaattgaggcacagaaatcctgcagggctgggtcctaccacaatgggatgtcttcacaagtctggggtgaagacacagacccatggggcctttggactgcgggacgccttccttgcagacaggagccgggcctggccgctgccacatgtcctgacatctcatgagctgacgctgcccgtgattcttggcagcccatagagaccccatggtctctgggagcctgagatggtttgaagacagcagtcctgcttgtgtgcaaccagaaaccaacccataccctaagccctgccttattatctgtgccaattttttcttttgttttttcaagacaggatcttactctcttacccaggccagagtgcagttgtgtgatctcgactcactgcaacctccacctcctaggttcaggtgattttcctgcctcagcctcctgagtacaggtgcgcaccgttacacctaatttttgtattttagtaaagacagggtttcgccatattggccaggctggtctcaaactcctgacctcaagtgatccgcctgccttggactctc

SEQ ID NO: 48492 - DNA, 1068 bp, Homo sapiens
tgccccaactcaggcacccccacctcacacccccaggagagagtccttggccacagagcgatgtagatttgtgtgcctttgttgtcctttttgatcagcacagctcctctttccaatctcctttccctccctgggacccctgttactgcagagctgttctggtgagtccggtttttctcgctccactgtgtgagtttctttcctctttcttcccctgctgtcctccagccattcatttcgtgcccctgcctttgtcagtgctcagcactgcctctgagtgcgtgcctggtcatcatgtcagtgcttttggttagatgctcttttaaacttccgggaacaaagatcgaacgcggagttgtctttggaagttaaaaagttcacaaacattgggaatgctcattcagaaggtggcaccaacaccgctcactccatggcttcagcgagtctggcggtgccctcacctgtgggtcccatgtggatttccctgtgcacctaaaggctgtgaattgtgaagcattcagtaataaagattcattgttgagaatttattaacgtgtcagaacataagtagggaaacctccctggaatgttgtagaatgcaggcttttgggagtcagctagagtgcgtggatactggatgcctttctgaatgtgtgcttgtgggctgtccctactggcagggtcaggctcgtgtgcttgcatgggcagcttggcctccagaggttcctccgttgggggtaggggaggaggccatccttgcagctcgtcgcttggaggacgagggctccctggggctctagcctctccttggctcccagcactcccttcgtggcccatcagaggtctcctgctgcccctgagcctttggaagttgcggcaggaggaacaagggaggcatagcagcccttaacccgtctcgggttgggctgtgatgcagctggtggggttcccactcctgtgcctcagttgggtccctcacatctcccgaaagtctggggtcagggccaacccccacatctctggtgagtgcgtgtcaggctgtggagctgcatctgtgaccctccgggg

SEQ ID NO: 48493 - DNA, 1032 bp, Homo sapiens
ggctttcacctgaattcaacgagggtgaaagttttagaaactgcagtaagatctcgcaaaggtgaatcccaagagtgaagcgtgtgggtttctgtgagggcccagatctctctgaccttttgctgtctggtacaaccacgcaggaatgtggccggctggaacgggggaggggggtgagggaggcgaggataggtgtcatgtagggaggagttagagcatgggtgttaaaggcacaggaatctcagtgtctacatttgtgaagtggaactagtagtagaattcactttgtgggattgttgcaaagaccagttacgcaggaacccatcaagttatgcttagcaagtgataattgtcatcccttggacagataaataaagtgaaaatcagagaggttaagggcattgcccgagtcgaacagcttgtcagggatgatgtaggcagtggagtcctgccttgcttctgttgttcctatgctgggtgcattggtcagctgtagtgtaagctgcaaacacccaggtagcccctaggttgtgcctttggattttgttgctcattagcacagggaactaaagaacagagactacaagctttgctcaagatctttaggtgaattaataatggaccaggctaacctaaagctgtccttctcttgtgtagtccactattggcaaagtgagggatgtttctgcgtgagtccttttgttgttgggttactgtgctgatcccctgaatcctttcccaaaacaaatactaatcttccaattccttggtaagattagatgtatctctgcattttaggtaaacctaagacttttctttagtgagggctgatacattaaatttcaaaagtagtggcagatgaagcagcaagtttcaggcttggagcaaaaggacacccatgttgaaagagcagaggctttgacgcagttgcctctggcacttggatctctctgcacgttccagacaagtatgtgtccacccccttccctgagtaggcatctccagggcagcctggccctaccctgttgcaca

SEQ ID NO: 48494 - DNA, 1025 bp, Homo sapiens
taactccctgactctgtcaatgcaggccacttttgcctatttctgtacttgtaagtggaagcatacaatagacacatggagctttgatagattttcttaacaaaaaactgcattgatttagcacaccatgatccaactgtgtgtttagaggtgtctcattttagattgaaagacacaagagtaaaaggatggaaaaagataccccatacaacagtaaccaaagaagagcacaggtggtggctatgctaatgttggaccaaattgactttaaggcagaaattattatgcaaggcaaaggaggacatcatgtaatgataagagtcaattcaccaggaagatacaacagccatacacatatatgcaccaaacaggaaccccaaaatatgtgaagcaaaacttggccaaattaaagggagaaatagttcaacaacggtgggagtttcaataccccacttttaataatggctagaaaaacaagacaagatcagaaaagaaatacaatacttgaacaggactataagacagttagagctaatagacatctatagaacactccgaacagaatacatattaaatgcatatgtaacattctccagtctagaacccgttttaagcaacaaaacaagtctcaataaatgtaagacgattggaattatacaagttatagtctccagtgacagtggaataaagttagaaataacaaggagatttgggaaatttacaaatatgtggaaataaaacaacatacttcctaataaacaaggagtcaaagaagatatcatacaaaaggtagagagatctgaaaaataacctaacctcccaaccttaaaaaactagaaaaagagaaacagcccaaagcaagcagcaagaaggaaatagtaaagattacaacagcgataaatgaaatagggatgggggaaaatggcaaaagataaacaaaactgacaaacctttaggtagaacaagaaaaaaagttactaaaataaaaaataaaattgtgacattactactgattttacagaagt

SEQ ID NO: 48495 - DNA, 1030 bp, Homo sapiens
catcacctgcaaaaaataggaatttagcagtacgcttttttctcttctgatgtcttttaagtgtggtgagagtgtagtcctgccttctccttttaaggggagagtgggtaactcaaatgcatcttcatttaccaatgcttctccattatttattaatgcattccattatttgttatgtttgcttttgttttaaatctatccaggtaagatttactctattgatgctctttttatgacataaagaaaaaaaagaaaattaccacatccacttttcaagtgcttcagttgagaagagttcaggctaaattatggtgaaagcatcttagcatagatgacattttaaattcctttaaaaatattagtttgtggcagaaatattggtagtttgcctcaggcaatctatatggtttacttacttgttggcttatcttgtttcatagcagatgctgaatatagattttaaaaattgaattggtttaccctggttttatgttcctgggcaaggtcttctgatcacagtgaataactcttaaggtaaatggttacttctgtttgctgagattttgtcaggtttttgcatctgtgttgggcgtggagttggtccatgagtccctgccctttggaagggaagatctgttgaaaccagcagataagttcatgacatacctgctgaacattcccgttgagtttgtaatgtcttttcttctcccttagagaggacattacaaactcagcaaactgaacaggagtgttcaacagatacatcaggaactgatagggcatgtctttctgttttcctttctcattatttgtttgagtggatatggttgtggacagggacactttaggccgagacctgagctcaagacctgctgtgctacacagcacccagactccctcctgggcatgcactccctgggtcagttctcctgtgaggcaggcctgctggtgccgatgcccatcttgccaatggctgtggggtggaaccagcaatgcagtagctcagtcctcacgttgcctgtggggactg

SEQ ID NO: 48496 - DNA, 1050 bp, Homo sapiens
attccagcccaggatcccttgatctcccaaatgaatttttaaaacaattcacatactaatattaaggttcactttttgtttttataaatgcagtggcatttatctaccattacaggatcatacagaatagtttcactgccttaaaaaaaaaaccctatgcttcacctgtttaaatccacccccgtcaacctctggcaaccactgatctttttaccatcattacggttttgccttttccagaatgtcacataattggaatcatacagtatgtagcccttttcagactggcttctttcacttagcaatatgcacttaagatttatccatgttttttcatggcttgattgctctttttttttttcttaaatcacaataatatgggtgaaccacaatttatctgttcacctattgaaagacatcttagttgcttctactttttggcaaatatgaataaagctgctttaaacattcacgtacaagttctagtgcaggtaattaccatttgggtaattacctgaagagtctgatcgctggattgtatgataagactgtatttagctttgtgagaaactgccagactcttccaaatgcgaataccattttgtatttccgccagcattgaacaagagttccctctcctcaggctccaccctcatagttcatcctgtggtgggaagaactctggggattgcgaggagatggcgtaagattctcctgccacttgctgactgtgaaccttactggtgtctctttctaaaacagtgctaataaggtgaagaagtgtgatgagggtttgagatgaagtcaggagaaaacccgggctgcagccatgctctcctgtggctttcagcccagcctggcccagactgctgtgcccactgtgccatcctcccctcgtttggaacagatgccgtctggacagctgcgtggcagggcccccaagctgtcccctcttgccctgactacaagctgttgaatggagatttgtgtcagggcagccagctgccatggaagatgagggctggtccccaggccccaggactggcttct

SEQ ID NO: 48497 - DNA, 1028 bp, Homo sapiens
tagtagagacagggattcattacgttggccaggatggtctcaaactcctgacctcaaatgattcacctgcctcggcctcccaaagtgctgggattacaggcgtgagccaccgtgcccagctgctgttactctaaccttgagaaattttacaagttccaagtgataactaattataatttgtatataaatatgactccaaatgtgtcttggccatttgaatttgctattctgcaaattgcctttataaagcatttatttatacatttctctttttggattgtttatcttattaatttaaaacagctgtttatgttaaagggagtaactccttttttaaaaaacatccattccttgtctcgactttgcatgtgatattatcccattcacataattttattttctacatgtttaaatgtgtattcttttacagtttctgaatttttaatcttaaaacttaaacttcacatataatattttaaagtggtcttctgtatagtttgtgtatcttttgggaaaatgttgctttgctgaaccagcgtgcaatccccaaactcctctctcactgctttatcttttttttttttttttgagacggagtctcactctgtcgccaggctggagtgcagtggcgcaatctcggcacactgcaacctctgcctcccgggttcaagtgattctcctgcctcagcctcctgagtagctgggactacaggcaccctccaccacgcccggctaattttttgtatttttagtagagacggggtttcaccatgttggccaggatggtcttgatctcttgaccttgtgatccacccgtcttggcctcccaaagtgctgggattacaggcatgagccaccgtgcccggcttactttatctttttttaaatttaacttttattttaagttcagtagtacctgtgcaggtttgttacacaggtaaacccatatcatgggggcttgttgtacatattatttcatcacccagaacccattagttatttttcctgatcctctccttcttcccact

SEQ ID NO: 48498 - DNA, 1029 bp, Homo sapiens
taaagcagagaaccccaaatgattaatgaagaacaatgaatttttgatagaaacaaaagatcagaaaaaggaagcttaaatggagaaaatgaaaagactgtatgtttgggttcattgataaaatagactgcagtgactaatggaaagatgtgtgttagtcccttttcgatggccataacaccgggcaactctgtttccatggccgttcagggacaaagtttctagaaagtcattgtaccaccatcccctagggcaagggctgacaaattttttgtaaaggcacaaaagtaaataggctttgtggaccatatggctactgtcacaactgcttatttctgcagttgtagccccaaagcagctatagacaatacatcaatgtatgggtgtggctgtgttccaataaaaactttatggacactgaaatttgaatttcatataattttcatatgtcgtgaagtagtattcttcttttaattttttgaccatttaaaaatgtaaaatacattgttagcttttggatagaggcctggatttggcccaagggcttcagttttctgacccctgccctagggcattgccagcttcatagaactgggtgctgccaagttggaatatactggtgggaaaagaagaggtttgtaggagacaaacccactttcttaagacattggccttatcacttccactgatgagtgaaaaagagttactcagtgccacctagtgacaaatgaagctgaacaaacctagtgttgtgaagcagccatgtgcttggctacaagcttaatattgtgaaggaagggcacaggtttgatgaacaactttcagtcttctcttctgatgtctagttctttcctgttatgtcttctaccagatgcatttatcacatcagtaccccaaaccagggatgaagaattgaaccataggccagacacggtggctcacacctgtaatcccagcactttgggaggctgaggcaggcagatcacttgaggtcaggagtttgagaccagcctggccaacatggtgaaa

SEQ ID NO: 48499 - DNA, 1070 bp, Homo sapiens
atattttaaaatcagttacatgtcactgataaaagacttagtattaccatgatgttatttttcttgaggcaacatgatgaaacccattgtctacaaaaaatccaaaaattagccaggtgaggtgtgcacctgtagtcccatcttctcaggaggctgaggtgggaagactacttgagccaaggtggtggaggttggagtgagcccagattacaccacttgcactccagcctgggcaacagagtgaggccttgtctcaaaaaaaaaaaaaaaaaaaaaaaacaacgatttttatgaaagttggagaaccaggattaagactgggtgggaactaagaatgacaggtacttttaacaatacagctgggatgctgttgatgacatgaatgaaccccactcttactgtagtcatttgctcaagattcaaagtcatgaaaaagagtagaatggaccaaacttaggtactaagagtccccagcctggcagtgaaaacagtatagttcctttgactttaatatggggaaacaggttcctggattgacgatctcaccaaaactatacacaatttttttttattttttctcagacctttcagggatgaatatatacaatttctgagaaagaaacctgagtacctttaggaagggaaaaggaatgctgaatatccccaaataacatgtcttacatgtttggtaagacttactgtaccctgtcctagaagatagaagatgccctgcccttagaagacaaagagactgtagagctatgccttctaaatcttaagccactcttcagataatggatcccttcatggtcagcccaaacatctcaagaacttttaatttgtaccgtttgtctttttttccatttatttaataccacaaattcactttattattatgaagccaatatctacatcttctcacaaagattctcttaagaaatgcagaactggccgggtgcagtggctcattcctgtaatcccagcactttgggaggccgaggcgggtggatcacctgaggtcgggagttcaagaccagcctgacaaacatggagaaaccctgtctctacta

SEQ ID NO: 48500 - DNA, 1041 bp, Homo sapiens
atttttctctcagggcagcccggagagaaatgaggccgtacatggtaaactgaggcagaggtgggaggggtgcacaggtgccgctaccgctctgccccttgcatccctgaacgctgcctcacccttgccgggttggcggtgttgagcccgggactggaggctgcttgagaccacctccttcccagctgaggagcgcggcctttgcccctcctcctcccgacctttccggggctacctaaaagccgatcaagccgccggttttctagctgttcccatttctttaccgcccccttcctctgccccgcctgcctctgtgccctccgtcacgtcacagcccgctggctctcacgcctcttttggtctctctgcgcacatctcggtggcgtctctggtgccctcacatcactgtctggaatcttgtttggcccacgccgtctgcctctgccccttctctcacctgtgtcgtttgatccctccgactctcgtctctgggggtcttgcctcccgaactctccggctctctccttccagggcgtgcgctccgctcagtctccctcggtctcggtcggccggcctctttcacgtggccccctcctttttggcctcccttccgcctccctcccttctgggtccctccctccggctcagcctaggggttgggggcggcggcgcggggcggggcggggcggggcggtgacgcggggctggccgggcaagaggcgcggcggcgtggggagggggcgcagtcccgggttcgaccggccgagccccgcgcgccccgcccgcgccctgcgcctccgcccggccggccggcgggggagggggcatgagccggcgcccgcgcgccgccccgagctgcgggccggcctagagccccgcgcgggccccgcgccggagccaagccgtcgccgccgccgccgccaaaccgcgggcgcagcagtgggcgccgcgatgcagcggccgggggagccgggcgccgcgcgcttcggcccgcccgagggctgcgcggaccaccggccgcaccgctatcgcagcttcatg

SEQ ID NO: 48501 - DNA, 1075 bp, Homo sapiens
ctattttgtcctatctattgataactaaattcagaagctgtactaaaagtaaaagttataaatacatcttctcttaatttatttttttttgagatggagtctcgctctgttgcccagtctggagtgcagtggtgcaatctcggctcactgcaagctcctccttccaggttcacgccattctcctgcctcagcttcccgagtagctgggactacaggcgcccgccaccacgcccagctaattttttgtatttttagtagagatgggatttcaccgtggtctcaatctcctgacttcatgatccacccacctcagcctcccaaagtgctgggattacaggcgtgagccaccgtgcccggccccatcttctcttaatttttaaagagcaatgattacagtcagaaaaactcatttgatggctagtattcttgaattaaaagtacgatgccaaagtgaaatctttttggttttcaacatcgagctttttcatgtcacaattatcttgggattcttttccacttactgcatattgtgaaaactcacctgaactcaaaactctaggtaaatctaaaaacctttatctaggaatccatctttaattcatttgtaaaacatactttctctgcacacatttcctttctcttcttttaaccttaatatttggatttagggagcattaagttctttgactgtaaagtgaagaaaaagatacgagatcaaaggaatgggagataataaagaagaggccactagttaaaatgtaaaatttcaataaagagtaagttaagacagttgttcatgttattaccaagggtttcaaacaccaagggtttcatccaggtcctgctgctcattggagaaaaagccaatcactgaggcgacaagcactgccaaggaagaaagctttaacctggtgctgcagcccaggagctgggaactcagtctcaaatccatggcttgactaataggggcaggaaagaaatgtaacaatgtataagagaacagaaattagggaggagcaggaggcatatggtgctgtgatttgttatgtttgttatttgatacttcctgaaggtc

SEQ ID NO: 48502 - DNA, 1084 bp, Homo sapiens
tatctttatgcaacttgctttcttcattcattcaacttttgagatttatgtatgcagataatgtaggtacagtttattcatttaaactgccatatagcattccattctgtaaataaataatcatttattcatttctgtacaaattcacagcaagattgaatctaccttttacaaacagtcctgtttgtctccctaacctgtaagaagaaatggtagcacgttgctaccagttgttctccaaagtgtttgtgcttatttatttatgttcctatcagaaacatcctggagttctcttttctctgtaatctgatggatttcccactacaattttttttttttttttttttttttttgagacggagtcttgctctgtcaccctggctggaatgcagtggcgtgatgtcagctcactgcaatctccacctcctggattcaagcaattctcctgtctcagcctcctgagtagctgggactacaggtgcccaccaccatgcctggctaatttttgtatttttagtagagatggggtttcaccatattgatcaggctggtctcgtactcctgacctcaggtgatctgccctcctcggcctcccaaagtgctgggattacaggcatgagccaccacacccagccctcccactacaaatttgatgttatagtttgtattgaacaacaaacaacacattgaagtactaaagaattaattagggttgaaagtaatttctggacatcagaaaatggggataggaatgccctttcaaaagctactattttgattaactttgaataactatttgaccatttcaagtagttacatcaaagaaataaacagacaaccaacagagtgggagaaaatattgcaaactatgcatctgacaaaggactagtattcagaatctacaaggaactcaaatcaagaaaaaagcaatcccatcaaacagtgggcaaaggatatgatagatatttctcaaaagaagatgtacaaatggccaagcatatgaaaaaatgctcaacatcacgaatcatcagggaaatgcaaattaaaaccacaatgagataccaccttactcctgcaagaatgg

SEQ ID NO: 48503 - DNA, 1002 bp, Homo sapiens
gaataaatttgttccatttttttaagttagagcaattggcgtatttaattgatattcacagtatttgaatagcatcccagaatgcacaaataatatgctatcatgagaaaattacatatactgagatgtaaatgaaaggaaattctttttttgaacttaaaatatcatttgtaacttatgtgtaattttttaattaaaaatcatagggcacatcatactgtaagtttgagtatgcagagtgaaatgagaaaaggattcaggcagattaggcttgaggacaggaggcaaagccccaagagtcagtccaggtagggattataaatggcagggttcgggaggagtggacataaaaatgcgagagaacaggaaactgcaggaagtaacagttagtgggaaacaaagagagaagttactgagaaaacagacacaaacactgacgtgtttcggactgccatgtgaccaccactgaaggatgataaggtttactgagtaggaagatttgaaattatggacaggagcaatatgtaccaaggaaagcaaatattttgcttttcactggatggaaatttctcccttctaggaactcctgaccttctttatgggaccaagcagtgtaagttgtaggcttgtggttccttctgacttcttgtgtcttctccctaggggcaatgatggtgctggggtgtgatgttttcagtatgaagttgtgcttggaggcagtggcaagagccagtgggagcttttcatggagcaggctgcattaacccacgcgctgtgtgcctcctgaagctgtggcagtagtggcgtgacacctgccttcctgggagcctgggaagaaccccaggaagagacagtgaagattgcatctcttgtgggagatagaaaagagttcagtttagtattggcagtgataaatgcttgctgtgtaggcaaacagaatgatgaaacagaagacattaaagacctctttctccccctaattaggataggttctagacattt

SEQ ID NO: 48504 - DNA, 1049 bp, Homo sapiens
ttcctaggtaggttttaattttgtttggaagttttgttttattttgtttttttcattttatttacatggagttctgcttattataattctaattgtatcagattgtttcttagtgatttgccagtgctcagatgggccagatcaagacatctattgccaattaggaacaggatgtttatggtatttactgatgttctccggatgacctgttttatgttttcagtttgttttgttttatgatcatgttggcttttccattaaactataactttaactgagttggcttagttagtaaaacattgaccagctccccttctctatcctccaggccccttctgatgcctcttcccctattgtgccccagcctcagtctgaagggaagcgaatttttaggtctctatgttccagatgtaatctatatttccaagacataagctcactgtatttcaacctaaattgcctgagtaatgctccttggaacatttagggataaatccctgtgaaaagtaaatttaaacagtgacgtctgtagtgggaggtatttcttaatgaatagccactagtgaggatgtgtggatgtctgcactacacgtggctgcctgatcgctacatctgttttgaagttcagtgatttcccagaccacatgttcatttctttagggggctgacatccctcccaggatccagtcattgtgagctggtaactgtaactggcttactctttttgacctagagattattatactttgtcttagtttgactattgttcctatcagatctgacaatattggagtttctataaattagcagcatggcagaggaaccaagtgtatttaaacccataaatcatgatttccaggtcttttaaaagctgtgtggtttgaatagtactttactctatggtagacataaagagtggttataaaaattctggctaatcaggaggcttttgtagttcagctgaaactacaaaataacctcagatgcgtcactcctttgggaatcagaccatccagatttgtcctggctctgccagtgagatcttttac

SEQ ID NO: 48505 - DNA, 1030 bp, Homo sapiens
aaaactactgaatggataaaattatttaaaatttaataattcagaattttttcccttctctttttctaaaaggtaagactacccagaattttgttttattttgaactgatctgttacaagatcactggaaagagccatgaaagaattacaatgtgtgtgtgtgtgtgtgtgtgtgtgtgtgtgtgtacatgtgtgcacacaagcactgacaggtcctaagtccacatctccaggtcgaacctttcccctgagccccacattttcagctgcctgtgtgacatctccacttgggtgaccatgagtatctcaaactaaacatgttccagattaattcctgatcttttccccaaaactttattctccctccaggcttccttaactcagttaaaaagcagcttcattcttcctgtttcctcaggtcaaaagccctggcatcatccttggctgctcttactctcccatctcacctcaagtctatcaatccatccagtctgttgattttatctgtgacacgtgtccagaatctgaccacttcctaccagcctcactgcttctacccccatccacgccactgttgccctctccaggaacattgcagtatctttgtgtgtgctctcctagagtctcaaccagaaggatttttttttttttttttttttgagaaggaatctcaccctgtcgctcaggctgaagtgcagtggtgtgatctcagctcactgcaacttccacctcccgtattcaagtgattctcctgcctcagcctcccaagtagctgggattacaggcgcctgccaccacacccagctaatttttgcatttttagtagaaatggggttttgccatgttggccaggctggtcttgaactcctgacctcaggtgatccacctgccttggccttccaaagtgttgggattacaggtgtgagccatcgtgcccagccaagaaggatctttttaagtgtctctgttcaggagcctcgggtaggttcctgtcttattcaaagtgaaatgcaaagtccatgcttggctc

SEQ ID NO: 48506 - DNA, 1043 bp, Homo sapiens
gcagaggcaaggtgaaattcagagatgaggccagggatgttagcgattcctcttccacagctccatctactatttttattacttttaagtaacaaacacattactgatattttttttctacctgcgttctatttgcttgactttctacaacctcagggtttttttttttaaagattaattgataattgaatttttgtatttgcctgtataggggatatttattcattgcttttccagtatccatctcccctcctttcccgccttcttaatagtaccctgaatttcccagctgtgcatgattcattctgggtgagaggtatcttatgtggctcctggagtgggtcctacctggcttaaccaacacagcttctctgttcctctggccacactggttggtcaagatgagccccgtcaaggctgatgagattcagggctgtaacatttgtttgcaagattgggaagtggattgtatctttcctgatgaacatgaattaagtagcacataatccctgaagttgctgttggtcatgtggaaccatgagatcagagcgtctctggaaatggagttagtcctgacaaaacatagctgagaaaaacagcaagagaaaacaggtcatattcacattgtgtggaccctggatcaagtcttttccaggcataaatgctcgaatttctttccttttctatttgagctgtttggttcaggattttgttactaaaagccaggagtgttttgagataacattgtttggggcataaaaaaacatttctttgaaggtttttgaaactcagggacacatggacacaattgcaagaaaaaaatcttatttattcaaggatgttatgaataaatagtgaatttaataaagtactttcagtttcttaaaaattgctctaatttgtatttgttttttcactgccattcattgtagaagatatatgcattcaataaggcatccttcttcccagcctcagttaattttactcctttgcacaatcctgaagtgagttcataatatatgtttgtcactgatatggtttgg

SEQ ID NO: 48507 - DNA, 1035 bp, Homo sapiens
taatataaatttttctaaaaaggaaggcatttatttcaatagacgctcacctgtccaaatccaatttttttgtttactgataaagttgtaggtggagtaattgccatagagaagagaatacaccctatctacacttccaaaaatgaggattgccacatttagcaaataaaaatatggtatccccagttaaatgtgaatttcagaaaaacaatgaataattttttagtgtaagtatgtcccatgcaatatttaggacacacttgtggcaggtagaaaaggggccaacaaagatgtccatggacagatattcctaacacttggaacatattcccttacatggcaaaaaggattttgcggatgtgattaagttaaggcttttcagagggcaggtcgtcctgggtgaagtgactggtccaaatgtaaccacagagtccttagaggagggaggcaggagagccagagttagaaattgaaggtggaggaaggaccaaccagctgaaggatgcagtcgtcttctagaagtgtgggaataggcaaagaaacggactctccttgaagtcttcggaaggagcatggccctcctagacactgatttgagccccaggagaccccggggctagctacctgcagcagtgttagattaatttgtgttgctttacaccactgtaatttgttacggaaccaataagaaactcagataatgcttatactgaaaaagttatttgttgtttatctgaaaatcacatttacttggggcatcctgtatttgtcctggcagcccgacctagaacgccagagcaggaagcagccggcagtggtgggaagcactgaaacagcttcgggaggtcccactgtctcgcctggggagtctcttcagattcaggcctccagtccctccagggaaatctgaggagctgtctggcctgggtgatcactgaggctccctcgcagtccgtgagcctatctaagaaaaagccttttgccaatacgaataaaacaaccagcctaattagcgaatgttcacagttcagacaa

SEQ ID NO: 48508 - DNA, 1089 bp, Homo sapiens
atttatctctgggttctctattcagttccactggtctatatgtctgttttttatgccaataccacgctgttttggttattatagctttgtagtacgttttgaagtcaggtagtgtgatgcttcctttgttctttttgcccaggattgctttggctattcaggatcttttgtggtttttttataaattttaggactgtttcttctatttctgtgaagaatgtcattggcattttgataggaattacattgaatctgtacattgctttgggtagaattgtcaatattaattcttctgatccatgagcatggatgtctttccatttgtttgtgtcctctccaatttctttcatcagtttttgtcattttccttacagagaaatttcacctccttggttaaagttattccttgtgtgtgtgtatgtgtgtgtgtgtgtctattataaatgggattattctcttgatttctctgtcatattctttgctattggtgtatataaatgctactgattttttttttttttagacggagtctgtctctgttgccaggcagatcgtgcagtggcgcgatctaggctcactgcaacctatgcttccccaattgaagtgattctcctgcctcggcctcctgagtagctgggactacaggcccactgccaccacacccagctaatttttgtattttttaagtagagatggggttttaccatgttggcaaggatggtcttgatctcctgacctcatgatccatctgcctcagcctcccaaagtgctggggttacaggcgtgagccatcacacccagcctcagtgatctttttaacgagttgttgaattcagtttactagtattttgttgaggatttcccaaccatgttcatcagtgatattggcttgtagttttcttttttggtctggttttggtatcagggtaatgttgaccttacagagtgagtttgcagttattccctcctgtccaattttttttttttttttttttttttttttttttttttaggagtttggttagagtttggtttagaattcagcactaaagtcatcaggtcctgggcttttctttgatgagagacatt

SEQ ID NO: 48509 - DNA, 1006 bp, Homo sapiens
gcctcttttatttcttgaaatatatttcttcaaatatattccaactggtcattgtgcattctgtgcatgggcattctttttttaattattatttcaataggtttttggggaacaggtggtgtttggttacatgaataagttactaagtggagatttctgagattttggtgcacccatcacccaagcagtgtacactgtacccaatgtgtagtattttatccctcaccccctcctatcctttcccccaagtccctgaagtccactgcatcattcttatgcctttgcatcctcatagcttagctcccaattgtgagtaagaacatacgatgttcggttttccattcctgagttacttcacttaaaataatggtctccaattccattcaggttgctgcaaatgccaatatttcgttcctttttatggctcagtagtcttccctggtgtatatatacaccacattttcttcatctactcgttgactgatgggcatttgggctggttctatatttttgcaattgcgaattgtgccgctataaacatgagtatgcaagtatcttttttgtaaaatgacttcttttcctctgagtagatacccggtagtgggattgctggatcaaatggtagatctacttttagttctttaaggaatcttcacagtgtttaccacagtggttgaattagtttaccttcccatcagctgtgtaaaagtggttcccttttcaccacatccatgccaacatctattatttttcaatttttttattatggccattcttgcaggagtaaagatatcgcattgtggatttgatttgtgtttccctgatcattagtgatattgagcattttttcatatgtttggtggccattcgtatatgttcttttgagaattgtctattcatgtccttagcccactttttgatgagattgttttttcttgctgatttgtttgagttccttgtagattctggatattagttctttgtcagatgtatagattgcaaagat

SEQ ID NO: 48510 - DNA, 1021 bp, Homo sapiens
ctcaagcggcctcctgttcccttgggaacttgagggggtgtcgggatgtgttccctttctgcactcagctgggaaagagctggtggagaattttcccttctgagcagagagagaattctcttcacctcccccgccccgcccccgcccactcccacagccaccagttctctgggcaaccctagttagcagtttgggcctttctttctgcacacaattgacctggagggcctgagtctggtccattcagaggccacatggaacactctgtttttgtcactgccctctcatcttctagaagcataaccttatccaacagaaagaggcaaaagcgattgggcccgacctctcccagtgacagtgtttgcacttcattccatggcacagcgtcttctgtaactttaagatttaacatttcagattattttccactggggctcccatcgatgctgagttctggctacttttttcccctgatgctgaaaggttcgattcttccatctatccatcaacaaatcacattgaatgacggtgctcagtgacccaggatgccactggagacaaaacacactatacatattttctggtctccctggaaaattagtgcaaacactttcatcactgcggagaagggaaatatgcgcggagctgtgaaaatctgctttgttttttgtttttctaagaggagatttccccctccttcaaacagtgaaatttatattgttctttgtctgcaaattaaccagttaagtagaattcctgtatgtctctttcactttctgcaagccaaggcccctctttctctccaccctgtattcatacatagtccaggatcaccccctgtccccctccaatgctgcttgaaatttcattccattttcgtcctgacttgttcaaagtaacatttaaaatattttaattcaaattcttatctcatccatcctgtttaagttccattttaaagaatcttcttttcttatgaatggtctgtttttgattcagtggaaaacttgggctgctcaac

SEQ ID NO: 48511 - DNA, 1034 bp, Homo sapiens
agctagactctcctcgtgtctacggcatctcttatgatcattggctgccatccaggaccccaatttgtgcttcagggggataatctccttctctcggatcattgtgatggatgctggaacctcagggtatggagctcacatcagttcatcatggtgggtgttagagaattcggtgacatgcctagtgctgagccttggctgggccatgagagtctgtatactctaaaaagcatgcagcatggtgcccctcttctgaccaacacacacacgacccctcccccaacacccccaaattcaagagtggatgtggccctgtcacaggtagaaaaacctatttagttaattctttcttggcccacagtctcccagaaatgatgttttgagtccctatagtttaaactccctctcttaaatggagcagctggttgaggctttctagatctgtttgcatcttctttaaaactaagtggtgagcatgcattgtggtgtagaggcaggcattatgtaggataagagctccggggggattcttcatgcaccagtgtttagggtacgtgcttcctaagtaaatccaaacattgtctccatcctccccgtcattagtgctctttcaatgtgatgtgggaaagcaggaggatggacacaccccactgaaagatgtaggcaggggcaggtctctcaaccaggcatatttttaaaagttgcttctgtactggttctcttcttttgctctgaggtgtgggctccctcatctcgtaaccagagaccagcacatgtcagggaagcacccagtgtcggctccccatccaaatccacaccagcaccttgttacagacaagaagtcagaggaaagggcggggtccctgcagggctgaagcctaagctactgtgaggcgctcacgagtggcagctcctgttactcccttttaaattacctgggaaatcttaacagaaaggtaatgggcccccagaaatacccacagcatagtgacctcagaccctgatactcaccacaaaacttttaagatgctgat

SEQ ID NO: 48512 - DNA, 1072 bp, Homo sapiens
taccaagtagagagttgcccaactgagttaaatgttttggtctgtgttttattttagttcttagtttgattttagcttttcctttgttcttagtatacactttttcaggcactaacgttatcattatgatataaaagctcaatgtcaagtagagtttcttttgcatatttactttctcgtttaacacaaatataacaagcaccccataagtgccatttgcacaacagcaaataatggggacccccatatccctctgtgtagcctaaggtcttttaggggagagacaagttcacaggcaaaaccaggggaaatgcaaggtgtgctggggtctcatgagttacaggagggtctcgctcagccttgtgggggatgctgaatgaggaaacttagcctgaattagagcccccagctggaaacctggcagctggaatcccagcgctctcctctcagccggggttgttcccgcccagaaatatcagggttcctctttcaagcacttaaaagggcttcccattttctaggatgggatggattaacctgataaaggcctcaccaaggtcaaataaatgagcagacactgtatatgctaagccgtcagaaatctaattggcctgtttatgcttcagctagatggatgggatgcaaatgtcttaatgtggctgctgatacatgccccagccgaaagttccagcagtttacattagaccaagacattggctgcttggtttttactaatgtagttcagaagtttctagtgtttacaatagctgtgaggtatttgtatttttatggggattctctctcctttcatctgatgtcaaaacatatatagacatggcagcactggttgcctgttccattttatgaaccagaggaccattaacagatagatatcttgccccccccttcccagaacatcctgagcctctcccctaccccagcccacttccatcagagttgccctagaaatcattagttccagaaacgcatccctgcgtggagtctgtgccctccagccatgcagagtgtctgccagaggctgtccctggctgacaggtttaccttggtattc

SEQ ID NO: 48513 - DNA, 1033 bp, Homo sapiens
caacatggtgaaaccctgtctctactaaaaatacaaaaaaaaatagccaggcgtggtggtgcacacctgtaatcccagctacttgggaggctgaggcacgagaattgcttgaacctgggaggtggaggttacagtgagccgagatggcaccactgcactccagccttggcaacacaagactgtctcaaaaaattatatataaaacaaaacaaaataaaaatgcgattactatgattttatcctttttcctatgggagaacaacccctacaagataaatcagtttaagtgtggtggtgaaaacaaggtattaactagacagcttctctttgtccaggaagagtcagtggtgctccctggggtctgaccttgtgcctcttctgttccaggtagtggtgatcttcctttttctgggcttgctgggggtcagcctttatggcaccacccgagtgagagacgggctggaccttacggacattgtacctcgggaaaccagagaatatgactttattgctgcacaattcaaatacttttctttctacaacatgtatatagtcacccagaaagcagactacccgaatatccagcacttactttacgacctacacaggagtttcagtaacgtgaagtatgtcatgttggaagaaaacaaacagcttcccaaaatgtggctgcactacttcagagactggcttcagggtaagacggcgtgggaggctctcgtcctttcggtcttttgcgtgttcagcttcaacaggttcctttgtcatgattatgagagcgttagattagaatgtaacactgacgtgtttcatggacttttaagagttgctcaagattcttacatgaactgtttctgcagcagcctcccagatctggcttttacctataaaatgatgcagataattcagatgagcttctgtgagaatgtacaagtgcacgtcaggaaaaggggagcatgttgtaacaggtggagccgaggcttctggtgctctttcctcttggatagacggtggctagtttggtgaccacata

SEQ ID NO: 48514 - DNA, 1046 bp, Homo sapiens
ctcactgcaagctccgcctcccaggctcacgccattctcctgcctcagcctcccgagtagctggtactacaggtggctgccaccacgcccggctaattttttgtaattttagtacagatggggtttcaccgtgttagccaggatggtctcgatctcctgaccttgtgatctgcctgcctcaggctcccaaagtgctgggattacaggcgtgagccaccgcgcctggctcgtacactgttttatataccacttgcagtatcatgattgtataaatactaaatatctattgatctatccaaaactacaacataagtatttttggaatatggaggagtgggtgctgagtatgcatgggagaagggaggctgaggtgaaggtgggagagaaggagacagtgaaatattcatcttccaaattggaaactcaaatagataatgcctaaacatgaaatatcaatagaaatgtaatatttaaacatatggtggtgcttctgggaaaaagaaaagaggatggagaagactgtttgtttgtatgtttgtttgtttaaacaagcaatatggatgaaattacaggctaagctgctttagcaaaaagacaccaaaatacagaagcttaaatgaggtaggtataagtttctctgtttgatatgatctcaagagaagcaatctgggttggaaagtcacctttatgatcctcaaaacgtagcttccacctgtgggactaaggcagccattctagttttgtcttcccagccagagggaaggaggacagggtcaggagagcacatgtgcataactgataggaacatgccccagaagggccacacatccatcggtcaggatgtgggcataaggaccacagctgcatgggaggctgggaagcatagggtctagctgttagccacgtgctcagctaagacactggagccctgatattaaagaaggtgaggaatgatgctagtgctcaaccagcagtctctgtcacatcagctttgcagaatcatttgattctttcaactaggtgcatatacaacttcaatacaaatg

SEQ ID NO: 48515 - DNA, 1049 bp, Homo sapiens
cctagatgatcccagtgggcctcaaaacccaccatgggtgatgtgcagagtgcctcagggcagttaggactagaagacctggcatgcacggcagtctaacaggaaggagtttagttttctatttacctgcaactgaatatagatttccaccttgcatgcaaaagcccgcttttcagtcagcggcattcagagatctgatgctggataacagcttcttcgaaggaatgttcttatttttttgaaaatctgaaacacaagaaaagtattattcttgggcaccaaataaagacctggtaaaaatccttattgccacagaaagtcatcatcttctaacattgtgagagatagaacttggaggcagcaaacactctgcaataatacatcaacattcagatctctttgaaagaaagtttcccattatagacttggctacttgttatactctaggtgaagaccacctggagggaaatgtctacacagcgactcatttcttctactagaagatgtcaaaagtagaagctgcttagtcatagcaagattgctgtcaccagtgaacatgtcaactgagtcatacaaggaacgtctaaaatggacttctcagaagttgaaaatgttgcttctcttgattagtagcgcaggaaggggagaaataggtattccttgattaatgggcaaacacaccatttcccagagactcagacagttggagaaacccatgaatgaataagtcagagaggaaaaaaaatagtgccgatataaagaaccgtttattttctccttgtttccatgaagagtgcctttttgtttgcagatcctcactactgcagcaacccagagaatagaggaaattatgccaatagctaaagcaaaacttgaagatttctttaaagtacctaattatggttttaaaaaattctccatctcgatttgctggaagttgagacccaggtcttttgcaagcttgtgaagtgaaagaaatttctaacaaccttccctggaccaaaccattctctccaatctccgtcccttcctgtcttttcattgctggt

SEQ ID NO: 48516 - DNA, 1049 bp, Homo sapiens
aggcatttcaaaacaggctcatggaaggatgattaaacccaccaataatttgccaaaaaatagtctctctttatcttcacactgcaaaagtcaaatatatatctgtatgtggttgacagatctccagaattgtgagttaatctagcaaaaaggctccagaaaaaaatagatatgaaactctaagacaacacaagaaattaagtcttttgagttttagttagatgattttaggttgcagcatttctcccttcatacgtcgttccagccaataaggaagcaaagatgagtgaaggcaagagaaagaagataaaatagacctgtccttccttgccacaaataacctaaatcttaaagtttaaaactcaacgttgcacaacagtgtgaacatacttaacactattaaaccgtacacttaaaaatggttaagaaggtacattttatataatatgttctttcttatcacagtttaaaaagcaaaacacaacaaaaaagctccggccaaagaaaggaaaatttgaggcttgaatgaggtatagtgaaagatatatagagtcagtgttagaagtatatcatggtcccatataatgaatatcattacaccttgaatattcaccaacaccatttttacttcatagactcaataaatagactcaaataatagaacatttaatacctcatgtcagataagtataaaaatcctgcaacaaaacaccaagaaatactggttgaaacatgtttataaaaactctcaaaatataaaagcgaatgcttatacactgttgatgggaatgtaaattagtacaacctctatggaaaacagtatggagatttctcaaagaactaaaagtagaattaccatttgatgcacgaatcccactactgagtacccaaaggaaaataaatcattatattgaaaagacacccacacttgtatgttaccacagtaaagttcacaataacaacgtcatggaatcgatctaagtgtctatcaagagatgactggataaagaaaatgtggtatataaacaccatggaatatattgcagcca

SEQ ID NO: 48517 - DNA, 1051 bp, Homo sapiens
taagtttgaaaagcacttgtcatccctagcatgttaacttgggaacttttgcacatttcatatttctcatttgctgaaattgagtgattaatcttgcaaagtctaggtaacatagtaattggtaattttaaaaatacatattaagggccctgtaatgagatttggcacttggatttttactaaagggacacctgcagggttgttttgtagtgaaatgttttagatcttttgttagcaaacactacattttaattgtactgcttgtttagaattattagcaaatggaagcctccatatttatattttcagtgcataaagccaccttcttgctttacttcagagtaacatgccaagctattttgtgttcactaaatttagctatcagttaaacactgcagaaaatattagctactcaaataagtaggcttctgaaatagttttaactgcaagtgtgttaacttgtgtggtggtttgaagccatttttccaaataaagttattaaacaccactttatgtactgaagcatgaacagaaaaatcaagagctgagcagaccacctcctttatgtaggcaaaacttccatcattttggcttttgttctaaacagaactaaatgacatgcatagcatggtaacttacagatcgcttaattggagtaaaactcagagtaatagagggaaatatgggctcttcagtgcctttttagcttttttgagttgaagacgttcctacagatgtagtttaaacattacaaagtaggcttctttatccaaaaatcccaatgtgtcatagtacacagatagtttaaaatatgtagccacggggaaggggaggcatgtaaatgtcttgaagaggagaaaaagtatgaaagaagatacgatagttacgaataatgtgtatgatgaggacatactttaaaaatgtaattcctctgtacagtaaattacaaatctttagggatttttttgtaataagagaatttatatttgtaatggtctaagaatttttttgtaatgtggtatatagaattttaatttggagcacttataag

SEQ ID NO: 48518 - DNA, 1050 bp, Homo sapiens
gctgagttgctataaatgtattttctggagttgtgacaaagctgatctgacagtttttgcttgattttttagtcatctgtggagggatgggccattggagttacctgcctcaccatttttactgatgtcccttaagaaaggcttttgctttgtttttagagacaaaacaaaaatgttttgtgctatgttgcttcgaactcctggcctcaagtgatcctcctacctcagcctcctaaatagctgggactataagtgtgtgccgctgcgcccagctcccaagaaagatttttgaaagttatattatgatacgttgctttaatgagtagcgttaaataaattatattaatgtttataaaaattatcaacaggatggaatccgacgtggtaggcccagagcagatactgtccgcgatttaataaatgaaggagagcattcatccagcagaatccgttgtaacatctgtaatagggtgtttccacgggagaaatcgctccaggctcacaaaaggactcatacaggtaagttgagcaaattttatagagactgccagaagtaacactttttttttttttttttttttttttttttttttttgagatagtctcgctctgttgcccaggctggagtgcagtggcgcgatcttggcttactgcaagctccgcctcctgggttcaagcaattctcttgcctcagcctcctgagtagctgggattacaggtgtgtgccaccacgcccagctaatttttgtatttttagtagagatggggtttcaccatgttggtcaggctggtctcgaactcctgaccttgtgatccgcctgcctcggcctcccaaagtgctgggattacaggcgtgagccaccgcgcctggccagaagtaacacttaactgaatgctgatttgatattgagtaataaattaactttttagttgctttatattttcttattaccactattagttgtgaagttttttaaaaaggcagtatagtcagtttctttttggtggagagtggtggttttatgaatactggttacatgtgatttctaa

SEQ ID NO: 48519 - DNA, 1050 bp, Homo sapiens
tggtaaatgtgttgatggaaaatcctctcaattctcaagataatttgcactaaagtgcaaaaatactttcctctgtcaagtatttgcaaatggtttcagtgaatataatcttatttttttccaactattttcagagtaattcttcaatccagtgttcagagctgtaaaacatctgaacctaacatttctggcagtgcaggcattactaaaagaaccaccagatctgcttcaaggaaaagcagtgttaaaaggtgagaaaagaatcctactcttctgaaaagttgcaagcgtttgttttccagtttaatatttggaccctacctctggagactgacatgaaattaggagaaagtagagtctctgtgatgggaaattcatcaaatgtgtattccttgttcattatctaagaaaatctggaccattttaatgtaggcttttgttttgttttttagaagtaattctcaacactggaagtatggtctctgggtcatgatatgggaaagttttaagttaagaatttccaaagctggctgtcaggacttggaggacatttttctaggtgtatatcagatacagcatcattgctggacgattagctgcaaatgaatgtgatggtagaaatgagataaccagagagtttgaagatccttctctacctagtgactctttgtcctcttggccacagcccacacccgaggcactagttctttcactgtcgtcactgtcttcagtgagtgtaggcagaatttcacaaggaaaccaatgtgttctgtggccacgtcggtgactctgttgtctttggatatttctcatgaagtggacatgtcatttttaaagtattctgaaaacagatcccatctgaagagagaataaatagcccaggagtggaagtggggatagatggctcaggagtagaagggggcaccttttcatcgttgcctggtgttggcagcccatgcagtcctgtttctgtcctcctggtaaaaacgatctcttctaatagacatgagcgacctgaagataatcagaaccagactttaaaatgtcctg

SEQ ID NO: 48520 - DNA, 1076 bp, Homo sapiens
cccagaaggcgggtgtgtccgtgtcacggggtccaccgccacccttctgtgtctgagctgcgttcttccttctctgaagctttttccttaactcatattttaagaatttcttctcttgtctcctcttggacttggaagttatgaaagaatgcaaaagttccttgcaagatctcttccaaagaaaaattccattgcaaccaactctggtactttgtggtttcactgagtattttcacatagctgagaaagatttaaaaatcaagctgatttcactcttcagaattaggcaaaacctgcttaacttgctcctatttatggcattttcttgaatatcttacaaataaaagcttattgtcgcgcattcagacctgctgtatttctgagatagattaaccttttgggtgttttcttctttacttctcttagtcaactacgattgccacatattctgactcaagagcatcatgcactacatagagttattcttctcaaactgttccaagtggcaaagatgttctgaatgggtggagcagttgcaaataatgcttaggcactttgtggttgaatgatcattcccagggtaagtttaaacatggtctctatcaggctctcttcttttcagtattccatgtaaactataccttctgttgttattggtaatgacgtttgccattgtatttctagacccaagcagagtattcagttcagcctgactaattatttggaattttgagaagcaaaaagcttgtgacagttacagtggtgttaatcagtatcatctttgtagcacccccatgtctttctctcaaaagggttttatttgtaaggtggtgactcctgagctccaccatcctctgtcatcaccacccacctctgctggcagtggacgcaggtggtgtggcatcgtctgctaagttgtttccagtgaaaagctcctgttatgcagcatgcctggagaattaggccataacaacacttcaggcttctgagtcagactcagagatagtgggaaagccttctctggaggctgcagggcctcagggtcacctttgtgcacgctcttgtggtgtccggag

SEQ ID NO: 48521 - DNA, 1034 bp, Homo sapiens
tagctgggagtggcggcatgtgactgtaatcccagctacttgggaggctgaggcaggagaatcgcttgagcctgggaggtggaggttgcagtgagccaagactgcaccactgcactccagcctgggcaacagagcgagactccatcaaaaagaaaaaaagaagagccctgtttctggttccaggttcctaataaatggccctcaacccagcaccatagtctctgtagtactttattgatgtgttactctaacaataaaatattggcattatgtagagataattgcacatcagaaatcagtgatttcccccgacctgtaatatataaaatactccttaaggaattgaacttaaggtttgggctgggagggaaaatttcttcccatttccatctagctacttttctagtttcaattgggttttttgaaagaaactggaatttcaagagataggtagaacccaaaacttgttactaaccagttcccttgtttaaatgcatacgaaggatattttccaggttgcctcatactgtgctcattatatgcttcctatcttgatcaagagtcggctttggaaaaacactgttagcctgcaagttgactttttagaagcagtgtaattttgaataggtaatacatcgtacaatgcaaaagctgtaaaaaggcataaatctctcttattccctatttctagacaccgactatgaaggcattgatacgtttcttgtggctgcttccacagacttgctacctacgatttcatccacaatcgtatacatgtgtatataggatttaaactcacacatagaagtggtagcgcttaacagtccatcttggctatctttagttttcagttttcttttttttttttcttttgagatggaatttcatacttgttgcccaggctggagtgcaaaggcgtgatcttggctcactgcaacctccacctcccgggttcaaacgattctcctgtctcagcctcccaagtagctgggattacaggcatgcaccaccacgactggctaactttttgtatt

SEQ ID NO: 48522 - DNA, 1034 bp, Homo sapiens
tgtgatcttctggattaatttacatgtattaacatgtcatattccatgtaatttattacatgtaacatgtaaatttattacatttaattcatacatcagcatgcaatttacatgtattagcatgtcaggtttcatgtagtttattacatgtaacatgtaaatttattacatttaattcctttattagcatgtaatttacatgtattaacatgtcaggtttcatgaaaagacctgttgagattttgattcgaattgcatttcttttgagggaaattactatctttatgatattgagtcttcctgttgataaacctgctttatttctccatttatccataagggatatgcacatcttttttttttctattacatttcgtaattgcttattacaagtagatagaaaagctattggtttttgtgtattaatcttctgtatctagaaacattgcaaaactttattatttatttgagtagtttatctgccgattctcatctgtattttttttgttttgttttgagacagtcttacttggtcacccaggctggagttgagtggcatgatctgggctcacggcaacctctgcttgccaggttcaagtgattctcctgcctcagcctcccaagtagctgggattacaggcgcgggccacccatacccagctaattttttgtatttttagtagagatgctgtttcaccattttggtagtgctggtcttgaactcctgacctcaggtgatccacccgcctcggcctcccaaagtgctgggattacaggcataagccaccacgcctggcttcgtgtctgtattttttagtagacagtcatctgcaaacaaggacagttttgattcttcctttccagttttctctgatttcctttctgtatcttgatatcagctagcacttccacttactacattgttaaaaagaggtaatgatagtgggaattttttcttgctttttattttataaggatgcttccaaagttaaggcataaagtgtgatattggctgttggaacagtctttatcag

SEQ ID NO: 48523 - DNA, 1019 bp, Homo sapiens
cacacccggctaatttttgtagttttagtagatggggtttcaccatgttgcccaggctggtctcaaactcctgacctcaagtgatctgccgcctcggcctcccaaagtgctgggtttactacaggtgtgccacgcccggcccttttgtaagttttttttttgagatggagtctctttctgtcaccaggctggagtgcagtggtgcaatcttggctcactgcaacctctgcctcccgggttcaagcaattctcctgcctcagcctcccaagtagctgggactacaggcgcacaccaccatgcccaactaatttttctatttttagtagagacggagtttcaccatgttggccaggatggtctcaatctcttgacctcatgatccgcctgccttggcctcacaaagtgctgggattacaggtgtgagccaccacacctggccccacagttaggtttttagattgttcagagcatgtttagatacacagatatgtctatagagaaatacacttttttttttgagagggagtcttgctatgtcgcatatactttcacatcaacaagataaatattccaagtactatcatatcattagtttcttcctatttcatataatgtagtggaatattttattgtcataaacacttctaaacatggatatctttttttagtggatgcatactgttccattatatggttgcataataatctgtttccttatgtatcctctactgagaaaaatgtacataaattcatttgcataacattgggtagagaattttaggagttgtggacaccatccctagccaagccatggattgctgttatagtttataggttataaacacaaacgctaggccgggtgcggtggctcacacctgtaatcccagcactttgggaagctgaggcaggtggatcacttgaggtcaggagtttgagaccagcctggccaatatggtaaaactctgtctctactaaaaatacaaaaattagccgggcttggtggcgcacacctgttatc

SEQ ID NO: 48524 - DNA, 1409 bp, Homo sapiens
atgcttaatgtgtagcagagagacaagttatttggaaaggttgggaataggatataaagaagaaatgagatctttaaatctattttttattaccctgggaaaaatgaattttagtagccagtattttttgttttccttcccatcttagctactgaatatttgtataacctaagtaaatccttcacattaacattgttataaggatctgtaagttgacatgcaaacatggacagaccatctgaacatctcaaagccacgcctcatctagatcaggcatctttatgaatgaggtaagtaggtgcggagttgttgaggacaaatatggaagagattgtattagagacaaacagactggttcgcaggaactaactaatcttcaaatattgtttctttccactatttcatttttagcttccaaagtgagtcatttgatttctagtgttataagaagaattgacgtccatattaggcagggattacttttgaaaacattttccaaaattgattgtaaccttcctaaactcaaggatattgaactggaatgtgtagatctcatctggactctctagtttatatgaaagttttacgcccttttctctctctcttttttttttttctatagcttttcatggatactgctccaacaaaggtattcagatcattgactactttgcagttcttttatatgactttaaactgtagaatttaatctgttagttgtcattcttggttccgtcctttcctgtttgctggtcttaatcttaggtagcagattcagttttctgtaactgtagagcagcattggtatgtttatgacttaagttgaaatttgtctttatatgaaaggttttgttggtttctgtgatagttaatactgaaagtagtttctgcgatatttcattggattaatatgaatgccaggttttgggtggtagatattttttggtaatattcagtttttctttttaaattgaatttcactttcataggctcttgtggaaagggtactcacaatgagttgttataactataacagctactcctgtttttttttttttgtggtcatttagttctttctagacatttatttgactaatagacagatttatatcctatttactgaatttggcaagagggaaatgtcatgaaatgctaacttgggaaacagggaagtgcttctatattctttttttaatttaaaaagtattcttgccgggtgcggtggctcacgcctgtaatcccagcactttaggaggccgaggcgggtggatcacgaggtcaggagatcaagaccatcctggctaacatgctgaaaccccatcactactaaaaatacaaaaaattagccgggcgtggtggcgggcacctgtagtcccagatactcaggaggctgaggcaggagaatggcg

SEQ ID NO: 48525 - DNA, 1043 bp, Homo sapiens
agcattgtctcctccctccttcctttttaagatctttaaaattcacagcagacattagacagggaaaatttattcattaattcaagaagtatttattgcatgcttactatgtaaaatagtcatgcatattcattgcagtgatggaagtatatttttcttgatagaaaaggaatgctgttatgtagaacactgagtcaaggaaaaaaattgctttttcttcaagagttttgtgttatagtagattatccagtttcaggaattgaagcccatcatagtgtgtagtgtgcatttttcttcttgcctatgtcttggttctcctttacttacacttaaatttgtctgtaatgtgaatttgttttcttgatttctatgcttgcttaattcttcaacatcttcacttctgatattcatgttagttatctgctttaaatctaattcctcaggcactccaacaccacgtggaggcaacagtttgacagtttcaaatgtcactccttaagtggacatacagagtagttgggcacagacatgaatggaaggtggaataattgtgttgcagaaatggtactgatgccagggagttgccagtcagtgcaaattgtaattgctctgtgcttttgaatgggaaggaatgttcccagtttctgctggggttaggaagagctggactgaaaccacactgtggatttttaggatggaagaaaggcattgatgcacacaagtgacatttcttggaaatttctgagatagtctgtgggaatcactgaattgataggacaggggaaagaatttcaagagatcaaaaccctccacattcccctgtgaagaagccaaagggccagagataaaattgggccacaatgatgtagtttctttttggcaaagccatgactacctgacttttactgttgccagcagataaagctgcttcacagagttgtacataaatgatttattggatatctcctagttagtcctgtgctacttaggctaggagatgaataattacctactgaatttgaggaaaatgagcaaaacaagta

SEQ ID NO: 48526 - DNA, 1030 bp, Homo sapiens
acaaggtcgggagatcgagacaatcctgactaacacggtgaaaccccatctctactaaaaatataaaaaattagccgggtatggtggcatgcacctgtagttccagctactagggaggctgaggcaggataatcgcttgaacctgggaagtggaggttggcagtgagccaaaatcacaccactgcactacagcctgggcgagagaccaagacactgcccccaaaaataaataagtaaagaagaaagagcacatggagagcatcatttgtgtgccaacttgggaccattcagtcatccctcagcatccatggcggattggttcctggacctgcagtggatcccagaatctgagatgctcaagtgtctcacataaaatgctgtagtatttggatctaacctatgcacgtcctcccctgcactttaaatcatctctagtttacttataataccaaatgcaatgtaaatagttgttgtactgtactatttagggaataatgaccaggaaaaaaaaatgtctgtacatattcagcagatatgcagctatcctttttttctgaatattttcaatccgtggtttgttgaatgaggatgcggaactcatggatgcagaagaccagctgtgcttagaaaacatgcctcatggccgggtgcagtggcttacacctgtaatcccagcactttgggaggccgaggtgggcggatcacaagatcaggagatcaagaccatcctggccatctggtgaaaccccgtctctactcaaaatacaaaaattagctgggcgtggtggtgcaagcctgtagtcccagctactcgggaggctgaggcaagagaatcgcttgaacccagaaggcggaggttgcagtgagccgagatcatgccactgcactccagcctggcgacaaagcgagcctccgtctcaaaaaaaaaaaaaaaaaatgaaaacgtgcctcatacacttaatctaatggtttaagttaaaattctggtcttgagttcaagaatcaaacagaaactagattgtaaatttat

SEQ ID NO: 48527 - DNA, 1097 bp, Homo sapiens
ggtggaactgattcaccgaggtggcctgagtcattgggaggccaggtggcaaagccccatgactggggactcaggcttcacctgctgtcccttagcagagggcggcccacaggatacctttccatacaatacatcaccaactggagaccatggtctgtgctctagtcatgtatgctccctctccttgcctggttgatctccttagcaactcatggtcttttactctagcagatggatgcctcatctagagactctggaggagctgattttctgtctgcccacccactaagggccttcaagctaataaagatagaaaacaaggcaggaatttttgtctgttttattcacagtgtatctcaaacacatgaagcagtccctcttcgtattaggcactcagaaatacttgctgaaggtacagttatcaaactgaaatctgagcatttttccttttgatgttccaagttatcttttgggtgattattataaataggtaaaatattgctataagttccctattcacgggtattttataaatttttaaaacttgttcttaatcttcagaagtgtacagaactgttcttcagatctttgtcaaccaaaacatgtattttcaataaattgagattcccagttcaaagttatgtctacacatttaatcagtttattagtattgtagagtataaccttttttttttttctgctttgcttccacacaaatactttgtaagtaccagtctaagcaattttgcaaaacaataatgtaaaatcctatttccaagatcaaccagatgggcatgcaaagaaaatctggggatcatcactttaatccaacttaacaatagttcccctcatttttactctccaaataatccttctcacagttcaaaagagaagttttttgttacattcagatatctttgcccttggagagacatgttaccctgaaagaaggggtataacaccttcatgtgacttcctgcctctatgtttgtcttctctgataccttgtcatattaaatgtcttcccagaaccccagaagaaatagtatcttctgtccttgtactagggtagccttttataatgggagagaaatttg

SEQ ID NO: 48528 - DNA, 1050 bp, Homo sapiens
ggaagtgaatttgcaaagtatttctgaatttatcattaataatagaaactattcaacaaagaaaataggttgcggtaatgtatgtgagaattcacctttcaaaattaactttgagaaaactcagactggagagaaattttatgaacataataaaaacatgaaagctctcaattataatgaaaatcttcccaagcatccaaagtttcaaactttggagcaagcttttgaatgtaataaaattggaaaagcctttaatgataaggctaactgtgttaaacataacagttctcacacaggagaaacatcctctaaagatgatgaatttaggaaaaattgtgataagaaaactctctttgaccacaggagaactggcacagggaagaaacacctgcatcttaatcaatgtgggaaatcctttgagaagtcaactgtggaggaatataataaacttaatatgggtataaaacattatgaattaaatccaagtggaaataatttcaacagaaaggcacacctcactgatcctcaaacagctgtcatagaagagaacccattggtaagtaatgacagaacacagacttgggttaaatcctctgaatatcatgaaaataagaaatcctaccagacgtcggttcacagagttcgccgaagaagtcactcaatgatgaaaccctataaatgtaatgaatgtgggaaatccttctgtcagaaaggacatctcattcaacatcagagaactcacacaggagagaaaccatttgaatgtagtgaatgtggaaaaactttctcccagaagtcacacctcagtactcatcagagaattcatacagcagaaaaaccctataaatgtaatgaatgtggaaaaacatttgtccagaagtcaaccctcaggggacatcaaagaattcacacaggagaaaaaccctatgaatgtagtgaatgtgggaaaacttttgttcagaagtccaccctcagagatcatcacagaattcacacaggggagaaatcctttcaatgcaatcaatgtggaaaaacatttggccagaagtc

SEQ ID NO: 48529 - DNA, 1049 bp, Homo sapiens
acataccaccatacctggctaattttttaaattttttgtagagacagggccttgctgtgttgcccagtctggtcttgaactcctgggctcaagcagtcctcccaccttggcctcccaaagtgctgggattacaggcatgagccactgcacctctcctataaaaacttttaccaatttaataccttcaaagtctaagattaaattagattcaaaataggcatcctttacattcgtttaagctttttagagttaaacctgataagaattgttttcatggctattttctacatcatctaattctgaacccttcagattgaatagaaatgtactgttacaggcatcagtgtcattcaaggacgtgactatagaattcacccaggaggagtggcagcaaatggcccctgttcagaagaatctgtacagagatgtgatgctggagaactacagcaacctcgtctcagtgggtaagcatgtaaacataacttacccttgtaactccatatagaaggtatttcttttttaagtgccaatacatgtgaacaatttacttaaagtttaaattatttaggcttttcattcaggattccaaagtaactatgccctgtcgaggactagaaagaatgtgttgtcaactcccagtgataaatgcaaaggagcactttcaggatactgcttccaaagctgtattttcttccacttttggagactaaaatctcatatatctggtctaagtcctcgattgtgttttattaacagggtactgctgtttcaaaccagaggtgatcttcaagttggagcaaggagaggagccttggttctcagaggaggaattctcaaaccagagtcacccaagtgagttactgagcagtagtagacataattctgcaggagtggttagactccaggtcactttaggggtgaacacctaaatattgcaagacttttcttagaaagcctaaaggcacaaaaagcagcagttaaaagaaaataattaataaagttgattccattaaaagtaagaaatttgttaatatattattcaaaaggtg

SEQ ID NO: 48530 - DNA, 1034 bp, Homo sapiens
catttaatgaagaaataataccagttctacacaatctctttcagaaaacattagagagcaacaacttcctattcgtttactgagtccagcatcaccctataaccaaaccagtaaaaaacattcacagaaatctatagaacaatatcattcatgaatatagatgcaataaatacagcaaatgatatattagcaaatcgaatacatcacaaccacatggggttcatcccaaaaatgcaacctagttcaacatttgaaaatctgcgttcaataaaagtggttgggaaaaccggataaccacacgcaaaagaatgaagttggacacttcatttacacagtatacaaaaattaactcaaaatggatcaagggcctaaatataagagctaaaattataaaacacttagaagaaaacataaaggaaaagcttcctgacataggatttggcagtgatttctcacatatgacaccaaaagcacaggcaacagaacaaaatgattaataaattggaccttgaaacttctgttacattaaaggacactaccaagtgtgtgaaaagacacacaatgaaagaaaatatttgcaaatcatatatgacataagggattaatatccagcctatacaaagaacttctacaactcaacaataaaaaacagcctacttcaaaaatgggtagaggacttgaatagacattactccaaagacaaatagacaataagcactgaaaagatgctcagcatctgtattagccaggccttttattttctctattctgatgatttgacatcaccccttgctgacgttggggggactgccctcccagggctagaaaatgtcttgaaatagtagtcaatttgacatgagggcacttttcaaatacaaacggacaagtctagaactcatgctccaaacacctcctttatcaggctgtcacactctgagccagtatcccctgcacaaaacacctcagagctgagtaccagaaaactagcggaagtccctctgtcccaaagcctgctgaaatgattcaaactagcc

SEQ ID NO: 48531 - DNA, 1079 bp, Homo sapiens
acattcttcacagaactagaaaaaacaatgttaaaattcatacggaacaaaaaacaagcccaaatagccaaaggaatcctaagcagaaagaacaaagcaggaagcatcacactacccaactacaaattatactattgggctacagtaaccaaacagcatgttactggtacaaaaacagacacattgaccaatggaacagaatagagagcccagaaataaggctgcacaccttactgccatctgatctttgacaaagcttagaaaagcaatggggaaaggattccctattcaataaatggtgctgggataactggctatccatatgcagaagattgaagctggaccccttccttataccatatacaaaaatcaactcaaggtagattaaagacttaaatacaaaatccaaaactataaaaaccctgaaagacaacttagggaataccattctgatcataggagctaaccaaaatttcatgagaaagactccataagcaattgcaacaaaagggaaaattggcaaatgggatctaattaaaggacttctgcacagcgaaagaaactataaacagagtaaacagacaaccaacagaatgactgaaaacatttgcaaactatacatctgacaaaggtctattatccatcatctataaggaacttaaacaaatgtacaagaaaaaaaaacctcattaaaaagtgagcaaagaacatgaacagacactttttaagacatacatgtgaccaacaagcatattaaaaaagctcaccaatattaccaatcattagagaaatgcaaataaaaaccacaatgagataccatctcacaccagtcagaatggctattatcaaaaggtcaaaaaacaacaaaggctgtcaaggttgcagagaaaagggaacacttatacactgttggtgagagtgtaattcaaccattatggaaagcagtgtggcaattccaaaaaaagctaaaaacagaactaccatttgacctagcaatctcattactgggtatatacccacaggaatataaatcattccatcataaagacacatgcacgcaggtgttcattgcagcacta

SEQ ID NO: 48532 - DNA, 1110 bp, Homo sapiens
caacttataacactctatagaatgttataacttgtaaattaacatacatacaaaacagcttaacaacatacaaaaaacttgcccctataaagctttattttcactacttttcagttgttgatgtcacacaattacatattaatgcattttgtatctaaaaacagactagtaattttttaaatattagtctcataagtcatgtagaaaacaaaaagagttacaaaccaaagttatagtaacacttttatgattgtatatttccctttttcagagatctttatttcttcatatggctttgagttactatggttcatttaagcctgaaagagtcccgttagcatttcttgcagggaggcctatttgtaataaatgcccatagtttttgtgtgtgtgtgtgtgtgtgtgtgtgtgtgtgtgtgtgtatgataacctggttttttatatacagtgaaatgtttactacagtcaagcaaattaaaagacccatcatcttacatactctctttttgtgggaatagaacttaaaatatactctctcagcaaaaattccaaatacattaaaatattattgactatactcctcatgctgtacattaaatctctagacttattctacatacctgcaaacttggtatcctttgactcacctcctctcatttgctcctcactcctattaaccccctggtaatgaccattttattctctgtctctattctactttttttttttttttttttttacattttacgtataagtgagtgagatcatgctgtatttttctttctgtgtgtggcttatatcacttagcataatgttctccaggttcattcatgtgtggcaattggcagcatcttgggctaatattccattgtatgtatgtgtatacacatgccacagtttatccatttacccattgacatttgggttgtttctatattatggctattgtgaataatgctgcattgagcacgggtgtgcagatatctctacaaagtgctgattttgtgttcttcaggtatataccaagcagagggatttctgagtcaaatggtaattctatttttaatgaaacctccaatacttgttttctgtaatggctacactagtttt

SEQ ID NO: 48533 - DNA, 1026 bp, Homo sapiens
tgctgtaaaagaattgtgttccccttgctttataactactttgacatcagctacaatttgccacatgaatattaataacaaaccttttacagaaaatatctgataccacattccctttctcctgctgccttctaacatgtctgtctagtaaaggccattgttactaaactgccttttttcaaagaagccagtgtcaaccaatatatttctctctctctttttttctatgtgtgtctctcacacacaaatacacaagcaaatatatatatatatatcttcaacatcactgattctttcctagcagtgttgagtataataatggacctttggaaggcattcttcatttatggtactgtgtttttcatttttagcattgtaattttattatagtttttatctctctgccacagttacctacctgatactgcatgttgtctagttttcccactggagtcactttatatggcatttggcattctttctctcagttaaaaaactgcttggatctttgtttctctctacaaccacctagttttccagatagctttttgccctgtggcttcagatatttggtgcattgaagaaaagttaaagtcttcccaactattttcttgttttatgaatagaagcagtgctcttgcctgctatttctctgagttgtaactgaacatcatcagttgttttttgacaaatgttccagggtaatttgatgggaaaatgatgattgttttcaaaaatgatgccgctgggcgcagtggctcacgcctgtcatcccagcactttcggaggccgaggcaggcggatcacaaggtcaggagatcaagaccatcctggctaacacggtgaaaacccatctctactaaaaatacaaaaaattagccaggtgtggtggcgggcgcctgtagtcccagctgctcaggaggcagaggcaagagaatggcgtgaacccaggagggagagcttgcagtgagccaagatcacgccactgcactccagcctgggtgacagagcaagactccgtctcaa

SEQ ID NO: 48534 - DNA, 1069 bp, Homo sapiens
agattcactattggccggatgtggtggctcatgcctgtaatcctagcactttgggaggccaagacaggtggatcacctgagatcaggagttcgagaccagcctggccaacatggcaaaaccctgtatctactaaaaatacaaaaattagccgggcatggtggcacatgcctgtaatcccagctactcgggaggctgagacaggagaatcacttgaacccaggaggcagaagttgcagtgagccaagatcacgccactatactccagcctgggcgacagagcaagactctatctcaaaaaaaagaaaaaaaaaaaaaaaagattcactattgaacaaccctgacataataaaccaagtcaccagagctagggcagagcagtgaatccagtctaggtggaaaaatgactttaactcccatcaattttacatttccacttacacatgtgtgttcctttgatgataatgcagacagaattaaaatgttgtctatagtagtatttcttttaacatgaggaaattggtgtcattataaatttcttttgtgatgtgtagaatggaaatggagctccaactgaactattgcaggctaatgattatcctaccattgtaatttatatttgtataagaatctagactagcgttactccctacggcaaaccctgtctcagataaaaccactaatccattgatttttgttgttgttatctacttcatgttggtaatctttttttattcatcccattctctgattttcctgttcccaggatccaatgctcttacgtatacaccattctcagtcattttgttgatttatatcctcttctctattcagttttgaaaattctattttaagatgccaaatatgtatatatattcatttcccatttctttttctactacaaaaaaaaatttaagctaaaaagggaatatggggaatatgtacttgaaattactttattgttgagaaactgagccagaaactaaggaatcaaatacataatagggcatatatatacatatatgtcccattccataagaaatgtgttaaatatcataaagtttgtttaat

SEQ ID NO: 48535 - DNA, 1042 bp, Homo sapiens
ggcattttgataatgctaaaatagacagttttaaaaggatattttaaaagtagagaactttaaaatatatttaagagttttgaatatttgtgcactaaattttcatcaggtgtcataaaacaaaaaactgcaagtgttctgaggaaaaatggaaacatattaggtcacatagactttaatttacctctttgatttcataccagagccagtggatcacaactgagttcctagactagtgctcagcaaatgaggacacaggtgaaattctacctgctgcctattttggtcaggaaatatttttctagaacacagccatagctattcatttatgtgctcatgctacgaggtagaattgagtagttacaacagagaccacatgatcagcccagtggaaaacatttactctctggccttttacagaaaaagtttactgactcctgctctagaagttataaataacatattttataaaaatgaatctgatgtgtctttcacaactctgctctggaaacagaatgaaccctttttaaaatgaccatgggaccctgacaaaatataaaagtattttgtgcaaaaatgaataaatccacaaagatattattgtccagtaaaactgcaaattgcaaacaatgtaagaagaattaaagtctatcttaaactcaataaggaatatatatctttaaaaacatatttaatcaaagagtaaatgaaaatcaaaattgtctaatatccagaaaatttcaaagataaaaaacatgcatattagaacctttgggatatagataaagcagtgcttagaaaaacttttagtcttatattagtcttatgtacttgtttttaaaagtgaaaaagttttcaaagaaaactaagcaaagcaaaagatgtaataaaaataagactatattagtataaattttaaagccaaaagcggttcttgcaataaaaataactgaataaaatagtctcaattcgaaaaagggggaaagcactattactcaaagttttgatttaaattcctacttctgtggtatagtttgaaata

SEQ ID NO: 48536 - DNA, 1055 bp, Homo sapiens
ttattcttccagtttcatcaggatttgctttatgtattttgaagtagtgttataaaatggaaaaacatttgtgattgttatatcctcttgattaattattccctttatcattatgcagaatttctctttatatgtgctatttatatattataaaacccataataaataatattgtctaaaaagataacttgaaagataatgttctatttaaagaaaagaattccaagaatgagaaaagtatattttgttttcatcctcttttttccagtttatggtgctctttatctctataaatttttttatataaatcagaaattttcatagtaccatttttcttctgtctggaaaatttaacatttctcgtaatacacatcagttgctgataaattgtttcagctttttttttttttttttggtctgaaacatcttatctttgccaagtataaaattttaagttgattttttttctttaagtactttaaaagtatcacttcactgtcttccagactgtaaaatttctaacaagaagtcagctttaattctctttgttcttctgcatatattatgtctttttctgtctacataaaattttctttttttcagcaggttttagcaatttgattataatgtacattggtgtgattttatgtttcctcttggcatttatttagcttcttggatctgagggtttatataggtcattaaaattaggaaattttggccactgttgcatcagaattttctctccctttcctttttttcttctggaatgctgattacatatatgttagactacaaatttatttaaccacaggtcacagataactctgtttattattttccagtctctctatgtgttgcccaggctggtcttgaactcccagcttcaggcagtcctcctgccccaccctcccaaaaaactgggattacaggtgtcactgtgcctggccatatgggccatttcttatttggttgttactgattgatttttctccttgataagagtcttgtatcactgcttctgttcatacctagtaattttgtgttgggtgcta

SEQ ID NO: 48537 - DNA, 1035 bp, Homo sapiens
tcaaagttatatcatttcaatgctaaatacttcagtagtgatccctttttttaaaaaaaaaatttctacaaaattcttaattttttttcacagttcacaaaagtaatggtactttttttcaatatttgcaattcccaatccatattcagcttcccaattgtctccgaaagtcttacggaaaaaaaaaatgttggttcaaccgggaaccaatggagggctactctttgtatttgtcagtagcgtttaagttttaacctttaacttctccctgttcttggagagcctgagcgggagacttcataaaaactccatccccgccaattctgaatcgccgaaacgtgaggagtcacgtcgaaggcggacgcaagagcttatgggaaatgtagtcctgaatgagtctggttcgccgcgcagcactctgggatggggctcctgggctccttctgcgcctgtgcagccagagccccgcctcctcatttgggttctcgagactcccgggaagcggtttgggaagctcgggggtcggctcggaaagtagagggggcgcagctggggcgggaggacagcgtttgtgcccggaagcgggagaggaagcgggaagtttgtgggatccccgccccctgtgtcagtggatgcgaccgggcgggccctcggccttcccggccgctggagagggacttcggccgctggctcccggggcggctgaggctgagcgttggtccggagcaggtgccgggtgcgggccgcggtgtgcgggaccggagcccggcgcgagcggcggcgggggtggggaaagcgcatttgtaacgcgggcgacaacgtgcccgaaatccccggacggtgggtctgcatcgagaccccgagctctggagctggaaaaacccgggtaagttccatctctgtcaactggaagccgaggcgaatgtagggacgtggatgagagtcaggtttctcatctgaaagtgagggtattaataatgactgcttcatggcgttggtttaaaactttaagtcaccacctgtaaagcaaacagc

SEQ ID NO: 48538 - DNA, 1038 bp, Homo sapiens
ttaaccttaagcatttctataaatcggttaccaaaaatgcttgctatctggtgttggagtggatgtgaggaaacagcataaactgatacaagcctctttgaggactccctgttagcatctgttacatgttcatttgtacacattttaactgcacaattctatcattttggctcttgtgcaaagaaataatctcacaaatatcaaaagatgcatgaacaatgctatttgccacatattatttataatagtgaaaactggaaacaaacatccatcacaaagaattgattaaataaacatgatattccctacaatgtagttaaggaacagaaagatttccttctctatagcctgatcagataactcgattaggagacaattttacatgttaaaagaaaattgtaaagaagttgtaaccatgtttttaaaaatgcattgtttgctgtagcctaaagtgcagagttaggcatcagtggacaattggtcgtacttgggaggtgggctggatattaggagggggagctacattatagctttatgcactgctataatcaaatttgcagtgtctaaattttttaaagaaacgtttaaatgtatttactttaaataataagcaagggagtccggacgcggtggctcacgcctgtaatcccagcactttgggaggccaagacaggcggatcacctgaggtcaggagttggagaccagactggccaacatggtgaaaccctgtctctactaaaaatacaaacaattagccgggcgtggtggcgcgcgcctgtaatcctagccactggggaggctaaggcaggagaatctcttgaacccgggaagcagaggttgcagtgagctgagatcgcagcattgcactccagcttgggcaacaagagcgaaactaggcttaacagcctttttcagtacagaacttaaggagaataaaataacaagttaacaagttgccaagttgccaagcttactacaaagcgaacaaatatggttgggttgactgtttattatactgttacctttagtctttacga

SEQ ID NO: 48539 - DNA, 1025 bp, Homo sapiens
atctcaaaaaaaaaaaaaattagttttgggataccagtaatttcagtattattaacaacctgacttgggcaccccaaaagtttgcaataatggcattaaatggctggatagagaaagagatggtggcgtgaatgcctgcttcctggtgtcatgtctggaatttcatgtccagtcctgaaagctgcattttaggaagggtgctactgagcgtccagagaagacagcatttcgcttggtgaagggagtgggcttatgatgcatggcaggaggagtaatgtagaaagaaataagctttgcggtgcatagtgtagagaaattcctgctttgcgtcaaacagactgaccaggcaggcctcacagttttgcaaagccctggaagcacaggcttggctgcagatgttggatgactttccagaccagttttggaaaaagctcttgaggatcagaagctcctgggatttctgttatcacctgatttcatggagagagacagtccagggccgggaattatgtggcatctatgtgttccccagttgtgggatccatctggccgatggttatggtggtcagtgactttcagaggcctggaattcatgacagatgcttttgctaatgtgcttggtgccccactgaggctgctgagcagtgcttaccatgcgcccgatgtctcttctgtgtgcctctgagagcaaaagtggcctcagagtctgaaggagggcaaagtggccacagctgcagacacaaagtccagactagctcttgaccacatccaagtgcatcctgcattaagctcaggcacatcaaacctgcccaatcaaggtctgccaaaggaaggagtctgcaaatgacatttctcataatcaaacacactcttaatttgtttttatattattcactccattttttgattattataacttttaaaattatgtctagtagttttatcaattgctgagaagagtgttgaagtccaacttacaattgtggatttgttgatttcttctttcagctttattggttttggtt

SEQ ID NO: 48540 - DNA, 1034 bp, Homo sapiens
atatacgcatgctaaagtatttaagaggaagtactggtgtctgcaaaacaaaaattttttttccattttctgtggtaaaatatacataatataaatgtattattttaagtgtacaattcagtggcattaaatacactcagaaagttgtgcaaacatcccatttattcatttccacagattttttaattctcattccaaacagaagccctgtacccaaagagcaataactccgcatcctccaatccccactctctggtaacctctattctactttctgcctctatgaatttgccaattctaggtacctcatataagtggaatacagtatttatccttttgtgtctggcttctttcacttagcataatattttcaaggttcattcatgttttacatgtatcagaatcttgttttttcaggtggagtaatgttctattgtgtgcatatgccacatttggtttatccattcatcagttgatgcacatttcggttgttcccacctttgggctattatgaataatgttgctgtgaacactggtatacaaatatctgagtggaattgctggatcatatggtaattctgcatttaactttttaaggaactgccaaactgttttccacagagctgtaacattttacatccaaaccagcaataggacctggataaaaggtggctaaggcacagttaaataaaatactgttagttactgcccatttgcattgggtttctagtggcaaataatctagccgtgtccttgactggatctcccaatgattcttttcagtcatttgaatgagtatggtggtggtgacactggcaggaggctggagggtactttaattaacacgcgaacacacacaaatccattgcaccccactaagccgcccaaacacacatgaaacacaaaaactatccttgctagggaaacacagccctggaacaaaccccctggaccccttgtcaccaccagcccatcctgtaagaaaatgatggttgaagctgcagtgacagaattggagagatgctctgttagac

SEQ ID NO: 48541 - DNA, 1193 bp, Homo sapiens
accgctcccggctaattttttgtatttttagtagagaaggggtttcaccgtgctagccaggatggtctcgatctcctgacctcgtgatccacccacctcggcctcccaaagtgctgggattacaggcgtgagccactgcgcccggccttgaactcatcattttttatggctgcatagtattccatggtgtatatgtgccacattttcttaatccagtctatcattgatggacatttgggttggttccaagtctttgctattgtgaatagtgctgcaataaacgtacatgtacatttgtctttatagcagcataatttataatcctttgggtatatacccagtaatgggatggctgagtcaagatggtatttctagttctagatccctgaggaattgccacactgttttctacaatggttgaactagtttatagtcccaccaacagtgtaaaagtgttcctgtttctctacatcctctccagcacctgttgtttcctgactttttaatgatcagatagcctcctattttttaactatgagttggaatttgctgcttttgatatgataagaaagttcaaagtttctcttccttgctttgttgtgtgttctaattcttttctgcccatcccccagtaaagaaaaggctcagtatgatttcttgaatagattgtttaagctattttcaaaacaggacttggtcaggggcaggtagtcttaaatgttcagaagccactggatggaaaattgtgagcacataagtgtttttcttggtcaaccatgtcattttatagccaaagtttgacttgacatactggaattaatccacacgactttgaaaagaataaactctttaaaaagagagtgagcgctccgagggtgttatgagagtcactgtctgaaaccctattgatcatattgtggcagaagaaatagagtcctgccatgaattatacttttcaggttaaaaaaaaaaaaagcaatttgtaggacagtttgaataatttagtacaattgttaaaaatacagacatgcacattcctgtatgtgcatttttaaatgttcacgaatgatataagccagatatatttcttagaggtgcttgaaaaaagttatttcttcttgggctttattatctcaatttaaaaaaattaagatgcataattctcataagataacagattcagaagaatatag

SEQ ID NO: 48542 - DNA, 1033 bp, Homo sapiens
acctttgcctgttggtggcacttgtgggagaaggggagatgatatgaaaagagccacaacaggagtcacctggacagggtggagcttgatggaaactgacatttgtgcccattggaggcaaatgtagaatttggtatcttccgtagcgtcaggcacatgaaactctccagtgcccatgacttttgacagtgacttcagagcacatctgggagacccatgtggcccaggctccacacagaggatacagaggaccaactgtataccacttcatgtgatgttggagtgctgttctgcacgcctaactttatggcttggtggatcagacaatgcccaatgtatgatggaaagctcaggttgcagggtagctaggtggcccatgcttgagcagtctccactaagtcccaggagcaagccaaaactgcttctgaaaaggagagtagttatcagcggaagatggcatgctccacagttctagggtccacactgatttgcctgtagaggcctgccagtggcttcagatagtatccctatctgccactgacacttcaagcaccattggatctcctgaaacataaagcccaagtgggagagcagcttgcacagcagcctggacctgttgcagagcctgcttttatcctgggcttaaaactagcagctttttgggtcacttggcaaataggtcagagagtaacacactcaattgaggaatatgttgcctctaaaatccaaagagggcctaatggtgttatgcctctttttttggttgtacaaggggctagatgcaacaacttattcttcactttagaagggatatctcgaccactagactcctagaaatttcgctgaagtgaaaggcccttgaatttttataggatttattttccaccctctgacatgcaaatgtcttagtagtaagtctagaatagttgctacttcttactgcttccagtcagcattatgtcatcaatgtaatggaccagtgcgattgatatagaagggaaaggcaattaagatcccttcagattaaattatg

SEQ ID NO: 48543 - DNA, 1130 bp, Homo sapiens
gagtttgcccaggctggggtgcaatggcgcgatcttggtcactgcaacctccacctccctggttcaagccattctcctgcctcagcctcccaagtagctgggattacaggtgtgtgccaccatgccccacgcccagctaatttttgtatttttagtagagacgatgtttcaccacgttggctaggctagatatacagatgattcttatacttaaatggtcactttgtttatgatttccagcaataaccagccctaggaaccttaaaaaaccttccataaagtttttttatcaggctgggcgcagcggctcacgtctgtaatcccagcgctttgggaggccgaggtgggaggatctccttaggtcaggagtttgagaccagcctggccaacataatgaaacctcgtctctactaaaaatacaaaaattagccaggcgtggtggtgcacatctgtagtcccagttactcgggaggctgaggcaggagaattgcttgaatctgggaggcagaggctgtagtgagccaagattgcaccactgcactccagcttgggcaacagagagagtctctgtctcaaaaaaaaaaaaaaaaaaagttttttttcaattataggacagtagatgttttcatcatatgagagtaatgacttacaaattatttactgtcaaaactgtaacatagccatttcttttttttttccaccccgagacggagtcttgctctgttgcccaggctggagtgctgtggcctgatcttggctcactgcaacctctgcctccctggttcaagcagttctcctgcctcagcctcctgagtagctgggattacaggcgcacaccaccatgcccagctaatttttgtatttttagtaaagacggggtttcaccaggttggccaggctggtcttgaactcctgatctcatgacccctgacctcatgatctgcctgcctcagcctcccaaagtgctgagattacaggcatgagccaccacacctggctgccatttcttttttaaaatgaataatgggatttcttgtaaggagtggcctatcatgggtgaaaagatgcttgtataccccatttcaggttatactgcagtgtttgttttgttttgttttgtttgagacaga

SEQ ID NO: 48544 - DNA, 1028 bp, Homo sapiens
gccctgcaagtgttaggggaaggtctgaactactctaatggtttgattttatttttaaaattttttgaaatggagtctcactctgtcacccagactgtagtgcagtggtgtgatctcggctcactgcaacctccgcctcccaggttcaagtggttctcctgcctcagcctcccaagtagctgggattacagatgtgcaccaccacacctggctagtttttgtatttttagtagagacggggtttcaccatgttggccaggctggtctcgaacttctggcctgaagtgatcctcccttctcagcctcccaagagagctgggattacaggtgtgagccaccgtgcctagccatagtttgattttaaataccaataaccttgatatttttgaaagcctacttgtttattttctctctggtatattgcaactatttttttaagaacaactcagcaaaataaaattcctgtttattgttggacaacattgtttcatgcatatatcaaacaggccaaaaaaaaccccagcaactttataaacaaaaaaacggaaaaaaaaggccgggcgcagtggctcacgcctgtaaccccagcacattgggaggctgaggtgggcagatcatgaggtcaggagtttgagaccagcctggccaacatggtgaaaccccgtctctactaaaaatacaaaaattagccaggcgtgatggcatacgcctgtaattccagctactccagaggctgaggcaggagaatcgcttgaacccgggaagtggaggttgcagtgagccaagatcgtgccactgcactccagcctgggcaacagagcgagactccatctcaaaaaaataaaaggaaaaaaaagaagccttttatctctggcctttttgtttttgagatggaaactcactctgtcgcccgggctggagtgcagtggcacgatctcggctcactgcaatgtccgcctcccgagtagctgggattacaggcgcccgccactacgcccagccaattttttgtatttttagtagagacg

SEQ ID NO: 48545 - DNA, 1050 bp, Homo sapiens
cttctaaactgtgggcttcacataatgacatcctaccaagaaatcagtatagcaaaggaggaaaaagagtaacttcgcattggagaaacctaacaaacactgtctcagccaggtgatcaaggccactgtgagcagtgatcagtcaagtcgaaagtgcatatcatatgacaggatgagaatggcattttacctcgacatcttccctcccaaaactaataatcctactacatcagacaaacctcagctgagaaacagtttccaaaaacacctgactagtaccccctaaaaccatcaaggtcatcaagaacaatgtagtcctgagaaatgatcacagccgggaagaacctaaggacttggtgtcctttggtatcctgatatggaatcctggagcagaaaaggacattaagtaaaaaccaaggaaatagaaataaagtataaacttaataatatatcaatattaattcattaattgtgacaaatgtaacatagtaatgtaagacattaaaatggggaaaattgggtatgatgtggaggagaactctgtgtattctatttgcaactcttctgtaaatgtaaacctatttgaaaattaaaaatttattttttaaaaagaaaattaagaaacctatatacttaaatttgaggaaacaaaaattactttccttgcctaaagtatgtgttctacattttaggatttacctgacatcctaatgaatagacttttttaatgtatacaatcttatgtcactaatttaaatgtaaatgtttaagagttacaaggttcagtctattaattttattaacttggcccttgaagaagactcatataagaaagaggatgttttgacctgaattatttctatacaaagcactctttgatgaggacagtacacacttcatataataaccagcacaaaataaaattccagataaatattcatactatcaagcatgtaagaaaaaaagcaacgcaggcttctgcttaatatgctaaaactttctaagatttcccagagccaagcacatttgtctgaagttcagtttttaaaa

SEQ ID NO: 48546 - DNA, 1051 bp, Homo sapiens
aggaattcttaatgcctgaacaatcattgtaccttggaagtagttaacttgtttgtatttcagaggctcaggggcagaagagactgcctcatctcagatgagactttgggcttcagacatttgagtaaatgctggaatgagttaagaccttgtggcactgtaggtaaggcatcattgtattttacaaagtgagaagtacatgagactgggggaggcagggacagaataagatttggctgtgtgtccctaaagaaactcatgtggaattgtaattggaaatgttaaaactgggacaggtggaaggtgatttaatcatggagagcagtgggtgttggaaggtggggattggggaggatggggggattttggtgggggtgaggggtgaaaatggctgttgggggaggatccctcccaaatggttaaacaccgtctccttaatgctttcctcatgatggtgagttctcgtgatgattctggagctgtaagattaaatggatactgtcctgcttggttttggacttacactgggcctgtgaccccacttgtgttactttcctgacaaatctcttccttttggattgagaaaacttacccgatgcctgtaccatcattgtaccttgaaaaaaagaactcccttttaaattcagggactcataggcaaaagggactgtagacttttctcagatgagatgttgaaccttttacatttgtgttaatgctggaatgagttaaggcttttggaagcttttgaaaaggcaagattgtattttactcggtgagatggatatgatatttgggggatcagggttggaataatatggtttggctgtgtgtctctaccaaaacacatgggaaattgtaattctgaatgttgcaggtgtggcctggtgggaggtgatttattcctgtacttgagaggggtggagttggaagtaaaaagaagtgggtaagttcggagcagtaggttgactgtagggtggtgtgagggtggtgggtagtaggaagggggagtagcatgctacagaggcagaggctcatggaaaacctgcac

SEQ ID NO: 48547 - DNA, 1169 bp, Homo sapiens
ccacattaccaggctgtgacaaagatatctgagaatgtagaagcaggttcagaagtgggtaaaagagagagaggtcgggagagttgggaacccttagaagacagcaagatgaggaaaagtttagaccactgaaaataactgttaaatacttgggatcagaagtctgacagaaagatggacagtgaaggccagacttaaaaggtctcagatgaaaatgaggaatgtcctgtgaacaggagccaagggtacatttgattggccttagccctggagatctctgaaactgtgaacatgggggtgatgatttaggatgtatctggtggaatgaacatctaggcagcatagctcaagaggtgtcctctctacatccaacagcctgtgttcttatgtgtgacctaagaaatgacctcaagttgcaacttctatttaaatgagaagtggagctcaaaaatttgaaaaatttgcagcctagccaagtggtcaaaaagaaaagctgattttcaggggggaaattcaagaacgcttagagtgtttgcataaaaaagagcccagtgcaaatagccaagacaatggggaaaaggccttgaaggcatttcagagatcttttcagcagccgttgctgtcacaggccctagggatgaggagagaatggtttcctgggccagctccatggcctggctgctgtgtgcatcctcaggacaccgctgcctgcatccctgcagctccagctccagccatggctgaaagatgcacaggtacagcttgggtcactgctccaagccctgatggcttccacatagtgttaagccaggaggtgcacagagcaagagactagaggcttaggagcctccgtctagactccagaggatgtacagaaaagcctgggtgtccaggcagaagcctttccaagaggcagagcctcatgggaaacctttactagggcaggaaagaagggacatgtcaggttgaagccctcacacaaggaggcaccatccttcaaaccccagattcatagacccaccaacagtttgcaccctcagtgtgggaaagatacagacactcgacaccagcctcgtccatgagggcagctgcggggacttatcactgcaaacccacaggtggagatctgcccaaagccttgggagcccagccctcacacccctgtgccg

SEQ ID NO: 48548 - DNA, 1005 bp, Homo sapiens
ttactcctcaaaacacactagatttagcatttcatggatgacttgtgtttgaacaagtgttactgtgatggttgccagatgattatttttcttattctcttctttgttctacatggtgaaataaaaccaataaataaaggtgaaggcaaagctcatgattctggtgctccaattccctgagattaggccagtggtagacatttcaagctgactttatgtctttttgatttgtccccgttactctgtcagcacttttttaatttctggcacaagatgttctaaactaatcttgtgttttctctgccctagccctagaatgagtaatttttcttataagcagagttggagccactgaggaagcacaggagagccctccccagcacgcgctcactagtccccaacagaagaaccgctgccccatccactgaggtaccaagaaactagcaaagggccttctagctgtctggggacagtcctcatgtggtccctggctcagcctcaagggttctggattagtttccctgcagcctctgtgctgtgtctccagatcagggctctgcgggaagggccctgggagacccagcagcacagggtgtctcgtctgccaaatgtccctcccttcctcccactctgacactcaggaataggctacatggcatgtctaggcagtgccaggccacctcactgtctcctttgagatgggcccacacggccttggggggcgagtgtgaagctgggtacctggagcctgaggctgactgtccctccctgtgtcttggaggagaggccttacagcccaagaaaacccccagggcctgacctctgggcacacatgcaggaaggaagggtctgtgggctgatgggggcattgtaatgagactttgaacacagctgctcaagggcctcatcagtggaccatggtcagagatgacctagccatcaggacctggtcagttgggacctgatcagcagggacctggttagcggtggcctcctcagtgaaga

SEQ ID NO: 48549 - DNA, 1052 bp, Homo sapiens
cctattttaaaggagactcttttctgctacataagttatgtttcctgttgtctcttttttaaacttatttttctaacaattacccagagttttgtggcttaaaagaaaaacatttatattgttcatgaacctgtggtttggaaaaagattggccaggacagcttgcctctgctcccctaagcttccctaggaagttggagaaattgaatcatctgaagctttgctcacccatgtgtttgatggttgatgctggccattggctggaaccttggctggggcaggcagcatgaacactgacactggcactcccaggctgtctttgtggactgatctctctcacaatctgggggctgggttcaaagggaaagcagtctgagatgagatagggaagccacatggtatcccttgtactgcattctattcatttggagaaggccatcagtaaggatgacccatattctattcttttaatgggatgaatatagattctcttttgttttaattgatatgtatatacataattatgggctatagagtgacattttgatacatttatatggtgcgtaatgatcaagctaactagcatgtttactacttcttactacttcaaccatttttcatttctttgaattgtgaatattcaaaatcttctagctttttaaaaatattcaataaatcatagttaaccatattcaccctacaatgccacagaacatcagaactcattcctcttatctaactgtaattctgtatccattaaccagactccctccctctacttctatgagcttttttgttgttaagagacagggtcttgctaatgtagtctgggctctgggcaactgtagtcatccagactagagggtgatttgatcatagctcactgcagcctcaaactcttgggcccatgtgatcctctgacctcacccctcctgagcagctaggattatgggagtgcaccattgcacctgtttgattttttactttgtagagatgtctctctatgttgctcaggctgctctggaacttttggcttcaagtgattctcctgc

SEQ ID NO: 48550 - DNA, 1047 bp, Homo sapiens
gggcaggaggattgcttgagcctgcgagttccaggctgcagtgaggcataaatacaccattgcactccagcctgggcaacagagcaagactgtctcaacaaacaaaaatctaacaattattgagttgttgcttgttctggaagtggttctaaatgctttacatagagtctcatttaagcatcacactggtgtcttgtgagctagctgctttgtcatctttattaatgaggaaattcaggcacagaaaggctaagcaatagctggtatgtgactgagttcaaagtggaactcaaaccctagttgaactgaatccaaacaccaagcttattctatccaaataggctgctgtttcattaaggtagggagcagtaagagctaataaatattgtactttcttcaaaagaaaattgtttgttttgaaggcagaggaataacatgccattcaatgtatacaattacatgaaccattgtaggttttgagatactgcactacatttcctgaaaactcctctcgctcacttaggactgttctacatttggcctgtgcccatggccatgtggaagtggtcactctcttgctggggagaagatgcctgattgacatctgtgacagactaaacaggacgtctttaatgaaggtacatagtagccaactctttcagcatgaaatgcatttgatttaaatacatagaattaaaatgaattttattttattattattatactttaagttttagggtacttgtgcacaatgtgcaagttagttaacatatgtatacatgtgccatgctggtgtactgcacccattaactcgtcatttagcattagtatatctcctaatgctatccctcccccctcccccaaccccacaacaggccctggtgtgtgatgttccccttcctgtgtccgtgtgttctcattgttcaattcccacctatgagtgagaacatgcagtgtttggttttttgcccttgcgatagtttactgagaatgatgatttccaatgtcatccatgtccctacaaaggacatgaactcatcattttta

SEQ ID NO: 48551 - DNA, 1030 bp, Homo sapiens
tcacaggggatgcgacgggttagcttgggctcagaggcctgacattcctgccttcttatatttataagaaaaataaaacaaaatagtgttgaagtgttggggcggcgaaaattttttggggggtggtatggagagagaatgggcgatgtttctcagggctgcttcaagcgggattaggggcggcgtgggaacctagagtgggagagattaagctgaagggggaggtcttgtggtaaggggtgatattgtggggatgttagaagaaacatttgccatatagaatgattggtgatggcctggatacggttttggatgaattgagaaactaaatggaataacagaaggagaaaaacaggtataaaaggtctaagaattgggactactcaggatatctgattagagagtgcctaaggagattcagcatagtcctgccagcaaagattatttatttacttcaagagttaacagtggcagtttggggatagcaccaggagatataagctgagatggcttggaaaaacagtgtaaaccggcagtgtaaacaagagcagggcatgtatgagtagttgagaacagtgaataggagtatgactagacagaagatagtaaggatgacaagtttttttgggggcacagtctaagttggtctggtgtctggaatgagactggggcctaataaaaaggagcgtctatataggagctcaaatgggctgtaccctgtagcattccgaggacaggcctgaattctgagaagggaaagtggtaaaagtattgtccagtcctttttaagttggtggctgagcttggtgaggtgtgtttttaaaaaacctttagtccattttacttttcttgaagttggaggaccataagggatataaaggtttcactgaatactaagagcctgaaaaactgcttgcctgatttgactaataaaggctcgtctgttatcagactgtattgaggtgggaaggctaaactgaggaattatgtctgacagaacggaagaaatgactgcggtggccttctcaga

SEQ ID NO: 48552 - DNA, 1081 bp, Homo sapiens
tgaaacaaacagatatagctaaaaagccagcagaagagagaaaacagaagactaaaaaataatcacactaaaggaagaatcgagaaaaaaagaaacagagacagaaaacaaatagcaacagggtacacttaaatctagtcatttcaaccattacattaaatataaaagggcccagccttcatagctcatgcctgtaaccccagcactctgggagctgaggtgggaagatgagttgagaccaggagtctgagaccagccctggcaacatagtgagatcctgtgtctgcaaaaaaagaaaaatttaaataataaaaaattagccaggcacaatgccatatccctgcattcctagctactcaggaggctgaggtgagaggatcttttgaccctaggagttcaaggttacaatgagctatgatcatgccactgcagcccagcctgtgtgactgagccagaccctgtttctaatacatgaatatagaaggactggatatctcaatttcaaagttcagattttcagatgagattaaacaataaataaataaacaagacccaacactatgctgctcacaagaaccacattttagatacagacacaacatttaggcaaaagtatagatgtaaatgtgccatgcaaatactaatcctaaaagagttggtatgcccatattaatattagataaagtggtcttcagaacaggagtactgccaaagataaaggtgtcgagtcataatcaaaataggccagttcataaaattaacaatcttaaatgggtgaacctagtgaaacttcaaaatgtgtgaaacagatatcaacagagtaaaggtgacgatcatcagatctacttttcaagtgtatgtggaacattaatcaagatagattaaatactggaccataaaataattctcaataaatataaaaggatttaaatcatagacagtttgtactctgagcaaaataggactaaattaagtcaataacaaaaatatattcagaaaaaccttaatatttggcaattgagcaaataacttttaaataaaaatggatataggaattctcagatctatatttaaattttta

SEQ ID NO: 48553 - DNA, 1057 bp, Homo sapiens
tcactatgtctctacaaaaacttttttaaattagctgagcatggtggtgtgtaccagatactcaggaggctgaggcaggaggattgcttgagcccgggaggttgaggttgcagtgagtttaaatcatgccactgtactccagcctgggtgacacagcaagaccctgtctcaaaaaagtttttctaggccaggatctatagtcttcaccagactaccaagtaaatccgtagcacacatgattttaggaactcatagctctctgtggacccaggtggcatgcacatttgagtaagatttgcgtttgattgtcctctcctactttcttggtcttattttcattttagtggttttgagttgtctcttattgatcactacttcgatctgttttggagctagatggagtataaattctaaacaagtagaaagagtagatttgattttacagaggttatattggctggactcgatgggtacctgcgtgtgagtatgaaggagagagggaaggctcagaggtagcttagataagcaaggtaaggaaaagtgaggaagaatgatgttatcaatagtaacaggaggtcatcagggaaaaacaggtgaagaagatggtgtgagttttaggaatcagatggtcaagtgccctagcaacagcaggagagacacaggcctcggggagaggggtgtggactgcgcatgttcactgtaggtgggttatcgcctgtatttaggtgtgttgtcccccctggaaaagggaacaatcaaagaggaaaagaccacttaacaagggggttgggaggtagttggccagctttggaatagctggtgagagagagaaactttcattaccatctagttaccacctgttctctagatgggaaaaagaaaaaaaaagtcagtaaatactggaagcagacagttaccagaagtcacccccacaaaaaaataagctgggtggtgggggtggtggttagttgttgttgctagaagacagaagacttactatttggaaaccttccccgggttccacaggatctacgagattctagtcagcaaagggagc

SEQ ID NO: 48554 - DNA, 1027 bp, Homo sapiens
aactgggtggatcactggtgagaatagaagtgtaaagtgttgctttttattaaaatatgatttacttggttgctttcaaagaacccaatataattttctttgtaaaatgattttgacacgaagtagcagaaaaagctccaaacattagaatatgaccagtgtcctggcttcacagttaaactatctttgctcagtttccctacttgcaaaataaagtgaagtaaaatcaaaactctgtggttctttccagctcttaacattctgtgattcttatttttagccctctcctaaaataatgctgtcatcttataagaacttcaacagacttgaggtcttattgcacaagcactttttctaagatgaaaacataccagcatagtggtagagttctctactttctagttttcttgcaaagcttgacttgatgcttattgacgtagctcctaacaggaacttaaaaacactcctttttcttaattatttcagctgactccttttcctactgtggcattctgttatctgaagtcaaacgtacctgaatgtgtcctattgtgttactcaactcacttctgaatatggttctgttttgcataccaccaacccacataaccatttctgaatctcttgtttcacactgctccagtgacaacttgattcacaggccgaactagtgaggtaagaaagtaagtttgccaagtttgtataatcaactttgttataaaattaaggtaaactatatatggtttaaatacacatagacacacacacatgtacatggctgaaagcttgatggagttggatttttggattcacctgaatagcaccactgaaaagatgactttaaaatttttttttcagaattgcggcgagcagtaagaagcagcgtgtggaaaagggagacgattgttcatcaacatgagtatggaccagaagaaaacctagaagatgacatgtaccgtaagacttgtactatgtgtggccatgaactgacatatgaaaaaatgtgattttttagttcagtgacctg

SEQ ID NO: 48555 - DNA, 1055 bp, Homo sapiens
cagtaacaagactgcttacactgaaaattgttataaatttccatgaaaggcagtccttagttaatagcttccagcattgtgaaattctaggccaatggaactaggaggttggaacgtggtaaaccactgttttgtctccagcttcaattaggccttcagtactgcgtaggacctgcacccaccccaggtttcctcagctccccgaaagtcgatttcagacctacagaccttttttcactcttctaaagccttaccttgtttttaaaactacctccttctcattctcagcagtaggtagttgatttctgctttcctaagttttaagttgttaaatgaagtaatgtgaaaaaagtatttatcttaaattttttttatttacctgatgttgacatttgccatatttactttttctttcacacacacatattttgccaagccatttaagttgcagacattgtgattcttataaacacttcagcatgtttctcctcagaacaatggcattcgactgggagcagtggcttatgcctgtaatcccaacacttctgtaatcccaacacttcaggaggccgaggcgggtagatcacctgaggccaggagtttgagaccagcctggccaacatggtgaaatcttgtctctactacaaatacaaaaattagctgggcatgatggtgtgtgcctgtagtcccagctactcaggaggctgaggcaagagaattgcttgaacctgggaagtggaggttgcagtgagctgagatccccccattgcactccagcctgggcaacaagagtgaaaccctgtctcaaaaaacaaaaaacaatggtgttcttctacatagctaaagaacaacgatcatactcaagaaacttagcattaatataatgctgctaccttgtgtataatttaatattctccagttgttttggtgtcctttacagctttttgtcggatccaggtgttattcaaggatgatgcatattgatagctgcttttaaactagtccctcagccttttttgtctttcacgacattgacattttgcagtgcccaggcc

SEQ ID NO: 48556 - DNA, 1007 bp, Homo sapiens
gcgacgcggcgcggcagctgctcggctccactcggccccgcgcggcgctgctcggctcggcggccgcggctgcaccaaggcggggcggggagactcgcggcgggcggggcggaggctggggaaaggcgcagcccgaatagaggagcgacttcctccctctctccgattgcacgtggggcggctgatgtaagacctttctcgtgggtgggggggcttccccgccccccggcccccgccgcgctgagactccttctacctccggccccacgtcgtcgcgcccggagctgggcttgcggcccgggctgggaggttcgcgggaagggttggtgggaagctttgcagtccggctgcgggggtccctaaaacccagtccatccggggaggctcacgggggcggcccgacgcccgcggaggcgcgagatgtgaagaagccggggacaggctttgacgttcaccttttgcctgccacacagtctggggccaacaggccgaaccccgctgcctccttggcagactggcgtccgtagtgccgccgaggatcccccccgtcgggacggaatcgcggccgaccggccctggcagggcagctggggtcgcttgctaagccacagagcagccgagcatccccaccctgttcaggagagtctccctcggttttctaacattttaataggagctagagaaggaaacgattagcatttctaatagggcctcagggtttccccgcagacttttttttttaatctcatttattccttagggcacccctgtgaagtgtgtaaattcttggtggtctaagtttcgctgaaacctggcaggcagcctttgtcatggtctggcccaaagggtcccaggggttagagcaccagatcgggatgagtgttgtgctttgcagaacaccggggaatgacgttatattcagcgtacaataagtaaatacataatgtgtcaaatcaaatacaatctaagaagatcgtactgacaagaagcaccaaaaactaagaaca

SEQ ID NO: 48557 - DNA, 1047 bp, Homo sapiens
aacgctttgcagagttcaattaacaagagcgaggtctggtataaagaaagtggttttattctaaagattagcttaggggaagaggtacaggctcctcctgcccttaacggtaccgcctcacttttggggcagaaagcagaggcttttaaatggggactttgtatgaatggcatgcagggaaggagcaagcagatgggggtctatatgactcattttgatgcgttttctaccaagtggttgagctggtgccattgagggcagaactaggttgtaatgtggccgttgtcttgagatgctgtccgggtggaagagttctgttgaaggcatactttatgttgtaaattgactgttgtctcttaaggcaatctcctggtgggagaaagttctggttctagaccctctaagtaggtagataagtttgccctgtagggactatctggtgaagggaaggtaatggttataattacatttctaaagagctaagtagaggcagggcacagtggctcacacctgtaaccacagcactttgggaggctgaggcaggcggatcaccggaggtcaggagatcaagaccagcctggccaacatgatgaaaccctgtctctactgaaaatacaaaaattagccaggcgtggtggcaggtgcctgtaatcctagttactagggagccttaggtaggagaatcgcttgaacccaggaggccgaggttgcagtgagtcgagatcacaccactgcactccagcccgggcaacaagagtgaaactccatcttaaaaaaaataaaaataaagagctaagtaggaagtgggagacaggagaaaaagggggaaaatcttaaaaataattcattctctttctcttagaaaaatgctctttttcttagaaaactcagtctctgttacacgtttacagttatagcaacattagtcacaataggcaacacggaaacaatccaaatgtccatggaaaactgtttggccttgtttatgaaagctgaatatccacataccctgtgatccagacttaaaaaacaacaacaacaacaaca

SEQ ID NO: 48558 - DNA, 1069 bp, Homo sapiens
tgtatagatacacttccattccttctgcatgaggctttcagcaccggatatctgtaggcacattattacagggaagcattgatttttgcctagtacaatatgccttctctttgaggaaatgaaaatcatgacaaataaaaagccatttttcaaaatgactttgattcttgcagtttatgattcagaaatgaggcctgggagaagggaccttaattttctgggctaattatttggctcccgttgtaaaggagcatgtttttcctgaaggagcccttagtaggcccacagagtctgatagcagcagtggctgctttcagtctgcagaatgcgtcgcagttcacagcatgcctttctgttttgcgctctgtgaacactagctgactgacgaggtggaggaatcatattccatctgtggtaggggacaggggctctgagaagcagagtcacaaagtctgtccagactgaaataagacaggatatgtgttctcaaggcaagaatggatggagaaccacacgatgtggatgccatggatacagaacaagaacttggaactggagggtgggatggcagtggtgcccctgcttcactccgcaagtcctggttccttctgtaaccagctgtaacctcggccaagctgttcaacctctctgagccttgagtcccctctctaaggtggggataattgtccccacgtggcccacttccctggactgccatgccttcaacaggagataatggagaaagtgcttcataaattgtgaagggctctttataagccaagggtaattgctgcgcagataagagctttgactgtagagtctataattcctgcaacattaataacaataatagcttttttttcccccactgagccattgctgtgcctgccgttgtgcctagtgtttcacatgtttaattctcatgatggctttaggaggtaggcacaaatactagtgcacccattttgtagctaaggaaactgagactcagaggtggaaggtagtttgctgagggccccgcagatagcgaagtgggattcagactgggctctgtgtgactccaaaagcc

SEQ ID NO: 48559 - DNA, 1902 bp, Homo sapiens
ttaccttcttagccattttaagtgtatgtacagttcagtggtattaaatacattcataatgttgtacagtcatcaccaccacccatgtccataactctttccatattgtaaaactgaactctgtatccattaaaccataactcaccattcttcccaccctctagtcttggcaaccaccattctactttctgtctctacaatattgactactccaggtacctcagatgagtagaatcatacactgtttgtctttttgtgactgacttctttcatttaatacaacgtcctccagtttcatccatgttgtagcatatgtcagaatttctttcctttttaagctgaataatattctcttgtatgtatacactccattttgctattcactcatctgttgacaggcatgtgagctgcttccacatttcagctattctgaataatgctgctatgaacatgaacacacaaatttctgtttggaatcttgctttccattcttgcgggtatatacgtagaggtagaattgctggaccatatgataatttttaggggggaaccgccatattgttttccatagcatctgtatcattttacattcccaccaacagtgcccaagggttccaatttctctatgtcctcatcaacacttgttattttctggacttttttggtagtggccattataatggatgttacatagtatttgggttttttttttttgaggtgacgaaaatgttctataattgactgtggtgattgtgcatatgtgtgaatatactagaaagtattgaattgtacactttgaaggggtaatttgtatatgtgaattatatctcaataaacctgtttattttttaaaagctttccatggcctactcttcctagcagaaagtccacagtccttcggctggcccttctgcctggccctcatcctcccctagtcccatctcagctggagactgcacacgtggcttgctggcattctgccctttgcctggctgcatcctcccacccccgccctggtcgcttgcttcgttctcctggttgcgttctcttggttctaccttgttaagattcgagctcaaacattaccttctcaaggaggcctttcctgactccttggactagattcctcatgatgtgtgcttctggtttcctgcatgtacatgccccattgactgtgccagcccccagcccctgcccctagtctgttctgcatcctcaatcccagcaatagtcttccacatgtatttgtggagtgatgaatcaataacatcctaggtcttaagacttatggtattaatgttctgccattttcctaaaatgatttgaagcaacataaagcaaaacaaaacaacagctaataggatgacttataaagctatgttaattaaaacattgtgctctaaaaccaaaaagagatagccagtcagtggaacagaatagaaactctagaagcgtgcctgaataaatacaataatttaatatataataaattagaatgtgaaatgattgagaagaactgaatttatcaacaaaaggtattgaggatgactggttacatttaaaaagtttaaatgtcagaacaacctaattaaaatgaccaaaggacttacatagacatttctccaaagaagataaacgaatggccattaagcccatgcaaaaatggtcaagttcaccaacctttagggaaatgcaaatcaaaaccacgagtcaccgctttacacccattaggatggcttttattaaaaaacaaaaaaacaccacagaagcaaacaaaatgacaagtattggtgaggatgtgaagaaaatggacctttctgcattgctggtggtaaaatggtacagccaccatggaaaacaatatggcagttcctcaaaaaattaaacatagaattaccattg

SEQ ID NO: 48560 - DNA, 1060 bp, Homo sapiens
aaagaagctgatgtataaagatgaaattggatttataccaaaaataaatcagttttaggtgtttagcaaaagagagctgtaatggctttgggggagccctggggaaaggaaggatgtgttcagaatacggggttggatcttggaaggcttggtcctggttcctgaaatttgggttctctgagactcagtttcttcacctgtaaaatggggaaaggcacctgctccaacctctctcagggtgattttatgcttaaattagataatgacactggaaagtccttgaccaaagttaagaaaggcatatctgggattgctgagtgtttccatgagagccctgctgtgataggtgtctgaacgtgtgaaggaggaaatcatggaagctgcagaagaagcagtgttgcaacgataatggggactaaagtaggtctcatttcagttttaggaggaaatagggcagtagatggaaagattgagctatctatttttgtttttaagtcactttgcagggaagaaattgggcagttggactctttcattctctatagtcagaagtcagaagtcagaatgtcagagtagatttaaggcccacatgaaaaaacagataaatatatcctgaaaagagtttcttgtgtggtttggatgtgtataagaaaccaatttaaaagcgttcagatctttgtatggtatatgtaatgataactgacataatagcgttaggaagaacataaccgtgccataaaccctgtcattttgactcttttgaagaaaagctggtcagagacgtcggggatagaggacgatcctggcttttttacttgctgcaaaagctgctttctgcagtccagctcctcttgtttggagctgtacaagatccttcagaaacctggaatgtgggaatcctgggttattgtctacatgcactaggcacaggcatgagcttgtctaagtgaaaatgcagtatatcctactattagcaccgccagcattgtcaaagcaaacacattccccagtcttagcctcttctaaggactttataggtagtaaatcatctacttctcac

SEQ ID NO: 48561 - DNA, 1014 bp, Homo sapiens
gttagggcagagagaatttggcctggtttccctggcgctgtccaaggtactctctagtagttctgctcagcctccactcacatctttgtgcttcctaacaactcagcctggattcagagctgcccttgcctcactccagtagagctggtgtgtggccatcatcatcatcatccggtccaaatccctcaccatatgccggagggaatcgatgtccagagcaactgagtcagggcagtgctcctcctggagaggaaacttgcagtcccacatccctggctcccactgcactgtgcacggagttcctgctggctctgggttccggtccttcagtagctctgtgtgcttccactagctacagaacctctctgagcaccagtgtattcgcctgtaaagtaagggtgagtaacacagtatgcttacagggcagttgtggggattacatcataaggcacacagtaagtactcagcgaaggtcaaacttccattcttgttacaaggtcgtcgatatcttccacagtccctggttcaggctcaagtatgttttgtgatttgatgtcctactgtgttcctcgcattaatcagcccctgggactttatagattaatgatcacgtttcctattcttgaagtatgcagaggcacaaggaacccaaggtcttaggtcagctcactcgggtacatctggctcgggactgctttggctaagattggccagtgcgacctggcagagagagggccaagtccaggggcgcgcggccccgccctggcctgaggatagtgctcccaccccgggagacttctagggcggggcccatcaagaatggggacgcggggaggtcaaatgcctggagggggcggtagcgcacgtaaggttgggaccccagctttgcttggggttggcaaagggcggtcgctccgtctggtggggaggaaaggggtgtcctcagccaaggccctaaaggccgggcagcctggcaccaacgggcgttcgagcacccgtgggcgtcttcagcga

SEQ ID NO: 48562 - DNA, 1047 bp, Homo sapiens
gtttactgagcatctaccctgtgccagccctactcgtacgctctgtctccaaagatgaaaaaggacttctctgccctcaagggaaccccacagtatcttagaggagacaatcatgtcggtgagatggtgtggtgatgaagcctgctgggtatacagctcagggaaagtcatcgatgatggctcaggctcagcctgggcacgccccagaggagagagatggagtggggcctcaaagggcaggtttaggcagaaaagaaaaagggcattccagctggggcatgtgcaaaggcagcacgtaatgtgtaagttctagatcgtcagggaggaagggtcagttgggtgcctgtttttctgtttttagtcctttaaaatgagtagaagcaacctgttaccctggaaagagcactggacatagacctagtgctgcgtgatgttgagcacgtttcttcttccctttgagtcccagtttcccttttggttacagggggatagtagcccccagggatcatgtgaaagtgagaaagcccttttcacactgtggagcggtgcagatgtgggaaacctcaaagatggttgcccattttaaatcctttcatctctcatctctctttcttctctcccttctgccctgacgtagccatggttgggtgggtgaggccagaagaaactgcctccggcaagaggtagcagccgctcaggtggctctgctggcatcggagcccacagaagtgaggagtggccgatggacctgccctccaaatgtgcctgactctgggtcttgctgtcactggatttcctggcatggcagacagaaagaaagatagtttgaccaagtcgtagaagctgatccagcgggtaaaaagggggcagggaactcgtcccttttattcttgcctcagagctgcctgaagacatgggccaggccggaggctggacaactttggataacgctgacctgtacttccaagtaaatgcctcctgaagagcccgggacccttcctgggagaattctgcagccagaatgaaggtgccatcagcaggaggcac

SEQ ID NO: 48563 - DNA, 1032 bp, Homo sapiens
actcctggagctagaagcacttgtgattcttgttttaatttactgatggcttcaggggttaacagtaggcctagaattgtttgcctctgaaattcatggcccctgacgttatgtgctttgaggttttgtgcctgctttttgctgtggtcctgtttttttcataacaatatactggtatagcttccactcaggtaagtttgattgaacaatgatacacagctgcaccggggggtcaccttttcacaaatgtagacctccatgaactcattggatgaccctggacagagcggggctattcccattttgcagacaggacagcagaggctccagacaatgcctttcctttctttttcactggactcaagtgtccaaggcttttcatcctaggaagtttgtgtgctggttcacaagaggtccctggcaccctttctggggatgtttggatgcggctggtaggcagggaagagaaagggcaccccagcgggggcatgtgtggaggcagcacggaacatgtaggttatagatcgtcagggaggaggggtcagttgggtgcttgtttttctgatttttggtccttgatcacccccttcccttcccacacgtgtccccagcctgcctgtggctgttccccccacaagaagcacctcccttgcttggcaaccttcaccagcatttcccaaaagtatgctcctgggaaccctagttccacaggataataggtttttcataaagaaacgtagggtgtgtatgtgaaagtggggtgaggttccctggttgagtaggtttggcagacactaaagcgagctacacgatcatctttgctacaggcctctcacaaccttcagcatgccagcatgggtcaggcctcttcacagggccaagaaactcatagcatctcccacattactctcatcacttctccaaggtgcttttgcaagactggaattccttggacaccattggagaagccccgctttttctggaacagcggcaaccaagaggccttgcagccctggaagtgggtcagggccc

SEQ ID NO: 48564 - DNA, 1039 bp, Homo sapiens
aaggtcagaccagatgatgctctggtactccacagtgctcacctgtatcactgcagggctttctgcactgaaagtggaagcagaaggctaatgggtcacattgtgtaaaggtctctggtgctcaaagtttctaggcaaagaagtgaaaatttggaattttgtctacatcctattaatgctgtgttcctcaaaagggaattggcttgtgtagtttcctaccatatcatattttattaaattagaggggccctgacttttaaaacccactggctttctgaagtgttttccagtgaatgactcattcagccagtgcttgttgcatttatgttagctaccaggtgccaagtgtgcagacacaatacagagccttcaggctctcgacaggcaagagaacacctgtaaatagatggtcccgacattgagaggcagcatggtagagtgggcagaccttgtgctctggactcaggttcaaagttcagatgaagctcaatggcctcttagttggagcttagaaccagtatgcccaaagtgctgggtctgcaggaagtacccagtcgatggtaggctgcacagaattctgatctctaccttgagccatgctgagccacaagttggtctccttgggaggtgccatctctcatctgtccctcccccagccatgaaagcccattcccctatgctggctttcagaggctgtcgttaacttactgcccagagcctcgtagttttcttcccctgccctgatggttgggtgtttttcctttaaattctctcagccttacactcacagaagccaactttccacaggactgaagacaaagtgtttcatttagctgttactgatagacacctttacaaaggttactaatgtcccagcctttttaaggagacacactcattcatcccctactatgtgctggcagctttacctttgtcatttcatcctcatggccaccctggaggtggcattgtgtaacctcatcttgcacattcgggaaacggatgcttaggagagggaagcagcttgccagttaaacag

SEQ ID NO: 48565 - DNA, 1026 bp, Homo sapiens
gggcatcccaaggccaagtagttttcctccagtctttactagttccttctcctctgtaaatggctggattctaaacatttcttggttgttgcgtgggcctagaccacctcactttacatatagggaagcccaggctcagagttgggcagtgatgcctgacttccggaccagcaccgcttctgctctgctgttagatgtcaagggggagggcaggggggtaaggcaggtatggaggttgtcagaggcgggcagatctcggctgtcaggaagggcatcgtccaggaaactgaagcctgagggtggctcacagaaggtgaatcaaccaaaacagtctctaaagactggggcattgatttattcatgaagaagagcctttatgtctcaggcaccatgcgggtattgaccattcagaatcactctgtgccaagcattgtgctctgagcatgtcacacattatagtcattcatttaatccttacgaaagccacagaagtcagtttcagtttgtagatgaggaaaccaaggctcagagaagttgaggaattcacccagggtctccaactgcctcagtgtagctaacccacagcacataaaggagaggcaggtggtgctgtgagagctggcttagaatcggggctgaaaagacatccctgaggaagtggcaaggcagctgagacctgaagcaagagtggaaaccactggttagaggggtagtagaaaagtgcggagcaggcagagggaagcacatgtgcaaaggccctgtagtgaggtgtgcagtgtgtttaaagaactaaaggaatggttggagtgcagagcaagagacatgacatgtggggaggcccaagggacagagcaaggcccccagggtggtaaagggtgactcagtcaagtaagggaaagggctttggggaggggaggtgggtgagtgatggtggggcgggggagggctgtggcccaggcgttagaggaccctttctcctcttcgcctccagaggccagatgtgtgagccaaggagaggatggagtg

SEQ ID NO: 48566 - DNA, 1052 bp, Homo sapiens
gaggagtataagtcagcagggaggaaaatctgattgtgttcgtggccctcacaaatgcgtttgcgggcagttcgctgcagctgctgaggagtagggtgctgagcaggttctgctgagcaagataagttggaatcacttgcacaggctctagtctgtactaagttgataaatgcatgctgccactggtgtcctccttatttgggggctgcttttattgttttgtgatatccagtgtgatcatttatcaaggcctcagagattcaccagcaaactcattcctccccaaccatattttctatgtggagtcttgagttccacactcgtgaattctcccacctctgaggttttcaggaattgaagcccctagagattcagttaggtatttgtgccccattgttttccaaaaaagagtggagacagtggatgtctgtatggactgtttgtacccactctctttccctcttgttcattattaaaaatggtttgcagagtcctaattgggatgaaaaaagaagagggccaatagcactttctttgtagaataatttctctggttcataaagcttagttttcctgttgagagttcctgggtcctgaggcagcgagccctttgtcctgtgggtatatgattgttataggccgggggctgcaatccatccccgaagagcttttttttttttgagacggaggcttgctctgtcacccatgctggagtgcagtggcgcgatctcggctcactgcaagctcctcctcccgggttcacaccattctcctgcctcagcctgccaagtagctgggacctcaggtgcccgccaccacgcctggctaattattttgtattattagtagagacggggtttcaccgtgttagccaggatggtctcgatctcctgacctcgtgatccgcccgcctcggcctcccaaagtgcttggattacaggtgtgagccaccacgcccggcccccaaagagctatttttattatattcttctgggaaatatttggtcccagtcaaggacacgtgagcttttccctgcctcatgtctccatct

SEQ ID NO: 48567 - DNA, 1137 bp, Homo sapiens
atgcagtgtttcactttccattcttggcttatttcacttaacataatgtcctccagttccatccatgttgctttgaatgacaggatttcatcctttttatggctgaataataatccatataaacccataaatgtaagtaagtgtttccctgaattctgtgagccactagccaattaatcaaacccaaggagggagttgtgggaactctgatttatagccagtcaaaagcacaggtaaaacaatctggggctttcagttggcatctgaagtgggggcagtctcctgggactgagccctcaacctgtgggatttgatgctgtgtttggatagatcatgtcagacttgaattggaggatacttagctggtgtccactgcagaactgattaattgattggtgtgtaggggaagaaagctccatacctttggttacagacacattctgtgttgattgttgtggggtaagaatagaggaaaaatagtttatttttttgtctctagtcacaggatggaacatagagcgctgtttttatggcttgggattaggaggagggattagctagaaaaggaccacttaaggacattcagaggatgatggaactcttctgtatggtaccctcttggtggatacataacactatgtgtttttcagatcccatggaattgtgtacaacagagctattttttactgtatgcaaattaaaaaaaacaaaatcaaccaggaaccaaagatagaatgcaaactatgacagaagatctaagtgtattcaaatgaatgacctaaccacattgtaggaggtggaggagaaaatcgtatgttgagtggatattaggctaaagacaaaaagtactgtatacaagtactgtactctagttgatattttttttcttaccaggatatgggctaacaattctgttatccttaccaggatatgggctaaaaatttttttgtgtacatgtacacttaacatatataccaggattgaataaataagtagcaaagtttttactgtcagagacagaatcaaaggaaaaatgctagaacaaactctgtggatgttgggttgaagtcagaggtatcggtatgaatcagtatgagtgcatgcttttaaatacacagagagttgcacacacacag

SEQ ID NO: 48568 - DNA, 1032 bp, Homo sapiens
ataaaatgagttactgggagggtgtgagtagtgagctccccgtcactcaaggtattcaacagcttggataactttgtcagtttgctgaaggagattcccatactgactggaacatagataagatcccttctaacagtcagattccccatgaccagattagctactttggcaccactgtctgagacagactattgagctgggggcaccactgtctgactcagtacggcagtggtttatggaaaagctgaaaacatgctccaatataccttttaaatgccttccttctattaaaatatcgaataccaattattattaaatatttaagcacccaggagagttggttttccaggttgaagcctgccccagtcactcatccttatgctgtggacacgtggaggggtcatttcaggaaatttccatttgtctctcaggtcctgggagcacaagaggagaaaaggaagacacgttattgacaaccatggtgagtgtggggcttttctaaaagcattttaggtctccggcaatcatcagttgattgatttacaaggagggatgtaggtgtttgtctgtctttgtagtggtcacagatagggttggtgatgagaatgtgtaacagtgggcttagctctggcactgaggagtcagaacagatgccagctctaaactgtggagagggctgtgctggtgctcacccgctgggtgtcagccctggccctgttctcatggaggcaggggattgagggtaggaattgatgggcagcatgagaaatgaagactcaccatttgggctgtggagaaccagggtgagaggagtcaaagaggaggctatgtttccagctggggaggcctcagtttcctcatctgtaacttagagatgtattaggattagggtcaactgtgagtaacggaaaatccccaagtaacaatggtgtaaataagacagcagcctacttcattcaagtaaacaaagtccagaactagtatatggctcattggagttagggacttgagtcctttctgcctgttggtccc

SEQ ID NO: 48569 - DNA, 1050 bp, Homo sapiens
ggcaggactcacagccagggagtaacagtaggtgggctgcagtgtatataaacatctagctctgagaggtcaagcactgaagaaagtagcttcaggcacattggctaaaaagacctgaaagtgttaagtttgttaccattgaaagaatatagaatagccccatcaatcaagagatgctgaaaatttggtaaatgcttattagaaatacactctccaaaaaaaaaaaaaaagaaatacaccatccaatcagaacaagtctgaaataaacatgttttaaaagcctgtaatgacagagaggtggcaaaaatgaagaggatgctcaaatgaaaaggaaaaagaagtttaggaagaactacctgaagccaagagacctcttactttgtccaggtgggaaactgaggcccagagagggaagaaagctggtcaaaggtcacacacccattggaagctgagtgagtgacactcaggaggtgaggattccatgggaagagcacctagaggtgattctcccacctgcagctcctgcatgggctctagaagctggtttaacacatgactcttctgagcctttgcctcatctgtgaaatggacacaatgacaactactacggggtggtggtgagcagaaggcaggttatcctctggcgtgtgagatactcagcccagtagagtgttagggactcataaaggcttgctattagaaattagggccccagtctcctaggacagggttttgttttgtttttgtttttgacacaaggccattgctctcctttaaaggtttgggttgtttgtggcagggatggggaaaggatctgcccttcccaggccctgccgtgcccagcacacctgccatgctgaatctcccctcaccctcgcagggaccctctgaggagggtattcccccattttgcaggggagggaattcaggctcagaagtgaacactccagaacttgcacctgcccgtgcctgccgagctgtgcctcttctgttgtgcatgcgttctccatcccaggtttccttagcctctgcatcttgaatcttcacgga

SEQ ID NO: 48570 - DNA, 1034 bp, Homo sapiens
ggtgctagggagtcatggaaggttctaggcagaatgagtgacaggatgagagttacgttttggaaaaattactttccttgaagtgtgagaatagattagatactctagggtaagctagagtcaaaaaggctggttaggtagagtttgctgcagtctgagtgagaggtgatggtggcctagaccagaatggagacagcggagggagggcacccagatgaatttgtgatatattcagggagtagatcagcaggagttgacgactggcccttggggaggggttaagagagacagcaaggatggcatctagagatctggcttctgtgaagcctgccatgatatctccctgttctctggtccctccgcagcagaaaggcctctgtggtagcatccatcacaccatgttaatgctgactggcttcctcagtacccaaacctggccacacatcagaatcaccaggatgcttgtctaagtgcagattcctgagttccttttctggagattgtgatttagaaggcccagggcagtgaggggagtaagagacagggactctgtgtgagaagaggctccccagtgattctcttgtatggtaggtttgggagccactgatgtgttatgtgtgtctcatctctgcaatccaccaagtgcgtgcacaggggccctggtgagccccctgaggaatttactgagtgaggtttgtgactacagcactgacatgcctcagagtgtctcagagaccccagatcatcagttttaaccaagttctgcaggatagtcttgagcctgggtattttaaaatgtgctgttcctcagttggtgtgacaccgactctatattcaggtagcatctctgcctgtgttgagttgtgctccagctttctgctgcgtaattcataagaaaaggtcaagttgaggagtagtatatatggaagacttccagaaggatgtacagtgtgtctgtccctcacatcggggtaggcaaatgaatggcctgtgtgctgacaccttccagccttgtgctcttcttccttggatct

SEQ ID NO: 48571 - DNA, 1093 bp, Homo sapiens
aaattcctaaagttggtgggtctaagagttgttcattttaaatatcaatagctactgccaagtttgcctaccaaggaggctgtgtcactttactcccccacaatgtatgatagagcctcttactccatgcttttgtccgccttggatattaaccattttaaactttgccaaactgataggtgcagatggcatcacatttgtatttgtgtttctttaattatgactcctgagttacttttgatcatccttgcttgcatggaagctttctttttaagtaacgtggacatttaccaaacatcctgcatgtgtcagtagacatgaggcagctgagactatagtgggtagaggaaaaattattggcttggaaataggcatcttggattcaagttccgtatctactgctttaattaagtggctttgaataaattgcacattatccctaaagttaccttcttcaggttttaagttagctgagactaaaatgacttgtaaagattacccaacaagaaagtctgtagtaatgccagcatgtagttcatgctcaatgatgactagctttaatatttattgagcacatactgtgtgctaaactccatgtgttttgcatatatcagtgcatttaataatcacaaaaagtatatgggttttttgaactataatttgtcaccatgttacagaagaggaaactaaggcccagagtgggataaattacttgatcgtggccagttagtagagctgagattcaaaccctggcagtcttgaatctagagcttgtgctctaaactactatagttcattcattcagttccttagaaggagaaagatcctagagcggcactgttcagtatggtagccactagccacatgtggctgttgagcacttgaaatgtggctagtctaaactgagatgtgctaaagttaaaatacaaaccgattttgaagatgtaatgtgaaatatatgtatatataaagtatctcattaatactgtttagtattggttacattttgaaatgataatgttttcggtaaataatatgttaaaattaatttcacccttaaaaacatttttaatattactagatttctattaga

SEQ ID NO: 48572 - DNA, 1050 bp, Homo sapiens
gaagaaaagcattgaatgtctgcgctaaaactgtcctgtgcaagtggaatgacaagcaccaatttcctgaaccaagagagtggttgttggattagagaacagaaggggctaaagtgaggtcaaacaaggagacagaagaaagtgaggttgaggggtcagggtaagccagatctgcaggggtctcacagatcatgataatgtctttggagtttattttgaatgagacaggaaaacatggggggtctttgtgattgatctgattaatgtatttaaatgatcactctggttgccataggaagaatagacaatcagctggtgaaggtagaaaaaggaagactggtgaagacccttttgcagtgttccagacaggggatgtttgtgggttgggggaaggtggtattggtggagataagaactggctgtgttcaggatatattttgaaaatgaaagtgatagtccttgtgggatagattggatatagatatcgggggaatggaacgtaagagtcaacgatgagtgccactttttgatctgagaaccttgatgaatggagttgctatttattgggatgagaagaactgctgaaggaataggctggaggggttagaaatgctgagtccatccccagatggctctcagtcatctcagtgcagtcactggggtccttttgagggtcagagtgctgggaagacgaatcagaggccttgatttcccaaaggatgcagcaagaactccctgtctgtgatcacagaactgaagctttaaagagcacccacaggaggcgctccccggatgctcattcttagaaaagaggcagggtgactgtgaccaaggctggaggcagctaaaagttagactagtgatggataatgtttgagcatagagagctgctcaacactgcatttggacttgaatttttttgtgtaaataggaaagaaaaaccttggtttgtataatgttttacaatttagtgtgtgctttcaaattcatcgtcatatttatcctatgaggtaggaactgctgtcttcagtttggagatgaggaaatgga

SEQ ID NO: 48573 - DNA, 1022 bp, Homo sapiens
atggctgcatcatggcagaatgtttctggtggaaacagggtccttaaagagcaattacactgttccttccataagcatagatttgaaaatccctttagccagagagaagacacaggcaacaaatggaaggtacaagaatttttttatgcggagttgtttttgagtctctaaacatatcaaactcatcagctaatattaggaggcaaatctcttatctctgattaagagactcagagtgagctggtggacttcagcagaaggcaggggtaggtgccagcatgagcttccttcctaagatttgttctttgtgaactgactggtaaagccactttgttttctcatgctcatagctttttgtttttggtctgtagtttccagcatccacgtttcctccacttttcggaaagggtatatttttccatctcccaccttttcatattctttgtgtgtgtttcaggagtgctgactgtgtttctgtagtcacatctgtgtgtccttttagtccctcacatagttgcctgggttggatgacattcatagaagtgaatattgcttctcaacagcaagtttcctagacactcccaacttcatctccaatgtaaagtgagtccttggtacaatctcaggtcatctttttcttttttcactcctcttaacacaatttgcgctgatataatcatgtgattatttgtaatgccatgtctcccacttgagctacaacctgcatgaagatgggaccttggcgtttttggtctctgtggggttcccagtgcctgggacatattaggcactaggtaaacatttgttgactgactgaatgaatgcattgatttaatgtaaccagaaactcttaatgtcactttacttatcatgacataaagtccatcatcttttcctttttttagttgacagataataactatacatacttatgagacggtaatattttgatacatgtatacaatgtttaatgatcaaatgaggataattagcatattcatcaccttgaacatttatcattt

SEQ ID NO: 48574 - DNA, 1060 bp, Homo sapiens
tgatattttctccaaaaggcagtcactgactgctttggcagaaagaattgaggtgattactcaagagttccaccaaattgttgtgctagcttttacatttgcaaactataaaaaacgggactaaattaagtagcagctcactttttttattaacagtattacaagttgactttttcatttcttgtgtaattgagataaaagggggggtgtgtgtatgagagagagacaaagattttgttaatggttttagtatgattcatttcttatgtcatatgggcattctaatttgagtcatattaattaaggtgatctatgtatgtaaactctttgagggagggacttggcatgccttgtatacagctagatccccagtgtagttccggacacgtggtagatgtgctcagacaacattagctgtatgaatgaaagaacttcttatgatacccaaatctggcagccacaagtctcattacaatttactttatggagggtccccattggtaataaggtctattaattgtagaattgtccctgctgactttaagagacttcactctgtgtccttttatgctgacagagcctacaacttttttcatctccaataatcttcagctccaggccaaaaaaaagttgttcttgccctgctcacattaattgaaataagtcagtgagattccttctgcccaccacctcacttctcactagcatggggctcagctaccattagagatgttagagtggggctgttgtgcagttcttcagactattagtgctgtatgctatgttctgaggagggttcgggcttttatcttctcaaaaatgtgtaaaattttgactcactcatacagctttagatgttaacagatagaagtatactgactgtgtgtgctaggctcttccatgtattatatcagatgttgcttccagccaacctgagaagctaagtactaacattgtccctattttacagaagcataaagaagttaagcaacccaacctaagttcacaccaaaatttgaacccaggtagccttacttcattcagtgcccgtgttcttaac

SEQ ID NO: 48575 - DNA, 1005 bp, Homo sapiens
gtccagtaccaatttgacttaaaagttattttggccaaaagcaatgtggtcaagtacaatttagctgaaagcaagttggttaactgatttgttgtaatcagctattaattgaaacaatgatttcgtcaaaacaatgagttggtcaaaatgaatatcctgttaatagtttttgagtagtggtaatttcagtgtaaaatgattagatacttttggtccattttctagggacttttccagtatttttcttttacagttcaagttaactttcagctatggcagcatttgattgcttgtgatttcaaaaagttaaagcaacctagctacccagtaataggagaatagttggacaagagtaatcttaactaaaaggcaataagaggttaattggaacaaacaaaacacccagtgataagataaaaacatgtttcctgtattatttttcttttcccctcataaaaaaggctgtgcatatgcagtacaggacattcagaaaaatgtagataaagactagaaggaaaaaagaaaaaagctataaattaattcacccaggaataaccactgttgtccttccctatccttctaagtgcattttatacacataaactctacctatagtttgtaatttgccataatttatttaagcattctccagttattggttagtcacttttgttgagaatcagattttggttcctttgtgcaactgtgggccaggctacctttagctgggaatagattgcctttctcttttcccttctgtccctcaatcctgcctaggcctgcatccagcctgggctctcaaggcccccctgcctgctttaagtgagacactttgtaaatgaaaccattctgccaagcctttctatggttactaaagaggcctggttccagaattcctgtggaactctctggttatatataaaaatttttttggagttcatgcttgatatatgttatatgtatatgtatgcaaatcagatagagtgaagagatgggagggattat

SEQ ID NO: 48576 - DNA, 1061 bp, Homo sapiens
agtggctgttaaaaagggagttgatttgaggaagtattacttagcattcatgcatattgggcttaggctctagccctgccactatcattgtcttctctggactgtgaagtcactgaggacaaggaaactaaatttaatgtctgtatcactagtgcctagaatttctggacacttagtagtcaccatcaggcgtttatttaatgaatgagaagcaaagtgaccttggttacttttttaccctgaggggctcagcactcattaggacttggtgcctaattttataaaaagtcactaagctcaagtgcttggatgaaaggacagcgtggataaaaaggtttttaaaacatggatgttaaggctgttttgcttggagaagacttgggactgggacagtctttagatattatttgaaatgctggcactgtctatctggatcccagggcttgaactaggatttgaggaagtcacagggaagcagatttcagtctgacatttattcagtgcaagttttttggtgctgtagtatatgatgaaagatgtaaagctgaataaagcattatttctgccctagagttgttcacagcctagtcaggcatatggatatgtaaacaatgactgtaacgtgttatagatgtaaagacaaaataaaggttaaagagggcataaaggagcactcaattgcagagatttgaggacattatttttattttgagctttaaaaagatgaataggtgttctcaggaggtagggatctggctgagagggaataatctgagcaaaggtatgaaacagcctaatgcattagagaaaaaagttcttttagtaaggcatttggggttggggaagctagaaaaagaaatgggagctggtcacacagggccttgtgtgccagactaaggggtttgtagtatatattgtaggcagaagagatccatcaacagattgcaagcaaggaagtatgttcactttaaagtttgagaaagaatagtgtggaagcacgtctcaaatttagacttgttccccctctgaaccgtgaatcagaccatttcaggtagaagtct

SEQ ID NO: 48577 - DNA, 1033 bp, Homo sapiens
aatatttttgttataggttcgcagtagtgctttggttacaaagctgcatagttttcagtggttagcccctaactatttttcccttgagccctgttatttttagtgtgatgttgcagaacaaagtttttttttagttacatatatgtaatttaggaaaatatataaagtgcccattaataaaaaatggttaatttggggtacagcatcttgatagactataatgtgccttaatgataagcatggaaatttttctatgaaacaagtacaggaattagaatacaaaactgagtatctggatactatgcttacaactgtgtaaaaatgtttcacacatacctggcctgcaatagttgtggtaggatggtgggactataggttagcaaaagtttttttaatactgtgaagttggtaaaatagagataagtccattttaacagtttacattttatttgactctggttttagaattcctggaaaactcaagcaattcgtatttgacttacattctggaaaactgcacagagaattccatcatggacctgacccaactgatacagccccaggagaggtaggactcctgtttatttttcaatgagaactctttttttccctttttcagttagcctcaaagagggtctgaagttcttgcatcagcttgagcttcagcttctgaatatttgtgtagagaaattctgagtagaaattaaccttttaaattaatttttaaagctttaggtcttcagaaaagttgaaagaatattataacgtagtttcttgattgtataaaagtgttctgatgtgacctctgtggaatatggctataacagttaaatatagttggcttcaaatgggaataggaaataggaatctaaagcagataaatcagtgaagaaatcagtggattccaataactatccaagccttcctctgtggctggaagattgaccacactataaagaaagtaatgatttgttattcttgctaaatcattctaagagccttcacaaatacactattcataatgctcaaaacc

SEQ ID NO: 48578 - DNA, 1029 bp, Homo sapiens
gatgctgtattatgttagtttcctgtacccacgtttgcaaggcagctcattggaggatcaactccatagctctttacagtcttgccccaacctaaccttccatctttatcttccaatgaggcactacatgaacttccatagccaggattcactactctcttcatccatagaaactactcgttgatccaacccatgcagtgctccctgcctttttttggccctgtctgtaaattttctctgtaatgctttctattagccttacagtatatgcatcatacatattatgtactttttatactagatcattaaaatctccctaagtgaattgtaggcccttgcaggacagaatgtatcttgaatttccttcaggccttagctggtgcagtgctttcatcttcataggttctcatctgaggactgccatgagcttgtggaagagtaggtagatatgttcttgatgagctgtatatgatagaattttcatcaatttgtagaagagaaaggtgagcagatgttcagtcctaaaggtgagcagatgttcagtcctgtaaggaaaaccttctagcggcattactttacaatggattgggttttcctgtaagctctctgtcatagcaagcgttcaattgtagggtaaatggccattctgccggggatgctgttaaggagaaagagaattgaaagggaaagagtattctaaaagtaggtaaactagggctcgcttcatctttgtaattctgaatacctatgattttgacctaaataaagcagaaaccatagaggatttatttatttaatatggggattgatgaattgacaaggataatatgataggaaattaaacaataatacacttactttatatataactgaataatctttgaagtttatgattctgttttttttttttttgttttttttaaagacagcactcactctgtcacccaggctagagtgcagtgctgcagtcatagtacaatgtaacctagaactcctgggctccaatgattttcctgcctcagcctccca

SEQ ID NO: 48579 - DNA, 1050 bp, Homo sapiens
ctgcacatcctcagttcctttgacttattactggagttctggcccaagtacagtaaaatgtcagctagccagtgataagcttacacttctgtaatgattttacctctgaaagggctgagaataaagaatagctactttttttttctttttttgctagtcaaaataatttcttagaaaacagctactcaaatggactcattcctcaaactttctaaatagcaggaatttttactgtaggagtggatattatttcctcacaggaagtcttgtagtgtgctaacaacaaaagtattacaatgttgtaaaatacttagttctttgttagtttaacctttgaatgaaatgaacagtttcagagaccctaattttgctttagagttacagtagtcccctcttatccacaggaggtaatgttccaagatgctcagtgtctgcctgaaattgtggattataccgaaccctatatatactatgttttttcttatacatacatacctatgataaagtttcctttataaattaggcacagtaagagatcaacaatagtaactaataataaaatatactgttcacagtttctttatagaagatttattcttaatctagatcttagccacctcagcgtatgatttattttctttccatttaaagtcaagagctttcatcttttcacttaaggaagcgctttatggcttctctttggcatatctttttttttttttttttttttttgagatggagtctcactctgtcacccaggctggagtgcggtggcgtgatattggttcactgcaacctctgcctcctgggttcaagcgattcttctgcctcagcctcctgagtagctgggattacaggcactcgccactacacccagctaatttttgtatttttagtagatttggggttttgccatgctggcttggctggtctcgaactcctgacctaaggtgatccgcctgccttggccctccaaagtgctgggattaacaggcatgagccaccacgcctggcctctctttggcatatcttaattgccagcatcactac

SEQ ID NO: 48580 - DNA, 1059 bp, Homo sapiens
tgtagcttattagtcacacttttcccccaccttttttttaacttaaaattttattctagagatgcggatagaaattttgcctatttctttttaactgcttatgcttcactggatagataccagttcactgttgttaccattcttttgctgttacagatagctctgcaaacaatagcttgtgcttacgtaattttgatagtgtatctttgagatagatttctgtacttgcagttgctagggcaaaaggtaaatgtatatgtagctttgtaggtattgctgtatatttgaaattactctccgtataggggttgtgccattttatgacctcaccaacaatgtaatagtttccctgtagccttgattaaaaaggtataatgtcaaattattgggtatttgtcagtctgatgggtgagaaatggtatctcaatgtattttaatttgcctgtctttaatatgagtgtgatcaagcttcttaggtgtaaaagtcatttgcatttctttttgtgtgaactgtcttcctgtctagcctggttttctgtagaattgttggtcttctatttctagactatatagacacagacacacacagttctttttttttccccccccacagacagggtcttgctgtgtagcccaggctggagtgcagtggcctgatcttggctcactgtagcctcaacctcccaggtcacgtgatgctcccaccttagcctcccaagtagctgggactacaggcacaagccaccacacccagctaatttttgtatttttagtagagataggcttttgccatgttgcccaggctggtctcgaactcctgggctcaagcgatccacccgctttggcctcccaaagttctggtattataggcctgagccactgtgcccagcccacacagagttcttaaccctttatatccttagttgattctgtgatgatgctcacagggttgagaagcactggaatatacagccatatgtgaattcagtcatatgtctgataggttaaaatttgtaaaaacccttggagatgtttaattgcttacagttattgaaaact

SEQ ID NO: 48581 - DNA, 1078 bp, Homo sapiens
acctgccccagcctcccaaagtgttgggattataggtgtgagtcactgcacccggcctgtagtcattttatgtatacttttctgtagttgttcttggctagattaatgagtggctcaataataatagttactgaaaacctatgatgagttatgggctataacaagtacactacatgaattatttctatccatagctaccttgtggtgtagaaagtataccctcactttatagctaaggaagttaaggttcaaagaaacagattgaactgtccaagccctgaattcagtaatcatgaagttccagagcccctttctgagaaagtccataaggtcagggctattttcataataatacgaagacattatttgcctttttcactgtgttggcatttgcacttagattttgggaaagctcctaccgttctctaacttataagagtagctcagtgtgtttaaattgcttcgtgcaaacaatagggttcgtgctgcacacctttccttctgggagtctggaattttggcatatgctaggcagagggtatctatgtgactgactccagataaaaatcctggagtcctaggttcatgtgagctttctttgtcaacaaaagattgtctgactggttgttacaatttattgcagaaggaattaaacgtgttgtgtgtgactccactgggagagagccgttggaagctcgtgcctaatttcctctggacattgctccatacaccttttctctttgctcattttgctttgtgtccctttgttataataaatcctaactgggagtacaactatatgctcagtcaaactagtaaatcctccaacctcaccaaacctggtggtagtcttggggatggggatcatggggatccctgacacacaagtaaactctaaataggataaactgcaaaaagccatgccaagacacatcatattaaacttctgaaagctaatgataaattttaagatcttgaaagcagccagagagaaatgacatattacctaggactgttactgagaaacaccaatttgaatgacagtggatttctcatctgaaaccatggaagccaaaag

SEQ ID NO: 48582 - DNA, 1025 bp, Homo sapiens
ttttaggacagccttcacccccactcccagtgcctactatgtattttgagcttggtagatgctcagacaggtttacataatacagtttagtcactcaatctgttatatccagaccctggtttaggtgtttggagtatgactagttcctgggtagtaaagacataagaataaaaataaagtatctcctatgtgtagtaatttagaattaatgaagcgtgcattatctcattccagcaacctgtcatattaacaggacatgtgcaacaattattaaatcctgttttacagatgaagaagcagagggtcaggggggccatgtgatttgcccaaagtcacataacctgttagagcttacctgaacctcacatttcatggttacaaacccagggctttttcctttaccccatgctgtcctgagcactttcccatctttctaggcaaaaacatcttccaaatggtttatacaatgtaaattactaggatctggtgtgaatttcatgggtaggctctataaaattggccttaccatgccaccacatggaactcactgggaaaacatcaaagagcacagatgtcatgttgagaatatcagtaacaaagaaccacagatgcggcagcaccccattttcctaccttcgccaggcgcgctggatgactgctgctgccttgttctttttgcgaaacagctccttcctccttcgttctctctgaattatctgcagtcggagctctacggggagaaggtcaatattcacactctgcccagagaggggaccaggtgctggatcagtctccttagatacctgaaagtcctcggacagggtagatgtctccagcctcctagctcctgacctcaactcctctgtgctctgtggcaaatgtgaatagagccctcctgtgagcttggcttgtgtcactttgtttcttggtgtacgatggtggggaggattctgcccagcatggaccgcctccccccgggcactgccagggcggctagaaccagccggagagcaccttcctcctct

SEQ ID NO: 48583 - DNA, 1016 bp, Homo sapiens
tgatagaaacctggctccagttatacttaatatatttacttgatcagcttctctgtctataattagtcttcctttgctgccacccctctcatctcactccatttgggctctggttctttcgggctgtctactctgggccatctcagcactcccaccaaatccagtgccagagtttacctagtttggctccagccattggctttagaactgaattgtttagggcagcaaggggaggcagaagggaagtgatgaagtggtcattattgaatgtgcacttttcaaatgtggtttggattaataaaaatattcaccatgtttgttttggagtaggaagatggccttggaaatgagttttttctcattgttacttaatggtataaaagaagttaccaagtaaaatatctgggtaatatctacaagatattttacagagaaataatgtatagatctgttgattcccccccccacacactctcaaatctgtaaataacaagtataaaaagtcttgatttttcagggctagatgacagctctcttgaacttaactgactgatctcttcctagagtgatattcatccttctaccattcttgttttttcatgtgatgtttttacatatttcatttttggtagtatactgtatcagattctggagtttgtgctgtgactgatatctgtgaaggacttagtactgttcttgactcttcttgtttttctgagaacttaggaaattaaaaatactaggggttttacttctaactctctactttttgtgcagatttcttttttacctttagagaaggcagtgttatgattaaattgaacaggatatttgtattttctgggtcataaatatttttctgtgatacatttctctatcaggtgggcaaaaaaaagcttttgttagccctttgttcatatcactcagatctttctgtcatagcactcaatagaaatacagtatgccctcacttaatatcctcagtaggttctttaggaaacagaaatgacatacac

SEQ ID NO: 48584 - DNA, 1912 bp, Homo sapiens
ggttgcagtgagctgagatcatgccattgcactccagcctgggcaacaagagaaactccatccccccaaaaaatatatatataaataaatataaatgcaattattataacagtaaaaaaattactaagtacttataggtgaattagaagttcctaattttgtttgatatttattcagttgtctgtgataaaaatttttagtataagtttgtctgattattctcagcctttttgcaatacccatgactgacatctgttttcttcctagccttaccttgaagggaatttttaaaggagacactagaaactgatctcataggaggaaccaaataatcctcatttaatgggaagctgctttacatttagctattccttttgagtcctctgccaataccttagctgcactattgtgaaatagacctagttacaactttactaagaataagaacacatagttgccttatagtggctttaaagataagttttctttgcctaattaagatacttttgcttagttatgtaggaagctgaagcttgtttaaacataactcatttgctgagggtaagactataaaaatcaaatagtaaatacatagcagctgaacctactactgaaaagcaaaacttcatcttggctccttagagtctgattttcagatgggatggaaattttctgttgtactatatatgttgatcaagtatgctttttaatgaaagtttgtattaatatgtttgaatttcaaactttcatactagggtacttgagcccttggatatgaaattaatacaaggcatactatgggttttattttaagctactaaatcaaacttgttttcagtaaagaacaatggttatatactgtgctacctttgacaagtctgtcaagttggtcacttctggtaatagttctccctttgttttttatagatcatcattttctgggtggaagtattcagctaaagactggttgatgagtgatgtagactatttcagcttcttattttccacacttacaggtaaccacattcacttgccagattaaaaaagaaaaaacctaatatgaatcacaattctccttctaagatttgccattttatcagtttggttcagttttgaagatgataaatattctatcttggagtgatttttgtgattagtaactggaaatcgaaagaatatttctaacctacatacactgttaggcttctgaggcaggaggatggatgatttgtctttaaatctcttatagtatgagtatcaaaaccctgagcattatttgaatgtcatgttattgtatttttaagtttgatgtactactactattattttaaatgtattatttgaatattttcattgtatacttggataatgataggattctttgaaattttctgaagacttgaaattaggagagttaatatagtgtcaggatccaaaaagaacttgacagatccaatactatgctgaatctagcaagataaatacttcagaagataaatgtaagctcctatatgtttactgtatatttatgaatgtatacatttgaggtgggagaggctgtgtgttttaatagtagttgtcagaaagtttttagtgattttagaaagctcattgggagtcagtactatgacatggctatcaaactagatgatgcctctttaggtagtgcttacagaagtatagtgatttgaacatcaaggtagatagggttgggccacatcagtggtattctgatcattttgagaactacctttcaggagtgactttggcagcttgtttgtgtaggttaggccaagtgtaaatagaggtggtaaggggaactagaaattgttgaatgaactatacatgtattgtcaaagtaaaaacacctagggggatggagtagttttgaaacatttgaaggtctattatc

SEQ ID NO: 48585 - DNA, 1043 bp, Homo sapiens
accttcttaacaactctgattccataatgaaatggtttatttatagaactgtggcctaagtcttgcctatgcacctatcttcttggccatctattaattctagaagggaattttttaaaactccattgatagattattttaagtattctaatgaagcaggcatggtagacgtaatgctttatagatgtgtgtgtctttgtttctagcatcaagcattgcacagttctctccaataacatagatcatctcttactgaatttaacactgtctgatatcatggtctccctggcaaatgcgtcaactttgcagaaggattgcagttggatagaaatgataaggaaatttgtaacagagacccttgaagatggctctaggctaaatagtaagcaactgaacagattgctgggagtatcctggaggttaatgcaaatacagccaaacagaggtaggtgatgctactttgcccttatttaagagtggagctcttacatgtgctatcttaaggtctagctttgaaatgatggcttgtaaacattccatgtagtcaggctaattgtattcaagccataaaaggtagctactgtctacttgaacactgaaattgtttatggctcagagtatctctaagtgggtaggtccactctgaagcagattgataaagatttctaccctcttctgatctagtttggctagaacttgagaactttttcccttgattgatatggcatgaatcttccctgtctctttaccttttttctagcttaaggttaagttatattaagtcagttttagagtgacttactaattctttgattttaaaacaaagttttcctatttggttcccatctaaattgcctttctaatattctggtttttgtcattcctaggtttgttgttaagaaaatttatactgtaactactgattggtttgacttttttattaggctattgctataggacttcaatggtagttgtctatttgtggctaaaattggctttgccataggaagaaagtaaagtacttcggtgcattcagaggaatt

SEQ ID NO: 48586 - DNA, 1027 bp, Homo sapiens
ggaatcttgcacttctagttattttcagcaatttttttttttttgagatggagtttcgctctgtcacccaggccggagtgcagtggcatgatctcggctcactgcaagctccacctcccgggttcacgctattctcctggctcagcctcctgagtagctgggactacaggtgcctgccaccgcgcccggctaattttttatatttttagtagaggtggggtttcaccgtgttagccatgatggtctcgatctcctgacctcgtgatccgcccacctcggcctcccagagtgttgggattacaggcgtgagccactgcgcccggcctgttttgagcaatattataattacctatactacctttactggaagttaaagtttcatcagagatctgccttcctcctagaattgttggttggtatatttagtctttgaaatttctgtatatgttattggaggagcagaaggaactctcccaagtttgcagatgtccattgagactttccggattgtaatagattatgctgcctgagataaacttacggtaaattttccaaagctctacctgtggggaagaaatgttgcaattctatcccagtgtttactgtctcttttcttaatgataggattcttaattttcatctgaatgtatcactacacaaaataaaaaacagatttcccagttttctttgcagctaggagcagtcatatgggtaatttctattaaatagctcagacttcttccagtgtcagacttgtacattgaattatctgttggccatctccgtctggatttgattatgatactttaggctcaacatatccaacgtagaattaatttctagatctctctgcccctttttcttcatcatctctgaatttagtcactactgttagaacccttaatgattactcctcctgtctccaccatcttcagactcacatatttgtatatatttaagcatatttcaaatctggctaatttttcttctttgtaaatgctctccttctcccagttcataccagtat

SEQ ID NO: 48587 - DNA, 1035 bp, Homo sapiens
tgacccttgtccgggtgtggtggctcacacctgtaatcccagcacttttgggaggctgaggcagcggaccatgaggtcaggagacctagaccatcctggctaacacggtgaaacccatctctaccaaaaatacaaaaaattagctgggcatggtggcgggcgcctgtagtcccagatactcaggaagctggggcaggaaaattgcttgatccctgaagatgaaggttgcagtgagccgagatcacaccactgcactccagcctgggcgacagagcgagacttctccaaaaagaaaaaaaaagtcttgacccttgagaacgcatatttttaatattctgtgtgatgaatgggaagtgtacataaagcatttctgctgcatatcaaagaactatgattgtctcaaggaaatagccctgtgggaatttcttacttgtattttcctggaatggactagattttaacttgaaaaaaaatgactgacaaactgtggttattcagatttgggtgtttggcacatgttttcacaaaaatgaacaaagtgactggccaggcgcggtggctcacgcctgtaatcccagcactttgggaggcaaaggtgggcagatcacctgagatcaagggttcgagactggcctggccaacgtggcgaaaccctgtctttactaaaaatacaaaaatcagccaagtgtggtggcgcacaactgtaacccctgatacttgggagcctgaggtgggagaatcacttgaagcccagaggtggaggttgcagtgagccaagatagtgccactgtactctggcctgggtgacagagtgagactctgtctcaggaaaaaaaaaaaaaagaacaaaatgagcctatcagttccaggaaaacaaatggcatttgttgccaatgataaaatttgagctttcaagcaaaaattgatactttagtaaacttctgtctaccactgtgaattctgtccttagatttactacctttttgctcttcatgtttttcatgtatctcagtcctccctgggatcatttagagt

SEQ ID NO: 48588 - DNA, 1460 bp, Homo sapiens
agtagctaggcttacaggtgcccgccaccatgcgtggctaattttttgtatttttagtagagacggggttttaccatgttgggcaggctggttttgaactcctgacctcaggtgatccacccgcctcagcctcccaaagtgttgggttacaggcgtgagccaccacgcctggcctagttttttcatttttagagagccaagaagtaaaaattccaagcttcttcggtgtttgattacatataagcactagtaaacttttgttactgctttgttagtagcatttgtatttagatagactagtaggaccaaaattcaaaatctgaaaatttattaattatgctagttttgggtcatcttatctggataacactaacaaaggatctaaatactgctttagttttatggatatttaaaatagtatgctttagaactattttgtgctattataacatgactaggcttattagcagctcattaacatataatggtaagtttaaaagactgcgtagactgttgaagatcagaatacaaattgagatactgtataaagctgaaataaataaattcagataggaataatatttaaaaacatccactggtagaatgctctaattcaccttggcagatttgtaataacttgataagaaccattatttatttatttattttttaaaaaggaaccattatcttagagacagagtataaaaatgtacatcattggtacaatctatacaaaatgatagattgttagtagcattctatacaaaatgacattaaaatgcacattctggtcttgaacttctggccttaaatatccttgcaccttggcctcccaaagtgttgagattacaggcatgagcctctttgcctggccacagcctaatctttaggaggaaccaaatagcattgcttggcattgatgtcagatcacacaccacaagctgaattgtaactctttttctctcagaaactgtatagatttttctattggtaaattgatgtctcggttagatatagtcttaggactactgactgtttgcttttacatgttggtgctgcagcttaatgcatttagtttgctagtatttacaaaaagtcaagaaatttcacttgtattcaggtagtttttttttttttttaaactttttagtaatttgaagctttgatccttactttgaaaagaagtctcagggtacattaagtcttacatgcagtggctgaatagtcagattctgtaataatcaactgaagttgtttatttctgaaatactgtgtgtatcttttttttttcctgttcatataaacagccatttattccagcactatttgttgaaaagattgttgttttacatttgattaccttggcactatttttcttttctttctttcttttttttttttgcattcccttacctatcttttttattttaaagtcaaaccttcagaaggaatacaataag

SEQ ID NO: 48589 - DNA, 1322 bp, Homo sapiens
tttcttactagttttgattgatgtaattatcagttcatggtgcttcattttactagtactttatatttaagatttaaattagcaagggataataaacattttttaatcacttaatttttttctttcttacccttattaggtatctggttggaggactgagtggtgtggatgaaggcctgtcatctactgaaaacctgaaaggatttattgagataataattccattgctaattgaatgctgggttgaagctgtacctccacaactagctactcctgttgggaatggtatagaacgagaacctctacaggttatgcagcaagttcttaatattatttcccttctgtggaaactctctaaacaacaggatgaaacccataaattggtgagaactaatggttctttattttcttagtattaatagccttttatcataaatggcaagattcgaaatcagctcattactactaattggttatatatttttctgaaaagtaccctgggtttaactgtaaacttgtttgttttgcacaaaactacaaattagttttctgaagttattatctgtgaatatatatatatatatatttaagtgaaatgcgtaactcatgcttggttccattagttttttactggctataattcatagtagtgttacagtgtattgtttatggcagattgattgtgtaggaacattctagtttctgaaaggtctcttacaaggtttaaaaagttgcttattaagtagtctctttcaatttattccacattgccaggtttagtagaaagggacaaaactgaagagctcatgatcagacttgaattgttttaagtgttgtgctatagtgaatgtagtgcatagtgtatgctacacttttcctttgcaaccaaggaggaacaagctgcaagattaagttggtgctaaatcaatacagtaacacacttgaaaagggtagctacagaagcaagacttcaaagctagaagcatctggttttcagaagaattgctgtaaggacttttgataaggcaggtgtgaatccttcaagtttatataaaactgagaaggtagttttcttgtttttgttttatttttatttcaagttgaagtttagaatgagtcagtatggtgcataagacgggataaattaagtagtatttgatagtcttgaaaagcattatagagttgtagtaaggtgtatattttaagagcgtgttctattgctgttaactcatcatctgtaggaatgttttgtcaattgctttttcaaataagatggcattttattgattacggttttgagactttgttttatgattcattgc

SEQ ID NO: 48590 - DNA, 1068 bp, Homo sapiens
catgtaggttaatgtaaagagagaaaattccaactgaaaattatgcaatgtttttattaagctgaaagtatttttctgtttctgatcctaacaaaagctaaataacatttaaaaagtacttattgaagcagtttccccaaggagtgtcagtttactagtgtagtgttagttagcatgtttacgtgaaattgatacatgtatataagtatacatctaaaatttgtatttttatttataggatttgctgtcacagatgcatcactacaatgctggggttaaacaaagtgctcttcttggacttaaagaccttttgtctcaatacccatttataattgatgcacacctttcaaacatattaagtgaagtgactgctgtgtttacagataaagatgctaatgtacgattagcagcagttcaacttcttcaattcctggcccccaaaatacgagctgaacaaatttctccattttttcctttggtaagtgcccatctctctagtgccatgactcacattactgaaggaattcaggaggactctttaaaagttttggacattctgctggaacagtacccagctctaattactggccgtagcagcatattgcttaagaattttgtagaacttatttctcatcagcagctgtccaaaggactgataaatagagacagatcccagtcctggatactttctgtaaatcctaatcggagactcacttctcagcaatggaggctgaaagtcttagtgagactcagtaaattccttcaggccttggcagatggatccagtaggttgagagaaagtgaaggacttcaggaacagaaagaaaatccccatgccactagcaactccatttttatcaactggaaggaacatgccaacgaccagcaacacatccaggtttatgaaaatgggggttcacagccaaatgtcagttcacagttcaggctacggtaagaaggatttcagttatgtccacacagttttgctgtattgaattataactgctaaccattgatgactgttggtgggaagacatgcagttgtctttcatagttttcatatagtta

SEQ ID NO: 48591 - DNA, 1034 bp, Homo sapiens
cttcgcatgaaaatgctttgtatcccgtaataatattactaggtttgaaaagtcaaggaaggtcaatcagccttcttaattttcctaacagagaaagcattaatgtgactaatacaaagcgatagataatatggcatgaagttgacagtagactgttgaagatctatcaggtggttaatggctaaatagaacccacaggagtggaggaggaagggagttaatttttctgaatgtcctgtaccatttactttcgtgtctagtaccagctagtaataaaattgtaggaaaagctcacaaagtgtgcttgcttaattaatgaaaaccatttttgtattaaaagaggccaggtgagtatcatggccttctttttaggccttattccctcccacccacccacccaccgacccccagcttttttttttgttttgttttgttttttaagactaaggtaactagaggtgtgggtgagatgaaaatttggtaatagggacaaatgaaataagccaaactgttttgccacgaagacttccagtcttcaggttaattctggtatgttaaaggtggttttgcagagctcagttctgtgaatgaatcccttttcaacttcttgataaaggcgtgacttccaaacttttctgaggtacattgttaaaatgggtttagttccacctaccttgcatggttctgtgcagattgtatactgaggtacacaatgcatctagtaccgggcttggtatgtcctgatcctgagacttgagggacacgcacatgtttatgctttgagcatacgtatttaaccatgtaccaggcacagttctgagtgttttacaattgtgtatgattatccctattttgtagatagaaattgggacagtgtacagctggaaggcgtcagagtttggataaaagcctaatcaatctggttgtagaattggttcttaacctgtgggaaatcctacctcatggcgatctaatataaccctgtaattaagtaaatttggatatattgtcatagctgattggcttctgaattc

SEQ ID NO: 48592 - DNA, 1036 bp, Homo sapiens
agtctacttagtgctatgcagaggttgctttttcaagaccaaggagggacacagaatatggtcacataggaactgtgggagaacgcaaggtaggcttataagaagaggtggtgaatctgacctaagtcacacggcatctaaggctagaaggaggaataggagttaaaataagctgataaacaggaatgggactccaggcacagggaataacaggggcaaagtgggtaagaaagtgttcaataataacagtgcattcagaaaattgcaagagattatggggagacggagttttgcattttaaaggcaaaactctcttactggcaactgtcaaaggactttaagaaggtatttctgggctgggcgtggtagcccacgcctgcaatcccagcactttgggaagctgaggcgggcgaatcactaagtcaggagatcaagaccatcctggttaacacggtgaaaccccatccctactaaaaaaaaatacaaaaaattagctgggtgtggtggcgggcacctgtggtcccagctattcgagaggctgaggcaggagaatggcgtgaaccccagaggcggagcttgcagtgagccgagatcatgccactgcactccagcctgggcgacagagcaagacttggtctcaaaaagatatttctggaaggccaggtgcagtggctcaggcctgtaatcccagcactttgggaggccgaggcaggtggatcacgagatcaggagttcaagaccagcctggccaagatggtgaaaccccatctctactaaaaatacaaaaattagccaggcgtggtggcaggtacctgtaatcccagctccttgggaggctgaggcagagaactgcttgaacccgggaggcggaagttgcagtgagccaagattgtgccactccactccggcctgggcgacagagcaaaactccgtctcaaaaaaaaaaaaaaaaaaaaaaaaagaagatatttctggataaaggaacctgtcattactaacatccagattatactttggataaaataatgcttaataa

SEQ ID NO: 48593 - DNA, 1049 bp, Homo sapiens
cctagtgtgtccacctttacgaagccgagcatacacaccacctgaagatctccagagtcgtttggaatcttacgttaaagaagtttttggttcatctcttcctagtaattggcaagacatctccctggaagatagtcgtctaaagttcaatcttctggctcatttagctgatgacttgggtcatgtagtccctaactccagactccaccagatgtgcagggttagagatgttcttgatttctataatgtccctattcaagatagatctaaatttgatgaactcagtgccagtaatctgccccccaatttgaaaatcacttggagttactaagcaattcggaagagaaacacattgaaatcactgtctttccctgagcaagggggctgctcattagatcttttgatactttaccatgtgaaatactaccagaactgttctctaaacccactttttctgtagaggaatgtatcatctttttttttctcatattacaaatggacaaataacggactttctattttcatatttgctgaaaccattttttaaatgaaattaggtcattatttatgaaaagttttgagagggcactgtcaacttgggtttaagacaggaggacattgcaagttcacacctttcataagcataaagtagttgcaagaaagtattttcatcctgttaggattcatatctaagatagagttatgcattgcacatacacaaataaacttttattagatagatacctataaaagaaacataaaagtatgttgtgtattactgacagttctagattaatttcttttagaattaaagtagatttgttaaagtgtattgtgtgttgtaaattttttaagtgaaatttgcttgcgctctgccttgccatttctttccagtaagtataattttgaaaaaattagaatatatgccaaatattgagtgctgtgactcttcctcataagagatgtgccagattctatgtctaattgcatattctcttcagaggagatgatgcttattttaaacctttttctctataacttttaaaaag

SEQ ID NO: 48594 - DNA, 1054 bp, Homo sapiens
ctttggtcaatatttgttattatctctcaaatctcttccaagtttgttttattcattcactcaacaaatattttttaggctgtttactatatgccaggctatatcttaggtgttgtaagaatacagtggttactaaaacagaccaaatttttgttctcgtagggcatatgttctaatggaggaagaaatgaacaaatgtgtaatgtaatttcagaaagtggtaaattatgaagaaaactagaggaaatagattactgagaatgatgattatattttctttactattttaaaaattttatatatttaagatatacaacttgatgttgattattagtcaagataattatcatattcatctcttcacatactttctgttttgttttgttttagagaaaggagttctcactatgttgcacaggctggtcttgaactcctggactcaagtaattttcccaccttggcctcccaaattgctgggattccaggggtgagccaccacacctggccagttagaatttttgtgtgtgtggtgaaaacacttaagatttactctcagaagatttcaagtatacagtacagtattattaatgatcgtcaccatggtgtacattagatctctggaacttattcattctacataatttaaattttacctttgtccaacgtctcttcatttccgccacccctggtagccaccatcctactctctgtttctatgaatttgactttttttttgtttgtgttggagatggagtctcactctgtctccaggctggagtgcagtggcgctatcttggctcactgcaacctccgcctcccaggttcaagcgattctcctgcctcagcctcccgagtagctgggactacaggtgcccgccaccacgcccggctaatttttttatttttagtagagacagggtttctccatgttggccagaatggtctcgatctcttgacctcatgatccacctacctcagcctcccaaagtgctgggattacaggcgtgagccactaaacccggcctaatttgactttttagatactacatataag

SEQ ID NO: 48595 - DNA, 1036 bp, Homo sapiens
tagagatataggcactggggcagctgaggaacctcaatatgttaagagccttggctttggtagcctcctggcaggagcagcagtttgccacaggtccggacctctccctccacacagccacactgcctcatgcagtctgacccacccagtgagggtgcatttgaacactgattatattctccatttgtttttaagctctgctttgtgttagagcttgtgactgccaaaaattttgtgcacagtgatatgactgttttaggatcttaagggtagaattttgtgaaaggtgagatcctttggaattgagttctttctcattgggtatgaaaatggatgtatgtttagaatatatgcccaacgaggcaggaccatgtggatagattccatttgtttccttgacctgatgtaataaaaactgataaaagccgtgcagtgcccggcatcttggaggcaggtgatctggcttttctgttacctgggattttcttttcctatatatctgtagtgcactgataattgatattgttagtgagaactttaaggcacgacaagatctggaagagcttgtgaaccatcaaagtcagattgcttatgttgagtagtgatttaacattgaacatttctgtactactctgactctttgaaaattggacatttcagaatgatacaatataggggagctctttacaagtagcatatcatttttcctgactttcctggctgactgcttaccttcatttctttttcttctaggtagcatgatgttatagaaaaaaaaaaaaaaaaatcatggactgaagtcagaagacctgaccttttatttcagatctctgccatggcctaacgacgtgaccaccttgggcaggtcatataatcactctgggtctcaatttcttcacctgtaaaatgaggacagtaatacttacatgttaaagttgccttgaggattaaatggcagaatatatgtaaaacacctagcaagtgcttagtccatagaagacgcttggcaaacttttctctcctataataaacatat

SEQ ID NO: 48596 - DNA, 1048 bp, Homo sapiens
tcccccacaagcagaaggttttattttaaattccaagaatatgatggtcaaaattgctgggaagattctgatttagggttgtcactgcagagcatttccatgtcaatgtaagtaggtacccaaagtcgtttaggtgcagcattcagtaacgtaaaggtaaagaaaaaaaaagtagccacctgtggctttttatccccagtcgtagtaggaataagattgcatggtttgggcacactaccaatcacaatttccaaatttcatttccaccactgagatgccttgactcaaatgaaacattagtataggtttaggtggtgtttgtgtgtttttggtgaaacattagtataggtgtaggtggtggttgtgtgcttaactgaccccctaaaaacaagaccaaatacttaagcacggaatgtatttctgtttatgatatggaattcaatacaccccttcagtggtataaagacattcctggatttctttaggatagggtcagagttggtttactatctggccttcagtttttaaaaggggcgattctttgatatagcaatagcgtcaattttttttttcttttacctttacaggtgagaaaccttaccactgtgactgggacggctgtggatggaaattcgcccgctcagatgaactgaccaggcactaccgtaaacacacggggcaccgcccgttccagtgccaaaaatgcgaccgagcattttccaggtcggaccacctcgccttacacatgaagaggcatttttaaatcccagacagtggatatgacccacactgccagaagagaattcagtattttttacttttcacactgtcttcccgatgagggaaggagcccagccagaaagcactacaatcatggtcaagttcccaactgagtcatcttgtgagtggataatcaggaaaaatgaggaatccaaaagacaaaaatcaaagaacagatggggtctgtgactggatcttctatcattccaattctaaatccgacttgaatattcctggacttacaaaatgccaagggggtgactggaag

SEQ ID NO: 48597 - DNA, 1045 bp, Homo sapiens
taataattttgtagctacctcctgttgctattgtggtgagtgagctcaagtgttaccaatatctgcttaaaatgccatgtgccgctaaccatctccacatgagcagcacatgagagtctccattaattgcatatggcagcgaaaagtgatctcttgcattgtcgtgtattttttatcacgtttaatgtaatatcgtaaaccttaaataacaccatgagacctataggaagtaccacaagtgttgctcccaggaagcagagaaaagtcataacattacaagaaaaagttgacttgctcgatatgtactatagattgaggtctgcagctgtagttgcccaccacttcaagataaatgaacccagtgcaaggactattataaaagaaaaggaaatttatgaagctgtcactgcagttatgccagcaggcatgaaaaccttgtactttttgcaaaatacctttttatgttgtattgaagatgcagcttttatgtgggtgcaggattgctatgagaaaggcatacctatacaactattatgatttgagaaaaagcacagtcattgtatgagaacttaaagcaaaaagatgaaggatcaaagctggagaatttaatgccagcaaaggatggtttgataattttagaaagaggtttggctttgtaaatgtctggataataggaaaagcagctcctgccatccaggaggcagcagcaaaggcagtcaggtttatgatcaggactgcccttatctgtaaagctgctaacccccgagcctggaagggaaaagattaacaccagctgccaggcttttggttgtaccatacaacaagaaggcttggacaaggagaacactttttctggattggttccattgtcgatttgtccctgaagttaagtagtatcttgccagtaaggggactgccttttaaagttcttttgatactggagaatgcccgaggccaccccaaactccatgagttcaacaccgaagacattgaagtgatctacttgcccccaaacacacatctctaattcagcctctagatcagg

SEQ ID NO: 48598 - DNA, 1023 bp, Homo sapiens
tctacatttacatatacatcaaaagattcttctgaagcatcattactggctattggcagttatgctttgcatcttgggggcattttcataaaccttgcttatgagtgggacctttttattatgtttaggattgacaatataatttgaaggcaaatccaaagaatattagcattttatacatatttcctgtttagttatgcatgaagtgttttatttgttgaggggagatgattctcaattagattacttatatccctaaaaattaaaaaccctaagcgctttcttttgaaagttggttagaaacatttgatgagtcagcttgggactttcagtatttgcccttacttatagttggatcaatgaagcatcttagctttgaaaagtgaatgatagtttctaaaataattggcagttttaactgctattatttgcatttctagcatgtgacaagcaactttctgaaattttttttcaccgaagtgctacactgtaatagcattttgatgacatttgaagtagcctgtggggattcaaattaagtttgactttaacagcttatgttgctaccaggaagaacagctaccttccatcccagctaaactcatacatccagactgtaactactgtattcctagctcctcttctgtctagagaatggcaaggttcttttggtatcagtttcgacatatccacttattcctttttttttcttaagttttttcatttagaaaaaaaaacagatggggtcttaatatgttgcccaggctggtctcagcctcctggtctcaagtgatcctcctgcctcggcctcccaaagtgctgggattacaggcgtctgcccctgtgcccagcccacttatttcccagatgctaggaacttacattagacctgaggccatttggtcattgtttattttgtgctgtagtccaatccagttgtgatttctgcctcctgtgttcctcgttgctggcctgatgctgaccttcaggttaggtcagtcccatcattccccagggtattct

SEQ ID NO: 48599 - DNA, 1052 bp, Homo sapiens
ttcctcagccttgtggcttgtgtgttttcccattccccacgaggcagttcctcccctgaatgctcagtttatattaacatctgattttattttttgaacaaatgttgtgactaaattataggcactgaaaaaatgaaaagataagcttcttcaattcaaaatcaggattggaagagaccataaatgtaaaataagtcataacacttttaccaaatatagtaatttgtcagaaatatttattcagcactcatatggtaggtgcagtagatgttaccaaaaacttataaggagatatgagttataagagtttatagtcttgcttgggatgtgtaaagcaatgcaagattatatattcaaactgaattttgctttaggaatttaaaatggagatctgtgaagttgtgtggggtcatcagcaactgcaagaaagtagccaggcaaggtagcacatgcctgtagtcctagctactcaggaggcttaaaaatatctgtgtaatttctaacaggagatcatccaagaatcgccgaaaagcggagcggaagaagcacagcctcaaagaaggcagtccgctggaggacctggccctcctggaggcactgagtgaagtggtgcagaacactgaaaacctgaaaggtatattctcagtcctgatgatgattcctgaccacaaacaatagtgaataggcagtacagacaggcagagttcagtaggtgattaagctaccattttcccaatttgaggaaagatgagaacttttagcaggaagggtcatgtctgcacacattcctgaagcagcccttcttagctggtaactgagaagccttcctccatttggcatccccctaactgaactgggagagatgcttaggccaggataaagaattgtgggacactgctttctgcgtaggccccccagcgtgcttgattttctttttgtagtacatgtgtttaattattccagcatttgggaagaaaaaagataatgtgggagaaaggacctgcagtgggatcatagaaatttttggctttggatagaagctatgtatgatt

SEQ ID NO: 48600 - DNA, 1031 bp, Homo sapiens
tttatcattcttgataataatttgaaatattactgtcttttactgaaatgaattgaatttccttggctgccttgtaggaggcctgtttttcaggaaaatattctgattacctctgaaagtaatccatgtctttctaagtatcttaactctccagtgactagaagttttccttcctaaaattattgtgtttttccttctaggtatacaaatataacagactggatattatagaaaccaacgtaaagccttccattttagaaggtgagggttccattttagatagaattcctcatttggaagaaggtgaggagagagagatgagagagtctcctcctatttactgtgttttcttaataatatgtcatgtagactcaatcaaaattaccacctggatataatatttaattctcactagaatttttaaatatgctgaactattaaatggtaacaaaatatttaaatgttagaaacctgtgatcaaatatgattaagaatctttgtatttggaaatagtaaacttgaatatgaactatattagataataatataacactgataaatttctggcatttaataatcatgttgtggttatataagataatatcctattattctcaagagataaatgctgaaatatttaggaatgaaggatcatatctctgccttactcttaaaaggttccacaaaagtattaatgaatgtgtgtatgcatgcagagaaacaggaagcaaaaaaatgtcaaaatgttagtaattggtaaatcaaagtaaagggtatatgtgtgttcattgaactcttacaacttttatgtaggtttcaacgtttcaaagtattttttaaaagttaccttttcaaatgaagtttgtggttcttagagaacatatgaatattaccagttctagaatactcagatggtcactgtgacctcttaaaagcaaagtggagaaggacatcagtttgacttatagaaaccttagggagtggttgattttaagttctgcatttttatgcacatctaccctgtaagtaac

SEQ ID NO: 48601 - DNA, 1033 bp, Homo sapiens
tcacagaaattcagaaagtacatagtttcatacataataaagacatattaaagaagcacttgagctaaagtatctgtttaactttgtagtcaactgctgcttattgtctctacaggaaagctggttgagcagaggaagcacattgatgcggccatggttttggaagagtgtgcccaggtaaactcaattcctcccttctaaaccccccagtcagcaagaaaggtcttctcaattgtatcttagtgatcatgaaagttaaaggaactgtgcataattgttaagtccagagatagtgtttgccccagaggtcttatcttgctggcttgacttggaaatctaaatttagtacatctctaagtttggtgaggtagaatatgaaggtgctctactttaacataccactggtttgaccttggtagaaagtacttaattacatctcaaggtagctgtgctttttaaaattgagtttgccaaagtagaaacaatgagaaaggaccattataaaacaggatcattgaaggctacatactcttggcttttactctcattctccctattggaaatgtctcttttacctcagggacctggaggtacagcagattataaggataagtacccatatgagcatttggtagtattataggatttattatgaaaataataaaactgcagtaacactggccacagactaacagtacacaggtgcacagttgacaccagggattattgccttgtagagttttgacctttgatgagagagtgttttttacagttgttactgatagcacatttatgtaacttaattgtgctttaaaaatatttaattgtctcttgtgtaataacagtaagtgaaagacgataactaaaattttatataattagatcctggagagaatatttgttgggtgattgaattgaaaataccagtgaatgaaacatacctaaaagggtagataggttgggttggaaagatataccacatcgagggttaattaaatggataagatgtcattatctttttttctttgtaaag

SEQ ID NO: 48602 - DNA, 1042 bp, Homo sapiens
agccaggaatgaggtggggaaaataaaaggccaaatgtcgaagcattctgaaagcaaaggcagtttagctgcgtcagggacaagggttgcccgaaccagaggcgaggctggtaccaggggctctagtaccagagtggaggaaagggtaaggacacctatgaaaagagatgagcagaagctctggtcatctcagcagtgcttgaagtaaagcaatgactggtatatttttttccctaacttgtaaatattgttgagatctcaaagaaaaaaataaaaagcagtcctaaaaaaattccaaactctatcctgttaaattttgttaaatttatgtaccagtccttctttgtcatttgcagtattctttttttcttgggattataccagtgtatgggattatcacttttctttttctggttattagcctttcccaaatccctccgtttccatgctggcctctttttacaaatgtcgagaattccttatttcaggccttttagttattcgttcggtctccattgttcctttctgctttagaaatttatgatattggttgtttataccttctatctctgttcttggatctcttctattctttacagctcttagcttgctatttcccatgtcttatgagggagtatttctagtttttctcagatgtttagcaaaagtaggtggggagggcagtggtcaaagatgtttgagaaatgttacacactggagtcactctgtgtgtacatttaacgtaggcagtttacacaagagagcaaaagaaaggtaactatttaaatagtggaggtgattttacctactttttttagtgatatatgcactggagtgagcatgcaatgagagaccggaatctaccagctccttcgaaagccttgggttctctgtgcctctcattgtggtttatctcaattgggctgagagtgattctaggatctaaagacactgcatgactcaaacataagtcagctacctccatctagtgctcaaccaaagaaatagtggtctcttactgttaagggacgaagtggtttag

SEQ ID NO: 48603 - DNA, 1071 bp, Homo sapiens
ataagtatgtatgctgtcaccaggtggcatcctttgaaaaaccgaagtgtgtagttgtccttgtccagcctacttacctttctcattctggtgttcttcacttattacctcagatactgcctatccatacttacatctcatgtaaagaagacaaccccagaactggaaattgtactgcaaaaagtacacgagcttcaaggtagagatccgctcacagagaaagtgcttaaggtggccgtgactgctactagtcttctgcaggtgacaatcaccatgtcattgccacaccacagatttaacatgtgactttttagttgccattttaagacccttgtcagtttttttcagtgctgccctctaaagcatatataaaagtatcagaagtatatattcttctgatgtccagttctattgagaaaaatttattgtctttttggttatgttgttaggtctgtggattttttccccaaatgattgtgttctgttttgttttctaaacactgttaggaaatgctccctctgatcctgatgctgtgagtgctgaagaggccttgaaatatttgctgcatctggtagatgttaatgaattatatgatcattctcttggcacctatgactttgatttggtcctcatggtagctgagaagtcacagaaggtatgtggagttcttacttttatgccatttggttcttgtttatataatgatagtgtgaaaccctgcttctggtagtgcagtagcttttctgctatcactctgtgagtgcagggctggagacagatctgtgagtttctagggcccacattcctaagcccctgtgcttatgaaagtgttttgattgtgaggttgaagaagtgaagtaaaattgcatggcttttttttgtttctttttttttgagacggagtctcactcagtcgcccaggctggagtgcagtggtgcgatctcggcttactgcaagttccacctcccgtgttcacgccattctcctgcctcagcctctctagtagctgggactacaggtgcccatcaccacgcccggctaattttttgtatttttagtagagacaggg

SEQ ID NO: 48604 - DNA, 1603 bp, Homo sapiens
gaaccagagtagaggtggtggtacacatggatacagatgatacagatgtttgtgtaacacaaaaggatttttacgtttcttcatttggttataaggctgtatctatctttgtttcttcttttttttttttcttattccctgaagtctgaattcaactcgaatagtagattttacgcttcttcacagatttcattgttccaaggccgcatatattttgcattcctaactcttaaaaggctgtggttttaaggcagggtatatatgaagccattgtacagagcagaaaatggtgtttagaagggaaggcccagtttgcaaggctctgtggggcaaatggtgcttttgtggaaattagggaaagagcctccttccttggcacaaaattcctacagcagaggatctgcttgccaaggagcatgcaggctggattcagaccctgctctttccttccattctcctccttggcccagtacccttgtgcaggttacaatttgcctgtcatatgtggctgcctgattttagatagaagatgtatctcctctgtttcggtgatatctgttgtatgtagacctcttgtttcccaccagtatctgaatggtattatatgatagagcagaagagaaatgtatttgaattaaaaccctagagacaaatatgaataagatgaggcaattaagatgttttcaacatttggtgaagtcttaaaaaagacctactggagcatagaatatttgctgaagttgtataatggaaggagaaatagattttgatttttaggacattatacctggaatggtttagataacttattatttttaaagtcatccaaatgcaatgtaaatatgtaaggttttgtgggcaaatggagcctctgtgtaaaacaggaaaaggcactctttcctctgggcaagtacagtcccacagtgggatgaaccgctcgccgagagacaagggacacatgggatttaaaacttccttggataaagatattcattaattcgttcattcattcattcatgtttgctggaaaaaaaactcttctggattttatctattctttagttaggtgagctttcgatattgtaacactctgagtttgctttaagaccctcaggcagtttgattgcatctacacaagataaacccaaccagcaggatattgtgttttttgagaaaaatggactccttcatggacactttacacttcccttccttaaagatgaggttaaggtaagtgcctgagtttgtttcaccctcgaatgtagaggactttccatagctatagagggaattttttttttttttttttgagatggagtttcattcttgttgcccaggttggagtgcgatagtgcaatctcggttcactgcaacctccgcctcctaggttcaagtgattctcctgcctcagcctcccgagtagctgggattacaggcttgcgccaccacagccagctaattttgtatttttagtagagacggggtttctccgtgttggtcaggctggtctcaaacccctgacctcaggtgatccacccgcctctgcctcccaaagtgctgggattacaggcgtgagccaccacgcctggcctatagaggggat

SEQ ID NO: 48605 - DNA, 1046 bp, Homo sapiens
ttttcacacaaatcctaatgcagtaaatcaaaggaaatgtaggccaagttaagatcttaggtctcagaaatgtgtttctcagtacaaaaaaaaaaaaatcattctatggagtgatgaatatttttcctctatcctggggtcagtagacttgttctgaaaagggctaggtcatgaatatgttcagctttgcaggctgtatgatctgtgttgcagctgctcaattctaatgttgaggtgtgaaagttatacatgatacataagcacatctatgttccagtaaacgtttgtttgtaaaagcagatgtaggctgtagttttgcaaatccctgctgtaaccgcatcatttcttgtcttccattggaaaagttctctttcttcattccttggtccttaatctttctgtggaaacttgcagatagaagcctgggggtttgcaccaggatagtcactaccatttgtacgcagcagcaattgaggtactgtagcacttggatgtgagcagacaggaaatggtcatatggacccataatttataggaattgcaaacagccctgcttcatcagaatcagaatcaatggcaggaggaaagtattgggtcctggattaggtgatgttttcaggaccatctttattgtgcttcttgcaaatggatcctacctccaggaacagaagggttgtgttgtttcagcaactctgcctaatagtttatataagagaagtgttacgatctagaaagaaccccagtcagcctggaaggcagaagacctgtgttctaacttttggctccaccattagggagggtctcaatctctaagtctatgtgaggagctgttttgtgacctgcagcccctctatcaccagtgagagcttgcaatcagaattttattcccagttctcatcttggggttttatgttccggacatattttgtaaactctttatgtttcattcttcttacttataaggtgagggtgagatcgctgacttgtgtcatcaaagaaacttggaatatgtaagatggcagtaaaatgctttccaaaataaggaa

SEQ ID NO: 48606 - DNA, 1013 bp, Homo sapiens
atgttaaaactaaataaatggtaaggtcttttaagtactacttttagaatatcatttgcatgctttttgtcattgtaggttgacaagtgtattacgaagacaagatccatgatggctctcttagtccaacttctttcactttgttataaactgctgaagaaggtgaggtagtttttctattttagactcatactttaaaaaatggtttaaaagaaaatagttactacttaattttgtaatttttttttcagagtgaaaccagatactaattgtcttaactctttccagcttcagatggaaaataacggatgggtctcagttacaaataaggacactatggatagtaaaacttgagaagcttttggggtcagatctctggaacatcatgtgatgaagctgacatttttaaaaatcaaatgatcctttatcttttcagaaattcatcaattttataaagaaaacaatattgaaattttgctctattttctgatcatgaaactgattgtaaagctttttgacaactaataaatgtcttggtaattgctagattctaattgtagtgtgatttttaaaatagaacattgcactaatgttctttaaaagtcaaaccaaatatcccaactgtctcaaggacaatttaatccacaagaagctattttgaatatgtgcttagctttggcatattttaccttaactgttttctttatcatctagatcactaatgtcagcagcaaacatacagtagtctgggtgaatgcagggttttccttaaacctgtggactcttcaatccctctgtttaccaagtgtgacaaaaatccccttgatgaccctgtcccagattgtccatgccagcagcaagtttgttccctaataagcattttgtacagcaagggtgggtctgctgtgctgtgtatgtccctcacctactcccaaaagtaaggtaatggaactccacagaatcctggaacaactcctggagagtatgagatgggtttttggttctagttctag

SEQ ID NO: 48607 - DNA, 1040 bp, Homo sapiens
accagttatatctcaaaggcagcttcacttccaagagaaaaaggagaaaagaaagggttaatgtgttcaatttatttttgcaaagtcaccagaaagactgaaaagatgagcatccacctccttttatgggatgggataggtgaggcagcagacagaagtgagggatcctgtgctcgtgaagattccttcctatagaaggaggattaagagtggggaagatgcagtcccaagcttagaggcatcattttcctcttgatgacgtcttctaccttttctagatagataattctctggaaaaagaaggcagaaatgataggagttagaaattttgctgctgtttagctgtcatttgtcagtaccttatcatattttccatcattggagaccattcctttggtggtttccttccattgttcttaactgttgttagcaagcttatcctgtgattgagtcttcccaacatgaattttgacctttttaagttcatacctttttaaaatctgatggcccaggcctctaaaagaatgcaaaatggaactcctgtgtttacccacaataaatttgcacagactaactgaaataacaaaaatctcagcttttggctggaatcaagctagttatttccatggtgatgaaaatcatgcttttaaaaaatgtttttgactaataagacttgggggaatatattattaatgaatatagtttgatatgtaaaatattcccaaatgaagggttcatcaatagacttgcctggtttttttttttttttttttgagatgtagccttgctctgtcacccaggctggagtgcagtggcatgatctcggctcactgcaacctccgcctcctgagttcaagcaattctcatgccttagcctcccgagtagctgggattacaggcacacatcatgacgcctggctaatttttgtatttctttattttttattttttttgagacggagtcttgctctgtcacccaggctggagtgcagtggtgcaatctcggctcactgcaatttccatctcccgggttcaggtga

SEQ ID NO: 48608 - DNA, 1033 bp, Homo sapiens
gccaacatggtgaaaccgtgtctctactaaaaatacaaaaacaaaacaacaacaacaaaaaaaattagccaggcgtggtggcagaggcctgtaatcccagctactcgggagggtgagtcaggagaattgcttgagcctgggagatggaggttgcagtgagccaagatcgtgccactgcactccagcctggccaacagagtaagactgtctcaaaaaaaaaaaaaataaaattactgatgattatcaatagtaacagtgtggtgaagaacaacagatggtgagtatcagaagagagaacttgcaatgaagagagatattaaagtcttaagtctggaattttagaaatgatagtgggaatgcttgatggtgtaggggaagaacaaatgataaatcaaatccccaaatcaaaaaatggtccaaacttaattagtgtactttttgaaaagggactggcatttaatactgaaatacaacattaggaactgaatgtagctggtgtaaaagcgatcatgatactgcaaattaattctgtgacttaaaaaaaacagtttttgtgccttaagctattgtcagaacagtttgaaagtacaaatagcaatttgtctatttttgttattttaagataaccctaacagatggttttatagctaatatcctactgggtttaagcaagtaaggatagactcactgtttttgtaagtgctataatttagggctactacaaaataattttttgagaattagaaaaggcatcacaaagcttttaacaggttgaatggaacaaagattttattcaactgaatagtattttttatctttagtaacaaatcatttcagagtcatgaaccattttcttagttgagggatagcatagctaattatattcctagaaaattatagttctctcttttaggaagtgaagttggagtctggtgctatttatatttaggggactgacgtcttttagctttatataactgaaacgaatgaatctgactgcattccaaaatagtgtccactagatggcaagctt

SEQ ID NO: 48609 - DNA, 1095 bp, Homo sapiens
gagaggaagaagagctgtttctactctcatagcatctgaagtcgtagtagaggaaactagacctgaagtactttggctttctgaatgtaatgatctatccgcttctacttttctccttaagatttgttgaaagatctggagggcctctggaactgtatgccccagataaactgcatgccccagataactgccctcaggtgaacttggagttgtaattaatggaaacattgtcttaaggaatgatgcaggatactttgctggttgtctctgttgaagcatctctaactattgatttagtctattgagctatacagtatgccaggcttcattttctttgactttgtgatacagcttaaaaaagaaaaggtattgagataaaagttgcttttatcttttatttttagatcaccacgcttattaatcataaagataataccaaaaagtctgataaaactctgcaagcaattcagcgtgtaggacaagctgtcaacttggcagttggaagatttgttaaagtaggagaagctatagccaatgaaaactgggatttgaaagaagaaataaatattgcttgtattgaagctaaacaagcaggtaggtggatattgattttgaagactattcataccacttttattgctttggttatgatgaaaaattattgatttatttggaataaagatatacagctctttgattatgtctgcctcagacattaaaggcctggattagcttccgcgaatactgcacttggcttggatcaagtcctaaatctgaaacataggactccttcactggtcagagttagtgatcggccatcctcatcagccattgagatgtgagagagatagagaagtgggagctgtggcctctattctctaagaacatattagtctactttccatgacataggaaatggaaataagcattagtatccattagtattctacagcaaacaaatcatagtgacttcaaacttcatgatggttcacagttctctatagatggtagcacagaagcctttgagaacctagagtgttttgaggactgcagctttgttgaagtatcatttatccattaattttttcaataaat

SEQ ID NO: 48610 - DNA, 1046 bp, Homo sapiens
attcttttattccacagcagagttctttagtacaccagatcttctttcttccccaagggatgccttttctgccctcttctctggttcatttaggtgttctctagactctggtgtcagggcaactccaagttatgactctcaatttaatatcattcctatttttgcagaactatagttaagattgtatttggcatattatgatttacaaagcactcttgctagttgtcttttccttgatccttaacataatcctggaaggtaagagagacggtgtagtgattaagagtgtaggtagctcccctggctttgtgacctcgggcaaatacttaacttcttcaaatttcagattttgtatctgtaaaattagggtaataatagtatgtacctattagatgctggagaagcaagcattaaaagaattgatacatgtaaaacacataggctagtgcctggtactgttgtgcttaacaaatgttagctagtcttattttttatatgataaggaaagtgaagtttaatctcaattttgtaaaactgtgtatttaagtatctatatgtacaaaacaagactggaaagaattatgccagaattctcagaggttagtaggattatgggtaatttttatttcttgaggctctcctatattttccatttctgtttataaacaataaacatgtataacttttgaacctaccttttaaaacatttgaaactaattttagaatataagtagaccttaaataaagaatgttacatattgacttagttcctctaaataaaattttaaaggcatactatatttggattgaacatttcctagactgctttccagtgaaaggaaggcagccacacctaattatgcactggggaaggcgcttctagtgaaagcaaaatgtgtcttttggaacggaacaatagttcatattttggcttaattgcaggatcttttctttgtaattgaaattttaaaactttatgtaaatgaaatatttaataaacagaatcaccttaatctgttcggattgctataaaaaatagactgggt

SEQ ID NO: 48611 - DNA, 1913 bp, Homo sapiens
aagattagtttcaagttcacattcgctattcagttgtaaaccgaatggatgggaggggagaaaatacaagctctccacacaggtatgctcctctcttttctgagagagaaggcatgggattttcagcataaattccatgttatgtgagtgctgtttgagttctgaagttcctatcaatatctgttcctgcaagtgatctctgtaagaccaccttacatgctggtcttagttattgttaaaattgcaaggtttcttcacaccctctttgataagaagtgtttagctggcagagctttcccttgacttctgagtctagtgtgggttggcccatgacagtgggaagaaatccaacatgttacatggagaccttgtatgtaaacaaactctgtagcctttgaaagtggaactgctttttacagttaaagggctgctaaatggcttgcagatgagatcttctggctcaccttgatcttcacatgaacccattgtgacctatctggatttcctaggacctgtagtttccatttgggttatattagtgcctcaggaatgtgtcactactggtcaagcaatactcagaaattcaggctgtgaggggttagattagaggaaagtaatttaggtgagctatccagagctttcaacctcagggtttataggaaaaaaaaacaaaatacaaaaacccttaggacttctcatactctagccctgaccttgcagtctcctctgaggggcctcctaagacccttaaaataatattacaataggactttgagtgtgcatttcacagtggaaatagcctctggctagcattacttccaaatgctagttccagctaaaaacaagtactttttattagtttcttgtctttcaacattctgccatcaaaatatattcattttattaacttaccgattattgggaacctgcaaaaaaaaaaaaaaaaaaaaacacacatgctgtctgcagccactgtttggttatttttgatagtttaagagaattataaatcaagttgttctgtctactagagtcagaaattctgtgctagaatgggacttctaaaattaggtggtcctgtcactttctagagaaagacccaaattcataggtttaagtggcttgtctgacatacacatacagccagttagtaacagaattcagaatagaatagagttcttttttttctgtcagtccgttgttctacttctctttccttttcttcatggttgagcagcttttggcaaaatgtgttccatatagcagtagttccaagagatgttaatagatgtaagaaaaaaagtgtgtgtgtgttgggggtgggggattgcatggtcaattaaaatgaaggaatgctgagtttgtttccttactgtaggacttctaagagttttgaacatgctattacacattgtgaatttataaaaggggacaaacactgtttgaccttagactgcactccccttctttattcctcagagcatctcaaaggactacagggtcctttgagaaacatggcccttgatcaagtttacaactctttgagaagacatccctaatggaaatactgaatggcagatctattactgtggtaccatgtagtgtgtaataaatcttgaagtccagaaagcaagtatatttgctgtttagagctatacttaaggtatagagattcttttccacctgtggtgtgtaaaatcagtattgtgtttaattttgcaggtttttcaaggatcaactaatgtgcaaatacagtggtgatatattgatattacattttaataatgcttttgtatggcactttatagttttcagacaccttttgtaacagccctgtgagacagacaatattatccttattgtacagatgggggggctctggaggctctgaaaagtttttggtgatattcccc

SEQ ID NO: 48612 - DNA, 1212 bp, Homo sapiens
gtgaaaaatctcaggtgtagcaatactctgatttgttaaatgtatccgtttcattatttggaactctgccaataagttagttttcagcagaattttgtatttatgtagtattttcccatctcttagcacagtgccttgcacatgactctaaatgaatgcttgttgaattgaattgcaactttaaaaatatctcagatatcacaataaccagcatagtgctttacattttacaaagtccttttgcacatactatttcacaagtacatcacatcagctttcatatagctttatattattttacatcagttttacactgatggagaagctaaggttcagaaaagtgaccaactcaaagtcgtaaagtgtagtaggatttggcctcagatctttgactccgttgtgtgcagattctgctgtattagtgttccttctaaatattgtatgcagttttcccagtgttacgagattggtgttgctatccatttgttgtgaatgaagacttgtcctatagtacatgacagggctgagagtggactgtagttcttagctgaaccctttctactgtttaaaacaatcatcaggcctatcctctgctcccaggggaatgtgggagagaaaagggttcttggccaggctgtaggtggtggctcacatctgtaatcccagcactttggaaggctgaggtgggtggattgcttgagcccagggatttgagatcagcctaggcaacatggcaaaaccccatctctacaaaaaaaaaaaaaaaaaaaaaaaaattagctgggcacggtggtgtggctatagtctgagctactcaggaggctgatgtatgaggatcacctgagtccaggaggtcgaggctgcagtgagccaagatggcgccactgcactccagcctgggtgagagagtgagacactgtcccaaggaaaaaaaaaagtgttggggggtagttcttaagcgttgaagatttcctttttggaaagtatttaaaggtagaaatattaataatttttcctaaaacatctccctaagaagtcactgataattataattagtttaaatttattcttacactacttaagaaaaatttcatttagaaaaggctaccatgagatcttttgactatatggagtagactgcatacagatctctttatttctattatgaatattttagcgattataatcagctattccactgagtattagatt

SEQ ID NO: 48613 - DNA, 1025 bp, Homo sapiens
tgtcaccagcatttcataaaataaattataatgtttgaaaatttttctcaattgtcttataattttcttaaatttctttaggtataatttatatatggtgaaatgtacatctaaatagccaaatgtacctctaaatagacaggttgattttttcatgtactcacacccatgtaaccactactcatatcaaggtatagaatatttttgttgttctggaaggcttctccctgcctcctctcagtcagaccccactgcctgctgatactctaaccatagtcacttttcattagttttgcctgtttttgaacttcatataaaagaaatcatatagtaggtaggtactcttgagtcagtcctcattgctcaacagtgtatctgtgtgattcattcatattgttggatgtttttctctgttcatggttcattcttgcattgttgtctaatcttccattacatgaatatattacaatctcatttaatcattgtaggactaatagatatttgggtagtttgcagtttatgtctgttttaattcaagatgctatgaactttttaaaaaaaatttcttattttgccacgaacgtttttgtacatgtcttttggtggacatgcgcacagtacttactgtagttggacatatacctaaaagaggaatgtctggttatacatctggttttaagtttaggtggatacttaaaaacagttttctatgttatgtgccagaaattacattttaacaacaaaaaagaaggacagtctcagaataaaaagtaaaatgttttgaactttccggaaactatatggcattctccttgttatctgcaattggaaaacactagttttcctgccactggatattctcgtgtaatcaaggagtcactgacaagttggttctgacaatgcatttaatgaaaatattttatacttttatgtaaaattctttaacaacatgattctgcttaattttgtttttagtgttatattttgtgaagagagacattgtcctttaactcagaacaaatgca

SEQ ID NO: 48614 - DNA, 1034 bp, Homo sapiens
acctttgatgtcaacttatttttggcttaaattttttaaataacataaggttaaagaaaggatcacatctctatcttttcctcattgacctccctagttctagacaaattctatacttttttcctttctttttctctgtggtcgattatgtcattattccctccccctcaaaacctaccttctcccttggtctccgggaatactgcactctagtgattttcctcctactacggaaatgatttcattacctctctggctggtatttctttgtctttaggtcctttatgaaaacacaacctgttgccctattttctctccacttgcccttttaagatgtcctgtactcttttataattattctggtgcgtctcagatgtcttgttctgaattttctattaagccttgtctcttatttcagctacctctagggtattttcatcatcctttttgagttcctgttgcccatactaaacaaactgcccttttcttgcatgcctcttccattctggccttctccatgactttgagacactgctattctttccccttcaggtttaaaacctgaagctctgttgttttctttttgctctgtcctctctgtttagttgttgagcagatccttggtattttctttggggtctttcgcttccttttggtatttttgataccactttattctgggttcttgttgcagagtcatatggctcctttaagacgttctctagtgaaagccattggtccggatgacaaagcaggttttacaattggggagccactctgcccctggatccatgtcccagaacactactaaatgactaaatcactagattacagggcttcactttgctcctaacagtatacctcttgggatgctttagaaaagcttggtgtttctttttgcatgtacaaggtcacgtttgccgctaacgtcttctttttcaactacagcttttcttctgtagtgaccatatgaaggtgctttccctgcacccctctgcaccaccccatagagtccaggtttttatgattttgtg

SEQ ID NO: 48615 - DNA, 1125 bp, Homo sapiens
tgcctgtaatcccagcacttgtggaggctgaggtgggcagatcacttgaggttaggagttcaagaccagcctggccaacatggtgaaaccccatctctactaaaaatacaaaaattaactgggtgtgggggcgcacacctgtaatcccagctactcaggaggctgagacaggagaattgctcgaacctgggaggcagaggttgcaatgagagtcgagatcgcgccactgcacttcagcctgggtgacagagcaagactctatctcaaaaaaaaagaaggatttattgtatatccttagagtgggtaatgatcagctaataccagaacgtaatgaattaatataaaagtattaaagatgaaggttagtgatgaaggctaaagattgaatgtttataatgaagtagaaaaaattctaaattgtctctatgtaaataggcagaaagttgcagaggaaatagaaaaatggaaacaattgtattaaggaagtgggcctacaaacttctagaaattctttgggtttttgtttttttttctgagaccaggtcttactctgttactcaggctggagcatgttggcgtgatcacggctcactgcagcctcaacctcctggactcaggtgatcctctcatctcagtctcctgagtagctgggactgcaggcatgcgccaccacacttggtaatttttttgtatttttgtaaagatggggtttcgccatgttgctcaggctgatctcaaactcctgggttcaagcgatctgcccacctcagcctctgaaagtgtgaaaattgttttttatattataatatggttttaataataactaagtgggacaacattttataatgatagccttcctctaagttacgttgtctcagtgtacttgatttccacaaacccggggccagtctgatcaattgtaaatgagaccggacatctctcagcatgcaaatagaggaaggattcgtgtttatagccaacatcctaaaattttacttaaaattctgtggtaattcttaataatagagataaatgtaacatgagacatatgtataatggaaggtcactgggattacaggggaaagatttttctctggacaggtaagatcagataagtcagcaatc

SEQ ID NO: 48616 - DNA, 1052 bp, Homo sapiens
gtacacagtgagctctatgtaagtattaggaatttgtgtaggaaaagtgtgtatgggatacagtggcagcactgagcaagaaatgactcactgttcatagggtcatgagaaagggaaggttagcagaggaagtgatactggagcaagttttgaagcacaggcgggagtttcttaggtagacatggccagaagggcaagcagacggagcagtgcaaaggcatggagacactaagcctacgagcatgcaggttattttatgtatttttaattgttggattcccaacaaagatgtggttatcatcatttcaatcattatatatcttaaaggaatactacattccgttgattttaaaactttgatgtgttacagtttttccgtccctagtttttcctttgtctgggatggtttccttctcatgctttccttttcttttcatactatggttgcattctctaatgatactccactgttcttatcttctctttctcaccttaccccctatcctcaagctctggcactggctaaataagaaggtaaatgaacacccagatgttggtttttactattgaattccgtaatgcccctgtatcgcctttttcactctatgtttctgtccatgtgtcaaactaagtttttgttttcaaagttttaattataagctatggaaggttgtgaagcatgaatactatcacagtataatttggtaaaaactcagcaaaggctgtctaggatatggatggtatctccttgctcaggtgtttgtaagaagttctgtctcatagtccttttgtcccctgtaaatccagttctgtaaatgtggctcagcctgatattctagtctcctttgatgtgtgaaaacacattaggcaatagttattgtaagggcaagagagaactctctgtttgatactttttctataaaagacacaggaattttttaaaaagacaaatctgtgaaatatttgtatggtttccttggcagataattttatatattgtctttttttaaataactagtatttcaaaatttatttttaacttaaaacagata

SEQ ID NO: 48617 - DNA, 1073 bp, Homo sapiens
tgcatgcttcatgtgttaatatattgacccctcaaacagacccctctggttgttttggactcgttgtcctgtgtggcctggctttgggaattgcaggctcctgaggaatccagctggtagatataccagctgtagagtcatgctgtactcttgcagagttccagaatgtaaaaggccaccttagtctgtgctgagagatccattagtgccagaggtatttggagttagggaatatttagagtgaattctccttgaagaactgactttagaaatgtcagctaagataaaggaatttggtgtagtaggaacacttatttttcttgcacatggaattatgtttccaaagtggagaggaaatgatattttggttttggactcattcttccaaatatctgtcacacccaccatcatgaagtttccaaattagaaagataactcagagcaaagtcaaacaaaagcatctgttaactagcttgggctttagccctgcacttttaagggtagaatgttggtcctagtgaggtgagctgacttaccagggtgcaagtgatctcagtagtaaaaattgactcatagctgaacttttaacattaaaaacacttaaggaaattatgatacagcacttggtgggctactgtatgattgcttatgaaaattatgaaacaacagggaagtcattcattcacttatttagtgagcacctcctatatatgagatactattgtatgtgccaggaattcagtggagggagaacaaaacagacaaggtcttagctctggtggagctgactttcaactgaagagaaagaatgagaaaggataagtagaacatgctacaactatgtaaaagaccagggggaaaatgtgaggttgggattatgggagttcttatttcttttctcttttttctagactttttttctgacgtatgatacttttgtaattaacaatccacacattcaacgtgacatacttttgtaattaacatttttttctaatggaaggcaaaatgcaagttttaggatcttaataattttcattattatagtatatatagagtaatactactttaag

SEQ ID NO: 48618 - DNA, 1034 bp, Homo sapiens
cccttgcatttccatatttatgatcagctttcctgtttttacaaaaaagccttttgggattttgatagggattgcattcaatctagagatcacttgtgggcgggggggagcattgccatctttacaatataaaaagacaaaaccacaaaaaccttacaatttatgagcgtgggatgcatttccatttatttcgttactctttaattttttagtgttttttttaattttaaattttaatttttgtggctacatagtaggtgtatatatttatggggtacatggaatgttttgacacaggcatgtaatgtgtaataatcacatcaagtaaaatggggtatccatcccctcaagtatttatcctttgttataaataatccaattatactcttagttattttaaaatatacagttaaattattgactatagtcaccctgttatgctatcaaatactaggtcttactctttttaattttttttttctgtttttgagatggagtctcgttctgttggccgggctggagtgcagtggcatgatctcagctcactgcagcctccacctcctgggttcaagtgattcttctgccccagcctcccgagtagctgggattccaggcacccgccatcatgcctggctaatatttgtattgttgtagagatggggtttcaccatgttggccaggctggtctcgaactcctgatctctggtggtccgcctgccttggcctcccaaagtgctgagattacaggcatgagccaccacgccctgtccatttttttaaactttttggtacctattaataaccacttccagcttccccgtaccctctcactatccttcccagcctctggtaaccatccttctgctctctatctctgagttcaattgttttgatttttagatcccacaaataagtgagaacatgaggtgtttgtctttctgtgcctagtttgtctcacttagcttatatggcctgcagttccatccatgttattgcaaatgacaggatctcattctttttttttggcggaatag

SEQ ID NO: 48619 - DNA, 1078 bp, Homo sapiens
aggagtgttatataagtgtactattattgtactcagatttttttctatgctctgcaatcagatctcaaattctttgaattcccagggttaattggtctggtccagcaagactggactttttgaagcagctgtagtctcacttcccatgtcctcatatttttgagcttcaaagctctttaatatttcatctgatagagttacttgaagaaatattttaatgtcctttttattataaaagaattagtgcttattaaaggcagtctggaaaatacagaaaaaagtgaaaggaaaaacaaaattttaccacccaaatacagccactaacttcttagtacattttcttttcctcccaccatatagtagatgtaatcacagcacaagtattttttgtattttacttctaacttaatatgatattgtgagtttttaaactatatagtctttgtttttaagaagtgattttaatggttgcataacattttattgagtgaatcgtaatcatttcccagttgttgaccttttaggtaatcacttttttcactgttctgaatcatactctgatgagcttctttatatttaaaactttttcaaaatttatcattatttagtaaggataaagtctgaaagttgaattctgaggttagaagctataaacatttttaagatgcgaagattatttgtattgatagatttgaccaaaataacgtaggagatagtttttttctgtcttttttagtaatcccatcagttcttttttcttcatgctctgaattatatagctcgaagtttctttttgtcttaatttgcttttttttttggcaaggttcatgtcatacttgacttttagcttcttggtcttatgttaattaaggtctttgtgctcagatgtgttctggattatgtattccctctgtgttttataaatgttctattaaaatatgagtttctgtgtaggctacgctggtttcttttgatgcgtcttaagctctagggtcatttaactttagtgtaggaagaactgaagagggtatcctggctgattcttctgttctgaagtcctgctgtttgttcctctaat

SEQ ID NO: 48620 - DNA, 1050 bp, Homo sapiens
tggccatctttccttattagcacttagagatatacgtctttcttttttttttttttgagatggagttttgctcttgctgcccaggctggagtgcaatggtgcaatctcggctcactgtaacctccacctcctgggttcaagcgattctcctgcctcagcctcccaagtagctgggattacaggcacatgctaccatacctggttaatttttgtatttttagtagagaaggggtttcaccacattggccaggctggtctcgaactcctgacttcatgtgatctgcccgcctcagcctcccaaagtgcaaggattacaggtgtgagccactgccctggccacttttttctttttaatactgctacagtataaatcttttttctccccctcccccaccatgccttttagaaaatgttttcaacagattttcttagctctgaatttgtattagaatactttgataaacatttttaaccattggtaattgtataatcataatgggcttaatataaactctaaagtgtttttataaatggccttacctcttgaactaatattacttctgcgaatcttttctgaggaaacacttcaaaatactggaaaaaatccagaagccaaaagaatttcctaaaggttaaaaatacttctttttctgtttataaagatactacataaccttagtagaaaattgagcacctgtaataaaacataaagaagcagattactccttgaaatctgccatctagagataatattttaaaacattttttgttgagtatattttcaccattataaatttacacacgaataaattgacactgtagcactgtatattgatgttcatcatactgttgaaagtctgactaattactcaatttttggagatagcattatttaaacagttcactataaaatgatatttaagttctcaattttttatattgtaaatggcaagtgaatatttttatatgtgtctgcacagtgtgcttctgtaaaacactcctaaaagtagaattggggagtatattttaaaatggttattttaaactgga

SEQ ID NO: 48621 - DNA, 1057 bp, Homo sapiens
taagatccaacttttgagcatctgccatgtcccaggcactagattaggttcttttacatgggtgttatttcattctctcaatgtcttatgagctaggagggagggatttcatatgtgagaaaactaattcagagaactgttgatgctgtcagtaaatggcattcaatagacctagcagcagttgaagtcctgctgttatcaaaactctgtagtaaccttcaataaggatttttaaaaagttttccctaatacattgtgtttaattatttttagtggattgtaggccaggtgcggttgctcacacctgtaatcccagcactttgggaagccgaggcaggcagatcacctgaggtcaggagttcgagaccagcctggccaacatggtgaaaccccgtctctactaaaaatacaaaaattagccgggtgtgacggccgactccataatcccagctactctggaggctgaggcaggagaattgcttgaaaccgggaggcagaggttgtaatgagcccaggtcgcgccattgcactccagcctgggcaacagagtgagactctgtcttaaaaaaaaaaaaaaaaaaaaaaaaaagattccagttactaggaaaaaatcagaaaaatatcagcattctagtcatctagaaaccttattcgtccctcttctttcttcccttttatttttatatctatgcagttttccaggtcccatcaattttcctttttagtgtctttgggacctatgtttttcttttttcttcttatattttgagacggagttttgctcttgttgcccaggctggagtgcaatggtgtgatctcagctcactgcaagctctgcctccccggttcaagcaattctgcttcagcctcccaagtagctgggattacaggcacccaccacgcccggctaatttttgtgttatttttaatagagacggggtttcaccatgttggccaggctggtcttgaactcctgacctcaggtgatccaccttccttggcctcccaaagtgctgggattacaggcatgagctactgcgcctggcctggacctatg

SEQ ID NO: 48622 - DNA, 1025 bp, Homo sapiens
gatggtgtgtgtttatacacaaaggcctgaatatacacaccatgagcatttgaaggtctttgtcaaggttgtttctgtttctgatctcttgcctactttaaaacccaagaggtagaacattatgcatattacaggcaaaactatgcttgagtttatagcaatgtagtttgtagaaaggattcctggatgttttactaagcctttcctcctccattcaacattatatgaattgttaagaacatataaagtaccactgttgaatgtgacttttctatactgttagttaagaaaccaagactagtgttagctgagtaactggcatgttgatgcaacctatacaggttttgtatttaattaggttccttattcagttattcaagtatccagttatttagtttcaaggtagatttctttgtttttatatttaataaaagacttgcatataagttcctcttcatgaaaatagtggctaggctagtgtgattttaagtatgtctggcaactcaaaatgtaatggattcatcaagctatttgggatttttaacataaaacacactgctgcttgattaatgtgttcagttttcccctggatatttgctattaggctgatagccatttggttggattcttctggagagtaattgattctctaaggtaatggggtgctgcagtgggtgtagcattcacccaggtcactagaatcctacctgtttcatcacatagaaggccctggccatggggaagagtgaatgcagcttctccggatgccttatttccacagacatgctgatatgctggaacaatctggctccaggagtattaatatacttttttgagactgtctacaaaatactattttgtaaaaactatgcctttacatagacattgataggttatatttgttttataacaattgtgtacctaatgtttgtgattaattttgagatttatgtatatttataagcctatcttatgtaaatttttactctaagatgtgtggcacattactaataaagacgtggatt

SEQ ID NO: 48623 - DNA, 1047 bp, Homo sapiens
tggactagtggcagggcttcctgactttttcttgtccttggcacacatagaaagtgacgtatagcatgctgggacaagcagacaaggctgcttgaagctccaggctccccatgtcctgcccacttactccaaggactgggagaataaatggttcagcccacttgcaacccttctgaggcttaccagttggaaagttctactgaggtccttgtcagcttatccccaatgtgttaattctgattaggaatatggaattgtccccattgaggctaaagtaaaacaggaaccagtttgtcccaaccagctcctccagaaggtgtgtggagaacttgtgtgctacctgtgagtctactgtgtgggctacatatacactgatcccgccgccaggaaccccaacttggagtgaagacacatgacataaatagctgaggagtaagtccaagttcaggcagcacttgatacgtgtgcactgagcaatccagacgagatgtatgcgactttggataggggaagttcattgcatttcctactgcatcagctggcgtagtacctatgggggacttcttgaccatccagacatgggcattctgttaaaggcggggaatctgttgatttcttggcctgcatggctgatgatttggttacttaggaggtagaagaaaccctgcagttattactgttgtaaattctgttcagcaaggaagactgcattggaaatgtgtaagtaacaagatccatggaagaagaaaaccctgacatctcagaatcatgaacatgaagtgagtgaaatccagggcttaattctccacatattctttttcttcttcttgttgatattcttttctaaaattaatttgtgtgggtacatattaggtgtatgtatttatagggtatatgagatgttttgaaacaggtatgcaatgtgaaataatcacatcatatatgttttactgtttagaaaatccaatttcaaaatgtcatagaaaatagacttgaatattttttacatgggctgtgaatttagaaagcatagataatccgaaagag

SEQ ID NO: 48624 - DNA, 1075 bp, Homo sapiens
tggcatccctcattgctttaattgctgcataacgttccatagtaaggccgtgcccttcagaatcctgtgggcttacgagtcgcagtttacatgtatttccattggtttttctaaggggaaagagccctgcccaggcggaactctcctatctgaataaagcgaagtggctggaaatgtatggggtagacatgcacgttgtcagggtaagaactgtgtgcgtttaagtaatttggttttgctgttactgaaaaatgtatgaacattatgcaaacaaaataacttgtggtgaggaaactgtttttgcattttgcattctgctgtgtgacgacctgttagaaccctctaccgattgtcacttcgtttgtttgtagggaagagatggctgtgaatattctcttggactgaccccgacaggcatattaatctttgaaggagctaacaaaataggcttattcttttggtaatttagttttgtctaatattaaaaatgtcttttcctattttgtggtggaattctatgtgatggatgattattgaggggtatctgcaacacccagattcatcctcagagcacacggtgctgctgttgtgggtctgtggcagttgcgctgaaacttctggataatcacacttggatgaatgtttttattttttttttagtctaagctttaaaagtagaaaggaaactgctatttgatgtgtagatagttttactgcagattgtgcttttaaaatgctttctgtctgactaggcctaaaattaccaaaatggattttaaaaagagcaaattgacactcgtggtggtcgaggatgatgatcaggtaggcctggctcccatttcttcccccttgctgtgaaaatcctgtgttggggttgcaaacgcccactcgaggcccttgtgcttcctctttaagggacgtgagcaagagcacacgtttgtgttccggttagacagtgccaggacctgcaaacacctttggaagtgtgcagttgagcaccacgcattcttccgactgcggacgccaggaaacagcaaatccaatagatccgactttatcaggctgggctctcgct

SEQ ID NO: 48625 - DNA, 1039 bp, Homo sapiens
gggctctttgatagtctgctacagctttctcaatgtacaggtgtggaaaccacattttttaatgttgtttatgcttgggtaatttttaaaaattcatattctcttaaaagtactttaaagtatttttagagaacagaacactttgcatcactttcctttagcctttgtactttgtaaaaactagctgtcagtttggagtattgtggcatcaggggtgaaaataaaatgtcagcttttagtaatctgtctaaatcactagggtttttctcctggaatgaggttactagctaaactatcttagtcagcacaaaagtccatccatctcagtttccctgatgaggactgaaaagaattggctagtgtcgcgtgcccagttatgctgtcctgatgttgtgctaaatgttatagatttaacgtgctttcccttttgtccatcctgtgatcttcaaaactgggggaaaaacatcttcaaccttccatctccaaatgtttagttggacctgcttatgctttacactttcgagttaaatactattcttcagaaccaaacaaccttcgtgaggagtttacaaggtaggccacgatgcagaacaagctcccgcccagcagggcttgccttacatgtcatttatggctcttctcaattgtgggtttgcctcttcttctgtctgctgtctatttctcagcaagagttattagtacttttccggtgcttccgtgttccgttaaaaatccacaactttgcttaatttgacatttttctgagtgaatagaaattagaagatacattttcttgtcacacttctattttcttggaccctgggtaaattaattggttgctctgcggcgttttatttttatctcaactacaaaaagggaaggcagatattggaaaagcatttctcagtccttaatcgccatcttatgttttaagagattgcaaaatattctcttgattgttacaatacaaggaacctctttaagaaaaacagagtaattatagcaaagttgttaaaatcccttcatgttatcttttaac

SEQ ID NO: 48626 - DNA, 1030 bp, Homo sapiens
acaacctctgccttcctggttcaagggactcttctgactcagcctcccaagtagctaggactacaggtatgcaccaccacacctggctagtttttgtatttttaacagagatgggattttaccatgttgtccaggctggccttgaactcctcacctcaagtgatccacctgccttggcctcccaaagtactgggattacagacgtgagccaccacgcctggcctatttttaatatacacagggtcttattgtcacccaggctggagtgcagtagtgtgatcgtagctcattgcagctttgatctcctgggctcaagtgattctcccacctcagcctcctcagcagctgggactacaggtgtatgccaccatgcctagctatttttaaaaaagaaaagtttatagagatggggtcttgctatgttgcccaggctgatcttgaattcctgggctcaaacgatccttctgcctcagcctctcaaattgttgagattacaggtgtgagccaccatgcctgactcagatactcttcataagccaagaaaatttgcaggtcctagaaatcccgttatgagtttcgtcactcagacttaatggtgaaggctcaggagatgttccagcagagagttgttagatgctcttcaactcctgagctgctctgaggccttgtagttccaatgctcccatgtagattttagatgattaaattctacaaccagccttatgggtgtcatatttccagaattgatgtactattggaacagatgggccttgccaagatcatctcacacatcttgatttatggaaaggattttgccagatggacttggatgagaaattcagattagaaaccacctttctaacacccgttagagtgtttgagtgaaatgtcctgccatttgaactcagaattgcacctgtctgtttccagtgactggtttaatggtctgctaagagggccggagccgtttgccttggcgtttacccacaggcggcatggctatatttagccaagacacaggtgaacatct

SEQ ID NO: 48627 - DNA, 1089 bp, Homo sapiens
aagagagaccctgtctcaggaagagaaaaaaaaagtgccagtatgttgttcaatctcattttttgcttttaaaaacatagtatataaatgtattatgcgtttacatatatgtgcttctgttcatttgtgttcatgtaggcacagaaaaaataagctggagaaaatatacaaaaagcacatctcagagttgtgaaattgctgataatttttttctttatattagtctgaatttcccaaattttccgcaaaaaaaaaaaatcacttccaacactgaaaaaactgtgtttttaaattcccatagagttaataaaaaccactggtgagaaaggattaaagggaaaaagcagtcatatagaaaagaaaacataagccttggagtcagatctgagttcttgtttgtgatctcgaacaaagcattgaacttgcaaaataagaatacaattaatatctcttacagggctgttgtgaaaatcacatcagataccatacaaatatgtctaatacatgactttagatatgcaaagattgtgttgtttgagatttttcgtagtgattacatgtgtagggaagtacctctgtaaatgaaatgtactatatattgggataaatgtttttcctgtggaaatagactcctgaaatgatgaatgaaatgctctcgttcttaaaggaagggtgtggttcactacattgaactgaagggaaatgattctagactaatttagatgatttccatttaattttgagccagaattcttcccccccccccccacatctagttgcttttagctcttgtcaaatagttgtcataaagacaaggtttcacttaccatgctccattacctgagacccagacccttcctatggcattttttcaaattaaaaaaaaaaattattaaagagtttagtcagtttctcatggaactgtagaatttcttattgggaagattttcttttagtatataacacataatcactttaaaatgttaagattttggtactgtgaatgataaagtatgttttcacactttcttcatctgatttttgcaatgcttgcttttttctctatttctcacatagcaactctacaga

SEQ ID NO: 48628 - DNA, 1084 bp, Homo sapiens
ctccttacccatggtttccttgattcccggtcccccttttttttcctgtccttttccctttttcttcccccttcttgggttctcagccttcaggaattcccctttttctgttcatagagttgacggagtgcttgcttccacttgctgggccttgccagcatccgctggttagagccagttgggggtgtgaagctctcacctgagggatgtgagtaggctgcacacctttggttgagtgaggagattagagtcacctgatgccttctctaatattatagtaggtgacttgttctaagaagaaatatttaagccaaaaaaccatccattgcacccctaccacattggagagcatctgctcccaccattcaaattttttgtctttggaggccagagctggtgatactgatactgtaatttcaatacagttgttccttagcaacccctcttagccgaactttttataatttaccgttagcttcagagcttcttataactatactctgatagaatgagaacaaagcattttaggacataaaaattaataatttttcataaaattcagtggttttgtcattttgtatccctgtgaccctgcctctcagcctcctggtgactcccattctaggacagaatctaagggacctgcagccaggagctgttgtctccctcacactccttcagcccaggaataaccaaagcaaattgttgtttttccgatgaattggaaaatgaaaaaaaagtgaaggttctcttaaaagccatgtctcatactctggccaatatcacaaagccttaactcattccgttccatccctgacccttccagaaagacatacctgtgattcctacactcactttccactctgtccctccgccttctcagagcagtgtttcataaccagactgccaagcagcccacagggcctggagaagagtcgataaattttaggaacttgaggccaggcgcagtggctcacggctgtaatcccagcaccttgggaggccaagacgggtggcttgcttgagtgcagaagttcaagaccagcttaggcaacatggtgaaaaccagtctgtactaaaaata

SEQ ID NO: 48629 - DNA, 1027 bp, Homo sapiens
cagaaagcatttggtcccagctgtcataaaatcacacttaataattagcatttctagagcactttggaacctagcaagtgtggtgcacatatgttgtctctgttaactctcacaacagtactgtgaaatcgatatggccagcatgatgaggatcacccttttacagatggagaaaacgaaaatcagagaggctgagggacttgcccagtggcacacaactagtcagagatagagccacaattagaatatatgttaaatatctaggctaggcatagttgctcatgcttgtaataccaacactttgggaggctgaggcgggacgattgctctagcctcggaggttgaggcttcagtgagccatggtcataccaccgtactccagcctgggctgcaacagagcaagaccttgtctcaaaaaaataaataaaattttaacttattgtcggcaactcgccattgctgagtgtacccagccctcactctatcctccaacattagccattccctttggtagccacactgtatgacctacatcaatgggagcagtttggtggtatttttgattggccccaaactgcctaaatactctttgtgtagccaaggtagggtgttcctctttctcttatgtaaaggagcagaattggggttcacactgaccccaaaattaccacttccaggaagctcttgtttttgtttgttcctaagaaaaacttggagattaatctacatgttccctgagttgaagtgtccatttaagcaaaggacaggatctgcatttggtatagactttcctggataaaagctaagtgatgatgctaacctgtcctttatttgagaaccagcttcccagcaacaaaggatcccagtgtccattttcatccagtgaccaggtgactcacagcttccctacctccttgcccactgttagttaagagctcgaaaatgaggaacaccacaagagaatgcctgcatcccccagttgatggattacagcagtggctacaaaagaccaccaaaggtcatgtca

SEQ ID NO: 48630 - DNA, 1047 bp, Homo sapiens
atatctgcgtggcaaagacccccacagtatcagagggggttggtcatactaggctgttctacgtgaactaaaaacccctaaatctccatagcttcatatcataaggtttatctttcagtaattcaaagcttgcattgagtctaggagtcttccagggcagccctccaccccatccatcgcaataactcagcagtcgaggctgcttccatgtcatggccatctttccatgtgacctccatgtttgtcacaagggaacaggaagctgcagggttacacaccagctcttaaatgcttcagcccaaaagagacatacattcctcctgctcagagcacagtggccagaactagtcaccgagttctgccctctgcaaggggagctgggaaatgtggggttgggcctgggaattgaatagacagtaacttcctatgctgcaggggttgaggtgcatactgaaagaccacaggattaggagatttgagacctggtctttggcccacccaaaccattcatttgtttccttgttcactcaattttgatttcctttgctaatttgctctgtcacacctgcttcatactccctctgttgtgatctcaagtatcatatttaaatgcaattctacccttcatcaagcaaatttggttttgttataagcatgtgatttctgttgggtactgatagtgaatactgcctggactttccacagtatcagcactgttttgtttgtcccgtttctctaactccatgttcacattgtggttcacaaagggtttgtcccacggcaaaggggaatggacgtttcttatgtcttccacgtgccaaactctcttctagaagctccatatgccaagcccccttctaggttttcatctctcatttcagccagataaaaacgcttcgaggtgggttctgtcatctttattgtacaagaagaaaaattgagcctcaggagcccaacattatatagctagtaggtgccagactgaaggttcacactcagttgtgactgactcaaaccatgccccctctttataattactagtatctg

SEQ ID NO: 48631 - DNA, 1027 bp, Homo sapiens
cacattcaatggataagaataaaaacttgctttagtagaatttagcattagattgctgaagattgataacataaggcatttaataaccttacagaaatggtatcaaatgttctagattttttaaaattggagttaatgccctctctttattggatgaactctgctttttgtcttttcttccgtagtgggctaaaacaatcagaagcagaatcctgctatatcaacatagcgcggaccctcgacttctatggagtagaactgcacagtggtagggtatgtattcttgttatgtcttggctcaaacattatgtttttattttaatctctgagagtttgaaaaattctttgatgaaactatttctttttcattataacaggactttttaaaagatatttggaaggtttattaagtaatgctgaattttttgttggtcatttgtccaattgcttttttttaatgtttgcttttgtacttgaagacttttcccttttgaagggttaggggactagaaactagtaatttttgtaagaccattttatattatggttttaaaaggcaaaaaataggtataaattcatttttcaggtgacggtttaaggagccaagatttctactacttaatctcaagtgttgctcaaattggagatagttactcatatatgatagtttttttaaaaagattatggtgatataattgttaaaatcaataaatatttgaaattagttgtggctactttagtaggatttactaacatctgtcatctgtcaagcaatttctatgcaccagtggattatttcctgcggtaataccatgagttccatatgttatcattaaccccattttacagatggagaaactgatactcagggacataaccgaggtcacacagcacacaagttgtagcttcagcacatgacccctcactgtctaattagcatctgacctttgatcagtggcatacgttttctacctgtgattggtccacatcatatccaaaaggaagcaaaaattaattgagcacctac

SEQ ID NO: 48632 - DNA, 1045 bp, Homo sapiens
cctccctcagcctcctgagtagctgggattataggcacataccaccacgactagctgccagatcatcttatcttggaccaggcttctaccattaattcacatgctttaaaaaaattaaaaattaaaaaaatgaaaaataaaaaaacttaaaagattttacctatattcctggaacatagttatcttaccccagctttgtagttcctgtttaaggaaattccctctgaaggaaattttagctctcaagagtcaaagaagatgtatagaggtggtatctgttagtttttgtttgtttgttaaggatctaggcagagaggtcattacatttttctgaagttgaggtcacaggtggggtacccacaagagaggtcattacatttctgaagttaggcatcccaggcatctcttctaaagaactatcctgtattctaattgttaaataaatatcttcttcattgtgagcctccacaactgctgtttctgataaatttagatcattctttgcagaattttatatactggcaatctcaaaactaggctccttcaagattcctaggaagtctcccaagctcgggttgggttccactattctagtttctttgtgtatgatgccatggggttgactcagaaactttgctcaatatatgacaaggcagcatttggtgagtggtgatctccacgtttatcttctcatttatatccctaggaagacatactgattagctgagcttgtcaatgaaagcccgggttcaccattggattatctataactctcctttctctttttttctctcagtagcattgtaggaggagagaacacttaattctggttgaatgtcagcttggataaacatagaaacaaactagaaagaactgatgatgttctcctaggtggaaaagatggagattccaataccaaataggtgtgaatcagcaaatgtatgttatactgtctctcaaggccaggtgttcaatacattgtgggtagttaattataatcaaagtaataatattagagttacgacatggatcctaagctttttag

SEQ ID NO: 48633 - DNA, 1698 bp, Homo sapiens
gtttgaaattagcccttttataatggaaaaagctatggttgagtgaaaaaatgcatcacttatggaagagaagcaacttacatacattgactttgtcaaagggaaaatttaatttgtttttgaaaaatgttgtaggaggtttcccctgtaccctgcattttcgagtaagattttttatacctgatcccaacacactgcagcaagaacaaaccaggtaacaacatttttttaaagttttctgtttagtgtataaaaatgagtaaccactaaaaatgtactcttcattttattactatggccaaataacttcatttgggtgtaactacaccaacaatgatgatccaagtaaaaatctggggtgcacatactgacattttaatcacctaatgagttttcagtcttgggcctgcttctcttatctcctgatttgctgccattcccagcatactcccatctgccacctcctacctctcccacctccttccacctccctggcctctcctgcctgctgaacacactgtgctcaaaggacaaaaagtcattttctaccaatgtaggcaggatgtagaagacaaatttgtaaaatagtcatccacaggtcaaatagcatgatgtctctgaagagctaaaatcaaggctcttgaagataacaagacatctcttgttataagaattttctttctttttttttgttttgagacggagtctctctcttcaccctggctggagcgcagaggtgcgagcttggctcactgcaacctccgcctcccaggttcaagcgatcctcccacctcagcctcccgagtagctaggattacaggcaggtaccaccatgcctggctaattttttttttttttttttttaacggagatggggtttccatgtcgtccaggctggtctcaaactcctgacctcaagtgatctgcctgcctcagcctcccaaggtgctgggattataggcatgagtcaccaggccagctttgttataagaattttctatcagatccccagtttgcaagagttagaaaggagagcaggctggattcagcttgtcttctcagtgaatcagcaagtacaggaaatatgtgaaccagataagggaaagagggctgtgataggagttgtttacccctcagggcttggagtctctcccaaccctgggctggtactggggtttttctaggtgtgagggacagagtaattggaatggagtaggagagtgtagcacaagaaagttgttgctgttttaacacagactgcacaaacaaactttccctcccctgtggcaacgttaagcccttttattattgatccatttatttttcttagggagggaagctatagaaaaaaagcaatagatgcttagtattgaatcctgttttacattcatcgtggccaaaagacataatcaaggaggcagcattaactcagacacagagtgttgccttgttaattttttttagcagtaattacatcacattttaacttgtaatatgttgaaaggccaaatattaatctgttactgtattttgccttctttgtgcacctcctccctctactatagcagacactgggaatttgactgtattttttattactttttaagccaatgtccaaggtgtctggtatgacacatccggtgaccacacagaagcatgccctgtcctctgagttttccccataccagctctttatgc

SEQ ID NO: 48634 - DNA, 1068 bp, Homo sapiens
gtgagagctttcctttcctggacatgcacttcggtggcttctccaggagtaggagccacaggtgtgtcctgaggagccaacagaaaccaccctggggttagcatttcattgtggataatccactggaggccacagggagttcactgtgattatgagagctgagttttccgatttagacattatcacttgggaattgcagctaagggggaaggaagaaatcttagacaattaaattaaactcgtattgtcttgtgttgatgtcatttttcttagccctacttcccatatgtgctgtgtggcttcttaaaatttattaaagcttttcttgtggtgggaagtgtgtgtgcatagcatttctgaatattttaactcttttttgcctacagtaaagatgtttttaccaccaattaatttaagacttttcccacttgataatttcctttgttctagaaacaagacactggccaggttcttctggatatggtgcacaaccacctgggtgtgactgaaaaggaatattttggtttacagcatgatgacgactccgtggactctcctgtaagtgccatttttaaaaaatgtgctgaactccttcacggtttgcttttatattttatgttttcttgtccaacagagatggctggaagcaagcaaagccatcaggaagcagttaaaaggttggtgtgatcttttcatttcagtcgaacattaggtgttagtgtatcacagcctgtttctcccctccaatcgtcagtgcctgtgacatctggtacctgtagttccgggtgtccaggagtcatgagtgagccgacttctccctgtctgacttctgagtcagcagagatgcttccagatcagccctctaggatccgccccagctgtgggaaagaaggggaagggtgagagtaggcagctcagagcgagggaacccacatttctgtattcaaggaaggaaaaggaaggaggatggccttacttagcccgatgtgagagccagggtggacaagagagacagggagatagacaaacacaaacacctcatactttccaacagcatagtcgcgttca

SEQ ID NO: 48635 - DNA, 1098 bp, Homo sapiens
aaaatggaagcagtctttagtagttcatagtccccactttagattgctcagctttggtaaacatttcttaaagtgtgtcagaagctcctacgatgtgtgttaaagatgtcaatcccttgtcctgcctgggtgttttgaaacttgctctctgtggggtggggcctgagaatctgtattgtaatggctccccgagttgtctcaatgtgccgtgcagttagagaaccactgatttaggggtctgttggcaaggttgtaaatatttcccttaaaaggcaactagtttggttctacagaaccttgtcttgtatctgatttccttttaacataatctttcatagaattttgtgattacacaagctccatgaaggtcacagatgtctcttccagatgctgtacactaatagtttagtatgtgtctggcttctttgttaaaatgtgtgtttgtctgtcttggagctgttctttaaccgtttatcctcttcctgacgaaaacatgaatgtttgttagtatataactcatgtattcattcagcatatgtttactgagcacttactatgggctaagctttgttctgggtacaaaaaatggcaacagtgcacaaaacagaacaaaatccctgcgtttttgaagctaacatcccagcaggggagatgggccataaaaaaatatgtgctgagtcgggctttgcagaaaaataaagtagagcaagagggagagagtgccagggcaaggtgaggttaccattgtatagacgtaaccagagacgtccccactgatgagatgaaagaaccaggcgttcatctggagggagcacatcccagggagaaggaacagcagtgcaaaggccctgaggctggagcccacttcctttggttgcagaacacagtggagtctggagtggaatgagcaaggggggagggtagcagaagataagctcagagagataacaggggtaaggggtgggggatcgcatggagccttgtagatcattctgagggcactggctttttttcctacatgaggtggaaagcactggggctctgtccacagttgacaataggagggaaggggctgaaagactggtgtggcagtccagg

SEQ ID NO: 48636 - DNA, 1029 bp, Homo sapiens
agatgtggatatccattaggctatctgtttattgaaaaggtcatctcagctaggcatggtgagtcatgtctgtaatcccaggcagttggatcacttgagtccaggagttcaagaccagcctgggcaatgtagtgagaccccatctcaaaaaaagaaaaagaaaaggtcatctcttccttcctcattgctctgaagtgccacctttgtcataaacatattatgctggtttatttcaagggagttttctgatttgatataaatgggtacatggcatgaaattgacttctctttgatttagattcccctctccttgggcctccatgtgaattcaatacaggagttgtttgggggtttaattattgtcactagatcatcagagagtgtattcacgtagtatatcaattagctttcaaggtaaagtacaaattctaatttctggatggatcagaactttcttccaactcttacctcacgcctttttccttctgcagactgcagttataaagatgtcgggagtgttctagttggttatctgtcttccatgttcacaaacttcctacaggcccaaattgcttatctttttgtcacagttttattgatatcttctttttcctttgaccattcaaaagaatacccactccctcaggagggctgagctaaagctggggacaccggagctaaataaagacacataaaagacttattcctaaggctaggcatggtggctcatgcctgtaataatctcagcactttgggagtcccagatggaaggattgcttaaggccaggagtccaagaccagcctgggttaaatggtgacaccccctatctctacaaaaaaaaaagtttttaaaaaaatagccagacatggtggtgcatccctatagtcccagaaactctgtaggctgaggtgggaggatcgcttgagcccaggagtacaaagttataataaactgtgatagtgccaatgcactctagcctgggcaatggagccagaccccattaaaaaaattaataaataaagacattc

SEQ ID NO: 48637 - DNA, 1093 bp, Homo sapiens
ggaaagaaagacagttaaaggattttggtttcggtggggggatttctttggctggatctttggtctaaaagtagtagtataacaaataatttaggtttgatacatgtagcccattgaaaacaaattttagaagttaattttgtcttaaatagttctttttttccccacattgaaacatgggccttatttgaaatcccagcctcagaatttgatatgccaagctgttttatactaagaaaaatttgatttagagaaaatttatgtctcttagatctatgtctccaaagatctaaatttttggatctttaattagtctctacttttattaagtttccatttaagaagcttgggtatgttgattgccattacctagttctaaatctttttggatttttcattttaaattttccagtccctctctgaaaagtattccaacgtgatattccttgaagtagatgtggatgactgtcaggtatgtagctggaaatatgagatactgctgagcttttcacattggcctttttctctgaattgcacagtgcttttttccataaatatgtcaaataattctagaactgtaatcctatctaaaaagttctatctcagaagagcaggcaagttaggagcttaatcctagctatcgggagctgtatatcacatcctaaagtaaacaaaaataaatgagtgagacttctgaatcttatcggccacccacctttctaaaaccctacattctactttacactctgagatgtgcaataaatggagattgaatttagctatgatcattacatccataggcttgatggagtcaccaaattatgagaccgcttgtagggctctttgtgaacttgcagtagcatgagaacctgcatttgcaagcctattctagtcttggttgattttagtcaattagaaaccacaaatgttttaacaaataaacaccaaggtacctgagagaataatttggaagaaattccagggttggttgtatttaacaaatacttgttttgcactaggtatataccaggcactgttctgggtggtttttaagtatcagttcatttaatcctgagtgctgttatcatcccca

SEQ ID NO: 48638 - DNA, 1048 bp, Homo sapiens
tttaactttcttgaaaatcacattagggaaggctttgaatgaaattgatctggaacaataagtgatgatttggaaaaacaattgctatacttctatgtaccctgctgcagctctccccatgtctccacctctagaggtggggttcagggatttgcataactaaaaaatttatgaaagtgttgtcctacctttctcaggaacaccatttgtgaattattttcccaaaaacgaggtagaaattagaaatctagagaagtaactattagtacatgaggtcatattagtgttttcttgttgggtttttttttgtttatttggttttttatcttatggttttttatttatttgatttctttctttacgagacctcttgtggcggtggggggcggggaatgttcatttttttttaaacctatttgaccagcattgtttccttgaagaaaacctagatttcagatacagatgtttatgttttgatttatcttaattgctctggtttggtttttgggtttggtcagcactaacgtactaatgtggttaaaatgagtcctttgttttgggaggccaaggcgggtggatcacttcaggtcaggagttcaagaccagcctggtcaacatggcgaaactctgtctctactaaaaatacaaaaattagctgggactggtggcagaggcttgtaatcccagctactcaggaggctgaggcaagagaatcacttgaaccccggaggcaaaggttactgtgagccgagatcaggcctttgcactccagcctgggcaacaagtgaaactccgtctcaaaaacaaaacaaaacaaaaatgagtccttggtaactagaatattcggttcccagggttacagtatctagatagtaaataattcagggaagttagtggtaagagatttcttgatcatttctactgagaattttatttaacaagcattccttatgaaaaataatatctatgaaaaatttccttcatgaggaacgaaaactttcatttaatgaatgacaagggtatagttttaaaataaagggcaaaaatc

SEQ ID NO: 48639 - DNA, 1030 bp, Homo sapiens
attaaaaattagcaatatttattttattttaaataaagcaaagctgagcaattttataccttagttcagttaattgacataaagtgacacctttgtattcctcttaaaatatactatgcattgttaaatgaaaaacatagtctgtaatcttttaggtgatataaagatggaaagacaataatgatgcctcataataatttatcaataaatgtggggataagatacagaggcagtacaaaataagcatatggataataactttttttttttttgagatggagtctcattctgttgcccaggctggagtgcagtggtgagatcttggctcacttgcaacctctgcctctcgggttcaagttattctcctgcctcagcctcctgagtagctgggattataggcacacaccaccacacccagctaatttttgtatttttagtagagacaggatttcgccatgttggccaggctggtcttgaacttctgacctcaggccttggcatcctgaagtgctggaattacaggcgtgactactcttcatgactcaggagggatttgccaaggtatttgtgtatgagtcttgagtcttttcgcctaacttctctccagagatctcatttcttttcttccgaaccttgtctccctccctccttccagaaactgtcagttctaaagcctgggttttagtttttctttttcatcccctaagtctcagattcaacattaaaaaaaaataaatgatttagccagccaacaaatacaaaggattccaggtttgctttttcattgcctccttttctatctttaacattattggttcccatctcttttttccctagccagacccaaatgaaatgccatgcagtttgcatatatgcaaacagaaatatttacatttggttaaaatgtacatggaaactactttatactagaagtttgtaagtgtgtaactgagtgtgtaaagaaatgttatattttaaaatacattttatatatgtgttttaacatcataaccacttaccctgagagggc

SEQ ID NO: 48640 - DNA, 1032 bp, Homo sapiens
agaattgagaatttataaatgtttaaaaatcctagaagagagacaacaaaaccaaattaattgttccaaaatgtttaatataaccatgtcagacgtagtccccaagtggaactctagttttctttcctgaagttttatttgttcatgtaaatttgaacctttcttagagttagtaatatgtcaactgcaatatttatttgtaagtaaaaaatggccatgctattgctaacaacattcaatgacaataatacacttgcatagtctttcacagattgtggatattttcatgcacattttttactcgatctcatttgactctccccatgtctctgtaattgaacataattgatattatccagcctgagtttgtggacctgaacatgcagtggaaatgttccgccagcaaccgcatcatgggtgccaaggaccatgcatccatccagatgaacttagccaaggttgacaaggttataggcaggtttaatggccaatttaaaacctatagtgtctgtaggaccattctcagaatgggtgagtcagatgactccattctctgactggtcaagaccaacagcatctcaaagaacttctgattggagagaattgtgagtgttgaatatttgtcataaataaatagtgaaacccttcacttcctccccgccaaaattagcccattttccggacaaaggatctaagtcttggagatttgctgcaggtgcagagccagaaattcaacccccttttcagacattgagtcttcccaatgagaaggtctcatatttacacttaacacccaatccccttacatttaagtgaatttgtgattcctcatttagattctactgtctgaactttccctacctccatcaactcagtggtacattcttggtttttgtttataagcatcaagttcaaaaactatttaaaacttctgaattgaatatatttatcgttaaaaggagatttagaggtcgtctgtcaaatgtaccttcaaatgaagaaatcttttttttacaatattcgtaacggttc

SEQ ID NO: 48641 - DNA, 1031 bp, Homo sapiens
tatgagattcaggaacaagcaaaactagttgtcagagaaatcagaacgacgatgcctttagagataatgggaagttgattagaaatgagcataagagggctgggcgcggtggctcacgcctgtaatctcagcactttgggagaccgaggcaggtgaatcacctgaggtcaggagttcgagaccagcctgaccaacaaggtgaaaccccatctctactaaaaatacaaaaatacctggtgacaggtgcctgtagtcccagctacttgggaggctgagacaggagaattgcttgaacccagggacaaaaaaaaaaaaaaaaaaaaaagaaggaaatgagcataagagaaatttatgggtggtgaaaacattctatgtcttgattggggtagtggttacattgttgtatacgtttgtcaaactctgaactatatggttaaaaggggcacagtttcttgtatataaattatacttctatcaactaactacctcaaaaaaaagaatacatttttagaaatctgattaatatgatccaaaaaattacatagttcaactctaaaatgtacaaattctaaagaaattaatggcagttttattaaaataaggaacaagggaattaattgcatctctatgttttatggacattctagcctcctgtaataactatattataattaatactcttgcaacaacagcaatgactataaaacacacctagtcataaatttaattaaaaaaaagtaagaaagaaatcatcaaattttactagcaggcataatacaagatctacataaaaagaatggcataccatactcctaaatgagaatactcagtaatgtaaatatagctctgtgccctaagttaattgtataaacttagcatcattctgatcaaattctaaatggtatttacatgtggacattggcaaaatgtttctaaattttatatttaaaaataattatatagtgagctatataatatataattatattattataaactataattataattatatattaattatatgttat

SEQ ID NO: 48642 - DNA, 1087 bp, Homo sapiens
ctttgttttgctatcacaggtggccccagacaagagaaaagttttgctctatggaccatctaggttccaggagatccatgtcaactctccatgtgcctccctgtttcccccaaaaccatgtccagttaaacttgggagaaacagtgaaaatcatgcttgaggaaattttagggaaacatgccaacatttttaagtatggcttgagtttctaatttgactttaagattgtctgaaatatctcttctattgtttactgccttcattatgttttaaatttggtagttgtgatagtagtctgatattcttggaatattcttggaaagccttggaatattttccctttgggtcataaaggattcatctaggaaacgtttttcaatgagctactgtgagaggaattcagagagagtctgacctgccttgattagttcaaggcttagcctgcctttaccagagggagttagattcatctttcacccccaaccctcacccccaatacacacacagggacttcatggacttgcatatcagctttggaggcatttgggactggccagttgccccaacagcttgagatatgactggatataatgtaacagggatagaggggtgtggttagaacgtgtcacaaaaatgtataaggaaggtcacgttcagaggcagagaaatgctgctatttgtgtgagtgctgggcctcccaaatggaatgatcacagacaaagtctttcaatgactgacttttctgagcagaaacatctcattacctttgaccaacaggaaaagtgattaggactcatatctatgctaattcttaatacttttgggaagatccaccttgtttacactgtcagagctctcctctgaggggctaatgaatgaaacttggaggctagaaagcagccagataaaattcatgtggtgccagtttatagtcagaaattatcaaacccatccagaactttactgctactctgaggaccctctaagtctgtctactggtgaagaagaatagaattaaggaggaaaagcagtcaacatgaaaagctctctggacataggatttcgttccagaatgaagttcagaact

SEQ ID NO: 48643 - DNA, 1045 bp, Homo sapiens
aaatagaacctagacttcaaagccagtatttgtttaggtcatgaagcaaacaatgctctaatcacaatattaactgtttaattaaaatgttgtaacaagtataaaacagggaatgtaagtttattaccaaagtgatatgtattccaaaaaagtcatagaagatgaagcactataatattgttcccatatatttaaaatacccaagtacattctaattaccagtatatcagaggaaaattttcgtagtctttgtaaaataatatactcatcatagaaaacttgaaaaatgcagaaatgtataaaaaagcaaaaatgattactgataatatcacaacccagaagtaaccacctttaaaaagcaacccccatgtatgcctatatgtgtattgtatactttttttacataattggagtcatactgtaaacagttttataagtagatctttttcattgcaaaattgccacattttcttatggcattaaaaattttacaaaaacataattttaatggctatattatattccatttaatggatgcaactcagtttatttaaccattcccatgttgttaactatttaggttgtttctaattttcattattataaagttgcagaaatttggtgtacataaaactgtctccatataattgattattaggatatattcccatgaaggattctttttttaaaaaaatgtgaaatgtcatcttgtacttacacctttcatgaaaagggatttcctgcttttgtactgcatgggtggcagttgtgaggaaaagccagtcaaatgacctttttacaaaagaaatgcagtggtcacttcagttgagagtgactttttaatacaacaagatcaactagaagaattcaactgtctcaagaatcaaggtaccccaatatatctcgcaattccaaactttgtttgagggactcgttatccagctcttggtagccacacctgcaatgtaaaatggaagaaaatgcaaagaaaccaaatgtgccgagtgaataaaggattgtcatatcaattagtgtgggtccatct

SEQ ID NO: 48644 - DNA, 1017 bp, Homo sapiens
gacttggtatcagtaaagccagaatacctaaactgatggaattgaataggattctactttatgggtgcagtgtaccttattttacttctctatttatgcttatttaagttatttacagcttttaaaataaagaatactgcaaatctttgcacatgcataattgtattgtgtgtaaatatatctgtaggataagtttctatcagcgatattgttgcagtttatttagacagctttagaactgattgacttttgcttaggatttacgggctagtcagaatttgctttgcaatatttagacttggtgttgtcaattttatcagctagcttttttactctacacttgtacttaaaataattgaaatttatgtagaaaaaagtatgtttatgattgtgaatctggaattctgtagccgaagcacccacttcccaattgaataattgtttttataaccttactttaaggatttttttaatttagaaaaagtttttgataaagagagatatcttagacacatagctatcatattagaacagaccgtacctcctttctgctctgccaagaatctgtgcttcctaaagatcaatccagggcatttggcagctataggagatgtaactaatctcaaaaagaatgacagtgaccacatttacagtttatactgttcttcttttcatgtcttttggctattaaaaattatatttatataaatataaacatttttaggttatgtaaataattcacaaagttttctgaattcgcttttagattaaatttttaatattttccccattttgatagtaagaaaatgaattgtaaataaaatttccattacgtttctctatccttgaagtttctgtcttgggtaatacatatcttgtgattcatgaactgcaaagaaaaaaaatccacaggattttgtcatcagctacattctatgagcattttcagccagatttcagtacttgtttagatttatattattttgggagaatcttaatttgtagttaaaaaattaa

SEQ ID NO: 48645 - DNA, 1035 bp, Homo sapiens
tgcttatcgaccttacttgaactatgcatccaaagcattgtattcatcactcagaaaagtataatgtaagcattggtaagtttgatttccagttgacagaaaaatgcttcagaaaaagagacaaactttcccttccccccattctctacttttccaaatattcagatgcctaaaccttccacccatgctagagctgttgctgcctaaccaccttctgggcacaatggcatggaaatacataatcagggtataattttgtgcagggcagagagaacatgctattatggaatcaagtctcagctgaatagcctggcctttggctgtgttttgatctcagtgctaaaatggaaatgaaacgttgcctcctcctttgtggcctatacaaagtttgctgattctgtgctcatttggtgattttcatgcccaagtaggtgaagggagaacaactacgtacatagatgtgcagctttggggttgaaggcattgatgtgtgtgtgctgagtcactatgacaatctaaagaggactctctggtggctgattagaaaattgtggaagttacaggctgtctgggttaaacatttcctggtttattggaggcagatttccttgggccagcaagcattgaaactcccacagtggtgtcatgtgatggttctccagcgaagcattttggatatggtgacagctgctttagtttaagtatctggaacatctaatgtgggagaacttggctaagtgatgtgagaagttaagagaggagtctgaagtttccgttacatttttttctgtttagtggattaaaaggcaattcccatgcaaattgtctctgtctttaggtgttgtattcattttctatgctacatcgcaaattgtcacagacttagtggtttaaaacacacccatgaattatctctcagtctctgtaggttaaaagtccaggcatgcttagctgggttctgtgcttggggtctcacaagctgaagtctgcgtaccagttgggttgcattctcatgtggaggctcgactagggaag

SEQ ID NO: 48646 - DNA, 1087 bp, Homo sapiens
gatttcttggccatgtggcttttgtagtagacttcaatgacataaaaccactaagcagagaccttgtcatttatttaactccaactgcctttaatcttaaggacagtaatattgtgagaaaccttggagtttcaacataatcacaagatggtatgcaggatcaaatgttcaaattatttgcttttgtttttctgttgcatgtactataaaagtcttgtgttatctatataagctttaaatttggacctgtgccttctttttcatcatcttttctcctttttcttttagttcacagccatgaatgaaccacagtgcttctacaacgagtccattgccttcttttataaccgaagtggaaagcatcttgccacagaatggaacacagtcagcaagctggtgatgggacttggaatcactgtttgtatcttcatcatgttggccaacctattggtcatggtggcaatctatgtcaaccgccgcttccattttcctatttattacctaatggctaatctggctgctgcagacttctttgctgggttggcctacttctatctcatgttcaacacaggacccaatactcggagactgactgttagcacatggctccttcgtcagggcctcattgacaccagcctgacggcatctgtggccaacttactggctattgcaatcgagaggcacattacggttttccgcatgcagctccacacacggatgagcaaccggcgggtagtggtggtcattgtggtcatctggactatggccatcgttatgggtgctatacccagtgtgggctggaactgtatctgtgatattgaaaattgttccaacatggcacccctctacagtgactcttacttagtcttctgggccattttcaacttggtgacctttgtggtaatggtggttctctatgctcacatctttggctatgttcgccagaggactatgagaatgtctcggcatagttctggaccccggcggaatcgggataccatgatgagtcttctgaagactgtggtcattgtgcttggtaagttctgtcttgactgtaacttactttatagattctcagtgactaaca

SEQ ID NO: 48647 - DNA, 1026 bp, Homo sapiens
tggaaaagacaaggaaacggattctcccctagagctcctggaaagaaacagagctttgccttcccggtgattttagtcctgtgagacctattttggacttctgacctctaggactgtaagagaataaatttgtatatttatgctgctaaatttatagcaatttgttaaagtagcaataaaaaactatttttgtgatgtttttactgatttcttttgtcttcataatggcttgttctattttcaatgttactatgttaacaaaacacattgaggacacaaatcagagatgtcccatcatttaatctttttctctttctatctcttctttttttcccctcccatacatctgcttcagtgggaggtgatttcttctttggcgagagataagtggccacctcctttgattacatttttccccattatgttccataattatttttctgtcattatagccctgactatcttattggcctatagtccaattgcagttaaattggattctctctgaaccatgtaggttttctgcctaagtctgtcggctcctgaagaagtaggaaagcccattcacactgcccttcttactgccattggaggtgctttcagggtctccactgcttattcttttgacctgttgctttctgcagacaataagagaggaggtttaattcctctatcagttcagtcctattgtcataaaactaactgaaattcctctcacttcttctcaggcatattataccctcccaatttttaattcctggtgtattttctactctttcaatatttagctgctaattttcatgaaatatagcgttcttatccagaatcctcttagtataggattttaaatctgaactagaccttatgtataagttagtccaatttcctcatttcacagatgataaaattgagtttcgaaaatcatttaagttttatcattaaatatgtatggtttttatggtattacagtcaattgttgagagaaaagaaatggcataggacagggcacttttctctacctttaga

SEQ ID NO: 48648 - DNA, 1087 bp, Homo sapiens
catacattttcgttaactatagccaccctactctgctatcgaatgttagaacttactccttctatctaactgtatgtttgtacccattaactaacccctctttatcctcacctccccattacccttcccagcctctggtaaccaccattctattcactatacatgagatcaattttttttaatcctatgttcatagatcccatgcctgggatatttgtcattctgtgtctggcttatttcgcttaatataaggactgccccccactccattcgtgttgctgcaactgacatgatttcattcttttttatgaccagatagtatcccattgtgtatatataccacattttctttatccattcattaattggtaggcatttaggttgaatctgtgtctctgctattttaaatagtgctgtggtaacacatgaatgcaggtatccttttgatatactgatatctttttcctcttctacttttttttgtttatttttttgtttgttttttgagacaggttctcactctgtcacccaggctggagtgcagtgttgtgatctcagctcactgcaacctccaccacccaggctcaagtgatcctcccacctcagcctcccaagtagctaggaccacaggtgtgtaccaccatgcctggctaatttttttttatttttggtagagacggggtttcaccgtgttgcccaggctggtcttgaactcctaagctcaagcaatttgcctgcctcagccccctaaagtgctgaaatgatgccctccctcccttcctcccttcttcctttcttcctttcctcctttcctcctttcctcccttcctcccttccttccatccttaccttctctgtctttctttcttttttctcttttctgataaatagccagtagagggatacctagatcatatggaatgtctggttttagtggtttttttttttttttgtagagacatcttcatactgtttttttttaatagtcactgtactaatttacattcccaccaacactgtataagagttcccttttctctgcatccttgccagcattttttttttttgtctttttaataatagccat

SEQ ID NO: 48649 - DNA, 1103 bp, Homo sapiens
taggaagtatatttacagacaaaagctccttaaaggcaaggttggcttagccttactttttttttttgagacggagtcttgctctgttgcccaggctggagtgcagtggcacgatctcggctcactgcaacctccgcctcctgggttctagtgattctcctgcctcagcctcctgagtaggtgtgtgccaccacgcccagctaatttttatattttaagtagagatggggtttcaccatgttggtcaggctggtctcaaattcctgacctctaatgatctgcccccactggcctcccaaagttttgagattacaggcctgagctgctgtgcccagccaataacgtcttttgaataaaagaaaagatattgttagggagtatgaacatcaccagaaaatgaaaatgtttcttaaaaataaacgaatttttaaaaattattttcttaaaatgaaaaatttttttcttctggactaaattgcaatgtggaaagagtcacatcagcctttggacagaactagggctgtgatttactacagggaagttagcatctttctgagttttcttaatgaacacgtgaataagagatttggttatactttgtgcttatttagcatcctctctttgaggatgtcaaaaggattttagaaatgttctctttctcacacaggtggacgtctgatttatgaagctccccatccacctatctgagtacctgacttctcaggactgacacctacagcatcaggtatcttgcctttctttagtcttaaaagcggtaactaagttccttgaggagatataggcagggaacacattaacttcgttacgtttcatataggcctgggaaccggagttgctgctgtagtcctggttctaccattaaatgtgtgactctagtcccttttcttctctaagcctcaattttttcttctgcaaataggtggggttggacggggtgctatctaatcacttgacggtattatggtagtctacttttatccgaagcttcactttccacagtttcagttacctgcagtcaaacttggtccaaaaatattaaatgaaaaatttcagaaacaaacaattcacaagttgtaaattgc

SEQ ID NO: 48650 - DNA, 1545 bp, Homo sapiens
aacaggcatgagccattgtgcctagctgagactctgcatttttaacagacaactggtgggccacatgttctttgagaaacagtggatttggggactttagttattattattttccatctcacggtagcagcatttttcaaagttgggccaatttgaaatgactgttttatcaaactgtagacattttgttttcattataatgtgctctctaaacacctcatatccaaacattaagaacaagtgggcttcatcatattctggactggtcagaactagccagcaagggtactatattgtgttttaggtgtcatccttgaaggatagaataaatcagctgtcgtgttctcagtgaaaagtggaaagaagttttaaaggatctgcaaaatagaattatgagacagaggaaagaaagaaacagacaatctgatctctatcttcatcggccaggtaagatttgaagtgtttaaagaacgggattcagtttggttacaaaagagtagctgggtcccagggatgggtttttcagttaggataatctgaactacatttgagagagaatttctagcaaactgcctgtccaaggatctcatggctggccttggaaggtagtgagcttcccgttattggaagtgttccagcagacatagagaatagattctgcagtgactaaaggattggataagatgtagaactagacctcagaagttttcttccaatgatgagatgctataaattttatgaacaacatacttaaaatagctttaagacactctacacgaattcgaggctgaaataagactagttaaactataatcagtcaattgattattaaaaccaagcacagacttacacccactacatacacttatgctcacaaatgataaatgccaggatagtttggattgcctttgaagtttattatttgcaggtgtagaagctcttaagttttagtttgtagtgtttctaaaagtgaggcattctcttgaactgtctttgatgatttgatgttcatacattatgtctgctgtgaatttggaaagcactgcagaatcactttttcaaagatcagaggaatgtgggatagaataaattaagtttctggctaatatttggtattcttctttagggatatgctttcagagatctgtttctggaaggagaagggaagtcatgacattttatgtgaactcaactgggcaatgtgaggttttcctatcattagctaataatatacatttaaagtcacatggaagtgtgttgcctgtgatctgaatttttattcctaaataaattagagattaaaatctgtggtttccagttcaagggtagggtaccaaaaaaaattgtctgatgtgggtttttatgtcattaagaaaggcggcaacagctaagtattattggcttttcccttttcttggttgcactggtccttttcccttatcttgaaaggcggtagtaaatgttgactttttgcctctaattcacctcaatgattgtacattttaacatgttttaagataggtggttttagcccctaccttattt

SEQ ID NO: 48651 - DNA, 1031 bp, Homo sapiens
gaataggacccataaaaggcttcattgaaaggctgtgactggaaagatgagtagatatttgccaggcatagaatttggacaagggagggtattccaggaaaagccaagtgcatatgcaaagacagctgtgtggattagcattatatgttaggggatttctgagtagatccaaagtgctggggcttaacaagcaaggtgaattatagcctaagccagaagtacctgaaggactcagtttgccgtgcatgaggaggctggccttggggcaatggggaaccatgggaaggtttgaaacagatcattgccatactagatttctgttttaggaaggttattctccaaacacccaggagaaatagttgcaggtagaagggactagaatagctttttaaaaaaagttatttatgaaaacatctttatttttcctccatttcactgacctatataattttttatggtgagacgtttgaaatttactcttattttgaaatatacaatgcattattattgactctagccactctgctgtgcagtggatctcagaaagaagctattcctcttgtctgtctgaaactttgtgccctttgatcaacaactccctatctcccaccccactgttcttcatcccttgcctccagcctctggtgaccatcattctaccctctacttcttggttcaactttttaagattctacctataagttgagatcgtatagtactgagatatcttaagagggcttgagttaaggcagtaacagtgggtttggagggaagaaggtagatacgaaagacatttaggaggaagaattgatgcaacttggctattgaatagatatggtgggtgagggagggggaggagtgatagtgaatggatgacaataccgttgaatgagacgaagtaggagagagtaacaaggacatgggaagtgtatttatattagattgccagggctgccatgaagtcccacggactgggtggctgaaacaacaaaaatttattttctcacaattctggaggctggaagtcatag

SEQ ID NO: 48652 - DNA, 1103 bp, Homo sapiens
gaaataatgccttgactttggctgctttttcctcgtatatttttagtgctattgccaatttttgtctttgtgtgcaccttcttgagcattttaactggaaattgtgatgagttttattgggacatttagttcagtggctttcaaactttttagtcatgacccatagttagaaatgtttgtccatacatttgaatgagacattagttgtatatagtttactacacatagtaaactctgacattttcttttctattttttcctatgataatttgttcattttcattttaaaaagtactggttataactcatacattttgaaaacacttatctagtcatgaactgcagtttgaaagacactgatctagtctgttgctgtgctgtctaaaatcaggttcattcatttttcaacatccatttgttaaatacagtatcggttattttgctagtagctgggaatagagtgatgagtaaagcagtcgttatcactggtggcatgaagcatagagtctagtgggatggagcatatgaaccaaaaaaaaaaacatccaaatgtataaatactctgcatgataaattctgtgggggaaaagagcaaaagcgattaaatggggaacctcatctgactttgggggtgattcaggatttccctggggaactgacatttggttaggtctgcagatgagaatgtgttaactctgtgaaggactgagcaggggtgtgtgcgtgggattgcagagtcatggaagaaatagtaacagaagcaaaatagaaaaccggaagggaaagacaggtggaaggcaatcttctttgatgagttggcattttttgtgatacttagtaggccttcctgtttgtggcttttttttcttacttgacaaaagtcaaataggaatgtcaaggattttttgggggagatgggtgttggtgtttgttgaagtagttttgtattagagcaatatagtatattgctaaatagcagggttttttttttttttttttttttttgttgagacggagtcttgctgtgtcacccaggctggagtgcagtggcgcgatcttggctcactgcaagctctgcttgccgggcacgccattctcctgcc

SEQ ID NO: 48653 - DNA, 1081 bp, Homo sapiens
ttacgctcttagtctatatcaaatgttaacaccttgtcaaatgttacgctttttaagctttttgttttttaatattgggaatttcccttggtgctaagaatggtgctgaggcactcgaacctttgtgcttcgtgctattgaattcctgtacattagctttctaagcacatttctaatttgtacacttaatgccttcatcttgaccagcctaatcattcacacagctagtaatgctaaattattgtctcacaatgccccttatctttggtgtgcatgtgtacctatatttatttaaaagggttaataacagagcttgtaattgtggaatgttcgctggtgaacaaatggcagaaggactcacgcaagtttatatcatcggcctttgttttccagagctcccccaaacagattttgattcttttctccctagaaatagtgttacctgtcatacaagcaactgattggtagggtctactactgaattccttattcctggaattagttcacaagatgtatcgtcttaaatgtactgatatgtgaaaaggagatacccagagtgtggcaagttggaaatcagaatcatcaaagtagtatataattgtctttttggtgataaagagcagctgtttccttaatgaagtttgtgttgaatttataattccatgtgcctccctgtaatacagtctacctgcacagcaaaactgccaccgcattcccattgcttcccccttccatcttttactgcgtacttactaacaagacagaaaagaaaaaagatgtgcccttgttggtcttcgctctggtagcaactgcactgcgcgcacactgtctgcccttcatggggcatttctacctgctgctgccacaatatattcatgctgcttgttaagtccagggagttactttgacattggccttattgtaatgtacaaactattgttaaatggatgtatatgtaacagaattttgtattttatatgtgactttcacagaatcgtctgcagtatgtcccagctagctaagtgtctgatagatatttgaaaggaaaatcccatccatgcccaagaagatattaaatggc

SEQ ID NO: 48654 - DNA, 1051 bp, Homo sapiens
tctttttcttctaatggtctatcagtgggtggggtgggggggaactgttagcattttctccagtggtgtatctgttactgacttcagaaggaggaccctcttcttttttctctctctctctcaaattgttttcacggattaagaatgtagaagatggaaacgtttttcctgcaaccttgtgtatttgctctttctacttctctatctttgcttagcaattaaaacacctctcttagggctccatcaaacagaacttttagactgagtaacgctaaacatctcctaatcccttttttccttgttgagataaaagagctaggcacttagtcgtattaccgaattctcagtttgccagatatgtactaatatagtccagatgaggaaaataaggctgaaggcaagctaaacttgcctgaagccacattgctaggaagtgacagaaccttgtaaacaagatttaagatttgatatactttcttattttctaaaaatttcaatgtgcatgtagttctcagatgctttcctcgaagaaaagggagtgtcatctatttatctgaccttgcaattatgacatttcttagaagttttttttttttaactgaccgtatcttatgaaatggtcttgcgatggtgttgttgaaatgacttttttgctgcagtgtgccttgccctgataattccttcttcctactatgcttcagtgtaattatttctcttactcccactgatactgggggaaggagaggaaactccctgatgtgcctctacgctactgtcaagaattaggttttgagacacatattgacagtatgtaatgataattatatactgatctgttatcaagaggttgctttgcatttatttgggggataggatatttttaaatttttttcttgcttgttctataaggattctttggggttttttctttttgctttgttttttgttttttttgtttttgttttttttttttcatgcagaatctaaacagtgggaatgtttgacatctgaatgcagagtgctcctaattgagtctttagctactatggag

SEQ ID NO: 48655 - DNA, 1044 bp, Homo sapiens
tgagcaaggagagctttacatttttaattaagagtgtgattttatgtggccttagagtattttagagtagttttctaaatgtgtttttcaccttgtcgcatattaattgatgatgcccatttgtgtgatacgttcctgtgggcacccaagttcgtaaagttctactattgtgagaataagtcacaacaccaacacactttctctccctttgagagagtggtgtgttttaacagttgagagtcactgcttttagactgttggtcactgactttttttcaggtttagaaaaatcagttaatttttcttgtcacttaaaagttgttttaattttgctttcctaggatcctttggtggcattcgattatacctgcaggagttaattactattacccagaaggctttgcagtctcagtcctggaaaatgaaagcccagggtgcaattgccatggcatcaattgcaaaacagactagctctctagtacctccatatctcggaatgatactgaccgcattgctgcaaggcctggctggaagaacgtgggcaggaaaggtaaaggaaccattcatacccagttaaagggattctgacttcatctttcattttgcataatagtaacgatctggttttgtgtaacttttccaatggattatttttgtgaactagatttcctagacagtggaagctttgggtaaaccttgcctgattaactgtggtatttcctctcaaactgcaacccgtgtggccttgcataatggacagtaatgctggagatagatacattttccatattcagccttccaagttacgtcttaaaccaacttgtcagcattttgtacctgttgacctcatgaacagatcaggattgggcatagaaagatcaggattgggcatatgtgaaatagagtagcaaggtagcctgcctctaaacctggggctgaagatgcccatctctgggacctatgaattagtaacagttatttttttacacaagagctttagtaggattcttaacagtgaacactcagtggggaacatgagattgt

SEQ ID NO: 48656 - DNA, 1027 bp, Homo sapiens
tgaataccatttagttatattcattagtaatagaaaacatgttaattgcattttcaaaaataaaggccagcaatttataggaaaagtcatctaagaagttgactcattagagggggtttggtagggtaggcccactgtagaagatcaatatttagtttaggttttttatactaaacatggattgataaagaggaagtaggcccagaaagattcttcattcttgagtaatcattatttttcttttttagcaaattgatgtttttcatttttttgtttgtttttagtgttgaatcactgatgaataatttttctgtttgtagtacaatagtggttttaatattgaaatcagagcagaagcaagcagtgatttttcaacttcatgtcaaatccagttggtacacgtttgacaagggcagtttttaattgaagatgtggtcctgacttatttgccaaggcttacctttatatttgtcctttttcaaaagtgcctgcaataccttgatgtgtcagtgctgggcgagctagttcctaggttgtgtgaactgatcagaagtggtgtaggtcttggaactaaggtaagtgtactttccacaagaggaaatgtgcatcttcattagttctggccataaggatataacagccatcatgtttgaaattcatgttttaccacaaaatctaatattatacactaaccattttatttctgtggttgcactgataactgaaaacatgtaactggttcaagaaataaaacatctaactgttccagtaagtattaacttatttagtggaatcatttctgttctctggttgccgtgtacataccctctgggttgtcattcattagcagttcatggaaatgcacatccagttattagggcatggattgttttaggtggcaattgcatttttcacagaggggtcagcagtgtttgaatagaaaaatgtcctagttttcaagatctttgaaggatcagacacccccctaccacccttttaacaacaaattaataactcacattttttc

SEQ ID NO: 48657 - DNA, 1029 bp, Homo sapiens
aaattgttgagtgtaggtcaaaagaaattagagttagacttgatgtttgcctttgttatagctacggattatttttttttaaagttctttagcttggaagtgaaagtcttttatgggtgtttgtgcggattattcctaattaattgaatgtgccgggtgactttaatttctcttctttaggctgcgatggatagtgctcggcttagtgctgccaaatcttctccaatgatggaaacaatcaacatggtgagtgtcttaaataataatgagagggtttgtttgcttacctgaaagtgtaattcttcaaagtcttcaggctatgttaaatgaagcagagacttatgggatgagtcaagcagctgttgtgactccagttttttcttagtatatttctcttttcttctctgttactaagtggaataaataattccccaaataccagaaacagttggtccaaatttgtattacaagagacaacaacatatcaagagctctctataaatttacatctgtagtcttttgatctgcctatttagaaaggttcagagttgtgcctgtgcctaatagttatctttgggaggaactaggaaagttataagctgtggaggtatttaatgaagtaggtaacataaaggtatgtgaagagattgggcaatgtcgatatgttgttttagtcataggaaggcatttgcagtaaagggctgcttggcattctgaggttctgatttctaaacttcctggagtcttggtaaagttactctgttgtgcattccctgtaatggttagttagctatgattgtgtttactggaaattagtttgctaagcagatctgtacctttagcaggactctgaaggtatagatccaacccctaaaaaaactgaagtgtacaaaaaactatgttaaactggtgaagagaagtagctattttttagtgcctgctgggggagtattaccaaaatttggtctaagaatgttatgtcttagttggattattggggggaaataaaaatttaaagaaataggaata

SEQ ID NO: 48658 - DNA, 1013 bp, Homo sapiens
aaaatgaccacaaaggatttagaatatttcataaacttagttgataaagcaacaacagggttggagaggattgactctaactttgaaagacgttctaatgtgggcaaaatgctatcaaactgcatctcatgctacaaagaattattttgtgaaaggaggagttgattgatgcagcgaacttcattgttgacttattttaagaaattacgacagccacgccagcattcagcaaacaccaccctgattagtcagtaggcatcaccattgaggtaggaccctccaccagcaaaaagataatgactcgctgaaagctgagatgatcagtagcattaagatattttaaagttaactaatgtactttattttagacataatgctattgcacacttaatagactacaatatagtgtaaacaaaacttctatatgcactggtaaactagaaaattcatgtggctttctttattatggtggtctggaacagaacctgcagtatccccaaggtattcttgtatgatcttatgggactactgctggacattgtggtctgttgttgttgactgaaatgtctcatgcagcacatgactgtaatacagtggcaggggggaatagcggctgtatgtatggaggaggtataaatgaaacaaaattggtcaaatgttgctaattgttgaactgggtggagaatacatggaatttcatgcctactataaattcctaccataaaatttcactataaatataaattcctactataaataaatacatggaacttcattcctactattaatgaaggtaggcttttcctacttcatttatcattctacctacctctatatatgcttcaaggtttctttaataaaagttaaaaaaagtaatgcccagaccaggctctgcaaccatgtgaaaatatgctttaatgcagtgaactgcagaacatcctcatggttagatttgtaggtcttctcacttttgttaaaaggactcaggagttgtgttccatatgtttgtagca

SEQ ID NO: 48659 - DNA, 1087 bp, Homo sapiens
gtaaaggaaatgttcttaaacgaagtttaaagtgctatgttagccaacacacaaatgataagaaagcaaaacagccttttgctaacagggagaaagtttgaatattctggatagaagatcaaatcagccacaaaattcccttcagccaaagcctaatccagagcaaggccctaactctcttcaattctgtgaagtctaagagaagtaaggaagctgcagaagaaaagttggaagctagcagaggttggctcatgaggtttaaggaaagaagctgtcttcataacataaagatgcaaggtgaagcagcagttgctgatacagaagctgcagcaggttatccagaagatctagctaagatcactgataaaggtgtctacactcaacaacagattttcaatggagatgaaatagccttttgttggcaaaagataccatgtaggattttcctagctagagagaagtcagtgcccggctgcaacgcttcaaaggccaggctgactgtcttgttaggggccaatgcagctggtgactaagttgaagccagtgctcatttaccattctgaaaatcctaaagccttaagaattctgctaaatctgctctgtgctctagaaatggaacaacaaagtctggatgacagcttatctgttaacagcatggtttactgagtattttaagtccactgttgaggcctactgctaaaaaaacaaaaacaaaaaacaaacaaacaaaaaaataacaacaaaacaaaaaccaaaccaaaaaaaaccccaaagattcctttcaaagtattactgctcattgacagtgtgcctggtcacccaaaagctctgatagagaggtacaaggaaatgaatgttttcatggctgttagcataacacaacatccattctgaagcccatggatcaaggtgtaatttcaactttcaagtcttactattcaagaagtatattttgtaaggctagagctgccattgatagtgattcctttgatggatctgggcaaagtaaattgaaaaccttctggaaagggcttaccattgtaggtgctgttaagaacattcatgattcatgggaggaggtcaaaat

SEQ ID NO: 48660 - DNA, 1036 bp, Homo sapiens
cttaatgtgtctgtgaagttgcaaggttgggtatccttagatctaaattaaatagacttagggaaaaaaaaggtggctgtataccttctttcaatagagatctcatgattctattggattagggacaaataacagttttggacatagtaacagtattttgatcagttctgtaaatgggattaattattctcaagtaatgtggccaattcctctgaatttttcttgggcaatcttaattttaggtattttggtattttaccattaaaattaggcacttcagttttacctttctttttgctttatttattggaggcttttaagtgtttcagaattctcacatagatctttatgtatttacttttataatacatttagtttctcaactgttaatagctaaattttttaaggtcaaaataggttacagttaatgtttaaaaattaatagtatggcatggtaatgtgttccttgatgggcagagagtctgatgagataccaatttttttaacatgatatgaaatgtaagattttccaccaaatctctgtagggcctgaggcaattaaattgcaaattgtagagtagatgatagtgaaactctctaacttgtatgatgtcacacttttgtcatttttaggaatctgtacgaaaagcggcagaactagctctgaaaactctgagcaaggtgaaaaccccgtcttacattgggaatggagtggagcagggttctgggtgaccatgacaatgatttacttactgtcataggaaaagacatttagttgcagtataattggcttcatgttgtagttcactgctcttagaatgaatgagaaagtgagtgctgtaaacactgcagtactagtgtgttgaacagagtatactgtggtctctttaaatggtgaaattaagataaaacttcgacttaaccctgaagagcacatcactcagatcaagcaacacctgtcttttctcttgcttttgctgtgtttatatataaagctacctttcatatttgtgaggttggaaagctttttgaaact

SEQ ID NO: 48661 - DNA, 1027 bp, Homo sapiens
tcattgttggttacagtgtaccaatcttgctgtgagtagaatgaacagcatttgagaagccagttagggcccaggtcttagccgtcttaacatctctacataatatcctgggcatgttatgggaatctagtaaggacttgttggttttataattgtagatgcccagatagcagaactgctggcagctagagttgtggttacaggaattaaaagaagggattctgactctgagaactggagtaatgtgatcaatgaggagttatgaagggacaaggggcggaggggaattgaccatgtcatgtactgccaatagatcgactaaagtgagaattgagaaaccatcattggacttagcaacaggaaagtcattcgtgatttctatgactaatttctatggagaagagaaggtaaaaggctgatttggagtgggctcaaaaaagagaagagcaaagtttgaacatgagtttaaacaactattttgaagggtcttaatgtaaatcattggtttgtcactggaggaatgagatttttccccctagacacttggtaatgtctagacactggggagggtgggtgccactggtctctagtgggtgaaggcacaggatgctgctagacatcctgcagtgtatagcacagctttgtatgataaagaattatccagccacaatgtcggtagtgttgaggttgagaaaccctggagtaataaaggaaaggagaaaaacagtatggtagctggaggaggaaagtaagtgcaaaataagtttgttagtttttagatggaagatgagaaacatctagtagacaaaaattgctgacactagagagattagggataagttttcattctcaggaactaaaaagttactcgagtacctttgaaatgtaattttgtttacactaggttctagagtggataattattgattccttcagcaactttaaacaccttagccatttagatttttatataggattgttctgttgagtaaatgttgatttgaatttaattttttcaggaaactat

SEQ ID NO: 48662 - DNA, 1050 bp, Homo sapiens
atcaagaaacgaataatgtttcatgacacaaacattgtcgtgtccatgttttactggaacccagccacgctcattcattgtgtattgtctgttgctgcctttgtactgcagtggcagagtggagtagttgcagcagagaccaaatggcccataaagcctttttgtttttttacagaagtttgctgacccttgttttagatcatctgtgaataaatttcacctgttttgtacttgtgtatctttgacgaaaatggacctaagattttgttatctaattcattcagctttcattttgttttcaaataatggcttgtttttttctcaatatccatcaacagattgaacgttcttttaattttaaaagatgttgtcatcaggcacgtggttctgtgtcatgtatatatttgttttttttttatactgctcagagtctgatgaataacagtaaagaagaaatgcgcgaactggcagcgttgttttattctgtagtggtatcaacagtgtcggggaatgagttgaaatcaatgatagaacagcttataaagactacaaaagacaatcacgtatgttattttgttttcattcttttttgtgggagatagggttttataaaaggatctaacttatttttgacttttatgttctcatttgtaaaatgaacttacaaattccttgcttttatgaccataaagagtaaatgagataggtgatacattggttcagtcagctcacttaacagatacgggtgctgtgtctgataagcactgttttaggtgctaggagtacagtgattcataaatacatgagaatccctggtacaacaggatgctcagagcctgcagccgtaccaccgtgaacacacctaatctcatctgatcttggaaactaagcagggtcgggcctgatgagtactgaaagcgagaaatgttagctccttttttcttcctcatctactgctgccagtgaaaaaacaagttttacttcacatagtttgttggttaccttgtgtttggaggttttggcaattagaaataggatctgtttattgtc

SEQ ID NO: 48663 - DNA, 1015 bp, Homo sapiens
cttttagtgtgtgagggacatgcacgatcagcatggttaataggaaagtggaaaatgtttgatcagaaaaagaagcaaacttaggacatgtagctagaaacacagttgtttttgagttgaggaagggcaggtatgcttcatttttcagtaattgtgtctgttttggactttttaaacttaggcttctcatcgaatgaaaactccagtcaagtacatgaccgggaccactgtccttccatttaacccagcagcctttggagaggtagaactttcatatatttctatttactttttgtaagtgttctaaaaagatcacaccacacccaaagaggggtctgtcattttgttgtgttttaggtaaacccatattgtggtgtcattgttcttcatcgggttgtttatttaaaaaaaaagtattgggaaattggtattattttaattcatagtgaagtatgtaaatatatttatctcagtgagattctttttgtgaaaaaactggatgttctgtagtgattactattgggattttgcagcaagttagatttgggttttaaagccaacctgttgttgaggttgttagggttatttagttttgaaggttggagaggattaaattgatcacacttattaagggaaattctgttttttagattattgacttgctctaggtaaattacaagaggtgatcttgttcggattaagaatattcacagtgaatttgctgcctatcctattttaacgatcaatgaaaaagcttccagaggatggactccttggcagcctgtttatgtaagggttgttttttttgtttgtttggttttttttttttttgagaaggagtctcactctgttgcccgtgctggagtacagtgaatggcgtgatctcggttcattgcaaccttgcctcctgggctcaagtgaacctccgtcccagtctcctgagtagccatgactacaggcgtgcaccaccacccctggctaattctgttatctttttggtagagatgggtttcac

SEQ ID NO: 48664 - DNA, 1032 bp, Homo sapiens
tttcacttatgtttgtggctagaggagtgacctggggaaggtacgtaagaataaagcttcaggatcagtagattctaaaactacttttctggttgaactttgtagttacagattattaatcttagttaattgaatatatttctgtagttgaaactgctttgagctaatctgagaagctcaatttgaagtatttagcttcaaattggtggggattccaagtaggctctgtttgtaatttctgccaaatacctgactttcactcatgtgactgacagtttgagagttggggtggcggaggtgatggctagaaactgtcacagtgaccgtggtcccaaggtttgggctgaggatgcgcagagattctctagttatggtccttggaggtcttcctacttcacctggaggatcctctaaaattataagaatactctttaagtaatgccaccatccaaaagacttaaacaacatgattaaagatcttgaacaaatgatttatttaatttagatacacgtttattaaaatgtcaccttagaattttgaattgtttacagttaggaagactcatcttgattggaatgaatggctggtaattgattttttttttcctttttcggatcggggtggtctgtgtatgtttacacatgaaatagcctgaagttcaagttcgacaagtggctgtgaaatttgccagtacggtgtttccctcagatcatatcccttccagatatttgctgctactggctgcaggagatccgtaagtttcaaaaggtgttaatttgaattttggtttattttgaatttatttgaaaattactaaaagttgtattgtttacaatgttggtctatgaaatttagaagctatttattaaagaaagtatggctcttgatgtgatatagacctgtactcatatacctatatatttatatagtaatataaatattacatgtatatatctatataatatacattatgtagatatatatgtgtaatatatgatatatagctaatacagaaaatggttatgaaatgg

SEQ ID NO: 48665 - DNA, 1030 bp, Homo sapiens
gcagctttttgaagccctttgcaaggtagggaaacagctgctaagtttatgctttgtgtttggatgttcccctgggaacccaacaaggagggaaacatttttatcatctttataggaagagcctgagactcgacttgctattcaagaagctttatctatgatggttggagcgtatagtactttggaaggggcacagcgaactctcatggaggcacttgtggcttcgtacttaataaaggtaggtccgtgtgaactacaaagcctgggtagtatacggtttacatttttaagaacaaaatttgaattgctacttaacttttgataagaggagtatttgctttcacttgggctgtgatttaggatctatttttaattcttcatgatgaaaatttgactttaggggagaaggagtggtagtattcatagcgatgcttatgtttagagctttccatgtgggaaaactattcttaatgccatgtcctccgagttagaagtgttttgtctttgtaactggtagctgagcactactgtccgctggggtagagtttgataggtaacattttcagagaaaagcagaagggatgaaagacaaattccatatgtcaaagtgagtctttaggaagtgagccagtactatcatacatgctcttcttcctctttatttggttttcatgggaatttgtaggaggattttgaatatctgtagatacacacacacacacacacacacacacacacacacacacacatatatgtaatatgtaatatatatttgctttagtcagttctttgtcccacatttttaggagtagaaagggagattggaagacagaatgatactaaaaagtgtcagtcagattaatataaattgtgtcctaatggaattagactgacatgatttaatattttgagggaattttaaatgttcagaaaggtatctgcttcctattaaaatatgacagggttaaatgtgctattatatacattcagaaagcttactatgatggagtcctattgtcaagtgctctta

SEQ ID NO: 48666 - DNA, 1028 bp, Homo sapiens
aatgttttttagtgtgttgaagatgaactttggtgtttggaggttacatagtgttgaaatatcttgaactcagcaccagctaagagaaacctttcatatctatgaccactgcattttctttttggagcgattggggatgcaaggttttgtcttgtttttccttttagttagtgtgatggattctgggtttggacatttttgttgttgttcaggtgctaacaccatgtagttagacagagtgagacctaggtttaataaggagtaaaataatgcatgtaattgcagcgaaaaggttttactgtttactgtattttttgttttgtctgttttttgttctttcttttctttcttttctttttttaatttcaaggaccctaaactactgtcaatggcatattcagctgttggaaaactctccaggtgagtaaactcttttttagtgagagatatggtgttggtaaacagagaaaaattatgtggcatttaataatggcggagaataaatttgtcgtgattctgaaagggaatgtatttaatggtcataggttgtttagaaatgtcttctgtgtagaaggaaaaagatgtgagacattttaatttacatttgaaggtatgttactgtattaaatggtggtcttgaaatgagagtttgaacttaattgtgtcataatgggttactttttttgtaccctagagacttttgattgaccttaagtgtttttgttgctacttggcactaatctttataaacccagtgatcaaggtttttctagtgattctcttttctgagaatggtgtttatgattctgagtggccctgacagatttttttttcttctcaatgtgatttcctcattccagttcctcctggcttcatcttccttcactgtatttgaaagcagggagatagagatgaagcattctcagtggcaccatgtgctgcttccacgcccagtgcaggttttgtgttggcctgtgtagaccaggtcttgctcttctctacagtgaaaggagctttggggtttggaa

SEQ ID NO: 48667 - DNA, 1964 bp, Homo sapiens
gtgattattaacctatttttaaagttttaagaaaaaattttattgatacataattataccatatttatgggggtacatgtgatattttgatacatgcatgtaatatgtaatcaaataatttagtatttaggatactcatcacctaattatttatttttcctttgggttgggaacattttagatcttctagctcttttgaaatatacatgattattaacctgttttatcagttggtctgtttgtcctttccctctctgcctttctttccttctctcactttctcgttatcaaactgtcaacactggtgtcttcaaggggctgtgaaaggacaagggaaaagggatgctttagattttccacttgatttattattataaatgtatctttctattataactttaaaaagcaatgcagaataaagtaataaggataaatgtaatcattttgaacttaatatatttaatatatttaatttatactaataaaatagcatttttatttgtgcatgtcaaattggttaagttggaaaacttttggaataggggaaatggaatcaaacagctaaaatagcctgttatatattaagcattgtgctaaactctttgacttatcttttcatttaatctttacagtagcctttgaaatgttatctgaattccacaagttatttttaaatctttcttggtttatggaggattccagacaagatataaccatatttaggaaattcgccgatatttaacatgacaataatgctactagaaaattaagtaattaatccatttaaaattcaaaataggccgagtgcagtagtagctcatgcctgtaatctcagcactctgggaggctgaggttggaagatcttttgagaccagcctaggcaacatagcaagatctcatttatgccaaaaagaaagaaaaaaaccatgcatggtagcatgtgcttatagtcccagctactgcagtgactgagataggaagattgcttgagactaggagttcgaggctgcagttggctatgataatgccactgaactccaccctgagtgacagagtgagaccctgtctcggaaaaaaaaaaaatcaaaataaatttattattaaaaaaaagcatgcaattgtgggcaagattctctgtctccatcgataataattttctatagagtccctctaggaatcagcctagattacaatgtcagaagagggctctttcctttagactagttcctcctgattgttttctcttgtcgcctagcggtatcacagatccaggacaggtaggaagctcggatgaagtatggatgacaatgcaagtttctagcttcttggaaggtatcatgtctcactgacaaacactttcgctgatgtgagttcaaatatcagtgtttgaaaaggttaaaaaaaatgggctctggagtcatattttgactttgctatttgctggcccagtatccttggacaagttacttgaggcttctgcttcctcatctgtaaaatgggaatgacaccacctcactggttgttgtgagaatcgtattagataaggaatgcctgggggaagagtgcatagaaactgtgataaatattagctattttaatattactatttatcattcattcaacaaacattgattacagagttgttattattcttaaacataattcacctatttcattattgctgtagatctcttggaattttttgctgtcggtgtcaaacatctctacagctttctttatgcatgctttgaggctagagcacgaatttcagaaatgagggagaatagtgtaaacctggccctgcagaatatttatcttaaattcttgagtctttcttaggcaaggccttctaaaaatcttatttctcaatgctcgatttcttttctgttggcagaaatctttttattgtagtataattgaggccatttgatatgagcctctgtacatccctttctatccatgca

SEQ ID NO: 48668 - DNA, 1068 bp, Homo sapiens
cctggctaatgtttaaattttttgtggagacagggtttcgctttgttgctcaggctggtctcaaactcctgagctcaagcaatccacctgcctcggcctcccaaagtgctgggattacaggcatgagccactgtgcctggccagtattttcattttttaacgaaactgttctacatggaacatttcccccttgatttgtagaatatttcattagtcttccagtatatttataataggtcatccagtctttgagctatggtcaggttttattccttgggccacagtaattggcagtgacttcctggaggtctgccctgagagggattccaaggtctgatttgggttcagtgcagaaagagaatctttaggaatgtcttttatgtttatatctctttacaggagggaatgggcattcttgtcatatatttggcatgtctgcagttaatccttctttgctgagatagacgtgcatttgattatgtcactcttctatttaaaacccttctgtggccttctcttactattaggatagcaaggtctaagaggcccttcgtgagttgatttctgtatacttcttagccttatcagttttgttatttagcaaatatttactgagtgccttctatatgccaggtcttggggatatggtgatgaatgatgacaacacctagttggggaaatcagtataaaacagtcaggcaaatagtacatagttgaaatttgtgatacatgccaagatggaaaaggaaatatattcttatgaaagaatatatttgggatataatttagactaagtgtggggtataaggggaggcctctgtggtgtgcaggaagtagccaggccaagaggtgggggagaccattgaagatagaccctgtgcaggtgttctgagctgggacagagtgtgatgccttcaggaaattggagaaggccacagtgatgtccccagtgcatgagacgaagcctgataggaggaaagaggtattccaggggcactgatttgaaagggtattgatggtagtgcctccatcactctagctgttggctggagaaagacttggagtagg

SEQ ID NO: 48669 - DNA, 1038 bp, Homo sapiens
cgcttcaggctcatcttgtttttgacctgccccaatccctaaactcagacctttttccaaggagcttggttccttttcctggagaatggtattgaaaaacaagatcaattctgggtgttaggtatgcttgttgctactaggatgtcattgcttctgcccctctcaggattgatcgatcaatctgttgatctgtctgtctgtctatccatgtatctatctacgtctctgtcattgatccatctattgagtgatctatgtctatctaatctatcttcctgtagaaaattattgtggaaaatttctggcaaacacaatagtaattctcagtatctgttatgaagcttgaataattatcaattagtggcaattttggttttacttacataacccctccccagtgtctcctcattatttaaagaaaattctactagctgttatttcgcctgcaaatatttccatctttatctctaaaaaaagattcctttaaatatatattttaaattgaagtatagtagatacagtagaaggtatgaaagtgtagagtttgatgaatttttataaatgtatttatctctataatcacgcagatcgaaatatagaacatttttagctctttagaaaactccctaattcccatgacagtttttgtagggacctttaaaaaacaaacctaaccacaataccattatagtacctaaaacaattttaacagtaattccttaaaatcaaatatctagttgtttgcataggctcccctttcattcccatcttcctgcttgccgctgcagtgtactggttgaagaagttaccttgtctaaagtttatcacagtctgggttttgctgagagtatccccatggtgtcacttaacatatgtctctcatagtggctttcttggggaaacttggctatttttctaactaggtaaccctaatacagtaatgggcagtgatcctgtctttggagaaacttcatcagtaagatgatttcaccagggatagatatattgtccctaataactgatggtatctgattaaag

SEQ ID NO: 48670 - DNA, 1042 bp, Homo sapiens
tgttcagcagaaagattatttgttgaatgaatgggttgaattattgagcccccatgttgttcagggagactgctttgagtagtggctaaaacctctggaactggaatcagagacagttttgaatcctgattctgatacttcttaatgtgttcttgaacaagggacctaacttgtaggcctcggttttctcatctgtaaaatgagataataaaacttacaagatttttttcttttcttttcttttttattgagacagggtctctctctgtcacccaggctgaagtacagtggtgtgatttcggctcactgcagccacaatttcctggtctcaatccatcttctgacctcagcctcctgagtagctgggactgcaggcgggtaccaccatccctggctaatttttgtattttctgtagagacggggtttggctatgttgcccaggctggtctcaaattcctgtactcaagcaatctgccctcctcggcctctcagagtgctgggattacaggcgtgagccaccgtgcctggccaggattgttttaagaatgggaagagatagcacatcttggcacatggattgcgggtgtgtgggaaccttggttctgaagctagggagacagtgtgggaatgattcccatggtagagctgtgggaatgggcatattgttcacagtcagctgactgggagccacgtgtatacgtatttaagagcgagaggaagataatcagagaaaggagatgaagagtgctaagagaggtcagcggtggccggggttatgtctgtcagccatttgcgttctcatatgtaatgtgctaaaaacatgtatacatgtttagtaacacttcttataaaactattatgtaattgaaacacttctaattaatgtaacagtttatatatttatgatatatatacacacatatacatatatgataaaatatgttgcattggtattagagattttaagtcttcagcaaatgattatcagtgtattttttgaagtattagcatgttctcagtaaatttggtttgtggacatag

SEQ ID NO: 48671 - DNA, 1049 bp, Homo sapiens
ataccattgagcatgaagttgccagaaggctgggtgcggtgactcaagtttgtaatcccagcgctttgggaggtcgaggtggtcagatcacttgagtccaggagttcgagaccagcctgggcaacatggtgaaaccctgttactacaaaaaatataaaaattagctgggtgtgttggcatgcgcctgtagtcccagctacttgggaggctgagtggggaggatggcttgcacccaggaagtcaagactgcagtgagctgagatcacaccactgcactctagcctgggtgacaaagcgagaccttgtttcaaaaaaaaaaaaaaaaaagttgccaaaaataggcaggttaattttggggtgagacttgttattgttagcatttgttatcctttcacaaacctcatgtttgagtcagtgattataatagaagaatagtaaagctgtttatttattgtgtgtttaccgtgtgttctaattgttttgcatgtatcaactaattgaatcctcagaacaaccctgtgagtttggtactggtactgtctcaggggtagagctaccctcattagacagttaggacttgaacttagattctctgattgcaaaatttgtattaattctgccctactactactgtgttattcctgtcctgcatgggagaatatatagttcataacaagatcaaaatggctttttgtgtgtgtgtgtgtgtctaactagtatccagagagaaccttctgtagtgtataaaatgtggcaatcggggccaggcgcagtatccagaaagaaccttctgtagtgtataagatgtggcaatcagggctggagcggtgcctcacacctgtaatcccagcactctgggaggccgaggctgggggataagttgagagcaggagttcaagaccagcctggccaacatgatgaaacccccgtctctactaaaaatacaaaaaaattagccgggtgttgggacgtgcacctgtagtcccagcttcttgggaggctgaggcaggagaattgcttgaacctgggaactggaggatgcagtgagc

SEQ ID NO: 48672 - DNA, 1039 bp, Homo sapiens
ttgtgggaagtgtagttccggggcgccgcggacccacgctggggtcataaataccgaagtttcataggacataggacatgtgagataatttctgattgcgttttgagtgttctcccccccaagggttttctttctttccctttttttttttctcccaatgctgcccttcagtttatggcaaaaacaagaaaggtgttatttgaagatgatgtgggttttaaatggaataaagcatgggtgaggtgttgcaagctttatgaagcttacgttgttaaagccgcttctgaatttccatatgaaagtagttatacacgtaatgtatgtttttctggtgcttgtcagtttaaagccacttttatatacatgatctcacttttgccctcatagcaaccttgtgaggcagataggtaggaattatccttgttttaaagaggaggcaggtttggagagattaagttccttgctgctttgacacagaactggtggagcaggagtactgtttgctttttttgaagctgaagtaaacacttggtgtgatcctgagcagattggagagtcggaggagacaaggtctcatggtgcgattagagagagaagcgggctacagattgctcttctgtcggttccacgtggaagcaccaccaggccttctgagatcagttccatgttttgttttaattggaagaaaagtacacataccataaaatttcccgtcctagccattttttaagtgtacagttcagtgggattgagtacattcacactgttgtgtaatcatcaccaccatccatttccagaactcttcgtcttgtaaaacggaaacttgatacccattaaacaacaaatcctcattccctcctcccttcggcccctggcgaccatcattgtactttctgtccctgtgattttgagtattcttcctacctcgtgtgaatggaatcatacagaatttgtgactggttttatctttatttagcataatgtcctcaaggttcatccatgttgttgcgtgtgtcagaatttcttttccttttaaagg

SEQ ID NO: 48673 - DNA, 1034 bp, Homo sapiens
tttcatggctaggatgtgattcgttggtctgcttagcaataactatgcggaccaatttatcacacggcaatatttaaactgcaggcttggggttggggaggcaccaaaaaccttctcccagaggtagcatttcacacctacatacattagtcacagtaaatgttcctgagtctaagattagcattaaggatcgctttacttccataagtgaagagttttctggtttagctctctttttataggaggtgcccacaatttcaactttaggaacttatttctagaccactgttgagtccatggggttcctccagaaccctatgacctgaagccaaaacctcactcattcagggccttaagttcctttttcagttggaaattattattcagactccaccaatgaaatttataaggaataatccaccaatacccgtatattccattcctctgaggtctaatttcacaaaagaaaacttaactgaaaattttttctgtatcaattctacattcattccctgaactttacttgctatcagtgcagtctctttagattttagggtatctattctccaaatggtaggggttataatagaacattcatacagtgggaaagtcaggtgacatacatgagagaactagctaagtcagaaagttgattccccatcaaaaggtggcagctgctacccaggaccagctgagtgctttacataaataaaagcccagtgttgttagcccttataattttttttaagacaagctttgtttttagtatgaaatgccctaattttagatagtggcaacaatgtatacacacacacacacacacacacacatgcacacacacccaagcaaattgttataacagcttttaactgttgccacacagaatgtttacactccaattgcaaaaaaatgtacttgctacaggcaaaattgttttaaagtagaatttttgcaaaccaaaatccatccagaatagctctgtcttcagcacatttccttacccccagcccccatctattttcctaggactgtta

SEQ ID NO: 48674 - DNA, 1026 bp, Homo sapiens
aatttttttttttttttaatttttagaagagacgggggtttcactatgttggccaggctggtctcgaactcctgaccttgtgatctgcccgccttggcctcccaaaatgctgggattacaggtgtgagccaccgcgccacccccaaacttcttaatcatatctgcaaagtcctttttgccatgtaaggaacaggttctggggtttttggatatgaacatgtttggggccattattctgcctggctgcagagtgcatgttgattggccagcagtcccgtggatcagaaaggagtgaggaaatggaaggggagaagcaccaaaaaactcccagcaccaagcacagtgacagtgacctgtactgcttgtttcaccatgggcacctccctggatcctgccacccaaatgtgcccttctcttcacaggcccacccccagagattgttatctatcaggagcttcgcatggaagcttttgtcgtctaccgctggcaaggagatgcccgccaaaaagctctgaaggacttgctgaaatgggtcttagaggtaaggagctccggagccaccccttccaattgtacactaggtcacactccctttgcctctcaaggcttttgttctaccaattcttccccatctctgccgcatcgtcagtttttccctattgggtcattgtgcttagagtataaatattcttacttttcccatctttgaaaggaaaacaaaacaaccctctctaaagttcatttccactgcaaatgcaggtccatttcccttctctcccttttataacaaaatacctggaagtgctgtctacactcactgtctgccattcctctctttccattcttccttaaacccacatatgaggcttttcagagtctcactctgttgctcaggctggagtgcagtggcacaatctcagctcacggcaacctccgcctcctgggttccagcaattctcatgcctcagcctcccgagtagctaggactacaggtgtgtaccaccacgcccagctaactttttgtat

SEQ ID NO: 48675 - DNA, 1047 bp, Homo sapiens
acacagtaaatagaagtcactgtgctaattattatttttattattatttaccatttggagaacagaattggtgctttcaggaagtgaccatgcccgtgtatattcatgaaaaaatgtccacacccatggagcgtcctcaagctgtcacaaagtctgagagtagaaatagggcctttctaacttcctcttcagcatgtgatatttctatcagggaaggggttaaagataagtccagcaaggccccatcactcctcctgagcactagctctcttgagggagccaccataaagagaatggtgaagtttagtcttaatggacttactttctccaagattgagtaactgatgtgggatataacacatgagtgattcacttgggtttgtaaaaaaatattctacaagtgattcagaagaaaaataaacatggttctctggcatgagaccatggaaaggtagggtaaccaaaggatggtgaggctataaaaaatacaattcaaatttgccagttgtaaattttcttattaaggaattaatgaggaaagtctctaaagaagcttgtgtggcaacacttgtgagcactcttgattagattgactcagatttttagagtatatatgcaaagtagacaaaaagacatataaccaggaactgatctaccagcaagaatcattcctggagccaaacccaaattgtgctatgcagaataaataaagatcattttccaatactatgtctagagtaaggaatagttgtgcccaggtagatcctgctggtggatggtcaagtgaaagtcagcttccttaactcctacttagcttttgtcctcttcgtttgtgaggggatagttagaagaaagaaaagagcttgctaccctacataggttcaagtcttccaacatggatgtagcgtattctggcaggttcatacaattttcacatgagatggataaaccattgcaaatgatcttcaataaaccttgaagaaaatggagagatgtaagaggactagagatgagcaaagaacaaggaactttgtacaaaggaagaac

SEQ ID NO: 48676 - DNA, 1055 bp, Homo sapiens
caattcctatatttggttatctccatcgcgaattcaagaggatgtaggccagagactgcaatcagaaaaacaaagaagggtagagctggataagaacccagagatacaatgcagtcttctcttagagaggtctcattgacttgcccagcctgcacagaggagcaagggcaaacgtgtaactgacaccaaagactctaggggggtccagtcttaataattggagctaatgccacgctggactagactgatggtcactccaacctatcatggcatttgcaaaagcatctccaagagttatttggaggaggtgaggtagctgcctcctggaatgctgaattcaatgtttggggaagtattcccgacacagaacaactgctggagtcacttggtaagagctgggtatagcttgtgagcctcagccatttgcttcattgctcaagctgctctgcctccaacattcagcagtcaatgggggtataagaattagtcaccgcatgaaaaaccagtggatctgcatggggcatagtaagctattaattagctgatgcttgtagagcactttgaagaacaaacatgttatgtaactgctaattataattaccatcctcagcctgctacctttcacaaagtctgtggctccagctgcagctgtttccatgggtttatgcaagctttgatttaagaaaagaaaaggcattctccctgagagctgtgatctttctgtgaggaggcctttatgccctcaatcaggattggcagctaaattcaatttccgcagataaaggggatgatttacatgctgattaattcatggtacagtgcagatgatctctgggtgggtaggtaggagaggcttctggtaatgtagtgagagctgctgattaccatggctcttgctcagctacccctcttcttttttcttttccctgtttttcacttgttacctatttcttcactcccctcatcccaactgtctctgtgtattttgttgttgttgttggagatggagtctcactctgtcacccaggttgaagtgcagtgatcacagctcacca

SEQ ID NO: 48677 - DNA, 1061 bp, Homo sapiens
tggtacaaaaacagacacataggccaatggcacagaatagagaacccagaaataaagccacacacctactaccaaaggatcttcaacaaagttgacaaaaataaacaggggaaagggttccctattcaatagatggtgctaggataactgttgatccatatgcagtagaatgatactggatccctatatattaccgtatacaaaaattaactccagatggattaaaagcttaaatgtaagacctaaagcaaagaaaattctagaagaaaacctaggaaacacccttttggatatcaagctgaaaagcaattgcaacaaaaacaaaaattgacaagtgggaacctaattaaaagagcttctgcacagcaaaagaaactatcaagagtgaacagacaacttacagaatgagggaaaatatttgcaaactatccatctgacaaatatgtaatatctagtatctattaggaaatttaaaaattcaacaagcaaaaaaccccattaaaaagtgggtgaagggcatgaacagacacttcttaaaagacatagaagtatccaacaaacacttgaaaaaatgctcaacatcactaatcatcagaggaatgcaaatcaaaaccacaatgagattccatctcacacgagtcagaatggctattaaaaagtcaaaaaataacagacgctggtgaggcttcagagaaaagggaacacttatacactgttggtgggaaggtaaattagccactgtggagagcagtttggaggtttctcaaagaactgaaagtagaactaccatttgacccagcaatcccattatttggtatatatccaaaggaaaataaattgttctaccaaaaagacacaggcactcatgttcatcacagcactatacacaatagaaaaatcatggaatcaacctaggtgttcattaactgtggattggataaagaagatatggaatatatacaccatggaacactacacatccataaaaatgaaatcatgtcctctgcggtaaaatggatgcaactggaagccattatcctaagtgaattaacacagaagaa

SEQ ID NO: 48678 - DNA, 1031 bp, Homo sapiens
cctgggctcaagccttccttctgcctcaggctcccaagtaagtgggactacaggtatgtgcctggctaagttttttactttttacttttgtagaaactgggtctcactttgttccttaggctagtcttgaagtcttgggctcgagcgatcctcccttctcagattacagtaggaagcactgggattacaggggtgagccactgtgcccagccttctcaatttttttacccctatatttgttctaaggatatagacagggtaacaggaaaaactcaatatttcttttggaataaattgccctctaatcacttgataagcatctctatcattattctgtgcctaaaattagagaattatctgctcagtccttattcctgcagaatacaaatgtcacattctaacctgttaagagattgtcttcaaaataaaactgttattaactacattaatgttagacaaagtacactttagggcaaaaggcattattagggatagatttcataatgatagagttctatagtagaatatagtaatgcaactgaacaaaatgaagctcattccactgcatggaagaatctcacagatgtgatgctgaacaaaggaagccacgtacaaacactatataattttatgtacatcaagttcagaaacaggatagttacctttgggaaggaggtaactgaaagagtatgaggaggggtttctggtatctggttaatgtactttgtaccagttacccaggagtgtttcaaaaattattataattgagcaaggagctagcaaccaattcttttcttaagtcagcagattattctagccaataagtaaggccctcttataaagaacccaagataccatggactgagtttcaacatgaaactcttacatgtgcatatattgcattgtcctgaccacggcatatctacaggaaaaatatttcactgaccaaaaaaaaacaaacaaaaaaacatgttttcaagtaaattttacccttccgaacagttttacatccaactagattcagaaagatt

SEQ ID NO: 48679 - DNA, 1050 bp, Homo sapiens
ttcccttccacacaggcactattataattttcagtgccatgttaaattggattatttcatttactttaagttaggaattactgtgtaatttattaattcatgattctcataacattcagcataagtgtagcaaagttgctaataacggaaggggatcatagtggtgttgaatgtaactttgaagtagggaatggccttttaagtctgagagagaacatttgaatccttttcagggatttgtgtaggggtgtgtttgtgtgtgtgtgtgaatgtgtgtgtgtgtagataagtgtatatacataaatacactcttctaaagttgtatatacatatgcacattacatacattttaatttattgacaaaattaaccaaattaagatttggagatgtgggatgttcttgttttaaaatagcatgtttgaaaccatcagtttgtgtctaaaattagctgtagcacatggatgttgtccatattaagctatttgctgtttgaattatagaggtctacagtatttgtgttggcatagtttttgtaaaaaaaagattaaaaaatatcaggatggtggaaaaactagatctgtgtatctctgttttggcatgcatttattcagtatcttctagcaatggtttttctctgttgatctaccgtagtatcctatttttaagtttattttatttttaaggagtattgtcatcacttttcaaggtgtcttgacttctacacaaagtatatatattcaggactttaaaaaatagcagtacacatttaacagtagcgaattacaccaaaatgatttactttgagatttgaataatttgcatagcagtaaaatgtgttttgtgtaacatacaaatagaaaaatgacccagtatcttaattgatacttactggagagtatcagaattacccagcagctcttacagaatgccataaattctttaagactaaatattgaaatcaattatttgaagtaatgtttctgatttactgttaaaagttgctgagctcagtttttggagatatcatttatgcctgcctgttccctta

SEQ ID NO: 48680 - DNA, 1029 bp, Homo sapiens
gaaaatattcaggtctatcatatggtttgacagattttttaaaagttatttttggtaaggtcttcttttagaaaaaaattaatctcaagggttttttgtaccactataatctctaatacttactcagaattactgtgtatttacttaatttcttattatgtgccttattatgtgcttaagatacaataggttagagtttaatctaaatatcttgaaagctatattgtgggcttggtaagcattttgttttttctttctctgttttggtaaggatttaaaatttttttcattgcaattttaagtggttttcaataagtaatagtttttatcaaatttttggtgcttggtgcagagacggtgtggggaagggtgaatggttttgggaataattcagtgcacacctgtaggcctctttacattgtgactgataggggttattgcatatcaatttggggctgtagagtgcaatctcagtttcatctttttcacccatcagaatttgtctcaggattacttggtttttctcagtcctcaagcgagaacttgcttttctttgttaatgtgactttcattactgagtacccacgtatttggagtatgagaaggtgggttatttctcatactctgtccctctctttttcattgaatgtaagagtacattttaatgttgcttcagtgattgtataatgtaaaattgtttctttttaataagaaactttgctattatttcttcaattgttgatcagaattttttaaagcagaatttgtcaaaagggtcatttttttgtctaccccttttacacttttcagattctcaaagtgtctcatctcaacttttaaaagaataaagaatatcttgctgggcatggtggtgtgcgcctgtgcgcctgtagtcccagctacaggctgagcctgtaggcaggaggctacaggcaggaggatcacttgagcccaggagttcaaggctgcagtgcgctatgatcacatttgtgaatagccacttcactccagccctggaacatagtgtga

SEQ ID NO: 48681 - DNA, 1044 bp, Homo sapiens
gagaataagggagcagatataaacccttaatgccatttaaaggctctgtgtagaagtaacatgtgaacatgtgtcatttccaccagtattctttgggaaaaacatgacatgatcaagcccagtgtgaactgcatggaaatatgtgctcttccacctaaaggcattgcaagtcatgtttggccagttatatagaagggggcaagtgaatatttggcaacaataatacaatatccaccgtatctctccttattgtttaactttgtttttagcctttctagtgtagatgttcataattgcttgtgtctatcttgaggcctctttgtgaagtcttcctttgtgcctttaatacagtgttttctgttgtaaaaatgaatcattttacctatgatcttgagcttgcttgtgtgtaagtttagcaaagacaaaatcttgtctgctttgttcagactcctcactagaatgcttagctcatgatatgctctcaacatgtatttgttaaatggatttcactctcccttcttacttcatcagttattctgtcagttactctcattttttgaatctcagtgtcaattctctgtgctaattctatccctgcagtctcttgtgacggtattttcttgaattactataattagttacatatttaataaattatattaaataattctttttaatgaagaaaataaaattatatgagtttttaactcctggaaaatagagcctacatacttgtgcctataaatacagtcatctccctatcattgaaaaagcaaactcccccctttgaggtttgcagtccaacctctcactacttctgtaatactgttgttttacctttttcatttctcattctctgtgccctatattgaaggtcctccctatcccccttttgaaactattcctctagattctgaggtactataattccttgtttctttcctgtttctagggctagtctcttcctcttttctgtaggatattccctttccttctgttgcttaagtgtacctatacccccaggctgtatctttagccttcttc

SEQ ID NO: 48682 - DNA, 1029 bp, Homo sapiens
ctttttttaatcaattttaagagttatttttgctgagtataaagttctaggttgacaggtattttttctttcagcgtattaaagataccattctgtggtattctgatgtccattgttgctcttagaaagtcagttgtcaagctaactgctgctctgttttttctggctgttctttagggattttcctttttggtgtcctttttcttttgtgtactttcaatatgatgtattcatttaaggatttatttttattctaattggagctcattgggcttcttgagtcagtggattgtttgttatttttagtggttctagaaattatcctttcatatattcccccttaacactatttctctcctgcctttctggagctttgattagacatgttatacccccatactgtcctcagtgtgtaaaacttaacttttctttctgagctgcatttggaataattcttaggacctaactttcagttcactgatgacgctcttcagcttggtttaattgtcgttaaatctgtcctataattttagatcttagcaattgtggctttcatttctagaaattttatttggttcatttttaaaaagtgtctcctgtactacagattttttttgtatgtcttttttcaaacatactatttaaatcttcatctgcttaatttagtatctcagattttttgcaattttctttctgcttagatatttctgactttttgggtttttttgtgggggagggtggggatgagttattcactttacttggagaattaattatgattgtcctttgaggctcaggattaaggtgtttgttcctccagagagaatttgcttgcctgcagcattaaaggctctacgttcaggatcatttcaacctaaatttatagcttgattttcctttggacttccaagaaatgtaaatttggactgtaaatttttgtgaaagcttccttttggttagaacttttcaggggacttttctcccttctctgctggtcacaaagcaaaccttccttgtagtcttttgaag

SEQ ID NO: 48683 - DNA, 1049 bp, Homo sapiens
agataattgacatcattacaatagaatcttccagtctttgaacattgtgcatctgtccattcatttggactttttttatttttttattttttgagacagggttttgctcagtcgcctaggctgaagtgcagtggtgcactcatggttcactgcagcctcgacctccaggctcaggcagtcctcccacctcagcctcctgagtagccaggaccacaggcacacatcaccatgctctgctaattaaaaaaaaaatttttttgtagaggtagggtccctctgtattacctagattggtctaaaactcctggtctcaagtgatcctccaaactctgcttcccaaagcactaggattaccagcgtgagccactgcagcctggatgtttgttcatgtctctcagtaaagttgggtgacttttctccttaaagatttgcacattttttgttgcacttattcctgagaacttttttttttttttttttgagacagagtctcactctgttgcccaggctggagtgcagtgtcatgatctcggctcactataacctctgcctcccaggtccaagcaattctcttgcctcagcctcccgaagctgggactacaggcgcatgccaccatggtttttgtatttttagtagagatggggtttcatcgtcttagctaggatggtcttgatctcctgacctcgtgatccacctgtctcggcctcccaaagtgttgggattacaggtgtgagccactgtgccctgctattcctgagaacttcttacttttacttttattttacatggcatagtgtggtgtctaagaaccatactttttgtattctgattctggacctattatttatgagctgtgtaatcttgggcaagttacttaactactctgcatttctctttctttctatgtgtaatgtgtaacagttcttaactggtagggttgtgaagattaaatgtgctcatgtacatgaagagtttaaaatgatacctaacataagcccaatgtaagtttgaagtatcattactgttttgttttctaactgttggtaat

SEQ ID NO: 48684 - DNA, 1043 bp, Homo sapiens
cataggaaaggaattgttgggtcatagagaacatatttcttcagtttcattacataatgccagttttcaaagtgattgcaccagtttataactgcattgtgagattaaaataatttttttaagccatctcctactgaaaggagtgaggttaaaaaaaattttattttagtgtgtggtaaatggtatcttaacatagttttcacttgcattttcctaattactaatgaggttggacatatttttattatttatcctctcatacattttgttttatttatttatttattacacgaataagttctttagtggtgatttctgagatttcggtgcacccatcacccaagcagtgtacactgtacccagtgtgtagtcttttacctctcgcccccatccctgtgcaattcttttgtctgtttttgtgttttatttctcctttttttcttacttagttgtaggaattcattatgtattccagatactagtccattgtttgttatatgggttgcaaatagtttctcccagttttggcttgttgatttattctcttaatgatacttttacgttgtcaagtttgtttcttatttcctttacatttgtgcttttttgtgtgtcttatttaagaaatcctttgtgatataaggtcataaatatatttacttatattctaaagtttatggtgttttagtaataatttaaactttgcaattaaattttgtctgaaattaagttgcaagagtagtacaaagaacttctgggtatctgttattcagattgccctattgttaatatcatgccatatttacttagatcatctgagtatttatgtgtatgtatgtatatacatatataatatatacactacctatatttgtgtatgcatgtgtgtgtatatttattttctcccacctccaaaccacttgagtaagttgcagatatgatgtccctttatgtctaaattaatcattgtgtatttactaagagcaaggacattcttactaaatacagtttaattatcaaagttaggaaattaacatctatacagt

SEQ ID NO: 48685 - DNA, 1051 bp, Homo sapiens
ggaaggttgagttacctgggaggtatgggagcagagtatgaaagagaagggcctgtgtagaaaaagtgcttcagaaataatacctttgaatctgttgtttgaatattattaagccacatatgcacagtacatatgcctgtgaggtcaggcaaagaacaaccagagagctataagcttaactttccaggactcacacaggcctgggagagatatttgagtgatagccaactacaacagagagtccttgttgaatacttgaagcacactcaagggcacctgacaccagaggagacatggactgaactagctccagcatgaaggcaaatccaaatctaccctaatgaaacttaaaaacaaactccaaaacagtgtagctaatctgaaagtaacttatgtttttctaaaaatgaagtctaacactttaaaagaaaaataacaaatataacaaaacaacagaataacaaattctggtgctcctaatgtggagcatccaattgccagacatgttaagaaccaaaaaaatgtgacccataaacaagtgaaaaattaatcaacagaaacaaacctagaaaattacagagatgatggaattatcagctgtgcactttgaaacagttactaaaagtatgttcaagtatttaaaggaaaatatgagcataggaaggagaaaaaatcaaatagaacttacagagattaaaaataagacacctgaaaaaaatacatgatggcattcatagcacattgtattctacaaaagaaaacatcagtgaatttgaagatagcaaaagaaactgaagcacacagacagaaaaaactgaaggctgggcgtggtggctcacccctgtaatcctagcactttgggaggccgaggcgggtggatcacctgaggtcaggagtttgagaccagcctgaccaacatggtgaaaccccttctctactaaaaatacaaaaattagccgggcgtggtggtgtgcaccggtaatctcagctgcttgggaggctgaggtaggagaattgcttgaacccccgggggcggaggttgcagtgagcc

SEQ ID NO: 48686 - DNA, 1070 bp, Homo sapiens
tttccaggttttgaacttggacttagataattgggtagatgaatggtaatgaatggttgtgccattcatttctattcgaatgtaggaagaacagagttggacgacacaggttcagatttgtatatattgagtttgagtttcctttggaacatccaaatggaaatgacagataggcagtgggtccctggtctcaacatcatgaaagaaatttgatagtatcatacacagttgacaactgaagccatggacatggagagtttcagagaagggagggtttctttatccagatgtttttggagttgtagggaggtggggatgaatggacctccttttccagaccaggagcttatatggtgtttgggaccatgggaacatagatgttcgggaaagtgaacaagtatagagacagaatgaaaagaactggatctaccaagctcattctagcttattttaatgtaactattaataataattctttttaaaaatgaaagcgttaaagcatacaggatactagaacaatggtacgaaattgtgacagcctcaggcaaactaggacttaacagtcattctatttaggtgttgttattaaaaagttaacatctgattctgtcacctaacactaaaattctgtttaggtgttgttttaaaaaattctcttagcttaatgtgggcatgtctttttccatgtcagctttaaattatttcatcgaattcaggggcgtccaatcttttagcttccctgacccacattggaagaattctcttgggccacacataaaatacgctaacattaatgatagctgatgagctaaaaaaccattgcaaaacagtctcacaacgttttaagaaagtttacgaatttgttttgggccgcattcaaagctgtcctgggctgcatgctgtgcacaggctgcatgttggacaagcttgatctagttctaaaacaaagaatccttcttccccgaacctttacctacaatatcttagggattctgataagaattatgttagagttatatgttaatgtgaaatgttgatcattttttggtattatctttccatttgggatt

SEQ ID NO: 48687 - DNA, 1081 bp, Homo sapiens
attggccaagctggtcttgaactcctgacctcaagtgatctgcccaccttggcctcccagagtgctgggattataggtgtgagccactgcacccagctttcaaattcttttatgtcgtctttaatttctttcaatgttgttttgttgttttcagtgtacaggttttgcacatgtatgccatttttcttgctaatgtaaatggtgttttattgtcaatatatagaaatactttgcatattgatcttgtgttttgtgatattgctataaaaacttacttattacctttttttgggtaaatttcttaggatttttaatgtacatgatcatgtcatctgagaatgtagttttattcttttctaatctgggtgacctttatttctttttctgacttctatgtatctttgccttactgctgctccttacgggaaaacaggcagtttttcttagctgtaggtttttcttagatgcccttttttaagttggaaacatttcttatttcttgtttgttgttctttggtaacattaatgggtgttggatttgtatctttcaaggaatttttgtatttcaactaagttgttgggatttatgcatgtaaagttgttcataatggatttgtttgtttgttttttgttgtttttgagtctagctctgtcacccaggctggagtgcagtggcgcgatcttggctcactgcaacctccgactcacgggttcaagcgattctcctgcctctcctgagtagctgggattataggcgcacaccaccatgcccggctaatttttgtatttttagtagagacaaggtttcaccatgttggtcaggctggtctcaaactcctgacctcgtgatccacccaccttggcctcccaaagtgctgggattacaagcgtgagccactgtgcccggcccataatgttttcttactatccttttaatgttgtaggatctgtagtaattttcatcttttcagtaccgatattcataattgatattttctttttttcctgattggtctagctttcagtattgttggtctatttgaaaagcagctttcggttttattcatttcctgtgttgatt

SEQ ID NO: 48688 - DNA, 1084 bp, Homo sapiens
tacacattatagattgacttatgtaaatttgttccaccactttgggtccatctgtgttcatcatctcttcttgttagcaaatttcagtgctcctactttatttgcatttgttggacctgacagtggtgttcattcatggttttttgtttgtttttaactctgtcacctaggctggagtgcagtggtggcatgatcatagttcgttgcagcctctaactcctgagctcaagccatcctttcacctcagcctccaaagtagctagtaaatctacaagcgtgcaccaccatgcccagctgggattttgctgtgttgcccaggctggtctcaaactcttggcctctcaaagtgctgggattgcaggcatgagccactgtgcctgccctaaagatatgtcttcataagtgaaagaagatttaaatgttagatgcaggaaccatatttgaatacaaaatttggctttctgactacctgcttttagcaagcactttgtaaacaaaggtcagatcctactctgaagagaagataagcttattagttggttcagtagcaatctatatttttataggcttagatctgggaatgtaaaattatgcattatctggagaaatttctctaagattgttctttttggattccatccaaggaatcttaattaccaagtaaatactaagaggccagtaaggctcataattcatctagatcgtgtgaaagataatctagcagttacttaatttcccttgtatgccatctgaatatgatgacacaacaaatggtttcagccagtggcaagagtggatttcaggttatcttccataagttgcttccctggattcagaagagtaatatggacttttaaaaaaagaattgaaaatactctgtagtataatataaaatccatcgttttagagaaagaaaactgagttgtttttagagattaagtgattcaccaaaatgtgtcatgagggcagggatttttgctattttcttcactactgtgtttccagtgtctgtcacataataagctctcagaaatacttgatgagtgaatgaatgccaaattgtcacatggctagttaggtagaa

SEQ ID NO: 48689 - DNA, 1034 bp, Homo sapiens
tggccaacatggtgaaaccccgcctctacaaaaactacaaaaaaaaggaaaagaaagagagttgtccctttttctctgctaccttactcacagctgtctctttcaccttcacttctttgaaaagattagggtaactcacaagctagtgaactggtttggactaggtaagttaggggagaatcatgttacgggctggtgaaaggagagaatccatggctatttgagaagagtgaaaatattttaatgaaagtcatcagctgggcgccgtggctcacgcctgtagtcccagcactttgggaagccaaggtgggtggatcactcgaggtcaggagtttgagaccagcctggccaacatggtgaaaccctgtctccactaaaaatacaaaaattaaccaggcgtggtggcaggcacctgtaatcccagctactcaggaggctgaagcaggagaatcgcttgaacccgggaggtggacattgcagtgagccgagatcacaccactgcactccagcctgggaaagagcagaagactctgtctcaaaaaaaaaaagaaaaaaaagaaagtcattaattggtacttaacttcaaaggaagatggcagtctaggaaaatacacaaaaaaatgaaccagaaccaaaaaagaaatttcaactatagtcaaactatgcaactgacatgacccattacagactgtgaagaataacttcaatttgtacccaaatcaaggaaagcggtgagatttgacaaacatttcctccaaatagtcactccgtgccatttttagtgagtaaacgagatgttcctgaaggcccagaagcaatttgaaatgtgaagaaataagaactgggacctaggtgcaccacggaaaaattaagaaatacaccctggggttcattttcagacgttaaggaaggtaggactgaagaagagaagatgtatcttgcatttttatttattttcaggactcagtttgctgacccatgactgaaaattgggaagtgaagggaggctgaagggttaacagtgacctgcaagg

SEQ ID NO: 48690 - DNA, 1068 bp, Homo sapiens
tcagaatactctaatatagtaatgggggtacataaatcacttttaactgtagtctaaagtttttttatgtattaaaatatagctataataatttggtcatggatagacaacatacaaattgtaacatcaataacataaaatgtgggaagaaaagttaaaatgcaaagttcttgtgatgaaagttaagctagtgtcaacttaaaatagactgtgataagatattttatgttaggctcatggtaaccacaaagaaagcagggcagtcaaatcttaaagctccaaaatgatcacctttgactccatgtctcacatccaggccatgctgatgcaagaagtgagttcccacagtcctgggcagctccacccctgtggctttacagggtatagcccccctcctggctgctttcacaggctaggattgagtgtctgcagcttttccaggtgaatggtgaaagctgtcagtggatctatcattctggggcctggaagacggtagccctcttctcacagctccactaggtggtgccccactaaggactgtgtggaggctctgattctacctttcccttctgcactaccctagcagcggttctccatgagggcccacccctgcagcaaacttctgcctgggcatccaagcatttctacgcatctttggaaatctaggtggaggttcagaaaccccaaatcttctgtgaacttgcaggctcaccaccacgtggaagcttccgaggattggggtttgaaccctcggaagccatggcccaagctctatattggcccctttcatccatggctggagtggctggaaagcagggtgccaagtccctaggctgcacacagcttgggaacactggacccagttcatgaaaccattttttcctcctgtgatgggaggggctgccatgaagacctctgacatgccctggcaacatttcccccattctcttgggaattaccattcagctcctcattacttatgcaattttttttttttgagacagagtcttactctattgcccaggctggagtgcaatggtgtgtcttggctcactgcaatctccgctt

SEQ ID NO: 48691 - DNA, 1033 bp, Homo sapiens
gtgtatgtgtatatatatatttttgagacagtttcactctgttgcccaggctgtagtgcagtggcacagtccagtcatggctaactgcaccttgaactcctagattcaagcaatcctcctgcctcatcctcccaagtagttgggactgtaggcacacaccatcatgccctgctaaattaaaaaaattttttttttttttgtacagacaaggtctcgctgtgttgcccaggctgatcttgaactcctggcctcaggtgatcctcctgcctcaacttcccaaagcactaggattacaaatgtgagccacctggccctattttatatttatagtatctcttaatcgctaaaaagatggaaccacataattatcttctaaaaatgtagtagcctccactgagaaaaacaagtcttgtcctttagttgacaataagcatgtgcaatttgtatatatacaaatgggagagtgccaatttcccttggaaaacattcttcactttacaaagaactcacctttggattcctctaaatgagacattccagtatacttaaacacgtcttcccataattatcttaccttaattcgtattatgtaacttttagggaaacgtctgttgtataaaatcaataatacctgtatttacacctttccatctgattcattgtaagagcatgatttgtttgcttatttgggtaacaggctcactgtgaagtagtaaatagagcaatatatgagaacaacataactctccttagtggactgcttttatttttgttttttgagacagagttttgccttgttgcccaggctggagtgcagtggcacgatcttggcttcactgcaacctccacctcccagttcaagcaattcttatgcctcagcctcctgagtacctggaattacaggtgcctgccaccacacctgactgattttttgtgttttagtagagacggggtttcatcatgttgcccaggctggtctcgaactgcccatctcagcctcccaaagtgctaggattacaggcatgagccaccg

SEQ ID NO: 48692 - DNA, 1033 bp, Homo sapiens
aatttctcagaatgtatccctgttgttaagcaacatatgatggtagatctgacattggatcagatatacaacatcctttatattattaatcttatattttaatctattttaagattatttacattgaaattgtattcacattattcaccttatggcctcttctgacatctatgttcgcttgctcttttacttgaaatcagaaccacttttaaagaagttttattgtcatcacacattatctgtgcctttatcttcattgctgtaaaaacttttgtacacatttcacctgtgttaagatagctccaaaacaaatcaagtcagacacatttgctgctatcaaggagtttttattttaaaatttgtataaaagtaaaatttactctctataaagtattgaatctcacttggcaagtagttaaccacttaactacttgaaggacgcctctatttccgttctgtatcaagtctgaattcctgtttgactctatgtatgtttgacccatcttcatatttttaaattactcatctctgttctgatttttttaatcttggttttgtcttaaacttatggactcttaaagtgtatactcatttggtccagcttctttcattgaccatactgtctgtgagattcatccatattgtgcatggatcagtagttcattccttgttattgtggggtagtattccatggtatgactttatcacattttgtttattcattcttctgtttgtaaactttggggttgtctcagttttggctgttgtgaataaagctgctatgagcatttataagtctcttttgcaggtacttttttttttttttttgagatggagttttgctcttgttgcccaagctggagtgcaatagcgtgatctcagctcactgcaacctccacctcctgggttcaagcgattctcctgcctcagcctcctgagtagctgggattacaggcgcgtgccactgcgcctggctaatttttttgtagaaacggggtttcaccatgttagccagtctggtctcgaactcctg

SEQ ID NO: 48693 - DNA, 1028 bp, Homo sapiens
ggatgtgacagtgtcctcagactatgtggggatgtcccctccatgccttccaagtgcaactgcctcttcttacccccccgggaccctagccattctgctgcagctccagaacaggctcccgtgtgatggaagcctggagtcctctttgtcctgttcagtctagacagatcccacagtgtttatcgtggaggggcccagaggcagctgtcttcactgtactccacatctgcctactcattcactatacatttgctgagcccagtttgtgtgccaagcattatggaagtaggttaatgtctctgaccttggtgagttcacagccttacaggaaagactgcaggtaaaagcagtgaccatgcagtgcctgtcagatgccttttcagagggtgcttgctccaccttgtgttcagggtggcatcaagggctttttctacatcatctcatttcattgtcacaacagtcctctgtgtgacagggacaattaggtccattttacaggaaggaaagttagggaaactagacttagagaagtaatttactggtggtcacaaagctagtaagttggcagagctgggattcaaacctgagtctagctggattccaaagccctggacattccaggacacggtgcttcctcccaatctccaagaaaggagggtacagtgggagctggatggtgagttcagacgcccacaccaggcttaatgactgtttggaaagatgagggcccaacagatctatcagttagttcaccctctcagggaagtgaaggccccctctggtccccaggtaagccctcagctagcacaagcagttctgcaaacactgtcagtgttacccagctaaggagatcctggctgagttgtaatcagctagtggaagcctttgccttctaagacaatggccaaatattagaatccttgaatctcagcactagaggtatcctcagagtttttagtcccatggctttcagctttcttcaccagggaacaccagccaattaaaatctttcttctaattccattatg

SEQ ID NO: 48694 - DNA, 1049 bp, Homo sapiens
tcctgcctcagcctccctagtagctgggattacaggcatgcgccaccacacccagctaattttgtatttttagtggagatggagtttctccatgttggtcaggctggtctcaaactcccgacatcaggtgatccacccgcctcagcctcccaaagtgccgggattacaggcatgaaccaccatgtccggcctgtggaatttctaatcaggttatctttttgacatctggaaatgcctggatgaagaatacgaggggaaaatgtgttacattgcatttgggagatttttatctatgagacactacattgaagatggttacaattgttttctgtagtcctgaccttttcttttccattctatgactctgagaatattatttcatccttcctatagcctaacaggggaaaaagtgagacagtttcttctcgaaacttatcataaagggttgaatctcatctgtctggattgctttgaatcagcactttccaatcactgtagaaggcaactgtgacagcagcaggaggagcactggggttgaaatccgagaacttgggttcaagttgtgaattttttctttattaactgtgcaggtgttttataaaataaagaatgttttacacatgtggtatattatggtgtcaggacatagtagtgatggtgcatcatgctgtactcattcatctgtgtggcaaaaaggttctctccatcatttcatgaccacttttcccagaatcctatggagactttttcccatagatcttagcagttaagtcatgatcactgaacctagacagatctaatgttgaatcttagcttaacaacttactaactgtgtgatcttgggctagttacttaatctccacgagcttcagttattgaagtaaaatggggataattctgacaaccttatgaagtttttggaggggcttaaacaagatcatgcatgtaaagcattttccacacttcctagaaaacattcttttttggtggggggaaactgagtcttgctctgtcgcccaggctggagtgcagtggcacgatctcagttc

SEQ ID NO: 48695 - DNA, 1035 bp, Homo sapiens
cataccttttcatctccactgttacagtcctgcgctaagtaaccgtctttccctgtataattgtagtggcatcctaactggtcttctacttccatttttgtctctttcagtgcattctgcatccagtatcaagaatgatcttcagaaattttcaaatcctgtcattcccgtttaaaactcctcagtagttttctgcacttataacaaaatctgaattcttcaccatggcctacaagattttgtatgttctagtgcctctccagattcattttgtgccattctttgccttgctctctataccctagccacattggctctctttcatttccttgaacatgccaatctatttatcacttccatggactttccacatattatttccccctgcctggagtgctccctttcttccagtcttcattcaaatgtcaactcttcaatttaagaggccacttttgaccgtatccaagtttcatgtgtcattcccgtccatgctgcctccatctctgtaggctctcacaaagcaccatatttttttcatagcatttattataatttacaattttttttattgtaaaatcatttacattagggacgttgattgcagaaatcatgtctgtttgcttcaccattgagttcttaccatctagttcatagtaggggccccatatgtatttttaactgtggccttgctacatggtattagatgtccattaataagacttaaattcttcagtggtctacagaataaattccaaattccctagcatggcatatgagctccttgtgagctggtccttgcttatctctccactttcactgctgggttatctttaatctcagtgcctatacacagtgttccctttgccagaaaagccctttctttttctttgccaggctaactcttactccttccagcccccagctgggttaggctcaaccttatcctcctgtgctaacctctctcataggcacggtcactctctgttgtaattgtctgtttgcttttgttttccctcactgggccataagctcctt

SEQ ID NO: 48696 - DNA, 1050 bp, Homo sapiens
aaaaacacaaaattagctgggcgtggtggcaggcgcctgtaatcccagctactcaggaagctgaggctggagaatcgcttgaacctgggaggtggaggttgtgatgagctgagatggtgccattgcactccagcctgggcaacaagagagaaactccatctcagaaaaaaaaaaaaaaaatagcgtaccaccaagccgactcttcatcttagtattccattcactcattcaacaggtatttatttgccttgcgttcattctcctaggctaaggtcaaatcatagatacaaaaatgaaccagaaattatacctcctctcaagtatattacatgttcctaataaaaatagtggaagataacttagtagtacttttatttcttattctactcatgataaattacaacaacgtagatataacccaaattcatatactttgttcttgagactttttaattgccttgctatgtaacataatgaattcttagctttattgggtccaatcactctgatcagaggccataatttgcttcagctttaatatcctctagattcatatatccgtttgtatgtgttctctgtgtatatttgtgcattaatatttgtgcattatgaacagtattaacaagggtgaaaatgctgcttccagtatgatcactgttaatcttgcaatcatgctagtaaccataatttattgttaacaacttgccagattgaaccaaaagctttatatgcaccagcttttgtagagatgcagtataatatgctggtcaagaacagggcctctggagttggactgcctggattcaagtttcagctctgccacttatttgcagtataaacttgagcaaactatttgatatctctgtgcctcacttttcacatctgcaaaatggccatacaggttgagtatcccttatctgaaatgtttgggaccagaagtgtttcaaatttcagattttagaatatttgcattatatacttaagggttgagcatccctaatggaaaacctgaaatccaaaatgctccgatgtggctgggcacggtggctc

SEQ ID NO: 48697 - DNA, 1233 bp, Homo sapiens
agagccacagcttccccaactacggcctgagccacggcctaacctcccgccagtggtggctggatgtggtcctgcagaccttccacctggcgggtgtccaggatgctcaggctgtagcccccatcgctgaacagctttataaagacttcagccacccctgcacctggcaggtgttggatggggctgaggacaccctgagggagtgccgcacacggggtctgagactggcagtgatctccaactttgaccgacggctagagggcatcctggggggccttggcctgcgtgaacacttcgactttgtgctgacctccgaggctgctggctggcccaagccggacccccgcattttccaggaggccttgcggcttgctcatatggaaccagtagtggcagcccatgttggggataattacctctgcgattaccaggggcctcgggctgtgggcatgcacagcttcctggtggttggcccacaggcactggaccccgtggtcagggattctgtacctaaagaacacatcctcccctctctggcccatctcctgcctgcccttgactgcctagagggctcaactccagggctttgaggccagtgagggaagtggctgggccctaggccatggagaaaaccttaaacaaaccctggagacagggagccccttctttctccacagctctggacctttccccctctccctgcggcctttgtcacctactgtgataataaagcagtgagtgctgagctctcacccttcccccactaaccagctcctagcctctgccctccctcattctcattcacacctgtgtcccttttccactaggagtcgacttcacatccaaaggattcacagagggccccactagcttcaaaaccaggcactttcaaacttggttttagcagcagagtcctttagttatgggcgatctgaaaccccattatgcaaaactaaaaacagaccctgaaaaactgctggagttgaagcagaggtgctaaggtctctctttcagcttctgaaaataccctctggaagcctggggtcagtgcttagtttgaaaagcaggatgctaagccattctgtagggacactgtccattagcaccacatagtatgaaggggagaatttaaacaaggaaccccatgacagtcatgagaagaaatcctgttgacatatgcctgccccgtgttaggtaaggtgctgagttacctccatgcacatataaccctca

SEQ ID NO: 48698 - DNA, 1048 bp, Homo sapiens
aaaaaagccggccgggtatagtggctcacgcctgtaatcctaacactttgggaggctgaggtcgggagttcgagaccagcctggccaacatggagaaaccccgtctctactaaaaatacaaaaaaaaaaggagccggggatggtggcgcatgcctgtaatcccagctacttgggaggctgaggcaggagaatcgcttgaacctgggaggcggaggttgcagtgagccgagatcgcgccattgcacttcagcctgggcaacaagaacgaaactccgcctcaaaaaaaaaaaaaaaaaaaaaaaaaagccgtgggtcaggagccagagccctctgctctagtcttagctgtgccaatgtgactccctgtgtgatttgggggtaaattactgcccctcactgggtctctgtctacccacctgcaaaatgagaggatctttggatgagtctccttaattcatttcctggacaaacttcctccaaggctcccccagatttaccagtgacgcccttccctaagtatcaacttagccgtactttgaactctggcccctcaggtttcaaggggacggccttgtctgggatcagctctgtctggggaaagaagctgcaccagcctctggatagcaggctgagtcacttgtttcttgtgccttgagtcagttctctcatcagctctcctcctaggccagtgttattacctccagtaaagatggaaaagttggggttcagagagggctagagacagacagcctgctgtgtcctgtcttttctcctgtgctgtacaggttcaccaatttttaaaatccaaatatatctcatggtacagtggaagaactggccagagagtctggaagtttgggttctggtcctggctgtgccactgactcactgtgaccttgggtaagtacctgcccctttctggctcagtctactctgcccagcagccaagatatcgttcatatgctctgcaaggccccttctgtctttgacatccctaataatgataatagcaatcataataattgtgtcctgtgtgccagacagctgg

SEQ ID NO: 48699 - DNA, 1046 bp, Homo sapiens
agctatatctagagtgcttatgtgactcacctaaggccactcaacaagtttgtggcagaactggattagaactgcacagaaaacagccaagctgggatttgaacccatgtagtccaactccaaggcctctgcccctaaccactgtgccataccacctcccaataatcaacagcaaaattataggtctaacaatgttttatagacacccctccatttatgtgatgggtttgcatcctgataaacccatcataagttgaaaatatgatcataagttgaaaatatgatcataagtcaaaaatgtatttaatatacctaacctaccaaacatcatagcttagcctagcctgccttaaacatgctcagaacacttacattagcctacagtgggcaaaactatccaacacaaaatctatattgtaataaagttgtaaagaattttgaataaaaattcaatatttgaagtacagtttctactgaatgtcttgtttcatactgttgtaaagtcaaaaattgtgaattgaatgatcacagttcggggaccatctgcaattagccccagttatacggggagaccaaggagaccaggcacctacttggttgcaagtgatggaaatccagttcaatagcaaagaaggacatgattggttttcataactggattgagataaggacaggtgtggttgggcccagggtcaaaccccatggaggtctctgtccctttctaactctcgtctgtgtttgccccagctttatactcaggtgggtttttgccacttgccagcaacatgatcctcaataattctaggcttaaatagtcgttaagatttgtaatcccagagaaagagccttcctgtcccatcactcacatagcaaatctctggaggtctctgattgggcctgttcaggccacatggtccactcttggctcagtcactgtaaacaatgggatgggagatggcgccacaattgaccaggtaggcctcattacacagaacgctgtcttggactgagcttttgcaccagtggcctccttggcttggaatgct

SEQ ID NO: 48700 - DNA, 1028 bp, Homo sapiens
cctcagatctgttttgtaatgctgagcaagttatttttccttctctgcctccgtttttgtttttgtcttgcttttcttgtttttgtttttttttttttttttttgagacggagtcttgctctgtcacccaagctggagtgcagtgatgggatctcagctcaccgcagtctcctcctcctgggttcaagcaattctcctgcctcagcctcccgagtagctgggactacaggcgcacgccaccacgtgcggctcattttttatttttgtagagacggggtttcaccatattggccaggctggtcttgaactcctgacctcaggtgatccgcccgtctcagcctcccaaagtgctgggattacaggcgtgagccaccgcgcccatctgcctccgtttttccaattgtacaatgtaattagctcctgcagtccgtctggctcactttcagctctgtctcctaaccccttgttccgtccttacagcatataggcgggagcagaaaggcaagaaggaggcctcagagcaaaagaagaaggacaaagacaaaaaaacagactcggaagagcaagacaagagcagggatgaggacaatgatgaagacgaagaaaggctggaagaagaagaacagaatgaagaggaagaagtagacaactgaaaagggcgggagactgtggcaccttggaaggtaccacttgaaatgagacgtgctacgtgtttctgtgaagcttttccatgctgggcagagtagtctcaggcaaaagtgcctgaaaagatcagaataaaaactgactagaaataccgtcaaaaccagcacttaccaaactcagagcatctgagtagcagaatcctgttttgcttcatcaatctgaaggttatggccttttgacaagagggattctgaacgactaaattagtcagtttgctcgcttttgtttacttaaatgtatggttagatggtttttgatctgcagtcttccctagtcccccaaataagtaataataacttccatgctgcctgctgtgttccaga

SEQ ID NO: 48701 - DNA, 1033 bp, Homo sapiens
atcttcctcttctgctgctgagagccgccgtgctgtgccggcctgcgagtttttaccaatcagctacccaggaaaaatgatttttcctcatataggccaccttctgagaatcctctcccagaaacaggacaatcagtgtgtctctaacttgagtctggtgctcatctctgcagagtttgtggttgtttaggacccaaaacgtgctccagatgccacaaagcgtattactgcagcaaggagcatcaagaccctagaccggagattggcacataagcaggcttgtacagaaccagatcatttggaccatataattccagaccacgacttcctttttccagaatttgcagttgtagtagaaacagaagatgaagattacacctgaggttgtggaaaaggaagattactcagagattatagggagcatgggtgaggcacttgaagaagaactggattccatggcaaaacatgaatccagggaagataaaatttttcagaagttcaaaactcagatagcccttgaaccagaacagattctcagatatggcagaggtattgcccccacctggattctagtgaaaatattcctcaagaaaaggatattccagagaatatcctttgtgatgccaagaaaatgtttgaattccaggttatgcctcagctcctaaactacctgaaggctgacagactgagcgagagcattgactggggcatcctggctgtcttcacctgggctgagagctgcataccggctatacagaataatttgtgtggaagcaggatgtaacagatacactgtaaaggcatcttagagccttaaaaaaagttaataatcttttataccttgcaattccatttctgggacgtcatcctaaggaaatacttataccaaaaatagaggtgcagagatgttgagacattgcttacacagtgtcttcatattagtgaaacaaaagtgtccagtgacagggaattaaatacattttggtacatccacagtggaaggctacacagtcttaattatacacacctatat

SEQ ID NO: 48702 - DNA, 1043 bp, Homo sapiens
aggggagctgagattccagctggccagtgcctcactccatctggacctctgtgcactctaccccgaaggctggagagaccccaggatggtcttctgctcagaacccacgagttcagaggcagtcctcagaacccaccgagccatttcactctgctcagagcccacgggggagggctggacccacctgggagggagccgcgctggggatgttgcgctggacacccaggctaggcatggtgggtaggtggacagcaatggatggggacccataggaaggagattgacattcactgagcagcaacaggtatcccaccccagcttcagggtcatatttgagcccctccacacacacaccaaggcacagccaggtggaatggtttgctcaacatcccacagctggtgcaacaggcaaagctgggactgaaacctacatctccctgattccagaacaggtgtttctttcctcatgcctgggtaagccctggcactcaggccctggcactgggtgtggagacaggcatagggatgaggtggattgatgactgttatagtaataagaatggtcataggtgatgtttatggaccactctcttaaataatttgcagttggggaagctgaggcacagagaggttaaataacttgaccaagatcattcaacaagtaggtgccagagcaggagttggaactcggcagcctagctctgaagcccacgagtgacaccacactctagcagaactagacttggtagttgcgggatctgcagctggggaggcctggcccaggaacaccgatgggtctggagccttggggttggggcaggaccagggagcccagctgtggggcagggagccaggactggtcaggagtcactggtgggctctgttctctacactggcctctggccagggtttatagtgatctcactgcatttgctgccatgttgccacctcccccccagcccctgttcctccatctcagctgaagagggatctggaagagctgaggtgaccagaaattacccaagaaggaattacggagatga

SEQ ID NO: 48703 - DNA, 1031 bp, Homo sapiens
gagcctgaataggaccattcctctcagccagtgctttgctgtctctgtagcggtttatggaacacctgccttcccctgtgacaacttgggattgctggaagctctttccaccaaacagagccaagcccatggaggtcagagcctgtttgaacatgggctggccccagctgccctctgagtgaggacttcccaagctatcaaaggggaacttggacaaagcactgacttaggactgggggtcttcctcatttctgtgccatagacccctctggcaggctggtgaagtgctgggaccccttcttagaataaagctttaaatgtttaaaataaaacacaatacataggatgacaaattacatcaggaaatacctgatataattttcagaatatgaaaacacaacgtaaaacatgctactttaggacagcaataacagggttgagcagtgagtcagtaactgctgtaactgtgaagccaagaagtgcataaatgggattttgtgacatctgtagcagctggaatgtgacgtgaaagatcagtgctctctgtgggtgaccatgaccagttcctctgaggctttgttgcttctgttagcaatgaaaggaaacgtggcctttcagttagaggttaatggaaatgaagatgtaacagttcccccagccaagttctcgggtgcctgcattccctcccaggagcactggtttccagccttatcctgagggctctgcttgccttaaccttctagagattctgggtcactctctctttccactgacgtccttttcttaagaccacagggagggaggcgtggagcaggtttcagcttagcaggaggaagcctggtctgttcagcagggcacaggcctggttacaaggaggcagtgacttctgccccatctcaggaaggcttcatgcagaagcttcccagagagctccctaatgttgtgatttggtggtcaaatatgatagccagaatagacaggctggtagaaaagcacagtgctggcccagtgttgaggttgttcttgtgatc

SEQ ID NO: 48704 - DNA, 1057 bp, Homo sapiens
actcactcttggcctcagtctccccatctgtacaaccacggaagacccccatggctcctccagttctgagagtcttctctgcatcaggaggtgctggaaaatatttgggggaggcacagcaaggaatgacaactctatattcccacctcttctgtgtatatttgaacaaggactgcagcattcctccagagagagaaagagcttgaaataatcacctttattcaccactaagtgccgctgtgtggtctacaacaccacatattagtaagcttttgctgcagtaatgctgagtaataaccctaaaatgtggacaacaacccaaaacataacatggccaaaatcccttcctgcatggagctcacacactcctcatacctctgctaaatcacttgtcacattgctttaacctcttcgtgggtttcccttccccaataaacagcgagagctggtgcaaaatggaggcccagaaagtgtggaacagaaactggaaggaaagcacacactccccggccacttgcaggattatcttctactatgcggccttctaaacattcgcctcccacatggtaggaaaatgttctttgttctagtgttcagttgggcaagatgacatcaggtggctggctatcgatgaccgagatgccccagacactggccccaaatggagccagtttccatttagcctgaattcctcggatcatgctgtgtggttattgatcccaggttaaatgtggctcattctgcagccatttcccctcaaagcagacacagtcaatcaaaggaaatcagatccagctttcccccattcacaaactgtgttgattttccatttgtctaacagagagccagccctgagcattttatgctgccttcacacaatatcatttcccccataaagatgttggccgagagagcagagtgaaagaagaaaggcctgcctgttatttcttgaattcttcatctagtgccagcatgcctgtggcagaggggcttaattgcacagattctgggatcctaccagctgggttctgctttccagagtagtagctttgtcacc

SEQ ID NO: 48705 - DNA, 1025 bp, Homo sapiens
cctagggggcacatgaaactcgaaatattgctgtggccatttttggaaaagtacactctgcctcagtagatttgggatggagcctgagagtttgcgtttctcacaggctcctaggttttgctgatagtactcatctttgtcattttagcagctataagagagtgcctgagattgggcagtttaaaatgcatataaatttattagctcacagttctgaaggctgggggagagagagagacagagagaaagagagagagagaaagtgtgtgagagagaaagtgagtgacagagagagacaaagttggaaaggtggagtccttgtggcctaatcaccttttaagggtcccatctcttaatactgcatgagttttagtggaggacacacattcaaaccacagcacagttggtccatggacaacacatggggtcttgctttcaaattgctgacagtctagtgaggaagagggaggaggaaatagcaaactgtaataaagtcagacctgttaagaagtaccatgctcttaataggagtactacctgataactggataacaattaacatctctgatgtacaggcagtattctgggcactttgtatatatcagtccttttaccctcacagcaaccctgtggtaagggtgctcatcccttgtttaccgatgtgaggctcagagagtttaaatgatttacccaaggtgacacagccagggcgtgtggagccaggcaggctgcttccaagtccctgtggccactgcacggcccttcctgtgctgggacctcaggtgggagcagtcagtccaggtgaggggggctggttgtggctgcagagaggaagtggatcttgagctggacttctcttggttagcaggttcttgctgagcctctctatgtgcctgacatgtaaacatgagccagaaaacacatgatttttgcccctgtgaagagtgcggtctggttggggcattgaatgtggaagattatgccaggcagagaagtgaaggaagagctcttccaggaagaattgg

SEQ ID NO: 48706 - DNA, 1003 bp, Homo sapiens
tgtccatgggttgccagcacctggtgcccaccaaagtgcctgcagtgctccaacaacaggaaagactcactgggccctggggcacccagggagggacagggccaccccctctgccgccatcaaacagctctctccaagccccgctgctcaaggaaaatgaaaacacaagcatgctcaggagacattttgtagtttctccttcccgcatttttttctctgacagcagaagggacaacattatagattttgaatcacaataggaaaaaatgataatatgaagcccgcaaaaatacacatttgctacatttttgtgcttctacttttgagaaggcccatctcaatactctaaaatggcaacaacttagtcaaaatcttataaattagagatgtcaggttttgaagaagggaagcaactatctaagaactcgatggttgaatcataaaaggaacagaacaaacaagaaggatcccaagccactgtgtacagtaggtcagaccaaaagagatctggaaggacatgacacctgctggcagctgtcacatcccggtaaattatttctcttttctacaactagcaagtattatttttgcaattggaaaacacagtaaagattttaaaaaatatgtattacgctctgctaagggtgacagccagaatccgccactgtaaacttactattttccctttataattatgaagtacactgatagagatattttgaaaccacacacagaaaatcctttttctgcttaaactcatgcccactttttttttttttttttgaacagagtctggctctgttgcccaggctggagtgcagcggcaccatcttggctcactgcaacctctgcctcctgggttcaagcgatcctcctgcctcagcctcccgagtagctgggattactggtgcctgccaccatgcctggctaatttctgtatttttagtagagatggggtttcaccacgttggccaggcgggtttcaaactcctaacctcaagtg

SEQ ID NO: 48707 - DNA, 1040 bp, Homo sapiens
tgaagtggaaagaagtgttccagtgtgcagaggaaggcccatgtggctgaacgtggaaagccaggtggggagaagatgccttagcaatgctgctgaggaaacagcctgattgcacgggagatgtaatgcacccaagactgtgcagctgtgaaaagacgatgatcaagatctgcagttattaatgtggaaagatgtctgtgggctgttattaagtgggaaacgtgggctgcaaaaccacatagctaacaggatttcatctgtattctatatgaatgcaaaaatatgcatagagaaacatctatgccggacacacaccacagtgtcaacactggttatctcaggtggtaagatgagggatgattttcactttgtttatgtccttaggcggcgtctgaatggagcaaatattccttttataatcttaaaaacagcaacaataaagtgatttccgttcggaaacaaggcagagaaaaaatattccgtagaagtgtccactcactttagtttgcctctcagttgcaggcaatcaaaggctttatttgctcataaaatgcccgccttcagtaaagtcctttctatcttcaatcccctccgcagtaaagcattttatattcctgctgtttattgtactttcccttccagggccccttggatatgctaacacctgcctacactcacttgggcatccaggactgattaattctgtttattgccaatgcactttcagtggaattaggcatattgaaatggaataaaggggcttggctatgtgggcagtggagccaagaaaaggttttatttgtaaatagggctccttgctgctgtgcagagcttccctggagagaaaatgtgccttttgctttgcttccagctgctcagcccacttagctcctgaagggcctggtttgagtctggggcgggggatgtcaggacggcactgccctaagtggagaagcacttggggggtcaggcaggttctcagcatttgccctgggaaggccccatggaacttggcaccttcccactcccccagtgggggc

SEQ ID NO: 48708 - DNA, 1030 bp, Homo sapiens
ggcaaggaagcgggttctcctctggagcctctaggagaagtgtggtccttttggcacactttatacttccaacctcccaaactgtcagataacaaatctatgttgctcttaggctctgactgtggtgatttgttacagcggcggcagtgccctggggtcaacactggcaaaggagtgagagacacagggcagggctgccgtgccttctcagcacggatctcggcaggtcccacagggagctctggagctgggatggcctgcagaggtgtccagaattgaggctggggctggcttttacccaccgccatcagccactagccacagagctgcctccagggagggttgtgaccctggtgaggtgctcccttggcctagggcagttcttgaggagagactcgctgccctgaggaggagcgccttggtcctggagggggagcagtgtcccgtcctgggtggccttgttctttcctctcagcattctcttaccacccggtgactcctgagcttctggagtgacccagcacaaggcctagcacagactccaggctcgaaagcctgtagatggaactccagcctggctcacgtccacatggtggtcccagcctgcacagcagcccacagtcatcatctcccctgaggaaggccacacctgctttccaggtcgcacctgctggcttggctgagatgccactgtgaggataacgacagccactgtttcctagtgcttccctgtgccagccacgaccctacgcactctacacaaatggacccattcatccctcacagcagcccaaggaagtgagcgtgactggtttccccattttctagatgaagaaactgaggcacagagaggtgaagcaacttggccggggccacatacctagcaagttggcagtctggctccggagcctgaacatgcattaaccaccatgtggtttcctcccaaatatgcaaagctgcctgtgacaagggaccagggtgggccttgaacccaggtgccctcagatctgctcaagccttggagctggca

SEQ ID NO: 48709 - DNA, 1033 bp, Homo sapiens
cctgcaggcagcttcctacaaagagcaaggacacagccgtggcctcggaggggcagccctctggccttcaagtcctgtcaaaatctcctgctgctgctgatagtgccgagttggggtgcgtatcctgccataactgagatgctccaattgtccttctggtgttttcttaaaccctgtggaacctcagagcccccaggctctggatctggttcagtgacctggtagcaacaccagccagcatagctcaagtgctcactgctgggatgggagaaactgaggacagttttccaggcccagaagtcaggtgcccataggtgcaaccctcagcctgcctggagttatccctgggtgtcccagagcccctgatctctctgctttaatgacctgtgaccaccatgagagcaaatacagtctttccttctaaatacagccctgaatcagaaagacatagaagtttaacttgggacaggatcttagcaaacaggtccaacctgctcattgccagagggcaaaaccaagacctagcaaggggagaagtaaccctaggacacccaccaagctaatggcacaacagggacctgctgggtctctgtctcacaggctcaagctctgctgcctgaggctactcactctgtaggctgctctggtgagagaagtaaaatgagtggtctggtgcacgtaaccatgggtgaggatctcgcgatcccccaggtggcctgagcctcagggatcaaggtagcaatggtgggtgagtttgaaaggctggcagggtggctacaggggaaaaaacatgaccagctttgtttaggaaataactctcctgttgaatgatgcccgttaaaataagcaagcaatggtttgtagaaatggagacaagaaggcagtaggagcagagaccgtcctcttccccttccctgcatgacccacacacattttagtggcattaaacagcaatggatggagctgttcctgcaggattctgatggccactgcaccaagaccatatcccaagagcctgcgtagatattgaaag

SEQ ID NO: 48710 - DNA, 1017 bp, Homo sapiens
cttccctgttctcccctgggcacactgtatgcattttattgactagatttcagggacagaggtggcattgggcactttttcctttttgtttttttcctttttcctctctcttatctctctcaccatgccttgacctttgtcaggtttttattttgtacgttgtctgtggaaattccctgatagataactggtgacttgtgaaattatctcattgaatggtggagtctctgaatttgtctacactgcctgatcagcacacttcaaggatgagaggagggtctctctcctgggcctcatgtgaaaggctggtggtcattaactctgctgtcacagactggacaagttaaaggggcattttgtttggtcataggaaacaaatggaatagaggaatttgtctaggctgttaaataaaacgttttttctccccacccccccacccccactttttttttttttttaaaaaaaagatagggtcttattctgttggccaggctggagtgcagtggcgcgataacagctctctgcagctttgaactcctgggctcaagtgatctgcttgcctcagcctcccaagtagctgggactacaggtgtgcaccaccacacctggctaattgtgtttatttttggtagagatgaggtctcactatgtcgcccaggctggtctcaaacttctgggctcaagcgattctcctacctcggcctctcaaaacactgggattacaggcgtgagccactgtgcctagcctctttattttaattacctaacatatatggacttaattgtttttctttttttgagatagggccttgctcagtcacccgggctggagtgctgtgatgcgatcctggctcactgcagcctcaactttccaagctcaagcaattctcctgcctcagcctcccgagtagctgggactacaggcttgcgccaccatgcccagcatggtgtgtatatatatttgtgtgtgtgtgtgtatttttttttcttttgtagacgtggggtttcaccatgtt

SEQ ID NO: 48711 - DNA, 1050 bp, Homo sapiens
cattgataagtaagagtggcatccattcctgaggaccagaggagctggcctttggagagccctgcctttgaaaattcacgggacagtcattctgcacacatctgctgaagaaagtgcttcccctttgccagatcttatgccagatgctaactatgaatgtatcctaaagatgctcttatactagggctgtgaaataaataagaaaacagctcatgatacaacctcagatgaatgtcctcagatcagaaaaaagaactgctatgatcatcagctctaagacccatctactaggcatagttccaagattgcccatttctatgagtttttaattgtttgcatcacattattgcacctggaaattccccaggcattctagtccatagagttaagctaagaattaagctccagctcagtcctcctgcactgagagcatcaccatttctccttattccacagttggactcctgtaccccttccccaaggactgctcccaagcaatgctgaatggagacacgacctctggcctctacaccatttatctgaatggtgataaggctgaggcgctggaagtcttctgtgacatgacctctgatgggggtggatggattgtgagtaccaccagggactgcagagccctcaggcctaggggaagagggagagggcaaagcaggggaggagaagagggtgatctcctcctgatgcactctgacacccccatgtgtgaggccttgcaagatagtgcctgtcacacagaggcactcaggaattctctcttaaacaaaagaatgggaaacacgctggctactttttgaaacggggagataagtttcttgtagtttatctcatccaatcctcatcaaacaactctgtgatgtataaatgacagttgatcattgaacccattgcttacattaattagcactgactaagcatttattatctaccaggcactgtgctaagagtttaagatgaattattccgaccccattaccataggagctgggtagtgtatttttgaattaataaactctatttttttagaacagtttt

SEQ ID NO: 48712 - DNA, 2475 bp, Homo sapiens
cctcagctcctctgtggcagacctaggattccagcccagatgcagttgactttcagccccagaagcagccctgtcttgcagcctgaagagcattcatctctctgttctcctcccagagttggacacgcccaaggaccttcaggtttctgaaactgcagagaccagcctgaccctgctctggaagacaccgttggccaaatttgaccgctaccgcctcaattacagtctccccacaggccagtgggtgggagtgcagcttccaagaaacaccacttcctatgtcctgagaggcctggaaccaggacaggagtacaatgtcctcctgacagccgagaaaggcagacacaagagcaagcccgcacgtgtgaaggcatccactggtgagtctgccctgagcttcctccaaactctaggttgattctgaggttagcagatctcctcagccagggtgtcctcacatgagaaagccaaatgcaaaagcaagccactttctccatctctgaagcccctgaacaccactttgaaagggctgcttactcgtcttttctacctcctgtcaactgatacagcaaatttcccccactgggaaataggggttttaaaatatttcttcctaggagaactttaaacatcagggtttgtgtttgcatttacctatgatttttgttttcttttcttaactgtgcatcacagcatcttttcaattgtttcttgtttatttccttcttttagcctaataattaatttacttttcattttacttcatttaaagatgaccaagatgttggtaataatattttttttgttgttgttattttctacaaactgtttttattccaggtcttttgctttctgccaaggttacccctgaagagtggcacacggccctttgagacttccatggtgccctctcattttctcttttctcttagtcattaagacattaacctagtttgtctatgacgacagcttaatcctgacattgtggcccatgcaacttgtgtccattctggcccatgcaacctgttcactgaacctgaggccatggttactcggtggctaaactgaagagacaaccaggtttttaaaatatttcttcctttatgaaaaataagcctattcaattttggccaccaaatattcgaaatgtataggtggaaaatgttacttttccagggtttggcaagtaatagtctttacttccaatttaattagtaagcatgtattgagtacctactgcatacattgtaccgtactgatatttgaggaaaagtagttcccaaagtcagcattgttatgtggactcatttgtgcctgctcatagtgcttgcggaagactagatactcagaatgctagacagaactcgagaaaaagagtgatccaaggaaatcaggagagctggcaaaggtgttatggcaagggatgttattccagttgaagcttgatatgcaagaaaagggttagaagtgtggacatatttggaaatggcttgaagagtctttctcacaatatcttcagtctcaaatcacagtcacttacttaagatagaagttggttttctttcttataaaatgaatctggagctgggaggtacagggataacttagtagtttcaaattgtcaggcacccaggctgcttctttcttttccaccatttttagtccttggcttccattctcaaagtcatctcagtgtcacaacatggctgctgtaatacagccattccatctgtgttctaggcagcataagggaggaagaaccaaaactcccaaagaggagcaccttctgggtgagtctttctggaaaccccaccaatcacttctccccatagttcattggccactcctagctgtaagggaggcagggaaaggtagtcttctgtctgaacatgttacttccacataaaattgaggtcatttgtaagagagaaatttggcagacaatgagcagtccctgccagagtctgaaatgagtttacgtggtcaattctgttgactctgcattgactgcttcccacccaactataagatgtttataaaggatgctctgaaagaatagtttaattaaaaaataaggtggggggcggggatagaaccaagaagaaataaatctatagtagagatttaaatttcagctttataaacatgagcttgttataaagtgtcaaggggcaacaaatgaatcagaaatgcccaaaagatgaaatccctctcttttctttctctttctctctctttcttccctcttccctcactcctgctcttcttcctcctcctccttcctctgcccctctcccttagctttcccttgagtttgataaatgctgtatctaagagagattcctattgcccctcaatcattccaccttctggtgatggccacattgcctccttcctccagtgagaaaacctcacacctgcgcagtcactgaagaagttttatctccctaagatcctgaggtgtggggcttctcc

SEQ ID NO: 48713 - DNA, 1026 bp, Homo sapiens
aatcgtggccgctgtgtagacgggcggtgtgagtgtgatgatggtttcactggagctgactgtggggagctcaagtgtcccaatggctgcagtggccatggccgctgtgtcaatgggcagtgtgtgtgtgatgagggctatactggggaggactgcagccagctacggtgccccaatgactgtcacagtcggggccgctgtgtcgagggcaaatgtgtatgtgagcaaggcttcaagggctatgactgcagtgacatgagctgccctaatgactgtcaccagcacggccgctgtgtgaatggcatgtgtgtttgtgatgacggctacacaggggaagactgccgggatcgccaatgccccagggactgcagcaacaggggcctctgtgtggacggacagtgcgtctgtgaggacggcttcaccggccctgactgtgcagaactctcctgtccaaatgactgccatggccagggtcgctgtgtgaatgggcagtgcgtgtgccatgaaggatttatgggcaaagactgcaaggagcaaagatgtcccagtgactgtcatggccagggccgctgcgtggacggccagtgcatctgccacgagggcttcacaggcctggactgtggccagcactcctgccccagtgactgcaacaacttaggacaatgcgtctcgggccgctgcatctgcaacgagggctacagcggagaagactgctcagagggtgagtgccagggcgcagaccagcatataatggccatgatggagtggactcctagtatgggttggaaaactacgtttatatatataaacattcatgcacactgattctttgtacgtattaatatatccatttaaacacacacccataatgactttttaagggggccctgtcattccgttgttacaaggtgacctatttaagggctgaagggctcagagaggttatataattgtcccagggacacacagctgacacatcacagagctggtattcaagtctgcctaactcatctacatagagtttaa

SEQ ID NO: 48714 - DNA, 1062 bp, Homo sapiens
taagttatcggttactgtaaaagctaactgaagtcaatgtgttcttcaaacatggcctgagataatgtgtattctctaggatagtgggataatttaaggtattttggctataagtcttctacctgacatacaaatcttaccatgcccctcctttgatagatccccactacttatagaaggtcattttctgccagacatggtggctcatgcctgtaatcccagcactttgggaggttgaggcaggcagatcatccgaggtcaggagttcaagaccagcctggctaacatggtgaaaccctgtgtctacaaaaaatacaaaaattagccaggcatggtggtgtatgcctgtaatcccagctacacaggaggctgaggcaggagaatcagttgaacatgggaggtggaggttgcagtgagctgagatcacgccactgcactccagcctgggtgacagagcaagactctgtctcaaaaaaaaaataaacacataaaaataattttaaaaaacatcattttccttagcttggcatacaagaccatccacaaactgtcctcttcatgcacattccacacgaacaattccgtttcatttctccacacccttacaaaggttgtttttctctgcctgaaatgtgctttccatttttcactttgctaactcccactggttcttcaaggttcatctagagcatctcctttgcaagtcttctctattcctcatccctttttcctgaccccaccctagctgagtgtcattcctgtgttatcacagttcctagatttcttccatcacagtttcctcactgtctgtctgtgggtctgtttccttatcaggcagacaagatctctgcgaacagaattgtggagtccttcacggtagtatttccaacccataacagtgctcagagtaaaggggacaccaaaccagtgattgaggaatatatgactagataaacaacaaatgaaaggtaacaacggatttatctttgagttcatttattaccagattatacatagactaaactaactaggtgcttgtgtacttatttgtaatgctattac

SEQ ID NO: 48715 - DNA, 1034 bp, Homo sapiens
cagtattattcatgatagccaagatgtaacaacctacatgtccatcaacagaagaatggataaagaatatgtgatatatacacacaatggaatattacttgaccttaaaaaaggaaattctgcaatctgcaataagaggaatgaactttgagaacattatgctaagttaaataagccagacatggaaaacaaatactgcattagctcacttaatatgaagtatctaaaataatcaaattcatagaaccaaagacaaaatgaatggtggttgctaggggatggggaagggaaaagtgattagtgactaatcaataggcataaggtttcagttaagcaagatgaataagttctaggactctgcagtaaaacattattcctatagtgaacaatactgtaccatacacttaaaaatttgttaagagggtagatctcacggtgtgctcttcccacaataaaaaataaagaattattactttgaatgactaaaatgttgacattcaatgttgatccactggcctgaatgtatttgactctttgaacccctggtacagatttaatggtgtctacattggcagaaaaccttcttacttcttttcccatcctgggcaatctagcaggaccctataagcagcttccccagcccttattccaagaaaatagttggtccctggggtggcttcaggtcacagctttgttgtcctgggacaacaataaataattacatttattaatgtataaatacattaaatattttttacataaaataatcaagtgaagggaaaaataaattgatatagtagtcctaggcaaagagcaggtgtggttgggctgacaagcaccctcacttaggtcctctcaggttggaggatggatgacataagcctcttgattacttcatggacatacagctcatttccatttatagaaagcctatgtaccattggacagtcctctccaacagtcagagagagagagagactcctggatccactttctcctactgtttcttctaagtagcaatgcctataagcttt

SEQ ID NO: 48716 - DNA, 1004 bp, Homo sapiens
ccatccatccattcatttatccttattccatcctatgtatttaattcctacgatgtgttacacattatgctaaggaaaaggatgcaatagtgaattaatatagatatagttcctacccctccagaccttatactctggtgaagagacagactttaatcacataatcacacatctaattaaccaatttcaactctgataagagctatggagaagaggtttgtgatgctattaaaaagtagaaagatttgatctagacagggagctcagtgaagtccctgaagaaatgacgcttcagctgagatcataaagatgagtaggagttaattaggtgggggtggagaagagagaatttctagagacagggaacaatatgagaaaagctctggtacttagagatttctcctgtctctggtttatctcatgttgctccttctactagtaacgcattcagacaaacaaaccatccttcaagatctagctcaaatgttacctctccaaaatgccacccctaatagcctcaggatgctgtctgctgccatagcctcttgtatttgattttgtgatagctcttcaggattttaaaattctctctttaattgtctatctccttcactatactgtgcgcatcatccatttctgtatcctagattgctagcaaaatgtctcgtatttgtgcaaaactttatcaaatatagattccataaatgtttatttagtaaaacgatggatggatggatggatggatggatggatggatggatggatgacaggcaagaagatatcatagatgactcaaggagagcatagttactattttcactggactaacaccaatgtattcccagaactggaacagtatctggcatataagaggttctcagtgaagctttggtgaacaagtgagtgaatgatcactttggacccagcatggtgcagaaaacaggggctcaggggtccccaaaccctttctttatcttggatacctctggatattcaaggttgat

SEQ ID NO: 48717 - DNA, 1043 bp, Homo sapiens
tcagagtgcccaatgtagaggagacacatggtgttttcttccctcctcttgcctctttgtgaactgcctgttcagagcctcctctgttacaagcttcctcacttatcacagatataaagctgagaagaaaagggtggagattttcaggtattgctaggtctaacctggaaaggacttggggacacctgttcatgcaggctcaagcggtgaataccattgtacacacactagtgattccaaagggccttccacatgccagatgatttctatatgctagctctctgactctgcaccaccttgggagactatcattattagctccccatcttgcagatgagaaaatagaggcttcagaatgtttaaagcaaaactaacctgtctcaggcctcagtaccagtcagtgagttggtgatgcaggattccaaaccccacttcaaacacttgagagcttttcagcaagtgagagtaaaaagaagggggaaaaaaaaggtattttcttcacaacctgaaaaggctgactgctgctttgtctttttaatcaccaataacctttatccttattatgtgcctggcactgagctaaactcaatgtgcatcattatcttactcactctgcccagcaatgctaagaggtaactattcttactatccccattttacatcttaaaagaaactaagatgcaaagagatgaatcagtgggctgtcaggtggcctggcactcctcagcaccatgccccaggaggacggcagagcaggagtcagggtcctctcttcacagacgaagaaactgaggcatggagagaagaatcacatcttgataaaatcagagctctgagcccaactgccagattccctgactccccaagcagctccccaccttctcccccaggcggcctcccaagaaaacctaccacccacagcatgaacaccatggtggccagtttacatttggggattctcagcaccatgtggctaggctgtcccataaatggcttggccacccactctgggattgtgttagcaagccaggtccatgattaag

SEQ ID NO: 48718 - DNA, 1077 bp, Homo sapiens
agtcttgctctgttgcccaggctagagtacagtggcacgatcttggcttactgcctctggctccctggttcaagttattcttgtgcctcagcctcccgagtagctgggactacaggcatgcaccaccacaccggctaattttcgtatttttagtagggatgggatttcaccatgttgcccaggctggtctcaaattcctggcctcaagtaatccgcccatcttggcctcccaaagtgctgggattacaggcatgagccactgcgcttggcccactaatagccacattaaaactttttttaataaacaggtgaaattaaaattaataatgtgttttgtttgatctaaaatttcgacattttaatgtgattaatatcaataattattgtgagaaaaacctcattacctttgaaatccgtggtgcatttttgacttgcaacacatgtaaatacagactaaccagtgctgaatttcaagtgctcagtagactcatgtggctactggattaaacagggccaggccagatcattcaggaccagtaggccagcaacaacgtctggactttagcatcagtgcaatgggatttttaggtatccttctggtagcagggtagactgtaatctttcagcttgtagtttccttctagctaattgcaacaaggtaggaagctcaaagaaaagcaaaaatcagaataaaggatgaaaagagaatgactagctttggatggaaaagagaaggatactgttgctttaccagaaaaagtgtgaatgttgataataatggaaccaaattcctaactgaccaagattgatgacaatcgagaggtcagatgtcttagtgagtctggtcacacaatgaagtctatctaaacctataagtctggctaatcatcagctctgtgaattaactagtgaccagaaaccctctcattcagaacctgaggctgttaaaagaagaggaccaggtcaatccaggaagccacctcattttccttgctgccagttgcagattcaggttgtagaacccatctcagcctgaggagaaggagtttggcaacccctcacctctgagcctatgaa

SEQ ID NO: 48719 - DNA, 1007 bp, Homo sapiens
tctataccaggtcagcctgagaggttgagtgagctctgcaatgctcctggtttactcaggaggattagggcaataggcagaccttttcttgtttttcttactgtctttccttttgatcaaaatgtccatctcaaaatgtttaaatcatctccagagcaagttcgagttctcctgtgtctgcttttgatgacctttctgtctcttcctttgctaccacactgccttctgtcacttataactgtcgttaaaaaaaaaaaaaggtctctgaattatataatgggcttggtaatgagaaaggcatgctctcttgagctttatcttaataatagttaatagccctcaggtgaggtcatgaaagagtctcctacaacattataatagttgttttgacttctagatttttctatcttagttttggggtctttgttcctggttgggggaagatgcttggtgggttcgtagggcatatgaggtgtttctgaagcaagatgccagccttattttggaaggtatgatagccgtagaatttctaaattttatttttttattcatagttaatagctgtgccaacacacagctgctttagtagagataatacagaatttagtggaagacaaaactgggttaaagtctttgctcagggtttacttgctatatgacagggacaagtcatacaacctcagttttcaaatctgtacaatggaagtaatccactcccttctacttatcctctgctgacaattcttcttcctcttcctcttcatcttcattcttttaaaaaaattgtttatgtttttacttcagtacgttttagggaaacaggtggtatttgattacatgaataagctctttagtgatgatttctgagattttggtgcacccatcacctgagcagtgtacactgtacccaatgtgtagtcttttatccctcgccacccctcaccctttcccccaagtccccaaagtccaatgtatcattcttatgcctttgcaacctcatagcttag

SEQ ID NO: 48720 - DNA, 1113 bp, Homo sapiens
atttctcgctgggccttagctgccttcccacggggcagggctcgggacctgcagcccgccatgcctgagcctcccacccactccatgggctccggtgcggcccgagcctcccagacgagcaccaccccctgttccatggcgcccagtcccatcgaccacccaagggctgaggaatgggagctcacggcgcaggactggcaggcagctccaactgcagccccggtgcgggatccactaggtgaagccagctgggctcctgagtctggtggggacgtggagagtctttatatctagctcagggagtgtaaatacaccaatcagcaccctgtgtttagcccaaggtttgtgagtgcaccaatcgacactctgtatctagctgctctggtgaggatgtggagaacctttatatctagctcagggattgtaaatacaccaatcagcaccctgtgtttagctcaaggtttgtgaatgcaccaatcgacactctgtatctagctgctctggtggggccttggagaacctgtgtgtcgaaactctgtaactaatctgatggggacgtggagaacctttgtatctagctcagggattgtaaacgcaccaatcagcgacctgacaaaacaggccactgggctctaccaatcagcaggatgtgggtggggccagataagagaataaaagcaggctgccctagccaacattggcaacccactcgggtccccttccacactgtggaagctttgttcttttgctgtttgcaataaatcctgctactgctcactctttgggtccacgctgcttttatgagctgtaacactcacagcgaagatctgcagcttcattcctgagcccagcgagaccacgagcccaccgggaggaacgaacaactccagacgcgttgccttaagagctgtaacactcaccgcgaaggtctgcagcttcactcctgagccagtgagaccaggaacccaccagaaggaagaaactccgaacacatctgaacatcagaaggaacaaactccagacgcgccaccttaagagctgtaacactcaccgcgagggtccgcggcttcactcttgaagtcagtgagactaagaacccaccaattccggaca

SEQ ID NO: 48721 - DNA, 1078 bp, Homo sapiens
gagtaggcagtcacacggcaagagaggtattgagtgagagagcaagagagagagagagagagagagaaatagaaagaggaggcccacacacttttaaacaaccagattttgtgtgaactcagagcaagagctcactcatcaccaaagggatgacccaagccattcatgagggatccactcccatgatccaaatacctcccacttaggatccacttccaacactggggattacatttcaacctgacatttttaggggacagatatccaaaccctatcaattgacagataaaaattgtatatatttatgtcagataacatgttgttttgaaataggtatatgttgtgggatgactaaactaagcaaacctttggtcttttattctgttcttcaaacacattaggcatactcctaccttacagcctctatacttgctacggtctcttggattgctccaaccctagatcttctaagcctgtcttttttcttgttaaccaaattctatttcagacaccccctcttcagtgaagtcttctctgaccacccagtcaaatgcagttgactccaactcgccatcaactgtcgtccaacctctatcacagcttcatggtttacatctttaatggcctttgccactacttaaaattatcttgaccatttacctgctcactcagttatcatcaccacatacctccctttagtctctgcttcatttaaggaaacagatgctcaggagtgtagtgtaactcaccagaagtcacatcaccactaagtagtcatcccaagatttgaacaggtctgacagattctgcaaacgatggtttcttctttactacgctgttctctagacacagcaataactagagggttgcacttgttttatcaggacataacttgaatcatgaatcctaaggcatggtggtataggggaaagagtatgaattattgggttggcaagcctagattcatggcctggcattgacattttccagtattaaacatctctgcattttttctctcaaaacagaattaacattcttacctcaaagaggtaacatacattacgttcaaagaggtaat

SEQ ID NO: 48722 - DNA, 1031 bp, Homo sapiens
aggtacctggtgggaggtgattggatcatgggggaggactttccccttgctgctgtcatgatagtgagtgagttcttacgagatctggttgcttagaagtgtgtagcacctcccctctctctctcttcttcctgcttcagccatgtaagacatgcctgcttccccttcaccttccaccatgattgtaagtttcctgaggtctctccagccatgcttcctgtacaacttgtggaactgtgagccaattaaacctctttttaaaaataaattacccagtctcaggtagttctttatagcaatgtgaaaacagactaatagaatcaatttcttggggcacaaaaaagcaggagggggatgaagtctcaaagtctgtggagggagtgctgaggaaaggaagtgattctccttattgggtctccagagcagaggattggaactatgtggagtagatttcactagaagacgaaaaaagcacactctggaaaggcatttcctatcatattgggagtctcccgtgggctgctgtggggcatgagctccagtgcccacaaagtgtggaccctcgtgtgaggaccagccagcaccacatggccaggtgacctccaagggccacctggggcagggtgggaagcagagagagaaagttcagggttctccttttccctcacctcccatatacaacctgtggtcaagtcttgttgatgccagagcccaattacatcccatcctgtctgtggcttccagcttagctgctagcagcctagtccaaggcattctctcctctcctcagacagctgcagtaacaccttaactggtctcctggcctcaactgttggtactctatgtctactgtcttataaaatgtaaattagatcatggctctctttatttaaaaaaaaatcatccaatggctgcttgttaggaaaaaatccaactctatccaactcaagagaccatgcacaatccatgtctgctcacctcttctgacctgcagtgagcaagggccacgtcttctctgtcttcctcaaatg

SEQ ID NO: 48723 - DNA, 1093 bp, Homo sapiens
ccagggacagggaactcactgtctcctaggatggataccctattgatagacaggtctaattgttccactgttctcttggctggacagtgatcagactttcataataggcatggaaataaaatcttctcccctgcctcaccacagggaagtccttcaggggcttgacaacagcacccaggtcttccctgagcttgtcaccctcaaagacaatatggaaggcagagtccactgactggtctctgatactgctgtgaaatgacagggtcttgggataactgactgttttgtcttatgtcccagaggtttgtggagtggtagacaaatcttggactttgaagtcaaatagacctgctctgctgtttactagttgtaagacatcaaacaagtgccttaacctctctgaaccttggcttgttcacctgtataatggggggttgaaatagatggttattaaggcctctttcagttgtgactcgtggagttccacattgcttgtctctgagcctcctgcttctatttcaggaacttgttcctgtctctgaccttctgactcttgtcccctgcccccgaccctctatcatagtccctcgtttgttgcactaactctttggctcccttcaccaggctttaaaaaagaattctgttctgaccaaatcactccctgcatctgtctttatggctcccagcagttgctagtgtatgtccaagctccctagagtggccctcaaggctccagtatcaggccttgccagtatctccagctttataaacaactctccgcttttcctttggaattctccaaaagcactttcactccatgcttcacagacactgtttcttccacatgcaaactcctattgatcctgcaaaaccctattccggtgtcacccttaatatctgaagctctttcagaccactgctctccctgagacaaagttcatcatttctccttactcctttgcaagcatgatcgctgaatgaatcatggtgtgtttcaatagtcattttctgtggctgtctttcctttgtaagagttgcaaggcagggagctactgatttcttctctgtgtccctagcactggggacggggcct

SEQ ID NO: 48724 - DNA, 1106 bp, Homo sapiens
cgacagtgaggttggcccagtaaattcctggatgagaactgtcttggatttggtaatatgacagaaaggattgctttgctccatttcagtgacttattttacactaacaaaggccatcatacaacctaacacctcccattaattcccagcctaatcagaatggaaaacttctcattcactcattaatctactcatttattcatactcatcctctcagtcagcaaatatctatggagcacctcctatatctccaatactgtgtggaggtacaaggatgagcaacagagacatgacccttgtgctcactaaattccttgccacactgagccacaggaagaaagcagatggggaaagtagatttattgggtgcctactgtgcaccatggatggtgctaagtactttatgcacatgatctgctttcatcctcacacctgggactcaggaattaatatccaccttttagaggggaggaagctgaggctcagagagagatgtgattgtggaagggcacccagctagccagtgtcagagctggggtggaaccctgatctgtctgactccagagctaatactacaggagtgacaggaagaggatagcagtgactttacaagtatctgtgttccatcatttcctcaaatctagagctaaaaagtgacccactttggaaaacttgcattcatgggtgtcctctgagttcaatgtaaagtgggacagaacatcctgttttgagaatcaggaggtctagggttctcatcctggtgctgtgtgaccatgagaatctcctcctttctaaatccaatactgggaccgagcaggcaggcaaaggggacaaagagatggcatggggaagagtggattcccgtgttggacctttggtttgattctgttagaccccaacctgtgactggcatggggcagcaggggaggctggatccagtcctttgggttgggggaggtggctggccatcattaggcaggatgtcagcatcccagccaagcaggccatgtccccatggtgggacactggggcacaaggaatggtcactgggcaatgacatacttagattggaatatgaattaatccatccaacaaatagctattta

SEQ ID NO: 48725 - DNA, 1035 bp, Homo sapiens
cagatgaagttcaggtctggagaggggaggcactatgatttgaatgtttgtgtcacttccaaattcatgttgaaacttaatctccaatgcagcaatattaaggggtgcaactttttaggaaggaattaggggatgagcaaccttataaaggagtctgtggccaataagataggttttatttgccctttgtaccttccacgatgtgagaacacagcatttgtcccctctggaagacacagaagtcaaggtgccatcttggaagctgtgactgagccctcaccagatactaaacctgctggtgccttgatcttggacttcccagcctccaaaatggtgagaaataaatttctgttgtttataaattaccctggtccttgggtattttgttatggcagcacagattaagacaggaggtaatttgcttgaagttgcacagctgataaatgacagcagtgggataaaactcagatcttcccaacacccaggtctgtacccataatcactctgctgggctccctatcacttggctccatgaattcagattctatggctgcaaccattggcgtgctcagtcaagagctatccaggctggagtcatgaattcatgactgaaggggtggggaaaggggtcggggaggagatcaagatttaaaatgaaaataagggactggattcgtctttgagggaggagatttttcagtgtttgtaatggtattgtcagttaccttcagcgtttctggctggagaaaggttttgttgttgttttactttaatggggatttgtgggaaacgtatgaaagagagatgggtcagtacttgggggtaggtattcgggaaatggacacaaatgtgatggaggccttggtattgagcttgctatagtccaggggtccctaactcccagaccacagaccctcttaggaactgggctgcacagcaggaggtgagttgtgggcaagtgagcgaagcattatctgtatttacagccactccccatcactcacattacctcctgagttctgcttccagtcagat

SEQ ID NO: 48726 - DNA, 1026 bp, Homo sapiens
gcagctggtcaggctggagtgcagcccacactggcagcgtctgcttccacttgcggcccactcaggcagttcctgccagtggtccaaagtccagccctgctcctggtgaggcccagaggggcctcatcctcgctgggaggcaggcagttggagttgcttctgactcaaccttttagacctctttgtcctcagggttgcccaagtcccctcttttcccattgaccccattccctgggaagccgccggccttgcctgacccgagagggcagcactgggcagggctcacccctccagctggatcacaatgggactaagtgcatggtggctaccaagcgccctcccacacgtgcttctctcaaatgcgaaagcacctccttgttaacaggcattcacgggagagcttaattacatggtttcaggtctaaaacgaccctctgtttgtattaatgccactttctcgttccaaacagaacagcatgtggtcccagctcgtgtgtgacactggccgacggtgtgggcagacacagggaaataagagaacaaggtcgccctggcctcgccctcttctttagccaaaacaatggtggggtcgggggccacagacagagagtgaccaggcccagggctcctttgtggtggaagccagtggctgggagcccacctggagagtgtggagtgggtgtgggagggagagacaggtgggcgaggtgtggacactcaacataggaaagtatttggagacagtcacagttacacactcaacatctgctggcacctacccaagcccagagctcccagagccccgcgggcccccgaggcactcccagtcaagcatgggagacaggccagcacacaggtgatccgtggtcgtgataaatggtcacaaggggccgtgggcacccagaaaatgagctcctactcggccttggaggtgagcagggaaggtgtcctcgggtgaccctggatgaacagtaaaggccaactgggaattgtggggtggagaaggggtgggggtggggctcctag

SEQ ID NO: 48727 - DNA, 1034 bp, Homo sapiens
atgttctgttgagatcacttttcttattaccattctcactagcattgttttgctttatttaagtcttaaattagtaaatgataaatggataacatattcctttcaaaaaattagtctcgaaaatatctggattcattatgaaggtagtttaatcaactctcaggcaattcaagcagacttgaaagtgatctgttagtttcaccataaggaagattttaaattaatatttgatatttggaagaataaaaggctacattagagttagcattaaaattgtatggaatataattttttctatgtgatgtaaaatatcttcctcatggagggctgcagagaatcattacagaagtgtgtctgtgggctgtgggaaatagctcaccctccccatgcctaggaaagaattgccagttgctaaccatcttaacacatccaatactgtttggaatttcaggatccctgcataatccataaattattcaatttgttgggggttcagactttaaattaaaaatggcttccttcctgtagacttactaatggaacacatacaggaaattcgaactttgagaaagcgtttagaagaatctattaaaacaaatgagaagctacggaaacagttggaacggcaaggatctgaatttgttcaaggtaaggaaagaccttcctggaggactgtacatgtctgtgagtgcttcactgtgacgcatttgcctgagtaagcatctgtgtacaaagcaggtgcttgataaatgttcatttttccatcttggagaagtctgccagcctctggcatcctgaattgtgactggcatctcatttaactttggaagctggagagaaatagataggaattttaagataaaacaaagcaatatattgtcttttcatctataatggattataaaaatatcagcattttagcaatctggtaaatttcacatgccagtctaaagatcacacatattcctgcataaacacagttagctccgaatagagtgatcgtccatgaagaacttaaaaacattaccgcccac

SEQ ID NO: 48728 - DNA, 1660 bp, Homo sapiens
ctgggactagacatgatcacatttgccatttaggaagactgctggggttgcttgcagaaggagttggagtgagggatggaacctctttagcctcctcaaccaatgtgccactccttttcatttctgacagatttgtttttttccttctgttctgcctctctcaactgtagtttaacttgggccacttctaagtcaattaagtgggtgcccttggcccatgctgcacttctgcaagccagcagcaagcctgtgcatccatcacactgtctgggcaaagttgcatcaggtgtttacctgttaatgaatgcattgcagccttagagtctttgctgttgtctgagctcatgaataatgagactgtggctgttgacaagaagtaataggaagacgtgggagaaaaaaagagcatcaattaaggagtttatctctaatggagattcatgtgggcttttcacagcattttttttttttctcatggcttaggtggtccttgggaaatacaggttaataaccagatgattgctagaataacgatattgaaacctgcttgggaaccatgagagttttgagatttttaaatccataggccatctcatggttttgggctgggctctcacattctcctggggccttggagccaggcaggcctggttgaaatctaaactgtgcctctgaccaagccgtgagacagtgggccagtttatgatgagccccagttcccccagtctaaatgaggatagtaatccctacctcaaagggtttctgtgaggcccaactaaaatctcaaatgcttggtatagagaggttatttggtaaacagctgccgtcgacccaagtcctcttgggtccctcccctgtaagccatgctgtgggacaggcacaatcccctgcttccccttgttggcttcaaactcaagcgcactgagcctttcttgcttttagaatgtcattgcttaatgctgtagggaaataaaaggtctgactgaagttgcaaacattggggagttactaagagtaaagtaatcgtaagtattcgtaagtcatagtcctggcttgggattttagcatgggagatgatttatctttcaatctcaatggttaaggattgaggaagacaacttaacctaccaacatcttctgcctgaatctcctgagccttcagcctctcatgcgctctctgattatgaaacatctgaaaagtccttcttctcacgagaccagaagcaagataatgagacagagaagacttcagttatggtgaacagtttttctcaaggtaagctaagcctcattaagtgttttaaacatggcctgattaaaacaataatttgccatcttaaccttagtaagcagagtgtggtgacatttgagtatttctctgatgaaaggagatcccattagggccaatgctggtcattcagagtatcctttatcactagagaaagctatggttgttgaaagtgttggcgattggggaaaagccatttttattttttaaatgacgacttaatatgtgacttgccatttcctgcaggctgtgtgtcattgaacttgtatgtcagtgcagatttggttaatttcctattgtttatttcaaactcatcctaaggcagggtcatttcagagactcttctgctttgagttgcccaagagtatctag

SEQ ID NO: 48729 - DNA, 1047 bp, Homo sapiens
ggccgagggtttccaggaacagctgaatcaatgtgctgagctgctggagaaattggaaaagctatttctcaacggtaggtagggtgaggtacgcgagtcttaagacatcagtaattgacccaggacttcttggaggggcacaggaggagctaactccttggccttagttatctttcacccctctgccttgatgaggtgacagcagaaccacactggctgctgcttcctcccagtgaccacttccacatggcttgtggtcggcactgttacaaaccaggagtccagtttagacgcctcaggggccgggctggtgaggtacatgagtgaagccagccagaaggcactgcctctcactcagcagtggtcacgtagttgccagttcttgcatcttacaaattttccagaaaagatgggattttttatttatttatttttttttgtgaaaactcatgtgttttaaatgttggcaagcaaaaaatccagtcaaccaagcaaaatttttatcagttaaaaagtatatcgaagagttaaggatggccagaggaagggtgaaagaaacctttgctatgtgctaggtaaaatttttaaaataatttttttttgagactacagcaaagaactcccatttactgtgcacccagcttcatcagttgttagcatttgccacatttgttttatctttccctgtctgtacacacacgcgctctattattatctttctgagctctatgagagtggattgatgctatgatgttcctttctccctagataattcagggtgtggttcctcagaccaaggaaattctcgtgcataaccatggtattgttatcacaatcagaaaaggtgttgtctaatatactattatctaatatacagcctatatttgaatttttataattaattcaataatgtcttttatgacagtttattctggatcctgatcctggtccgggatccagtctccacgttacatttagttgtcatgtgtctctcgtctcctttaatccggagtagttcctcaccctttcttcttttcgtgatgtgaa

SEQ ID NO: 48730 - DNA, 1266 bp, Homo sapiens
aggagttgataatcctatggcttacctcttttaataggatactctgatatcctgttaaaaggaacatcactgcagcccgagggtgagacaaggagaccagatatccttacagttgtttagttatagaaacacggagaccaagtatcctttcaattgtttagttacagacaagaggatggactttactgatatacatgtgtttgcatccggcctggccacttacctgctttgagcctttggcaagtgtctagtacagtaccttgtacatggtaggagctcagactgtgtgagttcctgtttcccttccattcccaaggaagaaattccaatgtgacatcttcaataatgtggtaggtgggactctgtttagagtccataaggtagcattttgtgtggtgttattttagaacaagcattaggttgactgacggcagtcttccagcttgaaattggctttggcatttgtgcacttgcagatatgttttctgctgccatatgacacacagatttggatccaggaataaagattggtggagactgaggacgaagcaaatgattgttattttccagccctctttgctgaggcatccacctcctcccacgtggtctccttttgccacctcaaactgttcttatccttgaacctgctctctcctcttacctggaatttcagagcagaaagcatctcacttttccgaactgagcagtggaccctgaagagctagtctgaggtctgactcttgaaccttcttgcactgtgacattggactagttgtttgacatctcggttcttcatctggaaagtaagaatgataatgtctcttatcctgtgagttctgggaatgcagagtttacttctggattatgggaaagtgtgcttgaaagcattttatatcctagaatgttcaagaaggggcccttactcttctttccttcttaagagacctcagtgatctcatttcttgggtcccaaatattttctgttttcctcttgggttccttctcctctgctatttaaaaactttaaaaaaaacacagccttattgagatttaattcacatgtcatacagtgcatccctttaaggtatacaattcagtgggtttttttttagtctattcacagagttggacaacaattttaaacattttcatcatcccaaaagaaaccttgtactcattaacagtcatttcccatttcccctgaacttgcccaccccagccctaggcaaccacgaatctactttgtgtctctttcaatttgcctat

SEQ ID NO: 48731 - DNA, 1031 bp, Homo sapiens
gctaaatgggtttagatgatcgtgctgtgtaatttacctgagagagctcctgaaatggcttggaaggaatcttgccagtcatgaaattaagtaattaggctgcatgctagtggctgtgaggggacgtcagcaaagcctcatgtaagcccattataaagaggagaaagaaagctttctttgggaattattcctgggagcccccagaaaggactgccttgctgtcagcgagaggaatcagccctaccgaaatatcttccagtttcgacaacagcttaaaaaataccattgtagttgtgattctgctgtttttgctgagcttgaattaaagttctcttctcattatatctgttgggagccattcctatgtgaggagatactacaggttgttttccttaaaacaaaaaaggagaaacattcagtacatttgtattttttcaattaatcctttaggagtaatttttgcccctttcatattcttcctagtccatccataacagctgcttgggctttggaaccaaaaagagctgtggttttatctctcagtgcctcagtttctctgattacttcttagggttgctgtgatgaataagaaaaaaacgtttaagaaaaatggctggcatttggtgtgatgcgtgttcaataacagtttttagttctcctcctgaatggatagagaaatggaacggtaatgattgcccatgactcttgataagagccaggaaccctagtatttcttctatcattgatggactaagccttacaggcatttcttcagctaaaaaacgggattgaagcattctgtttttgtgagctcagcaaagctaactcctccccaatccctgacatctgtccaatatttttctagcttgagtcttcttggaagacatggtcagtggcaattctggcttattatcagaagtagttaggtgaccgtagtagttggtgcttgagaaatggaggatttcctaaacatcagggtcccaaattttacttcagagttaaaagacactttttgtctgagggccatgtgg

SEQ ID NO: 48732 - DNA, 1090 bp, Homo sapiens
ctgattcgccacaactagcaactctaaccttggttaatttttatttcatggctttggcatttgtttcttcctcttttttgtttgctttttgttttgcattaaaaaaaaaaagacatcactgacttattcatacatattcatgctgcacacttttttgggttgcattttcacaccattccatgctccatgtagcttctggctagcaaggaggacgaggacacgatcaaaattggggaggatgacgagattaatttcctgagtgaccagcatttgcagcagagtaatgaggtaggaacctttcagttaactccttatttcatctactccactctatgtccaaatcagtcttcgagtctggaatgagtccagtgggttttctgttcattctgcctatatcctgtacctttcatgtgccagtggaaagcaaagactaggtcttttccttcttataagttataaactgggtgacagagccagtcatgaaacatgaaaacgagcataaacttgcaaataaaaatgggcttgttatagtagaatagcaggcattggatgtttgacctggacaaatctttagtgatgtaatccaacccattttatgaattagaaactgaaggctttgaggactgatgatttatttggggcacagagtaagttagtgatagagttgggataagaacccttgtttctggactgtgtaaactaccagatcatttagttgaggtgtaaagacctactgatggaacttagctccccttcctaggggccctctgcaatctcctcatctggaacccacgttactgtcatttgggcattgtgagaatctcacccccgtacacatagagcactcttccaatcacattgatactgaacatgtggagcaagcagtctccaaccctctaattcataaaataagtaggagactccaagcagtctccaaggttgaaagaaccctagagactgggatgtggtgggggtaagatgctacagatttggcatttttggccttcagggtgttcaagtttgtggagtcacaaatgggagatcttaaaatgtagatagttttagaaagcaaagtaattaaaagtggggg

SEQ ID NO: 48733 - DNA, 1054 bp, Homo sapiens
ttcttgctgatacactccccatcttgaggactagcacagtttccctgtaactcaggatttctcagcctcagcagtatgaggctttgaggctggataatttttttgtcatgagggcatgtcctgtgctttgtaagatgtttaacaatccccggcctctaccatgggagggtcggcacacctgatcctcccatggcagttgtaacaaccaaaaatgtctccagacatggccaaatgtcccctggcgggtgggggcaaaatcatctccagatgattatcattgctgtaactcatgaaaatcagcaatcttggctcataaatattgtcttctgtatgggagttgttagagtatgtggaaggaaggaaatgatgtttgttgagcatctcatatgtgttagcccctgtcctaacgtctttcccatgtaatatctcatttattcctcaacacaatcgcaaagcaaaggtattattattcccattttgcgtgaggaaatcaggactcagttagttgaactggcttgcccagtagtggtggcgtgctattttgagcttcgatctctctaactccttgtttctgctcctgtctgccctgccccagttccaggaagaggaaggtttttgtttttttctgagtgaagcaccttttgttctcccaactcctcacaccttgaaaagattctcaagttgggaaaacataaatgacagacacaggagcagcagctgtgtacttttcaccctgtcagaaaatggaagagggagtgaagcagttagctttccccagccctaatcgcaggagcttctctaaaacagtctctttttttctccctggttaaatgcctctgcagcatgactgcatccaagcgagtgctgtgctgtgacacctctgtgaggtttttcatcagccttacaaattgatcattatgattgtcttaaaatggaactagatacaagttgctagtagggccctttcccttgcgtgaagactgcttcacaatgaactgtcctcaaagcagcaagcatagaagattagacataatggtttattttccttccaatg

SEQ ID NO: 48734 - DNA, 1033 bp, Homo sapiens
aggatagaggccttgttctagccctgactctcccactttctagctctgtgtccacaggcaagtgctgctctgggcctctgtccatgtgtctgtacacacagggttggcctcagggacttctcagaattgagaagtcctttttttttttttttttgagatggagtcttgctctgttgcccaggctggagtgcagtggcaggatctcggctcactgcaacctccgcctcccgggttcaagcgattctcctgcctcagcctcccaagtagttgggactacaggcacataccaccacgcccggctaattttttgcatttttagtagagatggtgtttcaccatgttagccaggatggtcttgatctcctgacctcaggatccacccacctccgcctcccaaagtgctgggattacaagtgttggtcacctctctctacacagtgggatgggtacagctgaaaggatatgatgtctgggattcatttccaaacagtgcagaagctgaggacgtgggtgggaatatcaaaagaacaagattggccctggctctctgattgttggggctggggtatgtgtagatgggggagaggttcattacagtagttttttttttttccttttgtatatgtctaaaattttctataatgaaaagttaaaaaagaatcacccctcatttctccctctcatatgtcctctgctcttaccatagtgagctctttatcgttccctgggctgtgtgttcctgcctgtaccttcacctgtgtttcctacccttctattcccaacctttcccctactttgtctcctcccagtcctttagaatttagcttgaatgttacatttgtcaggcagcccagctaatccccaaaacagttgcctctctgtgtttctgccctgcgtggggaggtcaccttctgtagccgtctgtgcctgctctgcctcctcacctgtgttggagctccctcagggcaggggtcccaccttactgtctctgctccccagggcctggtacagagtaggcatttgggaaatgttc

SEQ ID NO: 48735 - DNA, 1035 bp, Homo sapiens
catttagttggtgctaggcatcatgctggatattctgtatgcattaactttattttaacattttttcttattttgaaatagttttaaatttgtagaaaaatacaaaaataaaggattgtatttttttctgagccttttgagagaaagttgccaatgtgaagccttgtcccctctgaatgtgctagtgtatatttcttgtaaacaggaacattctcctgtataacctcagcccagccactacaaccaggaaattagcctggactgatttccttcattgctaccttctaatcctcagactcatttgaatttcatcagttgtctcaataacaccctttgtagtgaaaggatcctattcaggatcatgccttgcatttaatagtcttgattctttagtctttagtttggaacagttctaaaatctttccttgactttcataaccttgacacttttgaagtgcctgggccagttataccatagaatgtcccttcagtttgggttgtttgtctggtgttttcttgctgattagattcagtttatgcatctttggcaggaatatcacagtagcgatgctatgttcttctcattgtgtcctgtctgatggtacacagttggatttgccccattactggccatgctaactttgataactttatcaagatagtgtctgccaggtgtcttgactgtctagttatgcttttttccctttgtatttaataagtattttgggggaggtgttttgagtctatgtaaacatcttgacttttacctactagttttagcatccttttgtgtttcttggctgaattatttattactgtgatggttggcgaagggtgatttttctaattccattattctttttacatttattagtcatcatcatttttctataaagaaaaacctactctttttccctcctattcatatcaatatggatttatgaattcctgttttatttggtgggttataatctgttactatcagttattatcagtgggttataaaccattactcattatttcaatgctcaaatc

SEQ ID NO: 48736 - DNA, 1093 bp, Homo sapiens
tagcttaagagtgctccattgtgagaatgtaccatagtttattcctctgttggtggacatttggattgttcacagccttttgctattatgaatagtgcttcagtattgcaaatagtacatatttaaaggtagtcacaatcattctgtatacggtttttttttcctttttctgtaacatgggaataacatgaactttttttatgttattataaattctttgtaaatggtattaagacagtttttttcctgattatgaagataatacaggattatttagaaattgtggaaacttagaaaaataagtaaaaaaaatggaaaattacccacaattcctctacttagatatactgttgttgttttgatgtgttacctcagccttatgacatttgtattaacatttagaaaataatgagcatcttattatctgtacagtttgatactctggtttgttttgactcataattgtgggtgtgtgttttttaaataccgtactctttataattatttctctgttgttgactgtctagtttctttctggttttccagcattttaaataatgttgtgataaatatctgttcataaatcttttgccaaatttcagattattcttatagtggtttttgtaagattttaagtgagaaggatttaaatatacacttgtatactcccttaaatacatctattatcttgctctcttgtagcagtaatttagcaagtcaaacacataagagattgaaatttttgtcaagtaaattccattttttcattttcttctggtaggatcttagaaatgaagttgaaaaattacgcaatgaagtgaatgaaagagagaaagcaatggaaaatcgttacaagagtcttctgagtgaaagcaataaaaaattgcacaatcaagagcaagtgatcaaacatctaacagaaagtaccaatcagaaggacgtgttgcttcaggtactgtaacttttgtatttaaattttttaatttggcatgggttgatttttttaaaaaataattcttttgcagaaatatttatgattacagtaatcattgctatgtttcagaatactttagagctttaattatgtcatttg

SEQ ID NO: 48737 - DNA, 1036 bp, Homo sapiens
caaacatgtatatttatatttctatgtctttccaattctctgtgtgtgtgtgtgatcatgaattcagactgatagcagagttcattctccccttcctttactttttttttttttttttttaaactgagtcttgctgtactgcccaggctggagtgcagtggtgccatcttggctcactgcaacctctgcctctcggattcaagtgattctcctgcctcagcctccttagtagctgggattattggcatgtgccaccatgccctgctcatttttgtatttttcatggagacagagtttcgccatgttggccaagctggtctcaaactcctgacctcaagcgatctgcctgcctcggtctcccaaagtgctgagatgacaggctaacttttaaacttattgtttaataagtaagcaggttctccctcctttttttaccccatgtaatttgtttgttgaatatgttgggttgtttgttctttagagtttttcacattatggattttgctgactgtttctgtaatgtcatttgacttatttctctgttgactgtttctggtaaacagtctaactaccatctaaagtggtagtttagataagatgcatggtcaaattcaggttaaattttttggcaatgttacatcataaatggtcatttgtactttcaaatatttgatagtccctctttttgtgatgttactagctattgatcatttgcaaatggtgataatttgatttcattattccttcttttatagctgaatacgtctataaagagaaacttggtttttcatcacctatttagttaccctgaggtgcagctcatacaggaaagtgaaaacaagttccctagaatcctccaatggtggctgtattattagcttctattgctgctgcaacaaattaccacaaacttggtggcttaacaatacaaatctattatcttgcaattctagaagtcagaagtctcaaatgggtcccactggactaaaatcaaggtgtcggcagggctgcattcctcctgaaggctctagaggag

SEQ ID NO: 48738 - DNA, 1068 bp, Homo sapiens
cacattgtggccgggcgcggtggctcacgcctgtaatcccagcactttgggaggccgaggtgggtggatcacctgaggtgaggagttgaagaccagcctggtcgacatggtgaaatcctgtatcgactaaaaatacaaaaattagctgggtgtggtggcagacacctgtagtcccagctacttgggaggctgaggcaggagaatcacgtgaacctgggaggcagaggtttcagtgagctgagatcgtgccactacactccagcctgggcgacagagcgagactgtctcaaaaaaaaaaaaaaaaaaaaaagcatgttgtgatatccttcacagtgctaaagagggggacttacaattcaactggtagctcctggcagggaaagcaaaaagagaaaatcagttacaaggtctgcagtgtctgtaagatgaacatgtcaagtaaaaggacagcttttgctggcactgaggcccaaggaaagaattgcctctggtgagcttttataaagagtactttgagcagtttatagcatcttcaacaataccccattcaacaaaagcaattctgcatggggccagatcaatgttatccaagtcagtaagcttgaaagtagaagcttttcagtccctgggactatatctagctgtttcccattattctcttttcttggacaagaactacaaaatcagttagaaatgctgcagccctgttttacagatgagccctgacctaaatcctatgtacaggatccagatcaagcagtcctggtttttgtagcgttcttgaattttgatggtaagccaaccattactcttggatatgatcaaaccatcctttgctcatgccaacaacatttattgccagtctcattgtgcctcttctttagcattttgtagggaggcaattcttctgctgaaaattgagcttggatcagaggcttatgaattcactgtgtctcattgtgcacgaacactgagaagttgagccccgagagtcagttctccatgtttgtttgttttaattgcctgtgattgcagtgacctagtgccggttgactcagcatgtgttgt

SEQ ID NO: 48739 - DNA, 1102 bp, Homo sapiens
agctgcatgtttcatagtcaattcttgtatctttcactattagatgacctttttttttagtttaaaacaattatccctcatcccttactgccattataatgtttgtttggtaaaatttggatggccgaggatgagggggtgatacacacacacactctgtctctctctctctctctctgtctctctcgataatatataatatgtagtttttttatatcataacttagtctttgtaatcatttgaaattgctgtataacattacatcaagcgtatatactgtaattttcttaggtatacctctgttgttagacattatttgttggtttcataatttacttattcatgtaaactctggtgcttctagaagaattttgggctgctgtggataaaaagatgtattgctacataacatgtatacgtcttcatatggaggtatttgggaaggagtggaaggggactatgatggcaatagggcagggattggggtgagtatactatgggtaggactttcttgtgagtggtagaaacctagcttgaactaagtttggcagaaagggaacttgattgccttgtgtaactaaactgctggaaggacggggcactggaacactaccaggagcagactctctctctgagagctggcttctttttcttgcatccatactacagttccaagtggctggactcattgccagccacgctgggatcacatcttcccgatttactgcagaagaggaagaagaactcccacactttgctgccctggctggtttcttgtcaggatggccagacgggtgatgtactgagaatcccaatttgggtcacatgcttattgtgccttggcagaagggtgtgtgtgtgtgtgcgtgtgtataacatcattggcagcctccctagaaccacatgtttggaaggggatgagcgggtacccagaaaaagtggtattttgtttcagggcactgggcagaccaaaagcagctgtatactctaagtgctgtcctcaggtgaacatgccagtgactcaggcttcctggcatctcatcgtgactacctttacacatcaagttacatacatgtttccaacaagatgatttggccgtg

SEQ ID NO: 48740 - DNA, 1071 bp, Homo sapiens
atttttagtagagacggggtttcaccgtgttggccaggctagtcttgaactcctgacctcatgatccatctgcctcagcctcccaaagtgctgggattacaggtgtgagccactgtgcccagctgagaatttgtgctttttttctggtcctttaagaaaatacttctttcatacaaccatccacatcataagaaacattatcttatgttattccaaaatcttcctattatttttgctttggtttctgaatgttgtctatgttaatctttttcttttctttttttcccccacggcgaaaaagagcccaggtttcttggtttgtttcatgaggtatgaaaattagctcatcttgcttctctgccttctcttctaggggtctgaagactatgagactgctctatcaggaaaggaagccctttcggctgcgctgcgctcacaaaacctcaccaagagtacagagaaccacagactgcgtagaagcattaagaagatcacccaggagctgagtgacttgcagcaggagagggagagactggagaaggacctggaggaagcccatcgagagaagagcaaaggagactgcaccatccgtgtgagtaccgccctgcccttctgacacagtggacagtgcttttggggctatgtggctgtgtctggttgtagggtgatattcagtacagaagacttaagaaaatatttcacttattatctcagtacctagaaatgaccagcttcatttgatctatttggtatttcagtccttttattctcctcgctctctctctctctctctctctctctctctctcacacacacacacacacacacacacacacacacacacacacacacagagttgttatcgagttgaaaatacagttttgtatcgtgcttttttaagtttaatgttctctctctggtttgttgccatgtcatgaatgttcttcaaaaacaattttttttgtgccagcataatatttcatcacttggatgtattacagtttatttaactagttcttttttgaacggcatttagattattttactttttttttgccttatgacttctgc

SEQ ID NO: 48741 - DNA, 1167 bp, Homo sapiens
gcaactccctttgttccagtcagttaagaggaagacatttggttggagaacattgcggtgctccttatagacagcttgccccatgtggttgtagctttaagtgagaaccctgaaatcttatattgaaatgacacatgccatgatgtggtctcctgttttccatccacatgttttatttttttttaagctgtaacacgttcccactgctgcatccaccacatgcatgattgtaaacaaccaccagtaattgctttggaatgggaaaaacacaccgcagaattgcttgtaaatttgcttggtggagggcatacaatttttaaatcagccttccttgtatgacatttatgccttgatatttgaatgctctggctgttagaagcttggagcatttacataattgttccaagtctcacaaaatctaggtctttcttttgagaccaccagtgtttaataattcccttttccctgtgccctgaggctaatgagggtttttggaatctaacatctgcctattacaagcatcctgtagtcagtctgtgctggaagcagtttccccattgttgacattcataggtcctctattttacattgtttcttttctttcttaatcttgttttgtagaacattgagctcaaggtggaagtagaaagtctgaagcgggaactccaggagagagagcagctgctcatcaaagcctcgtgagtaccatcatccgttgaaagcttgcaagtcgcccacactgggttggtcagtgaaatagagccgtacacttttctaagacagttggtttccatctggactctgaggactgcaaggaggtttttgtttttacttaattatttacttttcaacaagcttttaagatataccatgcttatagaaaaatgaacagatcttaagtgtacagcgtgaatgttcacaagcaaacacacctgtggagctaccatccagatcaggaaacagaacatgccagccccccagaagccctctttgtgttctcagagctcacctttctcccctaaagataactaccattctgaccactgttagttctgcctgtttttaaactttatataaaaggaattatatagtagattctcttttgtgtctggcttctttcctcaacaatatatttgtgagattgatctatgttgttaattatatcag

SEQ ID NO: 48742 - DNA, 1035 bp, Homo sapiens
tcttaagtacattagcatgtgtctctttcttaggacattttcctgtaaaatcatattattacctaatataaaattgttattcaagtttccccgggtatcatcatatggttgtttctgtaaaaaattcaagattctattgtacttagtagtcatgcctcttcaacctccttttatttagaagagttcaccaaacatttttgccttaggattgccattaagatttttgaagagttcagttctgttgttttgcagaatgttcttcaacttagatttatctggtagactcctcttgattagatacaggttaaaggttatagacagaagcactttggatggaattatttgctctcattgatttatttcaggaggaaaataatgttagtttatcccttcaatggtgataagagatgaatttttttggtcaagatggtgttcgcaagtttcctaaattgtaaggttaccttttccttttgtaattaataagccatttgtgggtgatatgttatgactgtctgaatattatgttctgtagtgatctttcatctaatgcttttagtgctgctgattcttaccttaatcaatcattactgtagaggttttaaaatagtgattttctgttccttgtattctacatttattaactggatttcttttgaaaagaagaaattcttcttttccttttcttcttattatcagtgtggagttttgaattctttctttattcagtcattattcattcctgtcattattcattttaatgctcaaattgtactaactttggctagtgggaaccacttaattcttctgggttagtagaatggtagcaaaaataagctttctctagtatttaacatttgaatcagttttgtagcctcgtaatccatagcgactaatgtatgtactatctgttggaccctctgtcttttgtttgcttttgatgacccttctgtgatatttttcagcaaatcactgaattgaagaaagaaaactttaacctaaagctccgcatctatttccttgaggaaagaatgcaac

SEQ ID NO: 48743 - DNA, 1034 bp, Homo sapiens
gatgtactagcgtccaagtgtagcttttcacattttgccctatttcattttagttattttaaaaatcagctttattgagatataatttacataaaataaaatgcaccaattttaggtgttggatgaactctgacagatgtatattcccttgtaatcactattgtaatctatatgtatgtatgtgtggttatagttttttatatgtgtgtgcagttcttggcacgtgtaatgatcaccacaatcagaatatagaacagttccgtaatatcaacaacttcccttttttttgcttctttgtggtcaaatcctctcttcaccccaagcctgtggcaactaatgccctgttctctgtccttgtaattttgcttttcccagaatgtcgtataaatggaatcatacagtatgtaatcttttcagactgtcttctttgcctcagcataatgtctttgaattttatttacgttgtgtgtttcatagttgctgagcactattctgtcatatggatgtctactgtttatccattcaccctctgagggacgtaagagtttctcccagcttttggtgattattaataaagctgcagtaaacatttatgtacaggttttttgtgtgaacataggttttcatgtctctaggataaatacctaggagtggaattgttgagtcacatgttaagtctagttttttttgcaagaaattgccaaactatatctagagtgtctgtgccattttgcattcgcatcagcagagtatgagaacaccatttattctacatcagcacttggtattatcgattaaaaaattttattttaccaggcacggtggctcacatattccagcactttgggaggcccagtcctctcatttaacagatatggaagctgaggtccacagagaagtgatctgccgggccaggcagggtggctcacgcctgtaatcccagcactttgggaggccaaggcgggcggatcacttgaggtcaggagttcgagaccagcctggccaacatggtgaaacctcgtctctatttaaaa

SEQ ID NO: 48744 - DNA, 1024 bp, Homo sapiens
tctgctctaatccaaagattccgttgactacaaccactgccctgggttctgccccatcagtgttcagtttctgtacatccttctgtgatgtttctttgaccttggaataaaatccctaatcttggcccatgagaacccgtcctgtgtgatcgacagcttcctgtctttctgaactcagcatattcctctccccgtcgtacactgctctagccacacaggctgctgttcctcagccacacccagcttgtccctgtgccagggcctacgtgcatgctccaccctctgcctggacaccctttctccctttccttgaatggcaggcccctggaccttcttgcctcaacttgaatgtggccttgttagagaggctaccccaactcccttctcaactcatgattctgtcttctagcaagtactcagcgccctgtctctcccaccatgactcttgtgacagtttgtggttatttctttattagtgtacttgcttaacatgtgtctctattcaatgtctggtactcaacgctgaacctaacaaaatcgtaggcatctaatatttgttgattgaatgaatgtgtaaccttgtatggaatactaaagctccaaattttggttgctttatctgtaaaactgggaaaaatgtttatctgaggcttgtggtgaggagtaaataacatgctaggatagtgcctgctataccagatctttagcaaacagggcggctactgtggttattgttactaaagtggctggagaggagatatacctagagacatatctagaggcagacagcttataatgaggatgggggcatgcggggccagagtcaggaaagcaagcagtaatgagggcaaggtgaggctaagagtgggagaatgagggtgaacttagaacatggcaggagtgtaagaattgtgtgggatgccgctcagtggaagtggctgaagaccaggtctgtagctggcagagcgagtgtcatagccactttccacggagctctgtgcacaacatatagcctgacggtgct

SEQ ID NO: 48745 - DNA, 1029 bp, Homo sapiens
aggctggtgtcgaactcttgacctcaggtgatctgcccgccttggcctcccaaagtgctgggttacaggagtgagccaccccgcctggccctcattgtggtattgattacatgttaatggctactgatgtgttgagcatctttccatgtgccttttagccatttgttcactttctttggagaaatgtgtattcaaatccatcgtccatttaaaaaacgtgaatatattttgacccagcaattccacttcttgtcatctattctagagaaatcctcatacttgtgcatatgggaccttataaggacattcatatgacattgcatgtaaaagaaaaacttggaaacaaattgaattatcatcagtaggggattgggtaaatacacatcctttcaaaagtatctttcagactgtggcccgttggtagctcatgaaattcaatttagtaggttgcaaccaggatttagaaaaatagaacagaatagaaaacatttcaaggatgaagggtaataatatttcttctgtggctcatggtcagtaaggtttgaagaacactgctgtagaaagctttgtaggagttgaaaactttgaggcatatctatttgtactgtcatgaaaacatcatgagggcatattaagtagaagaaggatgttgtagcatgatgtatactgtttgattgcatgtgtttttaagcagcaaaattgaaactatctatgtaaaaacacataaaaagttctggaagttataggtctttttgaaaacagtgattacctcctaggcgggttctagatgggagcgaggaggagccaaggagaactttaggcttatctgtatttttttaaatttatgtatttttctctaattaagaataaaatagaatgaaaaaggggttgttaaaagacaaaagtgagtttgtttgtgtaatcgttgtcagaatgtgatatctggtctcatccatgactctcatgaaacaatttgtcaaggagacataagaccccttgggtcttatggtttgagtggacaattgttgc

SEQ ID NO: 48746 - DNA, 1054 bp, Homo sapiens
ccaccgcgcccggcgtgagaactattttttaaatataaatctgctcttcacagtctgctgctttatacttttaatgctgcttattgctgttatcataacttccattattattctctcagatagccattcttatttcagtgctttttggccagacacttgggttttggggtcccaggcctagctgggttttaatcccagttctgctacttaacaaccccttgatctggggcaagtcactcatcatctgtgagcctcagtgtttatcatctgtaaaaggggttggtataaagcctagggttggcataaggattaaaatgaatcttaaaaagtttagctcagtgtctgacccagagtaactactcaacagatcagcaaatattctcctttccctcatctccctgcctttgcaggacgtagatactgcatacattccatcttaaccattttaaagcatggttcagttgtattaaatatatttgtattattgctcaacggtcaccactatctatcttcgtaactctccatcttgcaaaacagaaactgtgtccctgttaaaacagtaactccctattccccccttctcccagcctctgacaatcaccattctactttctgtctctatgattttttttttttttttttgagacagggtctcgctttgttgcccaggctggagtgcagtggagtgatcttggctcactgcaacctccgcctccagagttcaagcaattctcatggttcagccacttagtggccgggactacaggcatgccccactacgcctggctaatttttgtatttttggtagagacggggtttcaccaggttgaccaggctggtcttgaactcctggcctcaagtgttgtgcctgcctcggcctcccagagtgctgggattataggtatgtgccattgcgcccagcctgtctctatgattttgactactctaagtgtcgcgtataagtagaatcatacactatttgtccttctgtgactggtttatttaacttagcattatgtcctcaaggttcatgcgtgttgtagtatgtgtcaga

SEQ ID NO: 48747 - DNA, 1427 bp, Homo sapiens
cctgtaatcccagcactttgggaggccgaggtgggtggatcatgaggtcaggagttcgagaccagcctgaccaacatggtgaaaccccatctctactaaaaatacaaaaattagccgggcatgctggcgggtgcctgtaatcccagctacacaggaggctgagacaggagaatcgcttgaaccggggaggcggaggttgcagtgtgccgagatcatgccattgcactccagcctgggccacagagcaagactctgtctcaaaaaaaaaaaaaaaatcctattataccttttaaaattgaatgctatatattttagaataataatagcttaaactgaatacttgctaggcattatcctaagccctttgcagttattaatttatgtaattttcatagcaaccatataatgtagacactattattattattctcatttgtacaggaaaaaaaatgcaagttaggtaatttgcctaatttgctgcataactgccagtaagtaaaagagttggaattaaaacatttgcagtctggatctagagtatatactcctatccactatgctggtacagcctttctcaaaatctcagatattgagcaaagagagtgagtattgtaagaaattcaatgctgtggtgcagacttcttgatattttctaaaaatttcttctagttgtcttttggtaatcagacactgaccctggtgtgatgtagctcatgttatgtaaataataactcttctttgtaaggactaatcctagttttggcgtagtagaaattagagcatgaaaggaccagccctttgatgaacaaataccaattgcaatatctgttatattgcccttcctttttattaggcactttggaatattgcttttgctcttgtcaagaaatttataatctaatctgtgcaaaactatgaaacacatacaatacaaaatagtttatgaatatctgcttaatttgtaagtatagtagttcagagtagaaaaagaacaggagtaagtaaattaaagtgtaataggaaaggctttccataggaggtggaggtcttacaggttatgatttagagtggcagagagatgagaagacctatcaggagaaaaaaaaaaacatgaaaattccagtgaatttcctgattatacaatgacataagaaatctgatatcctaacaccaaattctcttctgttgtgacctctctgttctcttttaaaaaatgagagtagaaaagtggattcaattctatcctgattccctcatatattgaaagtctatggaactaacaattggcttttaaaaaattcatttccctattctttatgcccatatatttcagtgggagtcaccccagtgagggtagattttggctgcaggagccagatgtgggttgagcaatgtctttgtgtgcaaacacaaagttctttatgtac

SEQ ID NO: 48748 - DNA, 1087 bp, Homo sapiens
agtcatgagtgaaagtgaaagcctaggatattattgtacactactgtagaatttataaagtctgcacacttaggctacactaaatttatttttaaaaagttttcttcaatagtaaattaatcttagcttactctagctttttaacattatgatctctgatgttttaaactttttgactctttttgataacacttagcttaaacataagtccattgtacagttgtacaaaaatattttcttttttatatccttattctataagcttttttctattttaaaattttattttttacttattaaacttttgtgttaaaaactacgacgtaaatatacacattagcctaggcctacacaaagtcaggaccaatagtactgtcttccacctccacatttcatcccactagaaggtcttcgggggaataacatgcatggagctgtcatccatgataacagtgctttcttttgggatacctcatgaagaaactgcctgaggctgttctagttaactttttaaaaatcgtagatgtacactctaacataacaataaaaactgtagtatagtaaatacatgaaccagtaagtcatttattttcattattaagtattatgtactgtgtataattgtacatgctatacttttatatgattggcagtgcagtaggtttgtttacaccaacatcaccatgaacacatgagtaatatgttgcagtgtgttaccacagctatgatctcactaggtgatcggaatttttcagcttcattataatcttaagggaccatcatgatatattccatacgtcattgacggaaatgtcatcatgttgcacctgactgtattatttttccctgttctatatggactattttctatgtgtgcctacctgatagcttctgttatccttagtagttttcctttttttaatgaggtaacacatggttttatattatcctcatagcatcaaagtgtgttgatttctaaaatcctttatcatcttcttctaagtgaaatctggaaggatcttccttcccctgcagctcatgcaggtaatggttgttttctgtctcacactcttacttctggacctgg

SEQ ID NO: 48749 - DNA, 1084 bp, Homo sapiens
tcttaattttcacagcaactccttatatataggttactaggtcacaaagatagtaagtgccagagaaagaattccaaattaggtcttcaattccaagtccagtgtcttcactaccatagcataccgtagcatgtagattctataatgagaaaactgataatcactctattctttgagattgagaatagagtggtagcttaacgctgttccctccactccccctaaaacatgctcatacaagttagattcagaagtttcacattgcttaccgttttaaaagataagccattgttaagtttgttcattctggtgtctcatggagtgtccactactttctttggaataatattctgcaaacatatttgtggagaaatagaaaagtgtttacttctaggcccagtgctttattagaagagaaagaaataaaggaaggattaagagagagttttataatagaagctgtaaaagaggaaaaaacagtaatactgatatttatgtactatcttactgtattcataattctactgcaaattattcctgatttatcttttctctgacagttaatgctaccaagtttaatgctgaaaccctatcctgaaaataggtggtaaccataaagtaatggaaaagtacactagactagtaatctaaaggcctagggcaggggtctgcagagtatggcctatgaacctaatccaccccactgcctgtttttgtaaagttttattggaacatagttccatgcatttatttatgtattgtctatggctgcttttgtgctatagtggcagcattgactagttgtgatagagactgtatgggctgcaaacataaaatatttactatttggcctttttggaaaaagtttacccacgcctggtttatatggtggtttatatccaatcatggtgggtatttttaggtaatcatgtaactttaggcagttcactttaacctttattttattcattattttattttattttgagacagagtcgcaccgtatacccaggctggtcttgaactcctgggctcaagcgatcctcctgcgttggcctcccaaagtgctgggattataggcatg

SEQ ID NO: 48750 - DNA, 1069 bp, Homo sapiens
cataataacatgcacatgctcttggcatttatttttctggctatcttcatctctcaattggattttttttagcaggctgctaaaaagtctctttgcattcattctttccctggtccattttcacactgtagccagaattatgtttctaagatgtagatctgattattcttcctctcttgtataaaattcttccatggctatccagttgctcttaggaaagtccttcacctgtcaccacttcttaccccattctgtgtcccagccacaatgcactttttccagttctctatagtactatgctctcttttgccttgatgttgttacacatgctgctccttgccttggggatactcctctcctctacccttagcttagctatacctcctcattcttcacgtccatgcttagatatttcttcctctagaaagtctgaattaggtggttctccatgtgcaaacacatgtaccataatgttctattcatatttctgtttcaatacttatcacacgatattgcttctttgtttttctctctgctataagacattaagctgtataagaacaatgaccacgtctgtctttctcattgttgtatctccagcacctagaaattgtagtctgtatttctggcacaacactagtttgttgatgattgaaccagtgattaatgtgctttgccaggaatcttttctctagaaacctcagagaagaattacagttctctggttttgtgctctgcatatttttctatcttctattcatactaattcaattatcaacagaacattgctttgaaccttttaaacctctctaccttgcccagaagcacgtgtaaagaacatgtaaaatgaaaaactcctgcatatacttaccatacgcttcctatgtccatcctatctaaaattgcactcccacaacacacatgtagttactctccacctccatctcccctgtctccctttcctgctgtttttcctccttaggatttaactaccttctaacatactaaatacttaacctatttaagtaactaattgtgtgtccatttctaagatgtaaggtccatgagg

SEQ ID NO: 48751 - DNA, 1048 bp, Homo sapiens
gtaagattgagagtaggaattcattgagattttaatgaattccatggattgtcttaagagctatctaaacttggaagaaaaataacttccagagcatctaaaattgaaaataaaagatcagaagcaaatgaaagatcaattccacacagcttttcctctcttagacgtccctcttctgccatatcctgtaaacatctgaagtgttctgagtacatttggagagaatatttaatgatcacactgtgattagacatgagtagtccctgccagtgggatgttcctgtcctttgcattttaaccacatgttctgtgctctctgtggtaaagataatctaacagtaataaaaacttatggagaaaattacccagagctcctttatcattacgatttttaatactctcttctaatccttatgcacatgtgtatggatttatgtactgcaaatcattgttttgtaatacattctcaaaaatgtgctttaggtttttacaactaccataatattttgtaattttccttcattactgtaatttgctaaaccatttctgttttggtagataattaggtagtttccagttctgctttttagaagatactacagagaacttctttgtgcatatttccttagaacaagttccagtagaagacttactcgcaaaagcagtggaattttttcttagtattttctgttacaggtacagaagagtgcatacaacacacagttttgtcgaatagttatgaagtgaacacttgtctaaccactgcccgagtcaagaaagaacatttctaaacatgtttgccaatttaatagatataaaggaagtatctcaaggttgctttaactgacatttctttaacacatgacaacatttttatgggggaggggactagagagaaaatgacatatttttatgtgtgcttatttgtatctcttgaattctgtctgcatcttttacccattacactttcaaatacttgtgaaatcattggtcgagatgaattatggctataaataaaatttcactaatctaattatcactgatttag

SEQ ID NO: 48752 - DNA, 1004 bp, Homo sapiens
aagtatgggctttatctgctgggacatgcctgaacacactcaccgggcacacggaatgggtcaccaaggtaggaagacttggaagaagtctcctgcttatcaggctttttgagggagggcgtggaggatggtagacactgccttataagtgttaggtgagtcataagatggaattgctgtacctacaaagcataatggtacacaacagtgaccagcaagtagaaggtacttaatacatggtttaacaaataaatgacttatggacatggaaagttgcccacaatatattaggtggatagagggggcaaataaaacagattacatacaaaaaaatatgtagagtgtgataccggtttctgaatgtgttcatgcatcaaaatgttgaaggtgggtatttctggtgggattgtgggcgtgtttttccctttagaataaacatgtttctttcttaatcagaaaagcaattttcattttgaaaaaataacgcttacaagaagtaggacaaagaaaactgtacaggatctttagtaaaatattgtaatgttttcttttttaaaaaaaacaagattgttgtgaggatcaaatgcagtattaataatggatataccacgcagaagcacttttcttgagtttaccatcccattctatgagggggctgagaaaacaggagtaagcaaaatagacccagtccttaccctgtggatgatagtctaataggagaaatagttttattaaacaatttcatgggtaaatatatcatttcaaattgtgttaagttttgtgaaggaacagtacagtgttctataagacagtctagggccaggcacagaggcttacatgtgtaatcccagcactttgggaggccaaggcgggcggatcacctgagcccaggagttcgaggccagcctggccaacatggtgaaactccgtcgctactgaaagtacaaaaatcagccaggcgtaatcccagctactcaggaggctgagacaggggaattaacttg

SEQ ID NO: 48753 - DNA, 1024 bp, Homo sapiens
cggcccaacatttcttttttaatgtaactattaggacattttaaattatatctgcagtttgcattatattttctgttggatagcaccgttctagaccattggctctcaaaatattgctgatgagttagaatcacctggcaaacttttaagattattggaccctgcctcagatgttccccaagttaaactctctgaaaatagggacctgcctgtgtgttttgataaagttgtatcacatggccattgagaaccaaccaagtcctacccctctttttatacagaaggaaacagtctaaatagcaaagtgacaataaatacagtctttatttcagtatgctatcatagttttcccaggttaaaattcatactctagctctttcataagtgatggctatttttccattgtctcaaacagtggttcttgactgaaggtagaattgtggctggctttagtcatttcagctttttaaaaactggtcatttggtgctttcctaggatactgtgccattatcatagtgactgtatttagtggattctcaaaaatgtctttttatttgttgaggcttattgaagggtcattgtaagaatgaattaatcattaggattttaaacttaaagcaaagtcctgaattgtcaccatgattagtatagaattttcatcagaggcagaaataaagccaacttttcccttcagaatcttaagaggctttacaaactttttgttgagttgtgaatatctggggataatttatcccaggttttccttgaggtttcttccttcacgtatttcaagatgactggagcaattagcagttagcttttgcagaagttagcccaggctctgaggtttgtccttgacttgccttagagtggaatatatttcagcaaacacctttactatttaacaatccttatttgttcagaactgttgggtaatggacaagcatgcaagtgtaaacatgcagtcatgtgtaatacctatttatttgaagtcaaatcagagagctcgtgatagccaaggat

SEQ ID NO: 48754 - DNA, 1051 bp, Homo sapiens
attttttgtagagacaggatttcaccatgttgcccaggctggtctcgaactcctgggctcaagcactccgcccgtctcagcctcccaaaatgctaggattactggtgtgagccactatgcctaggtcctcttgctttaaaaagtttttttcttctctcatcaaaccttatttttgaaatgtagtaaaaactgcagttacttggagtggaagtaaatgggaaatattcactgaattctctaactacctggaaagttaatatctacaattctacattttaagattattctcttggtgggtctgtatgttaatgtgatttttattctgattaaattcatcaggtttgcatatttaaaattacgctgtgcagtggttgaaaatgatccaaagtattagtttaatttttctaacagcagcatccctggaactgtgaagagaggtatttgtgacagaattgtacatgtgtttgtgtcatcttgttacttaagagattgaattctcattgtggtggaattgggaaaccctgaatttggcaataaacttagtgactctcacattagtgccttgagtaagcaatagacagttttattgaagagattaatggctaatgacattgaggtagttatctttctctttcgcaatttatttctgaaatggtaagaaaggaatctattatgctttgtgctgttcagtagatatttacttatgggatgcctactgtttgaaaaacaatgtgagggcatacacggatgaattagagcagttttttcttgtggaacatacacactgggaccaggaagatgacctgactgaggtaaaagtctctgtgtggactatagcaaatcaagaacacttgcctttctaaagagtgcagctggtgctccattgtaataaattattgccatgtgggtgggattcagggtcagagttgttagatctgacttcaagagaagcctgaaatctagagttctgtgcaatagtctgattttttttaaagtattattaagatttttaagatactgaatggggagggatttttttctttcgtgcagt

SEQ ID NO: 48755 - DNA, 1137 bp, Homo sapiens
tgttaaagtatgttttctcaaatgtgttttcttttgtgtgcatggaaagtgttcagataaatatggtgtattaactgtaaagttgtaatgtaactacgcataaagttgtaatggcagattttttacactaatttttaatacttcatttgttagcagtcttgcttgaacagtctttttgagcagaactaatacaatattttgatgtgccacaggtaaatttttccataaccttatggagagaaaggactttgagacatggcttgataacatttctgttacatttctttctctgacggacttgcagaaaaatgaaactctggatcacctgattagtctgagtggggcagtccagctcaggcatctctccaataacctagagactctcctcaagcgggacttcctcaaactccttcccctggagctcagtttttatttgttaaaatggctcgatcctcagactttactcacatgctgcctcgtctctaaacagtggaataaggtgataagtgcctgtacagaggtgtggcagactgcatgtaaaaatttgggctggcagatagatgattctgttcaggacgctttgcactggaagaaggtttatttgaaggctattttgagaatgaagcaactggaggaccatgaagcctttgaaacctcgtcattaattggacacagtgccagagtgtatgcactttactacaaagatggacttctctgtacaggtaagagatgttgaaactgctttttgggttttgttttgtatttcatagggtgtaatcttgaaccagtcttgagctttgagaatgacaagtgttgattatatgagatatgtacagtgactttttttctctaatcctgagtggttccccccccttatcctcttccttctctctagagaacacaatcatttttataaaattttatgagaaaaacacttcagactgtcttttaaacattatgtgaattacaaagctatagattactttttctttgtgtttcctccatgtgtagtcctctgttgctaaattctgtttctttttctgttggcactgatatttgaggaaaaaaacagtggaaaaattggtatctaatcctagcaagtagttagatcattatggccaaattacttaacctctc

SEQ ID NO: 48756 - DNA, 1046 bp, Homo sapiens
gctgtggcctccagcttggctggttttgcaggccgccagcaggaaggcgaaggtggtagtacagcaagaggcactggcggggcagcaggcctgcaggagctgtttttccattgctaggcctgacccctctctacctgtgagcgttcagggggtccctgagatagtttagatgcccccccatcttagacctcagctcccacagtgccttttaagggggacctcacctcctgtgcacagcccacccactttcctctgcttccctggcacagcccaggcatagacgagctggcgttggacccagttcttcccccttttcagccccacagctgctgccacaggggccaactagggccaggtggaaggggagctgagaagccaacccctagcccaggggtgctgtgggaactgggatccaatttgtagcttcctgcctggcttcagagagcccagcaaccttctaggcctgctttccagacttctgagatagcctgggatgagcaatcctgttatagtacatctggaccttccctacctgggctctggggaggctgtgggcctggagagggaaaaggagggagggggtgtctgcaccacctgggaagatagcacaaggcctaatgaggtcaccctgactccccaccccagcatttcattcataccagataatagctgcattactgccaactgaccttataaccctctgcaccttcaaaaagattcatggtttttaattgctgcttttaataacatttgttaaagttataattaatgtgtctgatttatgatttaaaacctccctttgaacaatcacttgtcttccctatagtgaattagctgctgggtggcagaaggaattggctctggcttttgcacttggtttactggaggctgaggaggaatggcaggaccctgtcctctggccaccttgccactcctaccactgccagcaacattctcacccttactgccagagagaatatggaatcttttgtgagtacccgacctttgggggcaaaaaacattagttgagtgccactgagaggtaa

SEQ ID NO: 48757 - DNA, 1037 bp, Homo sapiens
ttattggatatgttttctgtaacttgcaagtataatttaaactagtggatctttcaaccaaccctaaaaggagacagcaaactacaacttatcatcaacctaaaagaggtctcggccaggcacggtggcccatgcctgtaatcccagcactttgggaggctgaggtgggtggatcgcctgaggtcgggagtttgtagaccagcctgaccaacatggtgaaaccccatctctactaacatacaaaaaattggccaggcatggtggcgcgcacctgtagtcccagctactcaggaggctgaggcaggaaaatcacttgaacccaggaggcggaggttgcagtgagccgtcatcatgccactgtactccagcctagcaacagagcaagactctgtctcaaaaaaaaaagtccttaaacctgttctaagaaggaaaaactagcatttattgagtatcaactgtcaggtgctttcatgtccattatctcatttatcttccccataagccattttacacaggaggaaaaggctgggaggctcagagctatgaactgatttgcccgtgttcacacaggggtagttattagcactcacaatgtctgactccaaaattctgcctttcccatcactccatatatattgtatgaaaaaacgcttaattttaaattaagacataaataaaagaaggatgatatcttaaggcacagggtccttagtttgcagttggcttcatgctcctacttacctgggtaagtcttgttactttttccaactcttccttgagctggttggcttcagcatcccttaggtttagccgagcctctagctcagcttcataggcactgagatctccctgggtctgctgcaaagatgcattcacctcatgctgctcttggagggcactttctagctctgcaagctcctagaaagattcagtgggtttaactatggaaccctcactgtgctgcttaagcatttgcaaggcattataagtaacttgagcactgtaaaccaaatgctggccagctactgatgcctgcc

SEQ ID NO: 48758 - DNA, 1077 bp, Homo sapiens
cttatctacctctaccaagtctttgctaagacaagtttttcagagagttgaaggcggcataatctatatttttctgaatctcctctagattatacaccccacggcttttaagtactttctatgtaatatattaaatcctatcttacgagtttcctcttggctcagcgtggtggctcacgcctgtaatcccagcattttgggaggccgaggcaggaggatcgcttgagcccaggagtttgagaccagccctggcaacccagcaagacctccatctctacaaaaaattttaaaaagtggccaagccaagtggtgtgtgcctgtagtcccagctacatgggaggctgaggtgggaggatcacttgagcctgggaggtcaaggctgcagtgagctgtgatggtaccaatgcactccagcctgggcggtagggcaagaccttgtctcaaaaaagacaaaaaacaacctcaggctattgttttgtttttaaaaagagctgctgcttacctgattttgtccaagttgagagtcctctgtgagggaagactccagctgagacagactgggtgatgacgctgaatctgcagaggtgctggtgaccaattcccctaaagcatctacttgtctcctcaaactgtgtaaagtgccctctgtctgccgctttcctttaattaatacttctgcttgcttggacatacagtgtcggagttgggcctgaaaagtgtgataagacttagggttttacacagaagaaatgtaccagaactgccgctcagcttcctcacatacatttgataggcaaatctggctaacagtaggaatggctgtcaaaaatgctcatctttaaaaagaattgtaggaggtgccaggtggatacttagtgtgcataaacctttacttttctgtgttgtcattaacggggtctttcacttggcccagtttttccatgctagcagtgcttaggatttctgtatcccttgcttctccattaaattattgcctcatctcttttttccttttctgttatgactgagaagatcagtttatacttgacaactggagtgtctcctgattatgtattt

SEQ ID NO: 48759 - DNA, 1555 bp, Homo sapiens
cgcggcgccggcctgacaggactcctgggcgggggcggaggtgtcccctgcgcggctccggcctgagcctcctgccctccccaaccggcggggcgctccgaggcgtgcagggaagggtgtgttccggcctcgccttccccgccttctcggcgcggctgggcaggaccgcatctcccgcgggcccccctctcgccgctgttccccgcggccgcagcccgcccccgcagggtgtacccacgcgtgccgcgccgccctgcagcccgcaagccccagacgtggcggtcccgtcccgtaggccgcgtctggctctgagtacaaaggcagctcttcgcagccctcttggcgtctcggggcagctccggtgtccttgtcgatgtggggagcccggccctgcagccgggccgggccggggccggggtctgggtctgtgcgcctgtgcttgcgatgtcctggttttggtgcgttcctgtgaggcccgtggacagcctctacggccctgaacctacagagcatctagaaataagagaaagttgtggcatttctagaatctaagagaagacgacagagctggagtgttttaagcgttttaactgtgggccaggtacatatttatgtatttttgtacctatttatcttgccccgcgtagccctcggagataagttgtctccacttcataagtgaggaaactgaggcctaaagttgtgatgtgtgtctggctgttgatggtacattacaaactggcttcggctcacactgtggctggtggtttctgtactacattcaaaaattaggctagggttacagacatgaccatttataatgtagttacaactttattccttttttactgtgttcgcattggatgacagctgattacccttttatgacctaaagtccataaagtcaaccactacactggcaaatcctcatgcttacaaaccccaaaggagagatgccaggatttcagtttcatatatgaagaagaaacgggttccaagaggacaggtgccttcctggtgaccccacagcaagtgtcagagcccagatttgaactcttgcaaagtttactgctcatttcgttactatcccaactgcctttaaaaaattcttttatttttctaaggtaaatattgtagaggaacaactgccttttatttagatttgattgttgaagacaaacttgaccttgcagtaatccagctcctacccctttattcccccaagcctttccaaattttttcttccaagttctgtttaggcagttttatttgatcatgcctagaggtatgtcgtggttaagagttttggagtcatactgtcaagggttctccctccagtactgccacttcctagttaagtgatcttaagcaagttacttaacctttcggactcagtgtccttatctataaaggggataattggacctgcatcttagagttgttgctaggattaaatggggtttaaagaaagcccttagcacattgcttggcatatagtaaatcagtgcctgtaacagtgccaggcacatagtgggtgtttaatatcttttgaatg

SEQ ID NO: 48760 - DNA, 1096 bp, Homo sapiens
tcctctaccccatgaggccctagcaggattgtccgtcacttgatcccactcacaagccccaaacaggtcctggttccaccacaagctaacccaactgactcttccaagaatttgtatcttgagaaaaaggatacttggccagaaggatattgacgcagaatcatctggaaagcaggccctaaagagatgtccaggaatttttgcctctcccgaggcctgattgttgaagttctcttttggttccaggagccacccaatatacttccagtacattctctttctttgcttaggtttgcttctgttacagagcatatagatatcagcacccaagagctgattgcagacagcagactttgttatgagttgaattgttatgagttgaatccccaacccctacacaaaacagtgttgaagtcctgtcctctaggatgtctgaatgcaaccttaattggaaatagggtctttacagaaataatcaagttaaaatgaggtaatcaggctaggccctaatagtaatataatgtgactgatgtcacttaaaaaggggaatttggacacagaaacagacaaatacagagggaagacaatgtgcagacacacagggaaaatgctatgtcaagatgatggcgctgcaggcgatgtgtggggttatgaatgggccacacccaaactacccaagcccgctggtggtgggagctcaggagcaggtgctggcagttagttggaactacctctcccagccttgccttacatacatcacagtatcaagagtccatggtctactagtgatcttagatcacgttaagtttcccatagacgctgatattgtccactggacattactagatggcacagagacatgggcaagttctagaagttggtggctccaaggcagtggttcaggtatttcaagggactggggatattctccaaacatcagtgtctgaggatatgctttgttgggtattagttggatcgggaaaaacccattgacagaggtcctcttgtactggctgaagatttctttgatatcatgcgatggccaaccaatcctcaacgtcaaatctacccagaggacatgattcggaccagcatt

SEQ ID NO: 48761 - DNA, 1027 bp, Homo sapiens
caggcactagtcaggcaagtcagtttcagaaaaagaagcatatggaaactgagtatgtagaaattgattttcttaaaactactctggcatacgccctagaaagttttgtggaccacctgaggtatacatacccccggttgaagagtgctgtgtgtccccatgaggttttctccagttcaacccctcctttcacctgtccataggttattgcagccgaaggagaaatgaatgcatccagggctctgaaagaagcctccatggtcatcactgaatctcctgcagcccttcagctccgatacctgcagacactgaccaccattgctgctgagaaaaactcaacaattgtcttccctctgcccatagatatgctgcaaggaatcataggggcaaaacacagccatctaggctagtgtagagatgagcgctagccttccaagcatgaagtcggggaccaaattagcctttaactcataaagagagggtagggcttttctttttccatatgtcaattgtggtgttcccagaatgtatagcagttataaaaataggtgaaagaattgttagcttgtaaatactgagagattggtgatttatataaggtaatctgttagtcttaaaatagttaaaagtttgtatttttagattattatgtagtaggttagatccctcttgttttgacttccactgactcattctgaaccccctaagcacccaggccagaggcaagaacctgggctgtaactgccacctgacaccgctgactggctaaatgctttgcagaaagtgatgaccttacaccacaaccagcttctccaggtcatatgtgccttacctccagagagtctttttttttttttttctgagatggagtttcactcttgttgcccaggctggagtgcaatagcatgatctcggctcactgcaacctccgcctcctgggttcaagagattctcctgcctcagcctccccagtagctgggattacaggctcatgccaccatgcccagctaatttttgtattattatt

SEQ ID NO: 48762 - DNA, 1048 bp, Homo sapiens
actataaagtccatcaaacattttaaatcggcatgtaaaaatttttcatcttgaatttatgtacttgccaagaatataattcctggcatgttgtaaatattgacatttttaaataaaactgttaacatcattcttttaaatgtacccaatgagaaataataatgatttagttatccattaaaaatatgtaagtaaactcttaacagtcaggagctttttattgtttttttcttcttcttcttaaacctaagttttttattgcatcttcacttccgccagattcttttcctaacatacattttgtcatgaattattttattaacatactgcaacatatttagtccataagttagaattaatttttaaaaatttcctgtaactaaaaacaaggttctacaaacatttcagaatttctcctaaataagaagtcaatttttttttttttttttgagacagattctcattctgtcagccaagctggagtgcagcagtggcatgatctcggctcactgcaacctcccgggttcgagcaattctcctgtctcagcctcccaagtagctgggtttacaggtgcttgccacaacgcccagctaatttttgtacttttagtagagatagggttttgccatgttggccaggctggtctcgaactcctgacctcaagtgatctgcccgccttggcctcccaaagttttgggattacaggtgtgagccactgcacccagtaccagaagtcaatttttactagaaatgcttgtctttataagatgaatgagaattaaatcgtacatgtatagatggctgttgtttaatgctagaatgagacacgattcagcatcaattttattcctatttttcatttttatagctataaggactttgaaaccttatttacataaataagtagatggaaatggaagttctgtttaaagtagtatcatacagttcttagcactttgaatttatgtgctaaaaaaatcatatcacagtctttcatcaaaaaatatttataatgacctgtcagctttcagtttagtaaggtactca

SEQ ID NO: 48763 - DNA, 1033 bp, Homo sapiens
ttgtcatatagacagtctcttgctgttgccattaggaaatttttgttcttccagggtagagacaggcttttcccagggactgtgagagaacaagaggaaaaaaagattcatgctggcaaccagaagtagaggggtgtagaaatacaggggtagtgcaggggtttaacacgtgggctgtggagacagaccacccaggttccaatcccagcctcctcgcttaggccattgacttaaccttcccacgcttcagcgtcctcaggtgtaaactcacgttagtaactgtgactaactaattggattgttgtgagaattcactgaaataatgactgtattcattgtcagatatttttaagcacctactgcgtactgggagctgtgctggggctgtaggtatagtcataaaccaggcagtaatggtgcctgcccttctgggaactttccgtctagaaaagaaataggcattaagcagacagttatgcaaatagccattggagtgtgataactactctgaagaaaaaataatgtatactgtgggcttagcattgtgcaagatgcagattgagttctcaaaaaatttcttgatgatgatgatgaaatactaagtcggggaggttatagagaaaggaatggttgattctatctccaaaagccgtgggaagcattttgggaaaggtgagagagaatcttaaatttgaaagatggctgtttttctagtggatcatttataaaaggagggagggatgtggatgtggaggatgagggaggcagcaaccaggccatgcagacctggaatgctctctcaggcctggggaccttgttcaccgtgccttgggcagttggtgcaggcagggcttatacttcaaaaaatctttctctgggttccagagaaaagctaagcaccagccaattcatctacggaaaggcagtggccaactattcagtagctttaaagggggctctgaagtccttcaggcaaaaggcattctcctccctttctgccaaggtggctagaagagtctgagcttttcattca

SEQ ID NO: 48764 - DNA, 1071 bp, Homo sapiens
tgcagtttcaggtacattgcaggcctctgagagttggcccattgtgactattacctttggaccgaggccatcagagaatgtgtctgaacttctggataaggaaatgtggttacagtagtcataggaaagcccccaagcagctgggctcatttgagataagagtcccaggggtagatgatatagtctatagtgtagaacctgcagatatcccccatctgataacctgtgactctgtgagagagagaaaatgcttgctgaatgtcagagcagaaaaggctctagagtttcccaacacgtgttacaatgacgaactagaagtccacagagaatggcatggctgaccattcctgtggccactgaccattcctgtggccctgggtctgctgtttaactcccatctgcgtcagaaaagaagcatctggactccactaaaaacacataaatggagggcttgctgatgacttactcaaactcagtacaggcacgaaaaaggagagtgagataaacccgtcaacatcccattaaggacctttaaaaaaaaaaacaactcggtagaaactccaggctaaacagatcaagcataaacccagctgcacacaattaaagacacactaagcctaaagtgggacacagggaattgaaacagtctgtgagaaacatctttttctccaaggttcctaactactctggtttagctaatgcttagagggaaatgcctcgcacagaacaatggaaaaagtaagaactcaggagtcaggcagacttttattcaaaaccacctccatcatggcacacctgtgcactctggtaacttaaaaggatgttcttaaagaatagtgaagtccaggaaaatatgttcatcatagtttgggtggaggaaaaagctttcaaaataacaaatacggaggatctattttatatagataaggaaggataggcaccaaagtgttcactggttgcttctgggctgtaggatgagaaatggtttttattttcatcttgattgcccatggttttattttttctttatagaggatatatattatttttataaagagagaaaagcaatga

SEQ ID NO: 48765 - DNA, 1135 bp, Homo sapiens
tagtggcggaagggtctggtggctatgggaaccacgttctgaacaattgtgagggtttcctgtaaatcacacctgcgctttaacaagcaaggaacccagacagaagatttgaaactggggcagtctggccaactcaggatctacagatatagttcctggatggccatactcagggccaaaatctttagggtgaggccagagtacagacctcagtgctgtctgatacattaggaggatctttcctacagtaagcggaggaacaagagatcttcagttttatcttagaggcaaaaatggcaccgcaaacttgaggtggggtcgggagacctcagttctcatcctgaccatactgccagccagttgtgggacccaagggaagtcacgtcacctctctgagcctccgtttcccccttgacttttgagagtactgggtgatgatgatccctgaggattcttctagttctaaaaattcaatgattctatgagtattaataatcttgatttgtatggcactattctggcaaagagcagaagtattcaggaatccaatgagtgacggagactattgaccaggtagtttaatttatttaaggcatatacatggaattcaaaggagaaaatattgctctggataatatattgaactgttagtgtcttcggcatagcaaaagctttccagagggaaaaatttcccatcagtgcaaacttgacatttttcacttcctggtccataactgccatttgtccagcacacttatatttactgtaaagggccaagtgtacgaatgctttggttgaatattaaataactacataaacgtcaaggtcacagttgcaagaaagcctcagtggaaggccctgggaggcttgcattgatctcttgtgaagttccattctcggatcctgctgacaaggggaaacaattgatgtggaccattattaaggctttaagtgtttctccattgttaaagatcttttacaagcccagaataagtgatagtgcccaaggaattggcaaaagctttatttagaaatataggctggtcaaagagataagcgcaaggcacaagccagagtgcagatgtcctggcttgggcttacacagcaaaggtggagagctgagaggagtctgtca

SEQ ID NO: 48766 - DNA, 1088 bp, Homo sapiens
actaatgatgttacaagaaaaaaaatccaccaaccttttttttttttttgagacggagtcctgctctgttgcccagactggagtgcagtggctcgatcttggctcattgcaagctccgcctcccaggttcacacccccaccattcttttaatgttttataacagtgagacatttcaattccctctgggcaaattaatgagataggatcaatgtcagtgtcagtccttataactgaggaactcctacagattgcatttttcccttgaagtataaattttggtattctttttatttcctgtccttcattcaaggagacagattttatgctgaaagatgtgtgttttcctattccatgcctttaatactcatgaaacagtaaaagaagtaaacttaattaagcctctcataatgtaaccagagtccactagatgatattctctagggtacaagacggaaggaatcccagaagcacgtaaggtggccccaaattaaagaaggtattaaattttaagtgcaagatataaatgcttccctattcattacctaagggggtgacaaagaataaaagaataaactaggtgaaaactcattccttcaaactgatgcttcatttttataaagagaaaagaacacccgtccgttacctcaagtttttcattaactcagtagttctttccaaaccatgagtcaccgctgtggggaacaactcagaccttttttaaaaatcctgcctgaaaaagagaatatgtcgggtgggtggttttaaaagtcccaaataatggctgttttatagctagtagcccactgttgttaaaacctcacagcgtctcttctccccaggcatgacggagatggtgcgtaaaattactctgagcagagcagtgagaaccatgcagaatctctttcctgaggagtacaacttctaccctcgctcatggattctgcctgacgagttccagctctttgttgctcaggtagatggcactccgtccccatgacccctgaattatattatgcttgcaactgtgtcctgggtcctgtgtgctgggagctgggacagggggtcccagggagctgcgactaaggga

SEQ ID NO: 48767 - DNA, 1138 bp, Homo sapiens
ggaagagaacattcccccggcacaacgactttaaagtgcagaaaataccacaacactatttggtcaggaggcatcctctacgtggagtaaggtgctgtattacagttagttatgaaggctttcagttcaatacggtaacattttaatgttagtaaacctcaagcaaaaggattccaaaaaagttgaagttttgctttgtttactttgcggtcagctctagtgtttattatgcaacaattctaatttcgagggagaataaaaggaaatagctgtgattttccagactcccttcttgggaagctcagaacagtgtcctcagtgagttttcttgactattgaacagtccatgttagagcagtttattagtgctttttaagctcctttatttcttacttaatccttccctacatccttctaaacaacaactaagacctgggcactgacgtcttgaagctgggatctttagatttattgcactttttaatacgctgatggaagcaagaagttggttcttaaaactttccttcccagatgtttacccttttctttctgaacgtgggaatttagaggaaactcattcattctgactgcccatttggaatgtgtgataatttgggcatgccaagctgacatggaactttgtattttctattaaaaatagctttgccaagcacatttctagtatcagtaatggaactgtttggtctctttcagggtaaaggccatttgtagccaccatttttggcaatgatatttgtcttaagaaacaagcatgatagccgggtgcggtggccacgtctgtaatcccagcactttgggaggccgaggggggtggatcacctgaggtcaggagtttgagaccagcctggccaacatggtgaaaccccttctctactaaaaatacaaaaatttgctgggcatggtggtgcacacctgtaatcccagctactcaggaggctgaggcaggagaattgcttgaacctaggaggcggcggttgcagtaagccaagatcgtgccattgcactccagtctaggcaacaagagcgaaactctgcctaaaaagaaaaagaaaaagaaataaggatgatgccaggcatggcggcttacacctgtaattccagggctttgggaggccaa

SEQ ID NO: 48768 - DNA, 1042 bp, Homo sapiens
gggcaccatctaatcagctgccagggcatctagaatataaagcaggcagaaagatgtgaaaatcctggaatggcttagcttcccagcccacatctttctcccatgctggatgcttcctgcctttgaacatcggattccaagttcttcagctttgggattcggtctggcttccttgctcctcagcttgcagatagactattgtgggaccttgtgatcatgtgagttaatacttaataaactcccctttatctatctatctatctatctatctatctatctatctatcctattagtcctgtctttctagagaacccagactgacacatccccccttcagctttgcctgtcaccactaaccctctgctcctgtgtgtggaatttctgagcattccccaagcatactgcctggctcagaggcatgacttgcttatgtgttgaataaatgaatttatggaccggcaacaccatggtgcctttagaccaacgctctggtgggactttttattggggaaagtactgaattggactgggttcctggataactggggaaaagctgccctaagagaagtcaggtgtgactttggataaagttgtctgatatcctgggtgggaggtaagtgttgctgaaatggaaacctgatttgcattgtttccatttcagttaataaaccatttaaagtttcgatatggaagagtctaggtaatttgaggcctagtggtgaattgatataatttaccaactgtgaggaagtagagaactgggagattactgttgataatttgcagggtataatggagttcatttataatttataattgatattggaactcttttccatgggctgaattatgttggaatggagtaagagtcatttaaagagattattttgttgtttgtatcaccctcatgaattggaaagtggaaaaagaacatagtgctaaattcgtatctaatcttttcagagctatttgctaaataaactggaattttaattaaaactgcaagccaagaggtaaatcgctttagaagtttgtgaagttt

SEQ ID NO: 48769 - DNA, 1032 bp, Homo sapiens
catcatttacttaattaatgccctattgacacacccttggctacctacagggtgttaccactgtatgtaaagctgcaatgaccatatccttgtatatatgtctttgtgtacttgtgtaagaatatcgtaggataaaaatctaggaatgacatcatgcatttaattctcttcaaaactaaggtataaaatttggaatgttttcactctggtaactattgtggagtgaaagaattaggacttgagatttggcttgtcataagaagtgggaaattaagtacattgtttacatttaaaaccttttgctcaggctgggcatggtggctcacacctgcaatcccggcactttgggaggcagaggtgggtggatcacgtgaggtcaggagttcaagaccagcctgaccaacatggtgaaaccctgtctctactaaaaatacaaaaattagctgggcgtggcagtgggcgcctgtagtcccagctacccgggagactgaggcagaagatcctggctgcagtgagctgagatcgcgccattgcactccagcctgggtgacagaacgagactctgtctcaaataaattaataaataaaaaatcttttgctcacatagagttttgtatcctcttctcatggtgccttggatttagattctgcagcagtaatattggcagatttataaaccaatgcaaacctactcttagtttatcttcccacatgaataagttgtctaccagctttccgaagcccatacctgtcaaagaagtcagattcaccgtaatagaaacaaagtgcctcttttgtttttgttttgagtggtagagaagcaaacacatttgaggacttttctgtgttagggagtttttataggttattttattaattcttacaaatcctttgaggtgcaattattattcctgttttccaaacaaagaaggggatgggttcacaaaggttgagtgacttgcccaaggtatgcagaactaggatttgaactcaagtcttgatgtcattatgatatgggctggctttgtgtcc

SEQ ID NO: 48770 - DNA, 1065 bp, Homo sapiens
aggagccagactaattggattctgatgctgactcgcatcttacaagctgtgtagcttttgcaaatactacacaggtttctgagccttaatttgttttgttgtgtctgcctttcttaaacattttgttacttcaatgtcttaagccagactagtcatatttgaatcccagttcccccagttaccaaatgggtgaatttgggcaagttatttagcctcactaacccacattgtcctcatctgtaaatggcacagtaatcataagctttagaaagatatttccttttttctgctttttccattcaaatagattttatttttttagaagttttacattcacaacacacttgatcagagagtaaagacggttctcattaattccctgctcccatatggacatagcctctcccacgatctacccactgctagaacataacatttactacaatttataagcttatacaatggtccccaacttacgatggttcatcttaaaatttttctttatgatactgtgaatgatccatgttcagtagaaaccgtacttcaagtacctatataatcattctcttttttcactttcagtacagcatgcaattaattacatgagatattcaatgttttgttataaagcaggctttgtgttagatgatcttgccaactgtaggctaacgtatgtgttagcacatttaaggtaggctaggctaagctatgatgaccggtaggttaggtgtattaaatgcatttttgacatatgatattctcaatttacaattggcttattggggtatagctccatcataagtggaggagcatctgtattgacatatcattatcacccaagaccatagtttacattagggttcactcaatgttatacattctacaggttttgacaaatgtataatgacaggtacccactgttatatagtatcatatagaatagttttactgccctaaaaatcccgtgtgcttcacctgttcatccttctctccctctagcccttagcaactactgatctttttactgtctccatatttttgccttttctaaaatgtcatttagtt

SEQ ID NO: 48771 - DNA, 1002 bp, Homo sapiens
tatttcactctgtaacctgaaatgaataggaacaagggttttaaaccatgttacattaacttttctgacattataaattagcctagaatattacaggaacatgattgttatataatttatatcagaacctttctataaatatgtgcttattacatttgaaatgcttccaatgtactttatttgctgtttgtaattccaaaaaggatatgcaaaccagtctgtctatttcatggatatttaatagtgagatcttccatgttgaaggtaatgtatttttttttaagattttaaaattgctattttgttacaaaatagagacctattaacagtttgagagctccttatgtgccctcagggaaagaaccctctgtgcaacagaactacacaaaacatcttcagcacgttctgagggtgaatatatactacataaattgatcttgtgtatttaaccttatctttttaattttaaaattgaaattttgaaacttggttgtgctctgctggagggggttgggataaactgcttagatgtttgcctacttgtccagtgaaattacatttgcatcagtatatgtatatacctgccaaccttattggtatgtctcagaacatttatattaaaataatgcttgtcttgcagcaggtgatcccataaaacaataactccctgttcttaaaaacttactctctttttcactaacaacataggaattgtttctgtgttgagattattctgtgttgcatccattctctatgtagtggtcaccttctgtctgtcatggtgggcttaatgtgaagtaaagccattggttctctgccactttcgaagaaagggcagttcatctgatccttcttcagaatggtacctactgatatcatcgaggaaaatgttacaaatcagacctaggatatgactttttaaaattgaggcatttcccgtcatttggcctttttaccaacaagatgtgatgtacaaatttggaatcaaaggatacaaagcaa

SEQ ID NO: 48772 - DNA, 1036 bp, Homo sapiens
ctaactagtattttaatttttatcataacttttggaaaacaggacttttcaagccaggagtggtggctcacacctgtaatcccagcactttgggaggccgaggcgggtggatcatttgaggtcaggagttctagaccagcctggccaacatggtgaaaccccatctctactaaaaatacaaaatagctgggcgtggtggcacatgcctgtaatcccagctacttgggaggctgaggcaggagaattgcttgaatccaggaggcagaggttgcattgagccgagatcatgccactgcactccagcctgggcgacggagggagactctgtctcaaaaataggaaaacaggacttttctagttacttctgatacttctagtgataaagacatgtctttgctagagactcctaaagtttgctgtagctttcattaaatatgtatagtcacccttaacagtttgcacttaaagctaatttgtttttaatgtcatttcttttttctcagggaggagcaaaaaacaattctgccggtaacttcttgctttagccagccactcccagtgtctattagcaatgcaagttgcctccccatcaccacatctgtcagtgctggcaacctcattctgaaaactcatgttatgtctgaagataaaaacgactttttaaaacctgttgcaaatgggaagatggttaacagctgaaaggaggttcatctttcaaatttgtgaccacaccatggaagcatttacactagctttttatatatataatatatattatataatgtatattttttttaaaaaaaagatattactgggggcatccatttcctgtggactctttgatacttcaagccctcttgcattagcattatgaaaaaaaaaaagaaaatttactttactagggtaacatgttcactttccagaaatgattggaatttggacaacatttaacttaagcttcaagcagctttttatgagtttgtagcaatccggtgcagtaactgagccatttcctattttaaatggcttctataga

SEQ ID NO: 48773 - DNA, 1641 bp, Homo sapiens
tctattttttaggttaccaaaagagatgaagactcttccctaatgcagctgaaggaggaatttcggagttatgaagcattacgcagagaacatgatgcccaaattgttcatattgccatggaagcaggactccgtatttcacctgaacagtggtcctctcttttgtatggtgatttggctcataaatcacacatgcagtctatcattgataaggtttgtgaaattagagatgctgatgttctatcattgctgttacattgaagagtattagaatattctaaagagtctatacacaaacagttggagattcctatgtttttaaatgtcagactcttataaattatccttattttctttttatttttctacttgcaaaataaagggatgcaacagggaaacaaatacatgatactagcataaaagcagtgaggcttacaaagtctcaaatttatctatattctgacctcagagagttaatacagcttataagttttctaagtgtctaatgatgaatttcatagggcagattctgaggtgaaaatttaattcatcactgatactcctactgtggaatctgaagacacttgaaaacgtattaaatatgttgataaattgaaagtatttgagtataaatgtgtcataagaaccaaagtaaaaagcattctcatttctgtttgttagctacagtctccagagtcatttgcaaagagtgtccaggaattgacaattgttttgcaacgaacaggtgacccagctaacttaaatagactgaggcctcatttagagcttcttgcaaacatagaccctaatccaggtatgtgggaatatgctcagttgcttatatttttttctacttttgaggtgaataacacaagagaattactgctaacattcttcccccccaacccccatgcccttggtggcttattttagacgctgtttcaccaacttgggagcagctggaaaatgcaatggtagctgttaaaacagtagttcatggccttgtggacttcatacaaaattatagtagaaaaggccatgagacccctcaggtaagtacatttattacatttctgactgctgttgtctctaactcagtttcatcctgaacatcttaaccagctgttttgttaattggactccgtatgtgactcataagtttctatcatctctattcttttgggaggaacccagtttttagtgtacttggtaaacatttcatagcacaccaagagtttagagggtatcttgggtgtgagtatactttattgcagaatatttttgaccaaatgtagataattgattccaaacgttttgtctcattcttttctactgtgggaaattgtcattttttttctgtattgaatttctatatgtaaatttatggaatttgaattttctttcttttttttttagacaaagtctcactctgtcacccaggctggagtgcagtgacgctatctcagctcactgcaacctctgcctcctgagttcaggtgattctcctgcctcagcctcccaagtaactgggattacaggcaagtgccaccacgccctgctaatttttgtattttttgtagagagggttttaccatgttggccaggctggtctcaaactcctgacctcaggtgatctgccca

SEQ ID NO: 48774 - DNA, 1712 bp, Homo sapiens
agctatgcaagaagaggccttgaagctggtgttactggcattagaagatggttctgccctctcaaggaaagttctggtactttttgttgtgcagagactagaaccaagatttcctcaggcatcaaaaacaagtattggtcatgttgtgcaactactgtatcgagcttcttgttttaaggtaagcagtaagtatctatgtaaagacatgcctgtttgtgagacagagacttcctgaaattcatgttacccagtctagaggccctagcaatgcagaatgcttacaagagttgagaggaaactttccttctgcattgattgcatctgtgataccaccttttggtagtacccattactatctattggcaaaataagagcatatatgtgaagatgtcagtaacggaaagaacataaggaaatcatttggtaaacttgactcttatcaagtaaaagtggactgcagaagcctcatttctttacatttagtgtcttgaaatcagactatattggaaacttcataaggagtatgtaaactttgtaacccattattatgtttgttatctcattctctgtagtgattagattaacacctttaatctgaaaatggcctacatgttatctcagatacaaccaggaaatggaaagttgaggagattggcccactctgcttttagatgttgttttttgtttagtggaaagggtagagaagaaccccaagatattttaaaatgtagtttcattgtctaatagtctagcgggtagtgacagatactgaaagcaagctgaatccttaaagtgtttttatgatccaagagtgtaggttgctggctgggtcttgagaaaggctcatgtacttggaaatagaaaggcctattggcttctatgaaagtaaaacatttaaatttgaaaccaaagcttatttaggttattttgttggttttatagcccccaagagtgaaaatagtacagacagaaaaatgtttctttggcagaacacttagtttgagataacaggtagttgataatagaaatgtgttgaagtgaattcatttaactccactaatgaggcttggacactagctgcctcatagtcatagtgtttagtttcatgctcttagggcaacaattgaaattaatctctggttccacacacaacctcactaggccctgtaaaactctgtatcttttgaatgtgtagttttttttactacttaagtagaaattaaagctatgtaaataccctgatgataatttctctggtagcagaacatttcttcttttcattttttttttaaagcaacagacttttgctctgttgcttaggctggagtgcagtggtgccatcatagttcactgcagccttgaactcctgggcgtaggccatcctcctgcctcagcctccctagaaaatttcttaattatcatgtggtagtggtaatatatgcctacctattagctggattccttgcttgtctatctttatcctctactgttaccaaagtgatgttttttaaagcataaatctgatcatgtcacttctatgcttaaaaatcctcaatcagctctgtgcagtggtttatacctgtaatcccagcactttgggaggccaaagcgagaggattgcttgagcccagaaagtcaaggctacagcgagcctagattgtgccactgcactccagcctgggtgacaaagaccctgtcctctccatccccac

SEQ ID NO: 48775 - DNA, 1008 bp, Homo sapiens
gagaggttactggggaaatttatagcagatggataaagtctgaacccactgataaatcttagcattactaaaagtgaggcaaattttccattatacaaagttttaagatattttaaaaatctacttttatatagaatttaagaatgttacctttagatatttcctgatgtttactttaagaagcactagactaggtgtcacatctcttttgttctacagctcagaaacaaaaatacaacctaacttaaaagtgggtaaataacttgaatagacatttctccaaagaagagacacgatgactaacaagcacatgaaaaaaccctgagtgtatttagttattagggagatgcaaatcaaaatcacagggacatacttgtttatacccacttggccattattttatttcattgttttagagacagggtcttgctccattgctcaggttggagtgcagtggcacgcttatagcccactgtaacttcggaacttctggcttcaagtgatcctcccatctcggcctcccaaaatgctgggagtggccataatttttaaaatggaacataaccaatgttgatgagaacgtggagaatgtgggcacgtaaaatggtgtgctgctttggaaaacaatttgtcagttccttaaaaagttaaacaattaccatatgacccagcagttttattcctaggtatatacccaaaagaatagaaaacaggtattcaaactaatacttgtatacaaatgtttattgcagcgttattcacaatagtcaaaaggtggaaacaatccgaatgtccatcaagtgataaatggataaacaaaatgtaatgtatccataaataggctattcctcagccataaaaggaataaatactgatacatgctgcatgtggatgagcttcaaaaaaactacgttaggttgggcacggtggctcacacctgtaatcccagcactttgggaggccgaggcgggtggataacttgaggtcaggagtttgagaccagcctga

SEQ ID NO: 48776 - DNA, 1062 bp, Homo sapiens
ttctcctgcctcagcctcccaagtagctggggttgcaggtgcgtgccaccatgcccagataatttttgtatttttagtagagatggggtctcgccatattggccaggctggtctcgaactcctgacctcaagtgatctgcccaccttggcctcccaaagtgctgggattataggcgtgagcaaccgtgcccagcctctctcttcatgttctttattcattcatatctcacagttctcaagggagccaatcctgaccaccctaattaaatttgtaacccctcgctagtatttccagtcccccttatctttgctctataatttcacctcttggaacactacaaatttattatgtttttaatttattgattggctacctcttctcctctccactagaatgtgagctccacaaaggcaaaacattttgtctgttttgctcattgatatatccctggtacctataactgtgtccagtgcatggtaagcactccataaatataattatttgttgaattgcattgaactttttttttttttgagacggagtcttgctctgtcgcccaggctggagtgcagtggcgcgatctcggctcactgcaagctctgcctcccaggttcacggcattctcctgcctcagcctctggagtaactgggactacaggtgcccgccaccacgcccggctaattttttgtatttttagtagatacagggtttcaccgtgttagccaggatggtctcgatctcctgacctcgtgatccgcctgcctcggcctcccaaagtgcgggattccaagtgtgagccaccgcacctggcctgtattgaacttttatagcggcactacaaaatacagattttcatcttcattttgcagatatggaaattatgacttggagcagttaagtaatttactcaaggtcattcatagaagtagcagagctgcaatttttacccaagttttgacctttgaatgagaacactctgtcttaataatgcttatcttaagtaaataatatagtaaaaaggtgataagtgctttggggaaaaaaaaacaactgtgtcttt

SEQ ID NO: 48777 - DNA, 1050 bp, Homo sapiens
ccctggtgcctcgagggttgggaactgagggccgcacctgacactcggatggaacccgggccctgcggaggcccctctctctggtagggctttttcgatgcggagcgaccggctcaaatggccaccttccttcgacactggccgagcggacgcctctgacccctaacgaacccacccaagcaaaggcccggcttcactctcccttttctacaccagttagtaagggggtttggaagaggtcctcgaaaccaagtcttctcctagcttttcagctttctgccctggggcttcccgagaccctagcgtagagggtggtggaggcgatctgagtggtaaataggaaccccggccaaacaatgccctgggagggcttaacctcccaggatggggacggccggacctgagtggttgcacaggggttgtggctaggagcaatggcatgaaacacagccaggaaattctgctatggctttcttctttccctctctcatttttcctttttggtgtagcctcttgaggagactcttccaccatcttagaagaatggtagaaagcatctttgtttcccagagaagcagctgtacttttttctatccttagctttcaggatgggagaagatgagggtagctgtcatttccatccttcaaatcccaaggcagccgtttaagataccggcagataaatccttcacaccaaaattgactcaagtaatcactggcataaagtaaatctaatccagtgatttatttatattttcataacccttgggttccctttttaattcctcctctccccttacccacggccttcctttttttcatttctactctccccctacccattgtgggtgggtgagtttgtatcccaaataaagtgctttaagtaatcttttttccaattttgtattggccaaacttttaagttccagtaggaacttttggttaacctgagaaagctaacgttgctataccacagtggtataaagtcactcaaaagcaaagaaacaaatgttagccagtgcagccttttaatggttaaacatacaaact

SEQ ID NO: 48778 - DNA, 1030 bp, Homo sapiens
ttgttcaagaaacattagttaagcacctactgttgctagacactatgctagatactgaggataatgaaggtaagattgatatagtccctgccctcatggagcttatagtctcatgtggtcttagtgaaacaaagtctcaatttgcttttatactagaaataataaagaaagctgccttgctgtattcgatcagttaaaatcagcaactttgtgcttttgtatcagtaaaacatttagttctcaccttttgaaaatgcaaaccactgaagtgatttacagtctcctccatttttggctggagaggtgttctgtttctgtgagacatttttctaatttttgtggaacttcactttcctccttctttgcttatacgtgtttgttagattatattgcaaagaagtcaagttactgatatccagtattttacagaggaagatgactttcaaaactagtcatatttctgtagaggaggaagatttttaaaacctttatcattcagcatttgtattttatggatccccaggagaactaaaaaggagatgactctctaccatagtttggtttaaaaaaaaattactctgtcagttatttatttattatttaatactaaactccaaactgaagtggctctgaggtaaatcagatatgattttaatttaagtttctttattagcagatctataaatggaaggtgaccaatgtcactgcttctaaaatactgtcctaaacaacccagaagattttatttcagctcatgaatagctgttctaaatctgttgtatgttagacatactatgaactacctcttcacttattatggggaagtttccttaataaaagtgtgacgattaaagctctggtgtcattggttattttctcactctcccctccttctattcttttttaattgctttactttgaatacaggaaggtcttctttatgtatagtcttaaaaatacatattaagcatgctgagcttgccttcagaaaaaaatacgaattaatcagaaagttgttactagattcatt

SEQ ID NO: 48779 - DNA, 1030 bp, Homo sapiens
caatttttactgaatgattccagagaggtgaaaatctccatattacagagttccgaagtggggagacaattgctcttatcctgttatagtggtgtgctggaattccctgagatggaactggtaaattacttgactgctgcaagttttcttcagatgagccacattgtagaacggtgcacacaggccctgtggaagtttataaagccaaaacaaccaatggatagtaaagagggatgtgaaccacagagtgcttctccccagtcaaaagaacagcagggagatgccagaggctccccaaagcaggactcaccttgtattcatccatctgaagacagtatggatatggaggacagtgatattcagattgttaaggtagaatctattggggatgtatcagaggttagaagtaaaaaagatcagaaccagtttatttcttctgaacccactgctttacattcatcagagccccagcactccctgataaattcaactgtggaaaacagagtaagtgaaatagaacaaaaccatctccacaattatgccctttcttatacaggcagtgataacatcatcatggcctcaaaagatgtctttggccctaatattcgaggtgtagacaaaggcctacagtggcatcaccagtgcccaaagtgtaccagggtgtttcgtcacctggagaactacgccaaccatttaaaaatgcacaaactctttatgtgtctactctgcggcaagactttcactcagaaaggcaaccttcatcgacacatgcgtgtgcatgccggaattaaacctttccagtgtaaaatctgtgggaaaaccttttctcagaagtgttccttacaggatcatcttaaccttcacagtggagataagccccataaatgtaactattgtgatatggtttttgcacataaaccagttttgaggaaacaccttaaacagctgcatggcaaaaacagctttgataatgccaatgagagaaatgtacaagacctcacagtggattttgattcttttgcatgtacaa

SEQ ID NO: 48780 - DNA, 1029 bp, Homo sapiens
gaaggggaattacatctaaaatcttcaaaaatttttcaagaagaatacattctgtatatattacttaaaagttgaaacaaaagcttgataacttggagagtatcgtgtcatgaaagttacctaaaagaagaacaagattaaggtttatagagagaaaggctgtagtataatacagcctctttagaaaaagaacataccatgtcaatgagggacaaagatttccaagtagttttgagtggtaagttgaaagataagggcacttttatgagacaggtgaggaagcaaactgatacctagcttaagaatttattatacagatagaaaaattttacttgccagtagttattagaagcatttgagaaaagaaactattttctcactgcctgtagtatagcaatttacattgtcccacctggaatattcagtaattagtcattttttactatcctcatttgaacaaagggaaaatttcaaattagttataattgtggaaggattgtataaatataaatgaagaggaagtgagaatattcccattacattgatgtttgagaaatatcattcaaaacttgctaatagaaactcaacagtattcagatttaatctcagtaactgaggcaatagataataaagacctgaactatggcaatgatgtaagaatggaggagtgaggagttggtgatcattctgaggaaagaatcaacaaaatatgatgactgtgtctctgatctacctgatcagttctttactttccttcagttacaagaagcttgactataacctagaattatctgagtgatttttatgattattttgagtaattactgctatacttagaagttacctacagttggggattgtgaaatcaaatatattcataatttttattgtctgctttatttgcaaatggcattaagtttcagtccacaaagataaatacacaaaagatggaaaataatataaagtaaaatagatgagaaaggtataataaggataaaggcataatatgcaatcaggaatatgactaat

SEQ ID NO: 48781 - DNA, 1029 bp, Homo sapiens
ctgtttaaaaaccagatctggttggccaggcgcagtggctcacagctgtaatcccagcactttgggaggccaaggcgggtggatcacgagctcaggagttcgagaccagcctggccaagatggtgaaaccctacctctactaaaaatcgaaaaattagctggcacggtggcacaagcctgtaatcccagctagctgggaggcgaggaaggagaatagcttgaacctgggaggcggaggttgcagtgagccgagatggcgccactgcactctagcctggatgacagagcaagactctgtctcaaacacacacacacacacacacacacacacacacacacacacacacacacacacacatctggttaaacattaattatgacgaaggccagtgtcatcctgctctaggtaatgttgctttgcgcaaacatagccatgagcacagaactttcccaagttcctgtcctctgagctgtaaatatgttagtgaggcacttttcagtaaattgcttatcttagtaaaatctgacaagttctgtaatacaggtagaacttaaagaaagaaagcaccatgttataaaaactcctaagctgccaacaaaacattaaacaattaaagttctaaactgggcgcaatggtgcccacctggagtccagcagctcaggctgagggagggatttcgcttgagcccaggatttcaaggccagcctgggcaacatagtgagaccctgtctctaaaaataaaaaaaaataaaaataaactaaggtcctcattgtaattggatgtgttacagcagaaggcatgaactcagaacaacactggaaagtgacaagccacagcacatgattctgacctctgcactcccaccacctcaagcaagacctatcacttgcatgactccttctcctcagcatcacactgcggacatcgactgccttacagacatttggaaatcatggggcacttgcactttgagatctaaagctagagcttgtttgatttcatctgtacacccttccagagaaaaca

SEQ ID NO: 48782 - DNA, 1044 bp, Homo sapiens
ctcgtaaaggaccaggagggccaggctcaggggtgtggactggattctctgggctgtagggagccactggacagctgtgctcaggagggtcatgtgatcacaaatgcttattagaaatgtcactggctatggaggaccatgtctgtggttgtaagttacgcctttccgtttagtctggacttcctggtcaaggtacttttggtattagagtggggaagagaggcccagagagttggacaggttttctgaccattggcttatagtcagtgagcaccccacctttattttgacatgacagagctttacagaatcttccttcttcaggcgttttctttcctgctatcctaaagattcacgtacgagggcaggataaatgaaacattctgtctccaatctaagttcggcttggggcctcagaatatgaaggtaaaggggcggggacggactgactgccccttgcttcagaatcaagtcacatggcgggaacgctctatggagcagattgcttcctttgtacatgccctaggcccgtgttcagcaggcctcagagaagcagaggtgctggcctctcgtctccagaggctgccagctactaagggaggtggaagcaactacccctgggggtggactgctctgggccgggcccgacgtcaggcgtaggggactgaggtgaatcagacgtggtggctgcattgaggaatgctcagtgtagttggggtgtttgtagcgctttctgctgagcatggtctttcctctcagaggggtttctaggcacgttgaagggagctgccgttcagagcatcggagaggtgccagggacgtgagctgctgccagtctgacgtgaacagaaggtgggaatagctggcgctgccgtgcgttgataggagcacagtgtccgctgcgaaggggcggctagggctggagaaagatggcctgatagaagcgcctccacaggcgctgattcagcgaagccccagcagccccgcggggcaggcgaggatcacatgcagctcggagaagaggaggcacttgcccctctgcct

SEQ ID NO: 48783 - DNA, 1081 bp, Homo sapiens
tttttttttttaattttgggtgaatgtttgaaaatcatgaatcagccaccattattaattgaagagctgggaatacctcgttaatgtatttttaaaactggtgttggaccctctgtgtatttcaggttaatacttttaagcagttttcagcacgtttatctcactttattctcgttctcctcggaccttcgtagccatatcacttgtataaaataggctgagatatagtgactgtaagctgtgatctcagtatacaaaggtaagctcttttattttctgattaaagagaaaaatagtcaattaagacaacatgcatatatgacaatcatatatgatgtatttgatctcttaggtcatatgtcatcgcattacctttaaaaattgtatggtctaaatgtaaaatagttatttttcaacatttgttttaatacccttgtaactgctttttactcaagacagacatttcacttacactaagtgtgtgtgtgtgtgtgtgtgtgtgtagaaacttaggatataacacgtatgtaaattacacacacatacctgtttaaatgtaagaattcagtgataggaacagttcatctaagaagattttaatgacagggcactcttttggccaaagcagtggaatttcctaagcagcaaggttggtaatagtgctggtaggatctgtatgtgtaagctgttacacaagctgaggatcaaagtgccaatttctcaaggagaaaaacttctccgagaaatgaaagtctctgatctgtgttgtatgccctaatacaacaacagcaagaagccatagaaaaaagcaatagaaaatgaaaaaaaaaaaaaacaaaaacaaaatattatggtaactatggaaaagtatataattgactgagctaagttaattatttgcagaaccaacttcagcaagactcgggtggtgaatatcgagtctgcagagaccaaatagacttaaagcaatccatctgtcttttccaggttaggtagctagattatttatttcccaccttattcaaccatcatggagttcatgtaaagatgtgagggttaggcagacattttaataaagatt

SEQ ID NO: 48784 - DNA, 1067 bp, Homo sapiens
tagaccttgcccttgggctcacgacctgactcatgtgcctgttttaatggccattgagacctcagcctgctctctcactactttctgaagatacttggaaagttctgtttgctaactttgagagattggtagtttgagtggttttaagtattcttttgttcaacaaattatatttagagagtggctactatatatatcatacattctgctaggttcagatgatgcgacgacggataagtttgaccaggtctatgctactctagtggggaacccagacaaggaactgatagttaatagagtgtggggtcagtgagtgcagtgagaaagagatgtaggacagtctggcacatctaggagagccttgtaggccatggtgaggagctcccacatcttaagcaggcacacagagagtggctagactgggaccattctggcagtggttctcattcatccaacatctggaagaagtcctccgggcccagggtgctgagcaggtggtgcttgtgaattgggccagtgatgattgccctgggtcttggactgatctgccttcttcttctttgcactaggctatggaacaccatatggttacagcacagctgcccctgcctatggtacgtacaccatcttactgatatctcctcttagcgactgtcacagcaatccaaagcacagtttctatctagggtttttgtaaattaattggaggatctcagatttattcattctagtgacccaacttaaattccttttgaaaatgccacaaccttgtggttcttggtttggttggagttgctcttctctccgctttgcctgattgaaggactgcttgttctaattgcctgtttctgaccatattgaaattaaatattttaagtagttcttcttacagccaactgatactccattcaaaggctactgaagggccatactcagttgctagcttggctgcctaccagttttaaagccacacttaagtttctggtttggaaccgtgtgagttgtgggtaacttaagtcaagaataggaactgctcacttcaaatttgtagccttcattcttttcca

SEQ ID NO: 48785 - DNA, 1040 bp, Homo sapiens
gccactctatttaatagtattttaaatggctttgtttctacataatcagtatattttgcaaaaatgtatgaattcaaaatataaaatgttatttcaaaaacttgtgcttgtcttgttggttttaactctgctttaatttttataccatttgctgttctgttttactttgtctagtattgcattaagttattgctatcagccaacttattctatgtattttggcttaatggtcggatttcaggattaaatgtggtccaaaacagaattgttttcaaatttactcattgctccaaaattacttgcatcctggttgggcatggtcgctcatgcctgtaatcccagcactttgggaggccgaggtgtgtggattgcttgaggccaggagttcaagaccaacctggccaacttggcaaaaccccgtctctactgaaaatacaaaaaaatcagccaggcgtggtggtgggcgcctgtaatcccagctactcgggaggctgagacatgagaattgcttgaacccaggaagcggaggttgcagtgagctgagatcacaacactgcactccagcctgggtgacagagcaagactctgccaaaaaaaaaaaaaaaagaattatttgcatcatattgctcttgacttctaatagctgtataatctcataagatttgtacatgtctgtgtctagatttgttttatagtgtaagggatgtaaattgggggactgaatttttttaatggataatgtttagtaaatttttttttaggaggtttgtgaccctgttaacattttgaatatgatttatgtgagaatcatgctttaaactaactttcttctgaagttaagaagaattgctgtctggcagcgtcatcctcataaaagtagagaaatgtattcagttattggtagttttgagaagttcatgatggaattgtggtgggcttctttttctgatgtttttatcctgtcaagttagcttgtttctgcctctcattccctagaaacttgccaggtggtatttctcctgtgtcaaacctttgaccag

SEQ ID NO: 48786 - DNA, 1025 bp, Homo sapiens
ttgttttgtcacataaggcaccagtgattgggaagggctaataactgcctcttttagcaaagggatgtgtttttctgttatccactcttttgattggttattcaataagagcttttccattttgctcactgacagtaaatattcaggaatctcattctggttcgacttagctggctcattcagtatattttaggttcagattatagccgtcgcatcttctttgtacataccgttaattgagaaaagacctttcggcctctgcccattattgcaagccttcaagtgatatggtagaatagagcttttccatcgttataggtgtttttgggtaaggaggaatagccggaatttggaactaggtgaggattttatattagctattgataagtaattgataggtttaaccttcttgcacgtgccttttttttttacatgaaaaagaagcttccagaagaaaatattgaaattcagtgttcttttcacattactattgcatagaaataatgccaccatgtagagaaagttgaatttatttgaagggatttggggagagtattggatttatatgtatttgctcttactttccttagtgtgttctttttttttttttttctttctgagatggagtctcactccgttgcccagggtggagtgcagtggcacgatcttggctcactgcaacttctgcctcctgggttcaagtgattcttctgcctcagtctcccgagtggctgagattacaggcatgtgccaccacgtttggctgatttttgtatttttagtagagacaagatttcaccatgttggccaggctggccttgaactcctgacctcaagtgatccacccatctctgcctcccaaagtgctgggattacaggtgtgagccaccgcacctggccccttagtgtgttctgagttgattcatctttgtattctccatgctaccaagcatatacatacaaattaataggcaattaataaatatatatttacttgtaaatctcacataatttatctttttttc

SEQ ID NO: 48787 - DNA, 1050 bp, Homo sapiens
aaagttatcaagtttcgaaaaacgaacctggtggctgtacttttccatttatcagttacacattctgaataactgagattttgtcaggattcttcttgaattggagaatttgttgcatactgagaaaacaccagtcacaagttcatggcgttatattgctgtcccttgagtttcagtacgctgattaggttggaagggtaatcttccctgcttatataagactgtgcttttcaaactactaccatgactgttagtaaatgaaccttcattgcggccttgggagcacataggtgggtgatgattatttttcaggaaacagaatttacagagccagggaaaagcctttatggctgagtggccatttcaacactatagccctggtctcctgacatagttctatttttttatttaattttctttgaagtctagtcatcagacctgaatttgcacttaatctctgccatttactagttgcatgatcttgtgagagttttaaaatttatgagtctggcccttttatctgtgaaatactgagattttgaaccacacaggaatgtctgtgatgcagaatttactttgcttaatttttaataagaattgctttgtataacgctgtatgggaatgcgtatttgtgtatttaagactcaaatttattcacttattggtgtcttgcctggtaggaaatgtctctatttctagattgtcttcaatgttcttatcctgcttatctgtggataatattcttgatagtcatgtgaaggatctatcttgggaaagccaaggacatctgggaatgtttgacaggtgaataacaactaaataactgaatcgacttctcacatcattgctggcgttgcttgttctttcctccttttctgtctcttttttggctagggaggggcgttgggggtgtcagtattatccaaatagttggatagtttaaaaccttgcagctaataaatatacgaattttagtagtttgaagtttgttttccactggaaattcaggcaagagatccattttacatatgaaaatcattcgacaaatg

SEQ ID NO: 48788 - DNA, 1036 bp, Homo sapiens
ttctacttaataaagggaaaataattttacaatatagagatctgtcattcaccaccttaatgaagtgactaaaacttaagatcaaggagctggtatcaagtaccccctgacttgatgcagtaagagctatgcaccatcacctttgtttaaatcattgccggaaatgaagaaacaatcagagaaatcagaatgtggagcgttctttaaaacccttggtctggattcttaaaaaagacgctgaagtatttatttaggggtgaagtcaagatgtctgcaacttactttcaaatggtttcacaaaacacagagatacagcaaatgtagcaaaacgttaactattgatgaacctaaatgaagagtacacaagtgttaattttaatagtcttttaattttcctgttttcaaagtgtagatttttaacagttaattgataataaaatatgactctgaagggtcttaagagatcttctaatccaaccccttgtttttacaaatgaggaaagtgcgacccagggagacttgtctgaggacacatcagctggttactgatagagcgtgaagagcatgcctattctgtcttttgccaccacccgtggaggatgtgagtggcaagatgtgggaggaatggcaaagggacagagagagggtctttgggaggaagggctctccggagtcatggtaggaaaggggcaccccttagtaggagcatgttgtgggtcacagccacagccaagatgaaggagattatgacctgaaacacaggcaggcccgagagacccaacgcttcacccagcttagctcctccttttctctttttaaaaattctttgttgttttctttctctaattattctttccactaccttaaaaaaaatctctataaacaaaaaacaaacgtctctattttattgtcagttggtcattttgctttttccaccaagaattaacgtgatgtcatggaaataatataaattttggagctagatagacctgatttcaaattccaatcctgcgtactagctctgcaacttggaagt

SEQ ID NO: 48789 - DNA, 1085 bp, Homo sapiens
ctgcaattagtgcagcctatattctgcaattaacattatctttcattaactgtatcttacatctatgcatctattcactccactatttaaccttcattacatcttactttttgcttcatttcaaaataagctgcagacatccttacagtttacccctaaacattttgacatacatataattagctggagtttgatacttgttaacacttcttaaagttcaaatttatatacataagcctggcataggggctcaggcctgtaaccctaatgactcttgggaagctgatgcgggaggattgtttgaggccaggggtttgagactagcctgggcaacgtagtgagacccccccatctctaaaaaaataaagaaattagccagatgtggtggtatgcgcctgtagtccagctacttgggaagctgatgtgagaggatcacttgagcccaggagtactaggctgccatgagctatgttcacgccactgcactcccagcatagatgacaaagcaagaccctgtctttaaaaaggaggaaaaaatttacatacataaaaatgtataactgttagtgtgccatggatgacagtcattaattgagcatctggcatttttcagggtctttgctagtcttgcagatagagagatgagtaagacacagtttctgccttcatggtgctagtaggataaatagaagagatgtctaaaaacgtagtgttttatttggagcttttagttgcaaataagaatcagctgtcttctacagataatcggtcttccttacagaacctgagggcaggaattcagtggggctttgggaagggctggaaccaagaaccagaaggctcacaggactgttttttcctaactctgcccatttcgttctttttcttcgaagatgtacttttttctctttttagtacaaatggtagaacatggctgtccgtagagcttttattttacatctaacaattctcagccacatagacataccagttttctctgttaatttcattccaaattcctgggaggtagaatctggccccaccctggttcagcttgcctgagggctgagctgttggaagctcac

SEQ ID NO: 48790 - DNA, 1038 bp, Homo sapiens
gaatcaaagataatgcctagatttttttttttcttttaaaacttggttggatgattattgttatccagtgagattggtaagacttgggagaggaacaaggtatgttttggagaaaaaaaaattgatttttttttttgtgtgtgcgggttgacaaggtcttgctctgttaccctggctggagtgcagtggcacgatcacggctctctgcaaccttgagctcctgggctcaagtgaccctcccacctcagcctcttgagtagctgggatcgtaggcgtgcgcaccaccacaaccagctaattgaaaaaaattcttttttgtagagacaaattctccatttgttgcccaggctagtcttgaacttctagactctagggattctgctgcctcatcctcccaaagtgctgagattataggtgtgcaccactgtgcccagttgatagtcctttttaaatcactttgttttttttttttttttgagatggagttttgctcttgttgcccaggctggagtaccatggtgtgatcttggctcaccgcaacctccgccacctgggttcaagtgattctcctgcctcagcctcccgagtagctgggattacaggcatgtgccaccatgcccagctaattttgtatttttagtaaagatcgagtttctccatgttggtcaggctggtcatgaactcccaaccacagatgatccactcgcctcagcctcccaaagtgctgggattacaggtgtgagccaccatgcccggccaatcactttatattttaactgatgtttgccatcaattggatatacaagtttggagtccaggcggaggtcaggattgttgatatagtgtggtgatttgtatatagacattatacagagttataaaactgggagaggccacttagaagacagtgtgataccagagaagggggcctgggacagagccttggagcactggcacattatgaggtctggaggaggggaaggcagagccaacaaagcctaggaaggtttagccattgatgctcttgtatgtttgcga

SEQ ID NO: 48791 - DNA, 1009 bp, Homo sapiens
tcattggagcagttttaggtttacagaaagttgggcagataattcagagagttcccatataccttcttccctcatgactttccccttttattaacatctgttaccatggtaaatttgtgaaaattgttgaacaataatgcagtattaatgcattattattaactagtctatggcttatattaggactctgtgacttgtacaggtctgtgggttttgacaacaaatgtaaaatgacatgtgtccactgttacagtatcatacagaatagttttactgccctaaaaatctgttctctacctgttcagccctcctgtacccccagttcgtggcaaccactgatccttttactgttaacatagttttgccttttccagaatgtcatatagttgaaagcatatagtatctgaccttttcacactggcttcttttgctaggctatatgcatttaaggtttctccatgtctttacatggcttgataactcttactctccccccatctctctttattgctgaataatatcctatagtggatgaaccacagtattcaactgtgattatatcacaatttgtttatccattcacctattgaaaaacatcttggttgttcccagtttttggaaattatgaacagaactgctataaacatttgtgtgtggacttttgtgtggatgtaagttttcagatcatttagataaatatctaggagcacaattcctattgtattgtgttgtaagactacatttagccttgtgagaaacttctaaacttttccaaagtaccattttacatttccctcagcaatgaattattttttattttaaccattccgatacttatgtagtaattcttttcattatgattggatttgcatgtctctggataatgattttgaatatgttttcatatgcttatttgccatctgcttttcagtgaaatgtttgttcatgtttttgcccattttctaattggattcttgttttttaatttttatttgttttaactgttgag

SEQ ID NO: 48792 - DNA, 1035 bp, Homo sapiens
tttgggcagtaagttgaaaaaaatatttttggattgtagaggagtttttgctgtttttcaaaggatagctttttgaggggggcattgggtagtggctgttctccccttttataataaattcattgattggtattttttcaatctggttttttcaaaacttttttttaaattattgttgttatttaattaattgcctgatgacattttggtaaaatagtaatggattaacattttccagatcttgatttctaagttcaaggtgatattttactatattggtgagaaatagtttgttagtaggtttttacaggttgttttaggccaagaattgacttacctttactgtgtaataacattactacttgattgaataagatggttatagtcacttttgaaacagtattttggcttacaaagcttttttgaggggaaaaaatttgtttgtattggcagtcagccaatattttataagctacaattttcctttgaatagctggtggtttgtagctccataatttgtggttcttctgaacttgtaaaaagattacacatatttaaaaatggccttatcactttaatgttttaagcaatacacaactgtcaaattctgttatgttatagtattgttgttttacttaattttcctgggctgagaatctaacttaataatttatacagtataattggaatctcatccccctaaaccccaatgaaactccaaacaaacctaaaaaccaaaaactacattagtaatgtaacaggcactgttaaaggcaaaggaaatgtgagcgactctacatcggtctgccaaaatccttgcagtattcatgctagtccattatttagccactgctgcccggatgtgttgaattatgtggtatgtgggtttgtttgggtgtatatggtgttcttatgtgacatttagttttaaattaaggtttttgtgatgctgtcaatgttgccttttcacatgcagttggaaaagaatacttcattcgaaatgtttcatgttctgtaccttgttctcctggtttg

SEQ ID NO: 48793 - DNA, 1030 bp, Homo sapiens
tgggattcaaatccatatctatttggcttgaaaagttgggtgttcttgtcactaaatttgggaatgagcaggcaaaaagaaacacatggaaggaatcatctcgtttgagggattcagtactctcttagcagtacagtgtgtaagggaaggggatttgagtttgttagtcctgttggtgtttgttagttgccactttatcctgtcccactatgatttgtatgcacaggaggaaaaacaaaataggaaataatctttggaactctttatggacattatcatgaacaattagaagaaatggcaatgtagcttctgacatttgttcttagaaattatctgtttctttttttcttctcttttaatgagtctttatatgattttattttaaattcataaattgatttgcttgagtggtttagtctgagcagtattggaacttgattgatttcccattttaagatccttttaaaaagtggtgattcaattccagtgaagcataactcaaattgtgtgtattgaagacttttgtaattacatttttgcccctattaaaaaactttattttagcttttttaaagtttgaaagaacttttggtaggccagttgtcagtcattcctttgaaagcccctagtaagtcacctcataaaccttgtcacttttctactgtgttttggcccgaatcatgttacttcccttcagtaataggccctggggtaatatgttaaaatatgctggctttgggtaaaaaggatggtatcatgtaaaatacagctctctggctactttggacaaagagatttttttaaggttatgtgagcataacaagaatataaggtatagcaatagcagccatctacaaatgtcttgagtgtgtgtattgatagttatccaaagaagtatagatttttgacagtgaccttgtgactttcgctaatatctaaatactaggtacttccataaatggattttaagcttttaaaaacttttatttaaaagttttaaaatgcccttgtagcttggctcaaatattac

SEQ ID NO: 48794 - DNA, 1119 bp, Homo sapiens
ttgagctcaggagttcgagaccaacctggacaacataatgagaccacatctttatagaaacaaagtagctgggtgtggtggtgcttgcctgtagtctcagttacttgggagcctgaggttggaggattgcttgaacccaagaggttaaagccgtagtgagctatgatcatgccactgcactccactctaggcaacagagcaagactagcaaaaaaaaaaaaaaaaaaaaaaaaaaagaaagaaaggatgtcttggaactgttgcaacttggtaactactgaatgtgagggctgagcaacaagcctgacaactacagggtttcaagcctacttgattggcagcctggggttccctcagtataagcagggagcccaagagaagtgagatcaggaggaaaatttgtttggttttggtataacgtttgcaggtgtgatggttatatacaggtgatgatgattctgataaaaagaaaattagtattctctttagaaaggatgtgcatctgttgctttcgtgccttcattttgatatagctaactcccagaaagagaagtaagactcagttgctggatctattgctggcatcagaatctagataattgatttggaaaactttgacacagtacctgaatttttcttttcatctgtaagtagctcaacccttttcactaagtttgttagataagttgctctggttgtaaaaacactatgtattctcagtagcttgatacaacttacaggttatcctttgaaatctcctttactgctgcttcattggttatggatatctaagtagtgcctttcttacgtctttgaagaaaacagatgagcagttgagtgttcccaactagtaaccttgatcaccttgagatgaaggcagtgtttatttgaattaaaaggtttgcatgcttttgccataccatactcctgtttttccccttaggacatagagccacattggaagaggacaagccttttaacctaattagtggtagttaagatgttagttgccaaaacatttctttaacagcctacatttaacaaaataccagaagatatcagaggatgtagctttctatgccaggcagattcaagaacaacagtgtaaggttcttttag

SEQ ID NO: 48795 - DNA, 1026 bp, Homo sapiens
tcttcagcctgagcagaagcttgtgagagacattgggttctagctatagcccaagattgtttctaagcaggaatttccagagacagaggccttctttggctcagtgaattcaattctttttttgggggtggggaatgcagtggcgctctgtcgccaggctggagtgcagtagcacaatctcggctcactgcaaactccgcctcccgggttcaagtgattctcctgccccagcctcccgagtagctaggactacaggtgcccgccaccacgcccagctaattttttgtatttttagtagaggcggggtttcaccatgttggccaggacggtctcgatctcttgaccttgtgatccacccgcctcggcctcccaaagtgctgggattacaggcgtgagccatcgcgcccagccaaattcaattcttatatcagaaataataaacataatacattttcctatgtattttgcagaaaattgattactgactgagtgactggaatagaaaaatagagctatcccttctgctagtgacgtcaagcttccttgttctgatttactgaatactccttcctttttcaagttttagttatcaaataattacccatcatttggtatttccgtatgctttgacaggtaatgctctatttgagggggaatgatttttaaatgctttcttaatgttgtgtttggtttacaagttgtaaagagccttccaggtgttggtcatgattgacacagcaaaaatgtaaatagcaaattgccttttttttttttttttttttttgagacagggtcttgctctgtggcccaggctggagtgtggtggtgtgatcatagctcattgtaaccttgaactccagagctcaagtgatcctcccgccttagcatctcgagtagctgggactacaggcatgtgccaccacatctggctattttttttacttttagtagagaccaggtctcaaggtcttgctgtgttgcccaggctgatcttggacttctgggctcaagcgatcctcctgtctc

SEQ ID NO: 48796 - DNA, 1053 bp, Homo sapiens
ccgtgttgggcacacggacttggtgcctggccctttaatctggcctgggttttcttgaatcacagatcttcatctccactgggaatatcaaagtgcttgggaaacttagaagactggggcagcagaaggggatgcaggatctttgaagtggagaggagagattcattcctcctgacttcttgccccaactctcacttccaattgcacattaaataatcccagcactttgggaggccaaggcgagcggatcacctgaggtcaggggttcgagaccagcctgggcaacatggcgaaaccccgtctctactaaaaatacaaaaattagccgagtgtggtggcgcacccctgtaattccagctactcgggaggctgaggcatgagaatcacttgaacccaggaggcggaggctgccgtgagctgagatcacaccaccacactccagcctgtgcaacagagtgagactctgtctcaaaaataaaataaccagctttgtggacagcaagatggggctgattaagagtaagactgtctcctggagtagctgagcatcctgggactcatcagggcccagaaacactagccagccactctctggccagtccacccctgaagttcatttcttccttcccagctgatgtccatccctccatcattccatctgtccattcgtgcattcattcattcagcaagtatctttgaaaacctactaggcgcaagcacggacgatttttttaaaggaggccttaaaagggagtccccatgctgactcttggttgacttgcattttcccaaaatgaaattttcctgtgtcaaattttctttctgaatcaatgataggtttcctagtcccttaaaactggccgttggcaattggaagaagacttttttgaagatttgtgggggaaacattccctttacttttcaggtaacattacttggttaatattcagttactaaatctcttcaagaagtactggctacttccattactattcagagcacagctgatgtgacgcccaggggcttccgtggggcagggatcggggtaggagg

SEQ ID NO: 48797 - DNA, 1044 bp, Homo sapiens
ggtgactttggaaattttagttgacaaggatagcacaatgggctaagaatacctgcttgttttagttttcgctactagctgtgtgacctcatactagtcccttaacctctctgggcctcctgtttcctgtctctgtaacagggaaataatccttctctaacttgcctcaccagggactgtgaggttcaaaagaaagaacagaagttaaaatgctttgaaaggaaaacacatcatataaatagaagagattattattaaaatccagtgtccttcaacagaaccttgctgatagcacacagctttggaaaaccagggtcctcacgtccataggacttttctggaaagacctgtgggtaccatggggagatggaagatggagtggtcccatttcatcttcaggatatcaaaccagaacctcgtgcggctgtaactgtactctcatcctcacaccgatgcttgtaacctgggagttttgccattttacagaagagttcactgagacttaagagagattaaataactcgcctaagtggcagaaccaatactgaagtcaactagaaaatgacagaaccaactcgtgaacccatgggtttctaacccgaagtctatttcttggggtttaccccaccaatatttctttcactttaagaagttattttcccatggtgtaggtcaaatcccaccagactctgcagtcctcaaggacaaggactgtgtcttattctctgaatccccctggtcctggcccccaaatacttagttgttccataaagacacacaggaggaatccttccactctgtgacagtccatctgcttcccctccagatgtgtttttcaggaaagcaggcactttgcgttgaccatcgaagaaaactccggccttctccccgcttcgccggccctctctcccctcctgccctggcccagctcgggaagtgctggaggaactgtcgaattgaactctccttagcaaaagatcgccaaaggcccagtctttttgaactgacttaagaagcagcagtctgtgtagccacatttcaacc

SEQ ID NO: 48798 - DNA, 1057 bp, Homo sapiens
ggaggagatgtgtgtgtgagtgaggtggacagggtgtcataagcaagaaaggcagctggagaaggtcacttagagccttgagtgtcatgctcaggaaccaggctggccccacctgcatggacctgtgcagtcacacagggccccaggcttggcttaatgctctgctgtcaccgtcctgaaattcctaacatttttacctttgaactggtgtggggatgttttgtttgttttgtttcaagacggagtttctctcttgttgcccacgctggagtgcagtggcgcgatctcggctcactgcaacctctgccttctgatttcaagcgattctcctgcctcagcctcctgagtagctgggattacaggcgcccgccaatatgcctggctaattttttgtatttttagtagagatggggcttcaccatgttggccaggatggtctccatctcttgacctcgtgagccacccacctcagcctcccaaagtgctgggattacaggcgtgagccaccacaccaggcctgaactggtgttttataaatgggacagtagagtaaggacattggcaaaggagacacgcacagaacatgtgtctccatggggcctcgccatcccaaccccatacaattttctagtgcctgcagcaccaaattccagtggacccaggatgtggggacattcagcaggactctacgtgctcacaaagtaaacatgtccatgtctgacagccccaagaggccacactttccattagaaccagaacttgcttcaaatacagaaagaaggcaataatgtttttttgttttgttttgttttgttttgtttttgtttttttgggtttttttcctgagacgtcttgctctgtcacccaggctgaagtgcagtggtgtgatcacggctcactgcaggcttgacgccctgggctcgagacttcttcctgcctcagcgtcctgagtagctggcatgacagacttgagccactagccaagcccggctagttttttttttttttttaagagatggggtctagacggggtctctctgtgttgcccaggctggtc

SEQ ID NO: 48799 - DNA, 1144 bp, Homo sapiens
aaatagcctgtatttctatatggtgaaacagaagatagatgaggatagtgctaacgtagttttttgggttgaaataatgctcataaggctcttctgtgctactgataggagtgttgaagtcacttagcagtttatatcaacagtcttagaaatggccaggcacagtgactcatgcccttctatcccagcactttgggaagctgaggcaggaggatcacttgagaccaggagttcgataccagcgtggtcaatatagtgagaccccatctctataaaaattaaaaagaaagatttagctggacatggtgttgtgcatctgtagtcccagctacttggggagctgagctgagaggatcccttgagcccaggagtttgaggctacagcaactcatgatcatgcccactactctccagcagcctgggtgacaaagtgggacctcatctcttaaaaaataagtaaataaaagagccttacaattgttcgtgctctgtcagcttcaggaaacgttttctgagtcactgcactgtgcctggccctgtgttgggcagtcatccctaagttctaaatgtgcacacttgagtaaaggaagtcggctgtagatgcaaacacttccaacaccacgtggtccgtgctgccctgatggggactgtggagccccacagaagacatcaaactcagcctggaacagggatgcctgggttcatgttaaaagttgtcactcaaaggaaatttgtgtagggacccagtcacggaggtaagcagcagtggtgttgtgtggctggaacataccaggggagatagggagtggtgggaacagacagggtccagatttggggaagcccagaaatgcacattctggtcctcaacccaaaatgacagtgggcagtatgaccagtgagtttgatttcagcactatgtgagcagccccgtgaagacagctcccaccaagggcaccggcagcacacaggctgcggttttccccctacgtgtaccagcgcatcaataacggtgtcccaatagcagcttctaattaaattttatcacagtcctgaatgcaccgctgacccacacactcttccaagtgggtccgattcacaggatatttgcgcagttccgcagatctgcagatttgaagaggtattt

SEQ ID NO: 48800 - DNA, 1013 bp, Homo sapiens
actgatgttaaagatttccatggctctttgaagccatttgttgagggcataccagtgccaggggctgtgcgaagtactcttaaatacactcccagctattccttgaaaccatctaaaaagatattgctgttgttccactttgatgaataaggagacagaggcataaagagagtagttgactatgccaaggtcacatggctgatattcaggtctcaaatccatctgactaactcctaagtccatcatcttaacactgcgcttctgtagatagcatgccgtagataacctccatctcaaagcactgaccacctgccaggtattatgtgaagcacctgacataatgatatttaatgtactctccccaaaaagcctaagaggtgagtggtattatccctgctaaatcaatgagcaaactaaggcttcatcatagcagccatggtcacggctagatcttgcaaagctgggaactgagcttcagtctgtctgctcactactccccctaaataatttttagaaagttattcatgttgctcagaaatgtttctctgtagccatgttagaaagttagtgggctcaaaatagatcaagacctaaatttaagacctaaaactatgaaaacctgtggaagaaaacattgggcaaaagcttcacgacactggttttagcaatggcttcttggctatgacaccaaaggcacaggctacgaaagaaaaactagacaaattggacttcatgaaaacttaaaaattttgtctatcaaaaagacaatgtcaacagcttaaaaaggtaacccacagaatgggtgaaaatgtttttaaagcatatatctagtaagggattaacatccagactatatagagaattcctaaaactcaacaacagaagaacaaacaactgattcaaacataggcaaaagacctgactcgatatttctccaaagaaaatgtacaaatggccaataagcatatgttcatcactaatcattcaggaaatcaaatcagaatgacaatgag

SEQ ID NO: 48801 - DNA, 1058 bp, Homo sapiens
atgtccaggcccccctcagagatttctgtcaagttcctgtgatctgaaatcagagccaaggcccaccatcttttcctagtgctggtctttaaaaaaaaattattttactattgtattattattattattttgagacggggtctcgctctattgcctaggctggagtggcatgatcatggctcatggcagcctcaacctcctaggctgaagtgatcctcccacatcagcctcccagctagctgggactacaggtgcatgccactgaactcagctaatttatttttaatttttgtagagataaggtcttgctatgttgcccagctggtttcaactcctgggctcgagtgatccttcagccccagactcccaaatctcgtgctgagattacaggcatgagccaccgtgcccggcatgctggtctttttgattgtcagtaatgtttcatgataccacactgtgctaaacatctttatataaatctttatgcatggtttgaattattttcttaggcggattccttgacatggatttactgggtaaacggatgtgagtccatttaaggcctttggcacataaggtgtgagagaaagctggtgagcagacacagggggatgtctgcagggaatggcccctgaggcgggtgccagggcagggcctgagaacagtaggtcactgggggcagaatgagcctgcagggtagaaggccaggtatgtgaacgccacgcagggcagcccagctgcagtgctaccagccctctggctcacctgtgctccctgcttcacagtgcctccacaacagtgcccaccatgcagggtcctggggtactgcccatacaggtgggggaggtggaggtggggtcatggctgtcaggttactgcagtcacagtgctgtgttttgttggaaacagaaacatgagggacctaagcgggctcctgtctgctctgcttctgcctccctggaccctgagcagttattcacctctccaatcctcagttccccttccataaggtggatgtgtaatcccctccttgcaggagtgtagtgaggcttaaataa

SEQ ID NO: 48802 - DNA, 1066 bp, Homo sapiens
tacctctcaacacaaggaggctgtgctatcatgtgtgagaccctcactgctctgggggctgttatgccctgtgcaccaccctagacagtaagccccaaccgcgtgtcagatgcagcgccaggcccctcacactcacctgctctccctggggcttcacagtgcacctgtgcagtagcggtgatcagctccactttacaaatgaggaaaccaagactcagggaagagaaacaacttagcccggaaaagccagatggccccggagcccctgctttcccactgggcctcgccacccctgttctttcacgggaccgctcctccacgcttgagaaagcagagcctcctgggtctcacgcctcatggctcctgagagtggttttggtgtaagtgaccacaatgaagaccgggaagtgaccttgcccacctctggcccttccccctttctgggcctcgttgacttatctatgtcccctgcctgcctcaggaagtgactcgtgattgcaaggatgtgaagacagcaggtcttctctgaaaccaagggcagtagcagtcctcttagcttcagagagaagttcttctttgctgtttctctcctcggcctactcttggctttctggttgaggagaatgcaggaactggcctagggacctgggtcaccctgcagaggggagaatgttggagggaaaccttgccgacaggcctgttctcccaggagcacagggctgccttcgtcttgaacgggtgagtgacgctgtcacacccagcctagtcggagtcagaatcagagttgggtgtaagggaccagcactggcttcactgcctataggccggggctgtttgtttctatttttactttaacctatagcatttaattagatcaaatcacaaaagatgaggggatgtgagacaatgcattctttatagaaattctgattgtgagcaggggtcacgcttccttgtaagccgcaattatacattggtaagtatctttactgctctgactccgtcgtgtattcaagtaaaacacaaagagtaacagcaaacaccttgtttccccatcacccaggac

SEQ ID NO: 48803 - DNA, 1048 bp, Homo sapiens
cccttctctgtaaaatgggtattgtatctatgggtattgcaaagttgttatgtggattagaatagatgaatttaaagttcctcatataatgtctagcacatttgttattggtaggtaacataaatgataatgtatacacacacacacatacacaccgacccctgaaatcaacggcaggaccggtgtatccaaaatgcccaggttttaaacccattggagtttagttctcatgcctttgctcagtcactgacttaggcaacccgtggctccgtgaatgaagcagttggcagaggctttctgaattatagtgtcatgggatggcatgtgtgcaactggggaggagatgcttgctggcagctctccaagtactttgtccaatcagaatggacagttagatcacatctcttgatgacagaggaagcagcaaatacaaaatattcttctttgaaacacattatgcccttcatccaaccttaactgctttttctgttgtaatcatggcaataatcgttcccatctgtattagaactctgctgatcatttaacgtatattttctttgattctagtaacaacgtgctggctggaatccaggattccattttaaagataaggcaactgaggctgtgcagttgcagagccgctctttaggggctaatatcaaggttgatgctcttcctgctacccatgctgtttccaatgctgcccacgttttgaaattcttctgaagtttctaggcttgggaacaaaatgtcatattaggatttttgttgtgaaaggaaatgtaactatgcatacgtttattaaaacagtttttctccaaatagtgaaccatctgtaattttctgtcagaagcaacagacattaaagcagctgtgtgtctctgtttctcttcacagtgctcccatgccctacctcataggaatccatttaagtttaatggaggtaagttggcttctttcctccccagatggctctacctggggctttgtttcattgtgtggcggtggagagacccagtctcagcagtcacagctctgcacgtgggag

SEQ ID NO: 48804 - DNA, 1003 bp, Homo sapiens
gaaagaaaagctcacataagacctccttcagagtttttctttctgactgtgggatcccctttgcctgatcagggtatttaattaagaaggtggtggccctctgagaggtaaggtgacactgtgatgtgtatattgtaacgtggatacctatgtgtaaacagtgatctttccaaatccctgggctgccctaagctgtgttccttcatgatagcagaggtgttgcccacctggaggtggagggaccgcctctcccttgtttcctctcccctcccactttgtcttgggaagctgtattttttttttttttaagcagccagtgttcctttatttcactggactcatttccaattagtagctgctcacctcaggggaacatgattaacagagccctggttatctgggggaaaggaattaaacaaattgtgaaagtgcggtaataatgaacaaggactacaggatcgttagtaagtctgcagtttccatattcttgcttcttccttgctgggaataagctcatgccataggacttacctgtcagagaagcgctcagcatcacaggcctggaaccaagaggactggcgaatagcccttttggtaccccagcgctcttttcctttcagcttaagtactgagtatgtgctgtgtgacctcatgtgcagagcttgggctgtctgttcagcagccttgcgtctgaagtacggcttcaccactgaccagctgtgcgatcttggcaaattttatctttctgagcgtgtttcctaacctgaaaatatggatgatcgcaccaccttgcagagttcccttgagcattatgtgtgtaatgcataaaggtgactgaattatagtagctcaataaaagttccttttcctcttaagaggattcaaactaaagatatcttccaggtaaaggttattctgttgtgtctgcctcaacaccagcaacagagcccttttccttttcaggggagaaggaaaaaagagtcacttttactctcacgtttgt

SEQ ID NO: 48805 - DNA, 1030 bp, Homo sapiens
aacatagtgaaacctcgtctctactaaaaatacaaaaaattagctgggcatggtggcggacgcctgtaatcccagctatttggaaggctgaggcaggagactagcttgaaccagggaggtggaggttgcagtgagccgagattgcgccactgcagtccgcagtccggcctgggctacagagcaagactccgtctcaaaaaaaaaaaaaaaagaaaaaatatctagtatctgttgatgtagctccacctccaccactaccaccctggtccaagccaacaccatttcttgctgcattgttagaactggtttccctgtttctaatcttaacctcctagatgcagcttttctcatactgcatttctcatctgatcccagaacacaaaacagaatttgaatgacactgttttctcagttctcccaaggatggtacatattatttttgctgtgtcaattactatggtcttaatatctatctagttctctacgtcttcttttcttcttggatgttctgcttttcttggtattgtgcctttccatgtaaattttagattcagtaatattatcaagtctcataaaaaccaggttgaaattttcactgaatacagataagtctggaatgaattgacacctttatgttagtgagttttcctgcccaattcctgaacatggtgtcagtttatttagattttattttaatatcttttaaaaacacttcaaaatttcttccataatggtcctacatatctttgcttcatttttttcccctaaggacctatgtttttacgggttctataaatggcatatatttttaattacatttttctgttctcgtgttgtttagaaactcaattgatttctgaatattgatcttttgcccagctacctaattctagtagtttattatatatccttttggatttcagatataaaattatgtaatttataaataaccactttaccttttttcccctttcctattctttgtaccctttatttccttttcttgtccagctgtgctgcttaatatctt

SEQ ID NO: 48806 - DNA, 1050 bp, Homo sapiens
tgcaaatttttcaaacttttatgttttatttcccttttaaaactgaatgcctttaacagcacccaagtcacctcttgaatgctttgctgcttagaaatttcttctgccggataccctaaatcatctttctcaagtacaaagttccacaaatctctaaagcaggagcaaaatgctgccagtctctttgctaaaacataacaagagtcacttttgctccagttcccagcaggttcctcatctccttttgagaccacctcatcctggaccttattgttcatatcatgatcagcatttttgtcaaagccattcaacaagtctctaggaagttccaaacttttccacattttcctgtcttcttctgagccctccaaactgttccagtctctgcctgttacccagttccaaagtcacttccacatttttgggtatcttttcagcaatgccccactctactggtaccaatttactgtattagtctgttttcacactgctgataaagacatacccaagaatgggaagaaaaagaggtttaatggacttacagttccatatggctggggaggcctcacaatcatggtggaaggcaagaaggagtaagtcatgtcttacatggatggaagcaggtaaagacagctggtacagggaaactcccatttttatagccattagatctcatgagactgattcattatcatcagaacagcatgggaaagacctgcccccatgatttgatcacctcccacagggttgctcccacgacatatgggaattgtgggagttaaaattaaaaatgagatttgggtggggacacagccaaaccatatcatgaggtagctcacttttgttggtggagatgggaaatgggatgaaacctgaagagcaactaagaatgttacccaggtggatggggaggtgggacaggaatgggagagaaggcagagcatgataggcaggttggacagcacgggcagaggcccaggaccaagggagcacagtgcttctgcagagtggtggagcattcagtatgcctggagcagaggagaatggcag

SEQ ID NO: 48807 - DNA, 1049 bp, Homo sapiens
tttcccactcagccccatgacaataaaattggagaagactcttagaaggcaaactttttgggaggataggatacctttgcaagtctgctgaaagctccaggaactgtctccaaaaaaatgtttatgtgggtttccttaaaaagttctatagacattataggttttcacagaaccccttctgtggtctctggatcataggctaaaaatccatatttaagatcttttcttcacttgctgtttttttcaccattattaagaattacccaagtactgtatacctcttctatgataccagggagcaaatttcacactacctattgtgggtgcttgtgtgtgagcaactggtaaaagccagaggctcctccctctattctcttcattcattttttaatgctctgtgctgtgtactggggattcagctgtgaataaagcactatccctgtcctcaaggacttcatggtctggtgcatttcggaaatggtcatttttggaatggctaaagtatgttcgtgtgatagggagaggcagcatggagtgtggtggaagaatctggattcatagtcaggcttggattcaatgtgagacacgttattattgaattatctgaggggcttttgtgtcaagggaataatgatgctaatgcctaccttacatcctttacaaatgagagcttttcttcgtaaaaatgacttcttctgaaaatgaaatacatgtaaagtcctgagaagaacacttgttgcagactaggccattaataaaggttgcccattattaaaaattaacacattttattcaacaaatatttgagagggaaatcaatgctgtgagtcaggtcccattaatagagatggatgtataaagtcgtatcatagtgcaacacaaactttgatatttaaggtctgcattcactaatgcccagtaagattttactaaaaactggtttaagtcgtgagtagaaattatattaggttgtgcagtttttcttacttactaaaagctgaacgtgtttttcttttgttgtttgttgtttacctgttagaatttagttt

SEQ ID NO: 48808 - DNA, 1043 bp, Homo sapiens
ctctttaacaaatactggttatgagtcccttgatagatgttaacatgttcagtgctttacattcaggatagcgtttctcttatttcaatttcttactcttctaggaagttttctcagctaagactgtcaaactagtgggctcttttaaatggtgtttgaaagaattttctcatataaatttcccagaaggatatcagtattttggggttagaaaatggcttagaatgtaagtggcaaaacttcaataacagctcccaaatggcagtccatttactcacatttgaggggattaattatcttggaattcaggtgtctttgttttaacagtattgttttcaaaatattttgaaagatgagcattgcttatgatttatacctgtctcttgtctaccccctttgaagtgctgctgatggctgctaagacccctggaaagagtggattttgaaatttcattttggggatgggaggagcggggagtacttttgccacataatactcttttaaagatcgaggaatgtgtacaaaaatcttagcttctgctacgttttttccaaacacaactaagctttctcagtaaatttaatttggactactcagttgtatagtgggttgccctttaaaaactgagttcaggctgggtgtggtggctcacatctgtaatcctagtgctttgggaggtcaaggcaggaggattacctgaacccaggagttcgagaacagcctgagcaacataatgagaccccatgtttacaaaaaattagccaggcatggtagtgcacacctgtagttccagctacttgggaggctgaggaaggaagattgcttgagccccaggagttcaaggatgcagtgagctatgattgcaccactgcactccagtgtgggcgacagagtgagaccctgtctcttaaacaagtacaacaacaacaaccaaaactgagttgaattaaaggttaaattaaacattttaaatatattccatatgagatgccaatattaattctaacctagcacaataataattttaacccaggcaggatta

SEQ ID NO: 48809 - DNA, 1044 bp, Homo sapiens
ggtaaggtggtcgtggacatctcaccacatcacatagtatagtagatattgaaaggtagaccaattgtcataggtgagatgtatgtgggcatacatgtgacaaagtgtacatgagcctaggttatgctagcttgcagatgacacttggtaatgaggtaggcacttacacactgttgatcaggttgtaaaatggtccaacattcttggaaaacaattggcaatatatattcaaaacctttaacattttttccactttggggaatctgttttatgaaaaactcagaaatataagtacggatatatggacaaggacatttagcatatagagtgaaaagttagaaacaattttaaggcctagaaatagaggatagttaaatttaattagataccatgtagccattaaaattggttttggtgattatttgatgacatggaaaatatccagtacttatagaagaaaagcaagagacaaatttttatatgtgatgtgatctccattttgtaaaaagtatgtagaaaaaaatgacgtgggggatcggatcccaaagtattaatgagaatagttaagtaatgttatcatgggtgtttttaattctctttaatgaagtagttatcctggctgttctatcaagcccaatccaaatattcactgcacaataatttacatattttttagtttggaaaaattataaccaccttcatatatctatctcatgatttcaaatatagaatgccacaaacggcagtactttagctaccaaaatagtaactgatactctaatgtgtgtttccccactaagtttgtgaaacggacttacgctctgaaatcagaactgtgttcaaattttgattctaccccttactagatctaaggccaaaacatgtcatgtcacctttctgagcctgtttccttaactgtaaaacagaaagtacatctcatggtagccttaaagattacgaggtatatatatttttaatttaaatttaaatttttttattttttattttttttttgagatgcagtttcacttttgttgcccaggt

SEQ ID NO: 48810 - DNA, 1046 bp, Homo sapiens
cttgagcccaggaggcagagattgcagtgagccaagattgcaccacttccctccagcatgggcaacacagtgagaccctgttttgttttgtattttacaaaacagaacaaaaaagaataggaacccggagctggagaggtagttcagaagtgaacacttgaatttgagagtcatttaccttgtgctgttaattgaaactaaggtataggtaaactgctaatagaggaggacgcagagagagaaggagaaagataaagtcctggaaaggagttgagaaggggcccagaaatagagcagtgagagaggcaggaggaggcccttctgtagtcttcatctaatggaacgtcattggacaagcaatgtgttttgagtgagtggggagtagagcaccagaaaaggctttctgctctttcaatattgctttaaaaatattctaagccaaacaaaccccaaattgaagagctctccattatccatagagcatgaattcatttatctgtcaagaaaacccatggaccttacctatagaaatgaactatattgatctaagaattgtctctatgaagagtccatgccacaaaacagttgtgagttttggatggtggaaacatgttttatttttaattatttatactttaaacatttttttaaaaatagcatatttgtatgcggtaggcatttggtcatttggcaacaatcacatttgaatcgttgaattaccagagaaccaacatgactggcattggcattttaccttttaggatttctgaatttgggtttttgggtgttggtgagtttgtttgggttatgcggtgtggccaggctccttaacactctagatcgggtttggcagactatagcctgaagccagctggtcacatcctgcccggggctggattttgtatggcctatgaggtaagaaggttttttacccttgttaaggattgttaaaaaaacaaacaagaacatgtgacagagaccataagtggcccgcaaagcctaaaatatttacaatctggcccttttgagaaaagtttgccggctcc

SEQ ID NO: 48811 - DNA, 1054 bp, Homo sapiens
acaaagctagcactgcctttagagtggaaaaagaagtaagaagaaaggggagggataaaagagagttacaaatctgtggtcccggagatgtattactgttgggccagttgtctgcgtgggatgataatccattttgatcttctctgtcttaattgtctgctaaagacaaatgggcagtaaaagttcatcagtttcatctttttgcttctcgtttagaagcagaataaatgatccatcactacagaagaagcctttctttctgtcacggaagtaatgcagacccaacacgttttattaaaatgttttcccctcattatttcagtcctctcagctctgatagatcttactgtttcataaaaaatgtaatctgaaatgtaaataagggtctcgatacagaaggaagaagtaatgagcagcctgattgtaattactgacaaagtgatttctctgtgccccattttttttcctccttaagttgtctgtgacaccctcagaccacaatgacatctatggtttaaaaccattaaatcactgtagcactcaatatttcatttaaaatctggtaagcctgctatctttaaacctggaaatacaggctttgttaattcctgaaagtcatgcgttgcctatattttttttaaaagaaaaaaaaaaaaacaaggcaaaagcaggggtttttcagagttcatattatttattcatctgcttttgtttaatgcttagctagtttaaatactaaaacatcaacattggtaggatcctgacttgaaaagaatcctgtatttttgaaaaattttaataacagcttacttatgaaattttcttaaattctatctcccttaactgtaatatgacgtagtctaaaatgtctttttagggttaagattactaaattacagtgtaagttttcagttactttggatttgcatagcttggactagattcttttcagtctcttactgtaactttaggtaatgtggctcttaataaaagccaattggaaaattttgttaaaggactgaagcacaataataatgtatttctttcatttcta

SEQ ID NO: 48812 - DNA, 1044 bp, Homo sapiens
tttttttttttttgcctccagcacaccctacccttccttttgcattttaaagctccctttggaatttcacttatgtttgatttttggattcacatagcataaatttgtttaaggatcagacttatattccttttgtagatgaagttataaaaaatatttcaaactatcagtaagtagtggcatttgctggttaaaatccttccatattctccagaaagaaagatgaaactccctagattttactgtataatgtcaatggactcattatttgtacaacagctgatgtatttaggacttgttgattcacttaattggtaactgtactacattcataacttcaacaactgaaaacaataggtcagtgtctgctgtttatgcataaatagtcacatcggagcaggatatgtctgaatggcagaatatgttagtctgaggaggaatctggcatgtgaatggctccattgcttgccatactgaggtgggtttttgctgtctttccttgaataatgttatttgtgtttttattatgggtgttgatggttaactgttcctatgttatcaggctggctgctgtgaaattgcatttgattatactttaaatgccagtgttgggggaaaatggtagactagactcatggttaaaaattgggatgatttaaagtttttatgtcttacagccttcatgtgctaaagcaaaaagttacacctagaatagattttttttaaataacaaatttcatttgtacgtggaatccaaataaatgttcatttatagtccttcaaaatgattttttttctaatttatgaattagacgtctttcaaattttagagtcaaatctgcattttagaatcagtattttttgaaaagagtaatttttaattaaaaaaattcaaaaggaaaaacaacctaaacctttttgtttcattgtcaaaaaaaggaaaacatgctggtgatttttaaactctgtaaaacatttcaaacattcttttcaaaaatatattatttgtaacaagtaaattttaacaatcgaacaatataattt

SEQ ID NO: 48813 - DNA, 1904 bp, Homo sapiens
ttgaaaattttctgttgacaccccctagtaagatcagcatccattacagaatgggtgtcaccagcttgagaaaaaaaatctcagaggcagtagttgcgcttttcttcttttttcttttctttctttttttttttttaaaagaagagctgtgtcatcagtgttcccaggagcattgggaacacgaatactttcactaattgattgtgcttatgttttactttttatgtatgtatagtagtattatataaaaaatctagagaactgtatcaataagtgtaagttaattttacgtgataagaaaccatggtaccaaactttaattgctctctcttcttttttgttttggtgtttcatgactaatggtgcattttattctcagtggcacttagactctgaaatatggtaacttgcttcttgcccacttaaaaatattcattatttattgggtaaatggagccaagctttctttcttagaaggccttcttataggacatattttaaaatgaactttgaactaattttactcattctagctttaaataaaatttataagagataggtaaaacctatgttcttgaaatgaaattttattctattgtttggtaccacataatgaagttaatctttttctccaaaacagtaaacttttagtaaggagataggttttattttattttctaatcatttaatcttacactagaatcgatagctaaagcttttttccccaataaattaacagtttacagtagtaccttagatatagattgggaggtatgctggtgttattaaaaaatcagatgaactctataaacacccatttggaaaaatagctattttgacatctttcttttctttactttttggctttctcagttttgaagctacccaatgtattttgagtttaaattacatatattggtgaaaaaaaaaagttaacagtatgtagtccattggtgattttccaaatccaaaaattgatttaccagcaggtactatacaaaatttcttcacatcgcattcagcaaacaactactgagatattatgttagaatttacaaagatgaatagaacaccactgtcccgccttcagagaactttcaatctattgttggcaagtgattgcgagttaaaggtcttgttaccccactctggatttgagtggtactggggtttagagtgtaagagcttaagttttggggtgtttctagatctgagattaagtcctggttctgctcctttgtcagattctccctactttacctctctgagcctgtttcttctgtagggttactgtgaatacctagcacattgtagatgttcagtaaatgttagctggtgataatgagaattatcaccttgataattctcatcttcatttcagtgttatgaaagaactttgattttcatgtcaaatagacctggccagatttcagttctgatgtttattaggtgtgcgataccacagtgcctactgaatggctcttcttgactttcttctcatagacatctcaaattgaacttaggatcattctcctaattttgcttattcaacagggttcccctcttagagtttcttgtgccagaaacctgggaattgttctcttttccctccgtctctcttggtgtttcttctgtcttacatactcactcacctttcccattcagttctatcatcttatctcaagccggctgacttccttctgctcccacgctatcacctgcatcaagtcctgcaccacttcccactcaggctactgtggttacccagctaatcttatatttcattttgcctaattccagtccattctccacagaacagctagagttatgtttggaagacacatgggatcttttcgctaccttttactcctttttgcttaaagcttctcaggggcttcctttta

SEQ ID NO: 48814 - DNA, 1050 bp, Homo sapiens
cgagtagctgggattacaggcgtctgccaccacacccaactaattgttttgtatttttagtagagatggggtttcaccatgttggccaggctggtctcaaaccctgacctcaggtggtccgcccccctcggcctcccaaagtgctgggattacacttgtgagccactgtgcccggccctcttttccctgttttgaagggaaaactttccacatttcacctttcagtaccacggtggctataggtttttttaattgagttttttgattgatttataactcacatatagtaaaatgaacaaatcttaagcatacagtttgaattttgaaacatgtatacacctgcgtaattaacacctcagtcaagatgtagctcagtttcccatatactcttctctttatttccaattcctttaccccaccagagacaacaactgttctgatttatgttaccatagattagttttgcttttcttaaaccttatagaaatggtattctatagcatttccttacagaaatggaattctcttggttctggcttctttcactcaacataaagattttttgagaatcatccatattgcttcacctatcagcagtttattctttttactggtaagtagtattccattgtataaatattataatttgcttatccatttggatgaacattcaggtgagacacagtttttaaaaatagataacctttatcagattaagacatctcctttgtgttattggaataaattcaagtaggttgtcatgtattattatttaatatattgctgcattccttttgctaaaattttgtttagaattttcacatcaatgtttaaatgagggataaatttcctttcttgcattgtctttagattttagtatcaaggttttactggcctcaaaacgagtgtttcctctttctctattctctggaaaatttggtgtgatattgatatgtgttgttccttaaaaggttggaagaacttactaatgaagccataagagcttgtagttttctccattaaacatgtcttaattatgtgttccctgta

SEQ ID NO: 48815 - DNA, 1034 bp, Homo sapiens
tgaagctggttttaagacccattgatgtgagttatcaatacaaaagatctttctaaagtctgaaaggtgaatatctctcatttgcttactagaaagcttaggtgcagaaaaatatataggctatttctttttcccagttaaataattacatcaaacatggaggcacattcaggactatttactgctagtgaagctcatgatgacttttttttactaaccatttctgaaattcatgtattatgcctaaaaaagctcagagtaggtcttgggaattaggaattggcagggttctcacttgatcattataggaaatttcacatttctcccccctaaggaatttgtggagaaaaaaattgtctgccaaaaagtgtaaaattctgattttttttccagctatttgtttttgtttttatgtttagaaaaacttttttataacatgaaaaacaggaacaaacaggaaaatgcagaaatacaagttaacagtttgatggattatcacaaagttaaaacatccaggtcaagacatagaacattagtaagcatcttgccagccatccttatgtgtctttccaaacaccattccctcaattagagaaccattacctttttgtttttttttctttcgtttccttttttttttttttttttttttttttgagatgaggtctcaccatcgttcagaccggagcgcagtggcgcaatcatagcacactgtagcctcaaactcctgggctcagaggaccctcctacttcagcttcctgagtagtcgtgactacaggcatggaccgctcccccggacccccaacctggctaatttcctgctgtgctgcccaggctggtcttgaacacctgggttcaaatggtcttcccacctcaatcttctgagtagctatgattacagtgtgagcaaatgtgcccagctaaaaccattatcttaacttctaatagcattgatcatttttacctgttgttcaacatatatacatggagttatatagatggagtcatgagtgtatttaatattttacttggt

SEQ ID NO: 48816 - DNA, 1032 bp, Homo sapiens
agcttatagttacattacttgtgcagttgttagtttgcctgagcttctgtactggaccttaaactctgtgagggtagtgatcacccagtattttcttcaccactgtatgaccagatctcaatattaagaagatttagtgaatatttatggaatgaacaaacactgaaaattaggtaatttatgtggaaatgcctttaaaatgaaaattactggagaaacattattttgatgatctcttaacatttaaaataactgtgattagtttattgaatttataattttttgtttgagtgaagagaaattctaaattctcatggtatttaagggtgcatcatcttggatagatccacttattgctgattagtctttgtttactggaattatggaattggtataacaataacaaagtgtacggtagggtctctctggaaagcactatactactttctaaatgacatcaccttggtaattatcacatttggtttaagatttcacttagcacaaaatgggttgcagaaagtcaaactctcgtatatatttaagtaaaggtgatgactttcttcacaatagggcagagatgaaatagcttccacatttgttattctgaatggagccttgggatgaaattccaagcagcagaatgccacttaacattctgcatgctattttgctctttagtagcataattgtaaaatgaggcaataaaaccagaaaagatataatatttatacctgtgtaggcacttcacatgataaaatgtcacacgagactgtttactccatgctggttatttggataacgccccacctgcctagtaacaggcggtgctgagtcttgcataaatcttggaaagaaggttagggttaatatagtgagttcttcagtaggaaaaaaaatacagcatatgtgataataataatggcgactctttgattactatttttgtaccggcactgtgctaggcccttggggacagagtgtgacaaagagggagataatataagtgagtacctttcatgtgtcagctattct

SEQ ID NO: 48817 - DNA, 1037 bp, Homo sapiens
ttaacaagtgttcgaaggattagtaaaggaaatgtagtttactctgcagcttttatgacaaagaatttaaaaggttttgctctaagccccaccatgtgtttcttccttttctccaaaacatacctttaagttgaaaagagagatgaatctcttagggagaaactattaactctgagggagtttatcattgtttgagaggaagcagagcatttacatttgaatcaactctgagtgtagcttgtgccctaatctcattccttctagaagttggtgaggagtttaagtacttcctactttgtgttctggtcctcatagtgccatcctaattttcctggggatcatacatttcgtaattcaaagtaagcaaactggacacggtgccttggttatgcatggaaatattttctgtagttgtcaaagttctctaagtagggccattggccagaattgtctcattgtcatcgcacttattaccatgctaaaaatgctataaaaaagaccaaatactacagaaagtttgaaaaagagataaaatataagcacctccatcacaatcctattttcaagttttgaagattcccatttgatgtatttgcagttgaggtacagtttaaatgagagaaagcaagatcttaatgttgaccacaaacattttcatcagtttttcatggctgcatcagagttttatagtttgatcaactagctcctgattgttatacatataaatcagctcctttaaaataagaccagttaatactactctcttatttgtggacttctgtggccaaatctttggtactgccttttttcgggggtgaggggtggtggatgggaaggaaggtagaggaacagagagaggctgactgtgccaaagataaactatgttacagatggaaatgtttttttctaagtccaaaatctataagaaaccttaaagtgagccattttctgagatcaaaaatgtgtaaacttgtgttagtgttttgctctgtggtgaatgaaagcaccactactttttaaaaagccacatttatgga

SEQ ID NO: 48818 - DNA, 1077 bp, Homo sapiens
tcatatatggataagtttgcatatatttgtacaaaacagcaaattatttgtacactagccctgtagagagagcagcccaggagatcatgcaagtgctttcatcctcatgttggcaggatggaaacctctactttgcagcctttgtgggggccttggcctgggtgctagcttttggccagcagaacctggcaactgatgatgttataatcagcatggctcctgagcttgggactcaggttgagatggtttggatgtttgtcgcctccaaatcccatgtggaaatgtgattcccagtgttggaggtgggacctggtgggaggtgattgggatcgtgggggtgggccctcatgaatggcttggcatcatccccttggtgatgactgagttcttgctctagtagttcatgatctggttgtttaaaagagtgtggctcctccccctccctcccttgtttcactctcactatgtgacacgctggctccctgtcaccttcagccatgattgtaaacttcctgaggcctctccagaagcagatgccagcactgtgagcctacagaactatgagccaattaaacctcttttctttatcaattacccagtcttgggtatttctttttttttttttttttttgagatggagtcttgctctgttgcccaggctggagtgcagtggcgcgatctcggcttattgcaagcttggccttccgggttcatgccattctcctgcctcagcctccagagtagctggaactacatacaggcgctcgccaccatgctcggctaatttttttttgtatttttagtagagacagggtttcactgtgttagccaggatagtctcgatctcctgacctcgtgatccacccacctcggcctcccaaagtgctgggattacaggggtgagacactgcgcctggcattgctataaagaagtcgcaggtactttatagcaatggcaggaacagaccaacacaggtgcccttcaagaccttgagcttgacaaaggccttgatggtcttcattttattggcctgtgtcttttgacccttcttgtgtttcttggcaaagtgcatgatc

SEQ ID NO: 48819 - DNA, 1030 bp, Homo sapiens
ttaccgtcaacaatgcgattactgaaaatagttatgtttttggctttttaaaacttggcagttcttttggtcgttagggtatatttcactgggactgtagtcaaattactgttttaaagtcagtagaattggtttttttctgtggttgtgtctccaactcaatacaaagttagttttttgttgttgttgttgttttgttttttgagacagggtcttgctcggtcgcctgggctggagtgcagtggcacgatttcggctcactgcaatttctgcctcctgtgttcgagtgattctcctgcttcagcctcttgagtacctgggactacgggtaactgccaccatgcccagctgatgtttgtatttttagtagagacagggtttcacttttttggccaggctggtctcctgacctcaagtgatctgcccactttggcctcccaaagtgctgggattacaggcaggagccaccgtgcctggcccatagttaggtttttataattttttcttttaatctgttggaattactgtttaaaaataatttgatttttaaaacaattacttaaaatatttatattgtttcaaagccaaagctacaaaacaggcatattcataagtctaacttctatccctgcctaccaccgtgttccttccctgacataggtaccgagtttgattttagattttcatttgtccttccattaaaacaaaaaaggcagccgggcacagtggctcacgcctttaatcccagcactctgggtggccaaggcgggcagatcacctgaggtcgggagttcgagaccagcctgacccacatggagaaaccccgtctctactaaaaatacaaaaataagctgggcgtggtggcacatgcctgtaatcccagctactcgggaggctgaggcaggagaactgcttgaacctgagaggcagaggttgcggtgagccgagattgtgccattgtactctagcctgggcaacaagagcaaaactctgtctcaaaaaaaaaaaaaaaaaagcaaatacgtagata

SEQ ID NO: 48820 - DNA, 1094 bp, Homo sapiens
gggaggccaaggagggtggatggcttgagtccaggaagttgagaccagcatgggcaacatgatgaaactctgtctttacaaaaaaatacaacaattagccaggtgtggtggcatgtatctgtggtcccagctacttgggaggctgaggtgggaggatcacttgagctcccacagagctcaggagacggaggttgcagtgagtcaagatcacgccactgcattccagcctgggtgacagagtgagaccctgtctcaaaaagaaaaaagaaaaaaaaaaaaaaggatggctttgagagattttaagtagaaatgacaagacttggtgacaaattacacgtaagaggcaaaagaagaatcaaagatgacttgccaaggttagcagagttatgttacaaatggagtatttgtgaggtgaggactggttatatgtttgcttttctgaggaaaagtgaaaagttataattgggataaggcattttagtctgcattgagaatggaaggaatctttgagggatccatagtgaatgtgtgtgctttattgaatgagtaagacttgaagtgggctggactaaattgctgaaggcaaatctgttcatggtagatttagagagggggaaaagaaaaaccaccttttgaattcactttagccacaggaaaggtttgagggtgttgcattgatctcgcataggctgtatgaataaatggaaggaaggaaaccaatctagagaagatactgtttgactccacgctggcagttcttgaactccggggtgtgagaggagccaggggtatgtgagcattggagtactgagttcccagaactatacattctccctctgagttctaaatttctgagcttcaggttaaaaaaataatatttatggaaggaagctaataaattaacctacagggttgttgtgataattaaaagagatattgtgcctagttctcagtggagatatgactgcttattaaatggcagctatcattaatattgcttggagaggagaaaacacagttgtctgaacaacctggagttaaaaaacaagttaaaaaacagcaagtatgttcctttttatagtattacagttttt

SEQ ID NO: 48821 - DNA, 1035 bp, Homo sapiens
tgtggcaaaagtccagcaagcaaaaaacttctggtcttgtgaccagagacgaatcagagagagaggtgagagctagattcagagatagtgttgaattcgtaagtgtttggagacttttaactgtataggtggaattgaaaggaagatattgctaatgaaatgttctgtgtcgtgatatcaaagagaaaatgggacttcaccgctctcttcaaattgaattgcctttgctaacttgggtctcaggtacataataagcactaaaaatccttcctttatctaggttgtcttttttcggttacttgagccaagccaagatttagaatgggaagattttcattgggaaaagaaataaaagatactcttttgttattcactgactttatttcattttagaattctatttggtaaaaatttggaatcataaccacttattgaacagtggctttcagggggagaggaggaaaccagcacgaatttcaccatcaaaagtgaggctctgttagaaatccaagaggtcgtctgtggttagagtttcgcaagctcttggaacaatggatttccactttcttgtatatgggttaaagaaatacaagaaatgaaatataggaccgagtgttactggtttgtagcttagaatcttataagttttgccttggcaggtaatttggcataaattgttaatgtaaatctggtttagtggtgaagacattattttagtaaaaaagataaactgctgattaattcagcatagaactcaattacaaattgaaagtgtctctgcgggactcccggaccctaaagacagcagatgttgaattgataatccagcatatttcacagcggtatgaaatattcacatggtttattgtacttgtgtggtgtgcgatatcagaaaggggggtggtgggttcatgggtgtgcaagacagtcacacactgcacatttgctaatatacacggaagcatgatgaagaattttagcaaagatttttcttctttttattagctctgtggaaaattaagtttaaaataatat

SEQ ID NO: 48822 - DNA, 1170 bp, Homo sapiens
attttcccccaaccttcccagccctgggcaataactaatccactatctctgtacacttgcctattctggacatttcatgtaaatgtaatcatataatatgtggtcttttgtgcctagcttctttcactttgtgtaatatttcacccgtgttgtagcatatatcagtattttatttctttttgatggtcaaatagtattctgttgtatggacataccacattttacttattcattagttggacatttggattgttttcactatttgactatatttataatgctgctgtgagcattggtgtacaagtttttgtatggacatatgttatgatttctcttgggaagagaaattctaggagcaagattgccaggtcatatagttactctatgtttaaccttttgtggaactaccagagttttccaaagcgtctgtgccactagcagtgtgtgaaggtttcgatttctatatgtcctcctttccatatatccttccatatatcctctatccttgattgtcaccaagacttatcatcctttggattgtagtcatcctggtgggtgtgtgtgacttggtatcttattgtggttttgatggattttttgttaagaactagtgcaactatggaaacgtttagatgggacaattgaaacatttgacgtgcttcctttatacactggatttgtgccgtaattgggttgatgattgtacatttgtttaaatattgaaagggccttttcagaggctccccctgaggctatttctgtcatttgcttttggtcgtaattcctgcttattggctttccttaagacctgaagcattagacataataaattgtctttattattggatcaaaagatgtatcagttttccccaataattttctctctggctttatttagcataaaacgttaggttttagagatgtctgaaccctaacatacaatccctggggtcctgtatggaattattctaagtagtgatttctaatagtgctattaaccagttaattttagaagtgaacagttactgaagttggcatttatggttcagtgggtgattcggaaaatcacccattatgtctttagaatagatgatgatgagaaactctgttgaaggtgaaaggttcccaccagcaccagatattttgagttgtcccccttttaagaagtga

SEQ ID NO: 48823 - DNA, 1027 bp, Homo sapiens
tgttttacactaaaaatgataatgtcttgttccaattaagaatagtaaacaggtccaagtatagacaataaatgagattgggattctgttctcatttctcaatgtgaacagttactcccatatcagcattattttctatttggccttcttaaatacagagaaaaaataggatatattaatagtaggtcacttgaaaaagaaaagaaaaaaagttccccagttttctaactataggagaggagttcctaaggttctacgcatccattagaactcacagaggtacaaggaggcgtactcttgagttttgtttagaaaatcacctcagtaatgccaaacccttctttaaaacacattaatcttttcaaatcttcctgaaagctttgtctatctccagttgattgggacttccgtatgttaaagaaaaatgagaattgtaggaaaagttgagagtatgaggtacattagaagtgactttaacactccaccaaagtaattttaccttatttagagtttggatttgaaatggttcaaaggctgtgaattcaatatttgatgtgattttgggaagtaaaggggaatgtcagcatcctttcgataaaattgatattatcaatctgaagaatgtttcttagatcagttgtgtccataacttgggagcattagctgtgagaccttgaaacagattggccatattcttatttcacattgattatttaaatggacaattttaggttactggtctttattcacttgttattgaaaccacatgcacactgacaatcagtgaaaatcactttatttattttagagacagagtctcgactgggcgcagcggctcatgcctataatcccaacactttgggaggctgaggcgggtggatcacttgaggtcaggagttcgagaccagcctgaccaacatggtgaaacctgtctctactaaaaatacaaaaaattagccggacgtggtaccgggcgcctgtaatcccagctactcgggaggctgaggaaggagaatcacttgaacct

SEQ ID NO: 48824 - DNA, 1116 bp, Homo sapiens
tatgaagaaggtgagatttgagtagaattctagagtagaagccttacattgaaacttggcaggtacattttgacctagaggagtgattgtggtccttctttactacttaatctctgagggattggggtatttgatttctatctgaacctcaatttccttacctgtgaagtggtattggtaatacctaccacaccaagttgtaatggttggaaataacgtatataaagcatgtgctccaatgcctggcctgtaaatagtagttatttttttgccccctctcttcctcatttgctaaccagctttttgcatttatgttttagctctagctgctagattaggagattttttgacaggctctcactctgctgcacaggctggagtacagtggtgcaatcacagctcactgccacctcgacttccccgggctcaggtgatccacccaccgcagcctcctgagtagctgtgactacagccatattctgccacacccatctaatttttgtattttttgtagagatgggattttgccatgttgcccaggttggtctcgaactcctgggctcaggtgatctgcctgctccagcctcccaaagtgctgggattacaggtggctgataatttttttttttttaatgactgcaaaaaatagtgataaaattatatttagaagaattgggattttcaagttctaacatttacattattgcttctgggtcaaattgcataggtccagaaattcgaacaggttgtgtgtatcgtgtagctggtgtttttccagctgtcatttacctcttaatattttctgtcttggtgtcttggctccacatctaggaaaactgctgccttgagtagtttggaaattgccagtttgagactttgctatgccattgtgttgttatctagcctcttacaaggtttttatataacagatgttcactgtttgttggggagaatgatttatccccagataccatacggatgaatctttgcagttattctaaaatgaagatacttatggtaattttagaattgttctgaattgctttattcaaaggtattaggtatctccatcaaagtattgcttttatttctccccatctgatacctttaaatggt

SEQ ID NO: 48825 - DNA, 1029 bp, Homo sapiens
gggcaagttcttaatgtctctgggttggttttttcttttctaaaatgggaatgataatgttgtcttttaaaggggactgtgggctgggtgtggtggctcacacctgtaatcccagcactttgggaggccaaggtgggaggattgcttgagtccaggagtttgagaccagcctgggcaatttggcgagacgccatctctccaaaaaaaaatacaaaaattagccaggtgtggtggtgcacacctgtagtcccagctacttaggaggctgaggtgggaggattgcttgagcctggggaggttgaggctgcagtgagccgtgataataccactgtactgcagcctgggtgacagagtgagaccctgtctcaaaaaaataataataatgggggctgtgaggctgagctgaaatcaggtgtgtggagtgcctcacataatttatagtttatactggctgacagtagatgttcatctaatgttcccttcccttttttgttcccatcaaaacaataaccccttaatgaaacagtcttaaggaaaactttttgttacctgacttctcatgcaacttttggctaagttacagtgatgctttgtggactcatgttttttttcttatgcatactctgatcaccaggtatcaaggttacattggtgcagccctagttttagggggagtagatgttactggacctcacctctacagcatctatcctcatggatcaactgataagttgccttatgtcaccatgggtgagtgtaacgttttcctgatgtttaagagtactcttacttaccacgatggtctcttgaagagctggtctgttttctcttagaagaggaggtgcaatacaatgctttgattcattcagcaaatatatactgagttcctactatagattaggccgtgttctaggtgcttgctatatagcagtcaacacaattctgatagtgattcctgctctcgaggattttgtattttagtgagggtaaatagacaataaacaactgtgagaagtatatttataatac

SEQ ID NO: 48826 - DNA, 1046 bp, Homo sapiens
aatcctgggctctgagctaggtgcattgctctgttacccatttcctacatttgtttgtttgttcttgatttcctgggggaatgggactgatggagacagacaaacccactgtgggcagcatctaagccatgtccaaggttggtcgaattaagggaaccctggcctctcagcaggacagaaagctgagctgtggttccaggccctcctctctgggcccctggtgtgtatcttttttccttgttgcttttgaaatttttgcaattattttaagaatccagtctttcagaccagcccttttattaagctttgaatttttaattgatttttttaaagtaaaaaaaaaaaaaacccaaaaaacaaacaaaatttaacaaaaaaatccgctactcttactcccctgcctccccctaccccagcccatgagagttcccttgcactcccctctgcctttgcaactgatcatcctccctttctccttggcttgaagcatctatgtccagtatctgtgaaatgatgttttatctgtgtgtcaggatgagaaacggcagtcattccaccaagtgttggaaactggttagcctggagacaagggtttctggggccacagctcagggatgtgtatttaattacaggatccccagaaactcctctctaggctgccacagcaacattttttctgggcttgggagccatacctgaactgtttcctccaaggcgggaactccagagagcctgccaagtctggagcaagctggggcttctgctttggccagacctgggccaccatgagacttgaaggcttctagctgtcctacgacacgagccacggtggccctgcctctccccgctcatagaagcctggtccctctgtctagcccagttcccatctagcatccgtcttctgggcctgaagccctaaatggaccacagcctgcacaggaatcaactgtaggctcaaagggaggcggtgagtaaggtcagagcctgctccaagcccaagaacaaaagttgtgttatgggtggaggctagtcccccagatctagcc

SEQ ID NO: 48827 - DNA, 1049 bp, Homo sapiens
agtagatttctatcatatacgtattttgttactctgggtggggtcgaggaagaagatgaacatttttttgagatggagttttgctcttgttgcccaggctggagtgcaatagcaccatctcagttcaccgcaacctccacctcccgggttcaagcaattctcctgcctcagcctcccgagtagctgggattacaggcatgtgccaccacgcccggctaattttgaatttttagtagagacatggtttctccatgttggtcaggctggtcttgaactcccaatctcaggtgatctgccctcctcagccttccaaagtgctgggattacaagtgtgagccactgtgcttggccgatgagcttttgaatttcagaacaagagattggcaagatgtaaatctttaagacatgtggccctttaaatgaaaagtaaagtatgttgctttcttttcacacctccaggacagtgaaaatgaggtaacagccgaactattaatacatttggtgttgtattccagtgacagatctttgttctctacctatgagctgaaataaagacatgtgagatgttattattggaaatagaaatacccaaagactgtcattgaccatggaacagcagagaagcgattgtaaagattttagaacttgaaattagattgaaagagacctcccagccaacaagcagcatacatctagctctaacataggctatgtatgtttcttactccaaattcacaacagctttttataaagcagaccgaccctgttgcctccatttagcagatgaaaatattaagattctagcaaagttgagaatagaaccttggatttttaactcaaagaggctagggagagggaaggattagttactaagtgcttactttacatgcaaggccctaaggttggtgttttatccataccattttatgtaatgtaacataaaacaagtaccagtattttctcttttcatttcagtaaactgaagtccagagaggcagagaaacttgttcataattatacagaccaggaagaaacaggatttggaccct

SEQ ID NO: 48828 - DNA, 1062 bp, Homo sapiens
actccctttcaaaaaaaaaaaaaaaaaatcagtatccctgggctgaaatgaaagtgtttgcagagccacactcctttcagaagctctaggggagaatcggttccttgcctcttccaacttctggtgactgccgtcattccttggttggtggccagtttctgcctctgtcttcgtatcaccttctcttttgcatgtgatgtgtttcttcttctctactatctttatcagatcttcctctgcctctgtcttacgaagacacttgtgattgtatttcgggcccacccatataattcagaataaccccctaccgcaagattcttaattcaatcacatctacaaataccctttttcctttataaggtagcattttacaggttccaaggattaggacctgatatctatgggtcgcagttattctgcttactatagatggcaatcataaagactcatctcaaagttggcatatattaagggctccagaaatgcaagccacctcctttctctgcatccctcctgtatatactaccatgaccctctgctaacattgccttcgaaagcttttcctttcaggaatgtcattatcacattaaatgtgtacctgctggggtaataataatgaaaataatagctgacagttatcaaatgtctattatagcccacacactgcaatgagaactttatccatgggatataggtattattataatcaccatttaacagatgagagaaattagaaaagtaaagaaggtcaatttttccctagttcacccagctagtttcagagctagggttcaaattagaatctctctaattataagcggtctctaattcatggtataatgatgtgcctttgtttttgtttatttgttttttaagagatatggtcttgccgtcgctcaggctggaatgcagtggtgcaatcatagctcactgcagcctcaaactcctaggctcaagcagtcctcctgcttcagcctcctcagtagatgagactacaggtgtgtgccatcacgcctggctctataacgatgttcttgattattataccttccctcttactca

SEQ ID NO: 48829 - DNA, 1112 bp, Homo sapiens
cccgccttagcctcccaaagtgctaggattacaggcatgagccactgcgcccggccaaagctcaggttttaatccaggcagtttgacttcacagcccacgctcttaatcactatatactgtactaggttttgatagagaaattagtgaccagcctgagatcacaggcctagcttaatcctcaccaattttgtatgaaggtggggagtacagatgtgtaatacaggcggtaggcttcttttgatgtcccagagctaagagggaaagcccatatttcaataggcaggaacatcacagtgactcaaggcaataaacaagtctgtgtttcgtgcaaagacctagcttaccattacaggatgtgaatcagccagcttagcagtagaaaataaaaaggactgagaggtttgagttactatacactcaggactgatcaataatattaacccattatcttttatgcagttgtagagtgtatactttatacccgaaaggtaataaattctattgcattcatttaaaacgtagtatccaaaagggagtgggaagaatgatttccctctctttcctgtactcatcaagccacagtagattctgagcatgatattttcatgtggcatttccaagcaagaatatgtccagaggaaaggcagatggccacccactgtgatggggaaatgatatataaatcagttgtgggactaggggtattaaactccaaaggttgtcaaactcttggtggaaaacgggagggagcaggcttgggcaggttgctcagtgttcacagattatattaagaccaggatgtcttcattgcagggaattatattttagcatcaaataaggaagtaagctctttatcactggagatgttcaagctcatgtaggaaagttactgtaaaaatgcagttatgaaattagataaaggagttaaatgactctgctaaggctccttcagtaatattatagttaagactaaattcttactcctcatctaatattctttctactacctcctgcctctgatcagagtggtatctagcaagtgtgacatctgggaagtatcttgaaactctgaaaccagtgtcataatttctaatatgacaaacatataggt

SEQ ID NO: 48830 - DNA, 1068 bp, Homo sapiens
atgagttttaggggaatgaagcaagaagcttagtttgaaggtgtaaacttttggctgagggtaaggattgggggtggtgaaattagtaacttttgctttgtaaaaggattttgcagacctagtttcctttctccaaactaatatgtataaccagagcattcttgcattctttcaaactagtatagataaccagagcatggaaatgaagggctagagttaaagtaagccctgcaaacaactcttagctctgtgtattaattttcttagaggaatttgccttgtcattgtttattgtaatgacagaaaacagggaatcccacttctgcacgccccccataccccccagaaaaaccctacatacctaacattgagtttccgttttgtcttttccttagaccgaaaggttttggctttaaattttctaacccagtctggaagactatagcatagaatagttcttgaaaaaaaagaagaaaagccccacataccagaacccttttaaataaattcttttaaaatgctgccttttaattttaggatcttagcttaaagaagactggaggagaatttcccatgaaatggttcccataatagttttcagaaagacgtgctaggcagtattgttaactaaagaaaataagtctatcagttccacttagataacctttggtaataaacgaactccgtacacgttgtgaccttagagcctgaactttgcaatcacatgaccagcttgtaaactgacctgtgaggatgactgtcgtagtcccggcttagaggaattgaccaagtgtcggaagggtagtcatcaagctggacttgtcctgtaatctctgtttcttcatggctgcaatagaacttttcagcagactacaagaagcatgaaatggagacatgggaaggtaaggaacagtctggggcccaaatctaagggttagaaattttctttgaaggtttagagcaaatagccttgagggagaagggaggcagtccacaggcaactgttttttttgtgtcttcgcagagttcagctagaaagttttcatgtatgtagcaagtggctgtaaa

SEQ ID NO: 48831 - DNA, 1056 bp, Homo sapiens
tttaataaataatgccaaaaataacctctcaaaatgttgtaccaatttgtataatggttgtgtgatggaagatgtgaaagaaagaaagaaaagaaagaaagaaagaaagaaagaaaagaaagaaagaaaaacccaaactactactttgcattgacattgataggatatatgggggtttaccttacccacagtacaagagttgtaactgaaattggatcatttttaagggtataattccttggcaggcaaattcttagattggtgtgatttgcaactggcccatctgctaacccagttaagtaactgagaagaggggagtatctatgaggttcctttgcatagtgctcagatgtgagctccccctgcttatgttcctggtactcttccctttaggtgcagtgctattttaagtcctgaagagatgctggggtatctgtccaagcaggcttgtcaagaagggatgcttgaagaagtcccaggaaagcattttctagaagtcattggtctcctctcagtcctggaactgtttttttctctgctttccacactgatttgtccttacacatctgagcccggggtcagttctatggagggtctgcataagtcttgtcttttgttccaaatgaaggttgctcctgggaatctgggtggactatgagagtgaggggcagaagagaagagtggttcaagtcagcagtggaaacctatcctttgttacttgacatctgctttaaattccttgtttagttttgtttggaaaccttatcaaaaagcacaaggttctgggacacaaggagctaaacagtatagctgcacagctcagctatcactttctctgggaaacccttccagatattcatcagatacatattaggttccaagaaaatagtggtgagctactggcaccccagctaagacaagcacctcttctctgagcacaccttgtattttgcccctcttctaagatagatatcattatcccttacactggcttgctggcttgagctcttcaaggataagatcttgactcattcatcttgacctacccatccccag

SEQ ID NO: 48832 - DNA, 1051 bp, Homo sapiens
cataatgcatcgcctgtttagtctccccaggggttgggcttcagtaatctttgttgcttggcaagattctagttgataaaggtttggcatggccagtatatatacctgtttaagaggaggtgacttttttttatcttggtgccagttaaggaatcaaggacactgagtgttaggtgttgctagttgtggataatcccagttatcttgcaggtacgagggtctgccatacctcccaaattttggaagccctggttagcatgttctgtggattttgcctttgtcttctgatcacttttcttcactccccaggcttaatgtctgcatcctgaggccttgttggtctgggggatgctgccctctgctggtggactctaggacacccacagcggtttggatgggtccaatcactaggggaactgacaaagctgtagggagccactcataaagctttctatagtttccaacttcataacccagccctaagactttttcctttgaaaatagctcatcagacactagaaaagatacaagtacagaaactttccctgtagcattatttgtagtggccaaataataacacctaggtgccctgcgctagctaattgtgtttccattcagttgactggcttacagctgctgaaattgactatataaaagacaaaaatagaatgaaaatatttaccacaaaacaaaaaccaggcagaatataccaattgcagccattgaagaaatgccttatgtaggataagggccacccgggaatcttcaaaattggctctcaaagctggagtgatttccttttatgttagtggtgctaataaacaacgggagggaggaattagctgaatgattggcagcctggctgaaatctagaatgagtgacttgcagattgactgggtgaagtctaaaagtctggtttctaatctccttacccatctctccatcttggctcttcctctactgatcagtatttaggtttcttctgactttttaaaattgtaataaatgtgccttatacgtatatttttgtgaacatgtgtatttctctaa

SEQ ID NO: 48833 - DNA, 1032 bp, Homo sapiens
cgttctgtctctgcacattctcaggctaagcagggacatgatgccaacagagattttaagaaaagatacctaatatgaaactaattggagtggctggatattacccattcagagggagaatgaaatagaaaaggtgtcttttcagtattcagcttagtattcgaaaattgacctgaagaagttcagatggtaacattctcatctgtctgaggacaggatgctttggtttgctagcctagcttacccacggctgtgatcccactgctgccaccatgtaccgggaaactgccacagccctcaagaacgatagaacttatcatcatttgcctggaaggaaatctttgcaaagagaagagtacattaactcttgcccctgtgagtcaccatacctttgaagtcttggtaattactaattgttgccaccagtatggcatggtagttaagagcttgtagtactccgacattcctgggttcatattctagctctgccctttactagctgtttgactttgggcaacttaacctctgagccttagtttatctctgaaatgggaataataaacttacattcagacttaaaagactctggtgaggtgatacatgtaaaacagttaacactggtgccaggcacaaagtaagggcttaataaaggtagaagaaaaagtgtggagaaaggggaggaggcttatgttgtctgtcaaacagatgttagtgggtggttagacatccattcttctttaactttctggtctaagcagagataagtagtttttccttcaagaccccatatagtacagctgaggtagggctagaacagctaaaacaggcttccctcactaaatattcagggggtagggaggagaaattaagacaggatattatgattctaagtaattggactcaggctgggtgtggtggcccatgcctgtaatcccagcactttgggaggcctaggtaggagcatcacacgagcccagaagaccagcctgggaaacagagtgagaccccatctcttaaaaaaaaaaaaaaaaa

SEQ ID NO: 48834 - DNA, 1068 bp, Homo sapiens
tctagaggaaagtgaccctgtcttagtgttttttttgtaattctgtgtcagcagagtacattactttatctcatttggggcatccttttcaatttgagttgtacatatggaaaaatgtaatggcagatctcatcatgttaaacaaatctctgtgagggtaccataatcaagacagtgtggtattggccaaagaacagacaagtagatcagtaggaccgaatagacagcctagaattagatccttgtaaatgccgtcaactgatctttgacataggagaaaaggcagtaagatgcaggaaacagtcttttctttcaacaggtggtgctggaacaactagacatcaatatgcaaaaaaatgaatcaagacagggaccttatatccgtcacaaagattaacttgaaatggatcacagacctaaatgtgaaatgaaaaactataaaactcctaaaagataacaaaggagaaaacatagatgaccttgggtatgatggcatgatgttttagatacaacaccaaaggcacaatctgtgaaacaatgaattaataagctggacttcatcaaaattaaaacttctcttctgttaaaaacactgtcaatggaatgaaaaaacaagccacagactgggggaaaacatctgaaaaaaaacatacctgatggagtactgttacttaaaatgtctaaagaacctttaaaactcaataaaacatacctgatggaggactgttacttaaaaatgtctaaagaacctttaaaactcaataataaagacataatttgattaaaagattggccaaaggccttaacagatacctcaccaaagacaataatataagtggtgaaaaagcataagaaaagatgctccatgtcatatgtcatcagggaagtgcaaattaaaacaacaatcagaaaccactacacaactattagaatggccaaaattcagaatactgacgacaacaaatgttaggatgtggaagggcaagaacttttattcattgctggtgggaatgcaaaatgatacagctactttgaaagacagtttgtcttacaaaattaaacatactc

SEQ ID NO: 48835 - DNA, 1070 bp, Homo sapiens
ttccttcaatgattaatgatgttgagtatttttaaaaatatatctgttagccatttgtgtgtctgcttttgagaaatgtctcttcatctttttttcccattttaaaattggattatttggagctttttgctattgagttccgtgtatatttagttattcatctcttgtcagtgggataatttgcaaatattttctcccattctttaggttatctctttattttgtcggttgttttctttgctatgcagaagctttttagcttgatataaccccatttgtcaatttctgcttttgttgcctgtgcttttgaggtctaactcaaagaatctttgccagacccgtgtcctgaagcatttccccagtgttttcttgtagtagtagtgtagtctcaggtcttacatataagtcttcaacccattttgatttgatttttttatgtagtaagagaacaggatctagtttctttcttctgcatatggacatctcgctttcccagtgccatttattggagtgactgtccttttgccaatgaatgttcttgatgcctttattgaaaatgatttgactgtaaatgtgtggatttattctgggttctctattctgttccatcggtctatgtgtcttttttttttttttttttttttgtgccagtaccacactttcttactatagctttggtagtatattttgaagtcaggtagtgtgatacctccacctgtgttcttttagttcaggattgctttggctatttggggtcttttgaggtttcatatgaattttaggatttttctatttctgcgaagaatgtcattggtattttgataggaattgcattttatctgtagatctctttggatagtgtggatattttaacaatatcctttcactttatgaacatgggatgtctttccttttttgtgtgtaatcccacaatttcatcagtgttttatagttttcattgtcgagatctttcacttttttggttaattctatttctaggtattttattttttattttttagagcttttgtaagtgggattgctttcctgattttgttttcttattgttt

SEQ ID NO: 48836 - DNA, 2311 bp, Homo sapiens
caggactgtctggttttggctcgtgcctttgtccatgtctggcttagttcctctctgtctatgcttgcctctacccccaccgccccaggcggcacaagtgtttggccacacaaaactagagatagaaaaggtggtaaaaacttcaaacttttctaaattctccaacagtttatttcttgtgaatttcttccttctttaaatactccattttaagaaaacaaaaaaattaattatctaaaggcaaagaatggaaagcaacctttgtgttccttataataactgacttcataactctctccagctgcgttatgggatgtgtataaaaagcttctgttctgagaacaaaggagcacgtgcagaaatgagacgaaaaaatccactgacagtattccattacacaaattacttaaaagattttagtcaagcccctcaacagattcaattttaaaatggcttttagttaaaaaaaaaaaattgaaagtgcttacccagtaaaagaaccgaagtagtcctgaactgttacgtaagactttttacagttggatctttgtcaaaaggggatgggggtgatgggagaaagcagcaacgacaatcaaaaaagttcgagctgctgtggctagaggacaacttctgtgtttccagataggattcttgctgtagaaatggaacttccagccagcacagcatcctgtcccagtagagaaatgagtttgtcagttaaaacaaaaaaaaaattagatactggaacccaggctagacgaggtattgaaccgcgccagatttccttgcagccctgtctgctcagctcgcattgaactatatatgacccagatgatggacagaagcacatttagtcatgtgcacactggaagaaagcggatttgctggtccctggcagtgcaggggtttgtcttctgattgggctgtgccctgatcggtgaaatgtgaagccctcaccattcagaggccgtaattcaggactggcagtttgagtgtctggctgcctctagtcactgagagactttgaaggtgttgcttttgtttggtggcattacccacccagaggttgcttacacctctctacttgtgtcagaagaaatactagtctttctgaaatacaaataggcagccgatttttcctgaatcctaaatcaccctattgttgataaacttggctctaactgaaaccaattatttgatttgaaaatttattgtgatcctaaccaagcttcatatccagaccaacccttggtcttgattttataggtttgataaggtaaaaataaaagtggcatatttgactttgaagcctctatatgatataaattgctcttaatgaaaattggatagatggacaacagagaagtgaagttttagattctggagtgtttggatgtatgaggaagaagctttatgtctttttatcccctttgtgagactgtcactcttgtcccagtcctagtcacattaggggttgctgggggggggaagctatgaaagcatggaccctactgagctgtgacatagcctttaatcatgcaagacagccacggtctgctctcttcagtctgtctgaactagggtccttggggtttattttccatctttctgagccactgggaaaccaggtcattatacaggactgtcatttgtgacatttttgtttagtacatggcagttgctttgtttatttaatgcaagttgacacttctttaaagtttcaaaacagtaaagttgttttgtgagaccttgactctgatatatgaaatctactctacatggaccaatcatttttttccgtggactttcttgtctctttagaaattagcttatagagtcctaaattgatacttaaacataccaatagttctgtttatttcttgcctttctcacagttgttgaaataattccatctgtctcttttgctgtaaattttgggtttggatgtttgtacttggaattttttagatgttgactatattatgcagcaccttccatatgaggactaccccagaattattctcttgtcttaacccgagaaaagctgttttgatgcactattagatataagaatgttcgaaagaagaggagatgagcactctcttgctttttgtaagccacaagacaatcttttttttttctaagttgtggtaaggtatatgtaacataaaattgactgttgtaataatttttaagtgtatagttctgtggtgttaagtgcattcacgttgttttgcagccttcaccaccatccatccaccacagaactcttctcctcttgcaaaactgaaattctctacctacctgttaa

SEQ ID NO: 48837 - DNA, 1014 bp, Homo sapiens
ggagaaacattcccaagtatcattttattcacacttaattttctatcccatacccccaaaataaggctagctatttaattagttggctgcttttctcttaatttttagtgtttctgttgataatgtgtaagtttgggaaaatgctaagtagcttttcacttagaacactgttattttctctttaaagttttctaccttacatttattatagcatagttatctttatagcatagatgcagaaagtaagagagagcttgttttttcaagaaaacaaccctttaaaatactttccaacccatgaagggaaaaatcctccttttttcccccaagtgcattctacttattactttgcatttttctcccaaagtccaaatttatgcaaagaaaatagaaacaagttcaaatgcaatgcattaaccaaataaaacaagtctgcttcaaattaggaaccaacctaagcatttgtaaagtgtagcagaatcagaattcttttaaaaattagatttggaacctgaactatataattcataattctcatttttctgtggaaaattattttatctttctcctgtatacctgaaaaaatgtccataggcttaaagggtcatgcttttacattccttccatatcacaggtactatgaagtaaggagacttttaggtttctttttgtcttaaactcagacagctttgtaagcagtagtgtgtagattacaagagttagacaaaagcaggcgcgactgagaagagttggtgggggagaagcttggggcacttcctgtcactcaacacattccagatcactaaaaaatttccacaccctctgcattcccccttgcccactccagttcccggtattttctgattccatatgttgtggtatttaccatacttctctccctcactaggctctggcaagactgcttcagaggggatgcattcctttagattgcacaaagcggagctgggaaaatggctggcagtttcagaatctagtcacgatcgcacgcatgag

SEQ ID NO: 48838 - DNA, 1022 bp, Homo sapiens
ggaggttacagtgagccaagattgcactactacactccagcctgggcaacaaagtgagaccctgtctcaaaaaaaaaaaaaaaaaaaaagaaccacatagaggtaattccgccaaaatctaggtcacaataacagataaccaaattggggtcttctttttttttggtgtaactgtctaatttgctctgaatacatttgccagacctcttttccacttgactttgatattcagtgaacaaagaaaaagaaaaagccacatgatattgagtctactagtgagaaaaatctaggtggaaatccaacatctttaatatcaggtaactggaatataaatttcttaattggaacttttggatcttgggagcttcctgctctgtggagataatattgcttcattgtggcaaatgcgtgtactttaccccattggtaacaacaacttcattgtattagtcctaggacaacaaagagtaaattccaattggaagaggggttaatatttagacactctgtaggcgtctttctggttcgtaagattaattgccacagaaacccaatagtgactctggtctctcattctgttcatagttatcgtccatgtctcaaatattcttggttgttaagagcccagattagtcatgggttgagtactacctagctgtgtaatcatgatcattatagcatgtgtcattaaaggaaatggtaactgctgagaacatagtcttcaggaaggagatgaaggaaacatgctttacatttaatgctcctgtgtatcatgatctgctcctgcaacatcatttcatacccagactcgctttatttcatcctctccagaaattatcttgttcttaaacatctattaaaaggtgactcagtttttatatgagagagtggtttaccatagatctgactaatggtcattatggaaccagcctgtgtatttgaaggtattttattttcttaatggcttgatgactccattgaaagtctgttaagatcttatagtttagcataattctttggtt

SEQ ID NO: 48839 - DNA, 1051 bp, Homo sapiens
cgttcataagtttgtctagtacttactgaggacttgccatatatctgatattgtgagaagaactgtcccaaacggtgacattactatttcattttgcatttgaggttactgaggatctggatacttaaacttccaatgtcagaatataaacaagaaagtaatcatcactctataaactgattctttattgccacaaatggattatcactactttaggagagatcctgtttttgaagtctactgttttagaagtctttttagagcttgtactaagtggcctttaaaaatctcataataatttctaacactttcttaataacttggcagtatggctttgtcatttaaaacaaaatctggaggaaaggaaaatatttatttccctgtggcatgaaaagaggctatatgtaggtcatttttttttttaaataaaaggcaagaaagtctccctccagaccacatcagaactatgccagcttggtacggggcccttaccagagtaatgatgtaagaatctgagagtacatagtgcagctgccaaagctcataatgtttaatttcagcactgtctgtttgccagagtttgcagctcaatatttttttctgtatggatcaaattataatcacatatatttatcttattggggtaggagaagtaaagagttattgtttgataaatttgccgttttcctagggaatggtgctgttttgcctgtcacatgcttctgagcattattcccccactgattcctaagaacttattctcctgggtgaattcttctaacttgtgacacagaggggcaattcacaccttgcctgtttatattttgcaagaaaacccttctcttagcgtgggtatctattcaggcagttccatgtgctacattccatccatttgccaagtcttggactcttatccaaagtacaatatttgagtatacaattacacctacacgtaccggcaagagcgtactttttcctagcctctcttggagaacgcttgaagccagaggagcaaatccagatgttctggattgagtttggcaccttcaat

SEQ ID NO: 48840 - DNA, 1025 bp, Homo sapiens
tagctgggcatggtggtgggcgcctgtagtcccagctactcgggaggctgaggcaggagaatcgcttgaaccaaggaggtggaggttgcagtgagccaagatcatgtcattgcactccagcctgggcaacaagagcaaaactccctctcaaaacaaaacaaaaaacaaaacaaaacaaaacaaaaaaacaaaggttagttgcggtatggaatcagaaactgtatcaatgaacttttcatactcgattttattaaaattcatttgtctatcttgcatttttcatggatcttttacccaagcatgattttgtgacatcatacattggtcatttggaaaatacttgttcactgagttatgcggattttctaaatattgacacatttcataatatcaaaaaattaagtttgtaaatatcattgaactcatcagatacatctttaaatatttggaacctgtgaagctcacagtgacagataaaaatatcccaaaattctaattttggcttaaaagctcaaatgttgggctgagtgtggtggctcacgcctgtaatcccagcactttgggagaccgaggtgggcagatcacgaggtcagtagttcaagaccagcctgaccaacataacgaaaacctatctctactaaaaatacaaaaattagctaggtgtggtggcatgcacctgtagtcccagctactcaggaggctgaagcaggagaatcgcctgaacccggaaggtggaggttgcagtgagccgagaccataccattgcactccagcctgggtgacagagtgagactccatctcaaaaaaaaaaaaaaaaaaaaagctcaaatgttatcattggcaacaaatactgtcacttgttttccttgaagtgacatactcactttgttcattttcaagaaaatatccatcagatacccaagtgtgaataaccacaatttgtttagtaagtaaaatgatagtcaatgaaaaaaatgggctagttcagcttacaacgtaacaataactccagtgctgcttcttga

SEQ ID NO: 48841 - DNA, 1050 bp, Homo sapiens
aatgaactggagagaatcttggtttgtattgtagtgtgtgaaaagtgttggccgagattttaaaagttctttaaagccaataggcgtgtgttttgcaacaaccagttaatgaaataaacaagaacagttaccaaagaactcaatctttccttttttacaattatgaagcgcagatgatgtatcagtgatataagactatttcttcctctgacttatttttgtttattgggttaattttagtcttatagtaatttatactttaaaaacttgagctctgttcttagaaagtttattattgcctcaggtagagtatagatttgtgttaaggctttgtaagttattggtaagtagacatattcatttcataactattttgagttattcataacagggaaaatgctttttaatgttgcctttcttggttatttccagcagatagttgagtttttccaaaatatgatgtcttaaaacttttatttaaaaatgtgtgttctgtagaaaagctatgcttagatctacctcatactttcataaatgaaataatactgtactagtttgggcaaactattgatacttggtttattgtttttggacctatctctccattgctaacctgaaattgacaatgccgatgtttgagtgggaatgctaatcatgaatggggaaataattctgggttgaataaatagaaaataagtttcaacctacaattttgtaactttcagactatcaggagtgttagaggtcatttagtctcatggtttccaaacctgctttgcatcagaattaaaagtgtaggctgggcacagtggcttacacctgtaatctcagtactttgggagtccacagcaagaggatcacttgggcccaggagtttgagaccagccagggcaacataaggagaccccatctctactaaaaattgaaaaaattagcccggcattgtgatgtctgccagtagttctagctacataggaggctgaggtggcaatattggcttgagcccaagacttggtcaaggctgcagtgagccgtgcttgtgcaactgca

SEQ ID NO: 48842 - DNA, 1028 bp, Homo sapiens
ctgattcggcagtagaatcctagggattgtttttcctgtatataaaacccttgccatcctggagcccactatctgactagggagctacacgtaaatataactgatgacaaagaggatgcctggtggattggtgtgaactatattaagggagaacagagaaaagaggggttaattctgcctacaagtgccaggaaaggtatatctaagtaggttaacctggtttgagctttaaaaggttagttgaatttttactagacagagaaagggggctaattccaatggaaaaccatgtacaggaaatcttagaggcagaaatgtttaggtaatggtgagtagtgagattaatgtctcagagtgtcagttaactcatctttaaaatgtgagacaaatagcacttgcccttcctgcacacacagccatgaaaatccaataaggttatgtatctgaaagagcatgcaaatgtaattgcttctcttgtctcccattgcttttgtttcatatgtgcgagaatagaataaatgaaataccttattataataaacttttccaaattggatgattctttggccttcttgctttttttccctttaaaatgaccatagttaaaaaatttcatgtattaaatgtttggagaagcagtatttacagcatagtaaagagcagattttggagccagaatcgtgactttgaattttactagctatgtgatctttgacaaattacttaacctctccatttctttgcttccttatctataaaatggagatttatatgttattttaaaggtatttaagttgttaagataatttacaactattatttctatgttaataaataaaattgcttgttttccccagtatttggcttccaggccatatatgctaataaaaaacctgttcttttatagttaaaacaatctctgactagctgttgtattgtatgtgtacatatatgtgttttaaggacatatttggaattaatgctctaccacttttttggtaaggttttcatttcccataacgttttag

SEQ ID NO: 48843 - DNA, 1042 bp, Homo sapiens
gggagttttatgggtgatgcaaaggttcgaaattagattttggtgatgcttgcacaagtctataaatgaatgaataaaagtcattgaattatacacttacaacaggcgaatttaattgcatgtgaattatacctaaacaaagctgtttaaagaaatatttaagattggctggaagcaggaaaaggaagggacgtcttgacaaaatgatttaagttcattgatcagatggggccccactgattatttgctatgtcattattcttcaccttggaagcttataatcccaaagccttaccctgtgtcctaccccactacagagtataatagcaacttcttgtttgggaggtgactcaagtgtttggagttgctactgatggacctagagtgaatgatatttcccatccagtctgatgacacttacatgcagaaaaggccttcttttaaccctgggttatgggttaactttatccagacatcttgcacacatatactgctggttgacaagtaggcaagagtttgggtagtgagaggatcttgtctgaactacttgtctgtacctgtggagcagcaccatcagagactaggatactttggcctataccttgtgctgtttgcagagcgctttttcacatctgagatggagagggtatatttagtcgtccttttacagagaagtaagacttaaacagggtgactggcttgaccacgaatacataatcagggcagagctgaacttagctgaacttaaattcagattttctgactcttgtatttcaagcgatttcttctatacctaccgttttttgccccaactacttactgggaagaggagagaaaagggcatacgattttgattggttgtgtgtttttcagtagatttagtctgaagaacaggaagggaagttgggctacagtgtaagttcatgggttctgtggcaagtatagccaggataattttatcctgatatttggtagctattaaaattatatataggctgaaactgcaatgtgtgggacagatagatagctgaaggtatcctgt

SEQ ID NO: 48844 - DNA, 1031 bp, Homo sapiens
agcactttgggaggccgagatgggtggattacttgaggccaggagttcaaaaccagcctggccaacatagtgaaaccccatctctactaaaaatacaaaaaactacctgggcgtggtggcaggcgcctgtaatcccagctactcgggaggctgaagcaggagaatcgcatgaacccgggaggtggaggttgcagtgagccgagattgtgccactgcattgcagcctgggcaacaagagcgaaactccgactcaaaagaaaaaaaaatctgataaaggagttgcatctaaaatacgtaaagaactcttacaactcaataagaagacaactcaatttttagaaattaacaaaaaatataatgattccacttatgtgagattcctagaataggcaaaattcattgaggcaaaaagtaaacaagttgctaggggaaatggaggataagtagttattgtttaatgggtacagagttcttgtttaggattatgaaaatgttctggaaatggatagtgatgctggttgcacagcattgtgaatttaatgccattgaattatatacttaagtgattaaaatggtaaattttatgtatattttactacaataaaaattaaaaatatgaaaacatgggtaaaagaacatttcatcacatgcaaaggtgctctaaattagtcattagggagatgcaaattaaaattggaatgtccactgtacaccctcaggaatagctgtaatcgaaaagactgtcaaaatgttctagaaagtgttaggatgtgtagaaactagaaatcttgcgtgttacaatggtaatgtaaatcagttggaaatcagtttggcagttcattaaaaagttaaacttaccatatgatccagcaattccactcctggatatccaagagaattaaaaacttatgtccatacaaagactgtatgtaggccaggtgtggtggctcatgcctgtaatctcagcactttgggaggccaaggcgggtgggtcacctgaggtcaggagtttgagacccgcctggccaaca

SEQ ID NO: 48845 - DNA, 1023 bp, Homo sapiens
ggcatagattaatggattaattaggaattatttgctgggcctgagatgagagaggatggggatctgagaaatgcagtgagaatccaggtattaattgatgcttgacatttggcaagtagaagagagatatattcaggtcacgcagttactggctgtgggtataagctttaagacccagagctcttggtcttggaatgctaatgaccagatgggctgagagttaagacctgggccagtgggaaagggacccatgatagccatcaaggcatgctgatgggcttaatcatagtgaccaaggccagctgtaacactcagtgtactactttgcctgggacctatttgagtacctaactggtgataaagtctgagattgtgtacttttgccctagtcatcattggccctggggcttgtccagcttatatatacacatggaaggcactaaagactccagtagttatggcttttgggaagagagaattgaaaataactctttacagttttgggctgttgctttctggaactgaaaatgattccataatcccaagatgagtttatacctctgccttcctctggaagttttccctcctaagtgaaattttgagattaagttgtatttaagcagtttgggtgccaaagacatttatatctggcatgagtgaatgaggaggtcaaaaaattctctctccccaaattttcaaaaacagcaaaggcttaaaacaaattgagaagcatttattcatgaaaaccactgtacttggggtaagaacagcaggagttttgtcgtgttgcctgggcctgttcctatttctcccagccctgacagtgcagtagttcaaccagggtggggctggcggtgaaaaccagtagctttatgactgctgcaggagggagctttcttgatttggaatgttgtcagttaaatttgatgatctttgtggcaagtgaaacagggccagcaaatctgctactctgaggttgcagttctgtttaggataaacagtgggccagtagactagccaggg

SEQ ID NO: 48846 - DNA, 1025 bp, Homo sapiens
aaataggagaacagattttctttggcaaggaattgtttaaggcagtggtgaaggaagaagatcagttaagggggtgtgagattccatgaagtggtggatagaatttatagggctgtgaaaattaagataatgtttggggaagaccactagggtgtaaacagtgtgacctggcaggctagaatagattgcttggttatggcaaagatgccagcttttttttttttttttttttttttttttaaaccttagctgacttaggcatgtaaaaatctacttaacttgcatgttcctgctttccggttcataattattcattggcagtggactattatgtacaaataggcttggagtaaggatgatagatgcgctttaacaattgggtatggttcatatttgaaacatgacatatgcatgtcaagatttaattactggaaaatttcaaaataaggatactgttaatgtaatacctatcattatacaccacatgaatcaaactaacttgaaaatgatgatgctgaatgaactgtaattgaagagtaaagcaaaaatagcagcaattgaaaactaccactaatttcctcaacagtgataatggagttcttctgagaactgtaagatttccagctgatcttacgtgtgcaattgcggaaggatctttgcaacttttccacccatttttggcaactaggcttagtagaatactagagtctcattcgtttataaacattgaattgtattaatagtcacttaacaagttacttgcatgtagcttttaatcacaggcagaaataaactgaacaccagtcactcataagatggatgaatgttggattaattcaccaggaagatcctttataccttgagaatcatggggctaagaggttgggaaggaggaggataaggtagaaaaatagccttaggctgaggctcattgcaatgaacctttgatgctaaatgtgaaatagaaagggggtgttttttctgtgacttaaagcaaaacctcaacattgtgtgtgtatgtgtgt

SEQ ID NO: 48847 - DNA, 1085 bp, Homo sapiens
tcttggtgccatactgccttcaaaagacttttttttttttttgagacagggtcttgttctgtcgcccaggctggagtgcagtggcgtgatcttggctcactgcatccttcgcctcccaggttcaggcgattcttgtgccttagcctcctgagtagctgggactacaggcgtgtgtcacctacctggctaatttttgtatttttagtagagaaggggtttcgccctgttgaccagtccggtctccagctcctggcctcaagtggtccccttgcctcggcctcccaaagtgctgggattacaggtgtgagccattacacccagcctccagaagacttttatttttccttaatttctcattttgggcatattcccttttatttgttgaatctgcattagtttaatttttcgtgtagtcataaaccaactaataggctttctagatgggcataagcgctctctcctcctccttcagtttttaagtctccatctagtggtctattctggaagcacagaggtgagaacctgtgttaatgtattggtgggtatgccagttttgtccattaggtggcaacaggccctaaccaaagagggaagagcactcagactgaaaaatagaaaacctgtgcttgcaaaactcggaacaagattttctggtacagctaggcttcaaaatcttggagaagggagttgtatacccttaggtcattctaagagcatgtacaaaaactctaaaaatatatggggcctatagtcccagctcctcaggaggctgaggcaagaggattttttgagctgcagagttcaagaccagcctgggcagcatagtgagactctgtatcttaacaataaagacacatgggaattcatttccctgtctcacttctcttgcctctcaagcttgaaaatcttgacttactcagtgggtatccagtggtcacttttctttgaatattggcagtaggaggtaatagggacagaaggttaaagtaatagagtagacccttaatgcaaggggatctgagtttggggatggggtgagaaggatgtgcctgaaacctactttattaatgataaaaagaagaaat

SEQ ID NO: 48848 - DNA, 1032 bp, Homo sapiens
gacatgcatttaaaaaattctctctcattttagctgccagatttccatggctattctgccaaattgagccaataggttctagcttccacttaaagcacagattttacattcagaattctgttatcttgaaattgttctaaggaagggggaatcagagtcctcaagtagcaggaaccatctttgaagtctgagaataaagtaaaagacttctacagcattttcaggcttctacttgcaaccctgcttccattcactagtaaagccatcagaatttgcctccttttcagtgtcaggcttgaggcttgagccagcactattgataatggagggagcttcttatataaattgggctatcctgacagttgcagggatacctgctgaaagcgaccctaatgaaatgcatgggtgcatggtacagtggaaaaaacatgagtgaaagttagcatcctggccttcctgctttcttgctgagtagcataggcaacgtgtgaagctcagtttgttcatctttgaaacagtagtaattcttgttaaatgttgttttaaaaaataatgagataatatacatgaattgcccagcagttagctgctctagtcctgcatgtttctcttttgtggaaatacaagacaaaaggtttctaatttctttttgttaatatttgatgagcatttactgtatgttaatgactttaaaacatttatctcatttactcttcctggcagctctacaaggttattctcaactcttgttctgccccattttacagatgaggaaactgacagtttaacacttggccaaggtcacacagctggtaagtggcagagatgaaccctgtgtgatcccaaagtccatgtccttatctttttaaaattgaggcgtgacttacatgcaatgaaacgcatagatctaaagtgttaaggttaagcatttttataaatgtgtgcaccctagtaatccacattctatcaagatacagaacatttccatcccttcagaaaattcccttttacttttcccagtccatcccacta

SEQ ID NO: 48849 - DNA, 1050 bp, Homo sapiens
agaaggaatgagaagaaattctgaggctagttaggttctgcagttgttctttccatgggagcaatattgcagtaacattttcagatgagacaaagacttttaataaacatttgttttattttattaaaaaaaagctgaaaggggttgcttaaattcagtgcttgataacaagggaatacatgggaattcttctcttccttttttgaactcttgccaaagagaaaaccttctgtgttaggcaaacgtatcagtagtggggggataccctagattaaagtcactgtcttcaaagttgtacatagttttacaaattaactttttttttctaaatatctcacatattcttagcatgctgaggctataataactcagttctaactgaggccctttctgggtactctttggtcaaccgggaccactctttgcctctttacctgaagctactttgtttttgttttattttggtccagtatttgtcatagatatgatctgaaagaaaagataagcctctctctttgaagagagccgacagtcattgtgaaccaaaattgaatgtgctttgttggtaagcataagaaaatcaaaactgcaaaataagattcaaagtgaaaatacagtgttaaagatctttttcatctgttagtacaaaattccatgtcctaagtgtagtctgccctatagatgtattttgtttgacttccaggatgtttaaataaaatcatgttagttgtcaacatttaaaatgttcaagatggccgggcgtggtggctcgcgcctgtaatcctagcactttgggaggctgaggtgggtggatcacctgaggtcaggagttcgagaccagcctggccaacatggtgaaaccccatctccactaaaaatacaaaattacctggacgtggtggcgcatgcttgtaatcccagctacttgggaggctgatggaggcaggagaattgcttgaaccctggaggtggaggccgcagtgagctgagattgcgtcattgcactctagcctgggtgacaagagcaaaactgcatttcaaaaaaaccca

SEQ ID NO: 48850 - DNA, 1048 bp, Homo sapiens
gagagagaatgaaaatgtcctggtgattgactatattattcgaggggactgttgggaagggtggtaaagtgggagcccaggaggagtctttggggatctctggcttgggggatgagagttggtggtacctggaacctgagtgaagaacacaggagaaagaggattcaaagagaaaataataggttcagtttgacatgttgaaattgatggagcctatgggttatttatcctggtagacattgacaatagacatttggatagatgggtctgtggttcaggagaagagtctcatccagaattgaaagtttgggggagaggggaatcatcagttgggaagtgtaagtgaaagtgtatgtggatgagaccatccaacctaggatgagaaggttgtgtgtgtgctgggataggcctttcttgcctgtgaggacatttagtaaagaacatgtcaggctggacgtggtggcacatgattgtagtcccagctactcgagaggctgaggcgggttgggttgatcccttgagcctgggaggtcgaggctgcagtgagccataattatgccattgcactgtagcctaggtgactaagtgaaactctgtctcaaaaaaaaaaaaaaaaaaaagtcagacaaggtctgtataatcatctgtaaggatgtgactgcttctaggggaaatagttgccagcagtggaaggacatccaaaagatatgtatggctgagtattattgataatgtgtctgtatttacattctttctttcctcccttactagtctgattcaagtgccattttgtcattaacttttttctagttttccctaagaagaaataaatagtgtgaccactgctgttaatgtctccattagggcatttacttcaaaagtccttgtatccagtcagttttctattttctatgctagattttaagaatctaggggtagccagctttactcacctatttttccaatgcagtctgggatagcagcctatacatggaaaacactaggtaaatatttgttgaatttgattttagaatataggaaagtttag

SEQ ID NO: 48851 - DNA, 1049 bp, Homo sapiens
gtaggacagtaaaagtgccttatttcatgtgtaaaaacagattctagtcatgtgggaaaaaggtcagaattagaaaaatcaaagttctgaatcaacagataaacacgcttgtatttcaataaagaataaatgtgcttgaaacagtttttaacagaaggtagctatctaatctgcccacataagtagtgatctgatatacccaactctttgtaatactttgagagcatttccaaaaccaattaagttgtgaaggaaaatgtttttcacacttctgcattaagatcaaccttaactttttaattaaagttttttcctggctcaggtaatttcttaagggtttatggatgccttcgataactagggttcagaaataccagaattattaaaaatgagcaagaaagtggtttggtactgagcaggtaattctttcttgggtattgagctttttagagcttaagtttcagattcagctgagcttaaatttaaaaaacgtctctagatgtaactttgatatacagtatttctagaatccagcccagtcttttgttcattgattgttttccaacatggcttgtctttaagaaaaagacaagggtgttagactgtaacacccttagtaagtaatagaaaatcagaagaaaaccactgtgagatgtctaacctgtttttcagtatggcggagaaatagccacaggaaaaagaggagagcatcatttgaaagaataaaacatttcctacggtatttcgttcttcattctttgttacctgctattaaacagcagcctttgtagaaaagcttctcaaaaaaacccagagttttttcagtggttacagttatttaaataagactttactagtgtaacccggtaattctaattaacagtgatttagtttgggagcggaccaggatttcctcagccggctgctggggagctgaattgcttttttccccacccccagctgcaccaaatcttttgatccccaagctacagtggttgtcatttgagaaagcaaactgagagaaaatacgttgtgaaaatagcctactt

SEQ ID NO: 48852 - DNA, 1049 bp, Homo sapiens
cttgatgggcttaaaatacactagacgctagaccgttgtgggatatttttcagtgtaaaaactagcattgtgcaatgttttacaatttatgttcattagcacttatgaagttaacatgctcacagaagaattgccaaaaatttttttaagtttgcctatggaacaatgggcacattttttcttttttgcttcctaattaatatttttctccaaaaatatatgaaactgcttgttctgagtagaaaagaaatgaattatctgttttttactcctagtgactgatttctattttatatgaactattttcaagagacaactatacagatagggggtcttttggtctctgtcatgaagaaataaactggaggtggcattttagaaatgttttcctaccggaaacaccattgatgctgaatttacagtcctttgaatggtttttattctgtcagaacagagtttctttctagccttttgatgcaccatcatccttccaggaattccctgtgctgactgcgctattttcagttgttgcttgtaggttttcataacaaacatgaactcatttagttgtaatagaggactgctcccttttgggatttcaaaggaagatgaatgatttgaggaagtgtatgctgaatattgcatttgttcattttaagagaatgagggaatatacttttaaatatttaaagcaaaggaaggcaaaggaaggttataagccattataagtaattaaaagcatattttatgtaattacactttagaggaaatggggagaagttcactgaatagcacggtgcctttttcttctgctataaccatgccgtccaaatgtttatgctggaaaataaattggcaaatatttcccatgatgatttaacttttcagttctgtgatttaaaaaattaagttaattctgagttgccccagaattttttcctactcccattagaaaaaaacaaaaccaaaaacatgctgtagtactgttgtttcttagtacatacagcacgcaggtttttcttttttttttttttttctttttttgtagc

SEQ ID NO: 48853 - DNA, 1009 bp, Homo sapiens
tcccaaagtgctgggattacaggtgtgagccaccgcccccggcccaaaaaacatctgaacctcttggtgtaggttttgtttggaggctgtatttgaaatttcagagcaggagttcccttttgcctgatgccatttgggtcatggaaatgtcaatgcaactaccaatgggccagccctaaccttggtgctggccattaggaagagaggctggcacccaggtcctgcccttgccccctcctagctagggcaagtggggatgtgggcatttctggagtgagtgctgagggctcctggtggggtgaggatgggtaggtaggagcaggatgggcccggggtggttaccatgcgggaatagccggcgctggccagccacagctcgtcgggagagaaggctatgctcttcacccaggtgacatggcccttcagttggataagcaggctgctggttgtgggcttccagatgtggatggtcttgtcccaggagccggatgcctggacagcagacagctctgatccccagggtttggggcctgtgagctcactgggcccctaagtggcctgggacccttaagggcctggctgccagcaagggaccagcctggaacccaggacaccccacttaccaggaggccggatgctgaatagcacaggcagctgatgttggcactgtgtccctctagcgcctggtgggagactgctggggtcaccatccgcaggtcccagatgtgtacggtggagtcccaggagccggtggcctgcaggcagcttctgtgagtctggcccagccagctctccacccactctgcatctaggcgggacccagagtccatccccttcccaccactcagctccaagtgggtatggggccactgaggtggggcccagggcagagggtaggctcaccaggcagttcaccgtgggtgagaagtcgctgctctggatggagtcacggtgcccaactaagaggcgcagcatctggccggactagagagagccctgagctgcagaa

SEQ ID NO: 48854 - DNA, 1037 bp, Homo sapiens
ggagccggggctcccccgctgcggcgccattggccgcgcccgccgccacccggcagtagttgcggaggtcagccccgcctacttcctctttccctcggagcgggcggcggcgttggcggcttgtgcagcaatggtgagagctgcggaatcgggcgccatccgagcgctgtgaggcgcgggggttggggaaggcggtgcgggctgagcccgcggattctatctgccacctaggcctgtggggcgccgcgcagaatggtctggcgccaccacaacccgcctcttcgcttggcgccgggagaggcgcgcggcccgggcctgggttactctgcccaaggcacggccggcgagggagactgtcctgagccctggttggggctccggcgcactcgtagtcgatggcgagtcgcgcgcctttgggggctggccacgcaggtgaaggggatatggccccgcggcctggctgaggcacactctctcttgcgcgcaggccaagatcaaggctcgagatcttcgcgggaagaagaaggaggagctgctgaaacagctggacgacctgaaggtggagctgtcccagctgcgcgtcgccaaagtgacaggcggtgcggcctccaagctctctaagatgtaagtgaggcggccggatcacagccctcgtgggtggggagcacgtgtgcatcgggatcgtcggaggatttcaaagttggcttaaggagctggccgcttagatgcccactccgtgcatcctggcgcgcatgggagacccgttgtgtgcttagcctcttacctgccttgaccttgcggtccttgtgcctggaatgcatccccggagacccatcttaatgctgccttcaaagcctacccggaccccttccttccgcttcccaccaacacttgagtttttaacccccttggcaggtgggtggcttgcaccctggagtggcagcgtaagttattttacatggctaagagtgcgggagacttgtgaaaggaacatgggtttggagttcatcaacctgggtacaaagtccacttctcaa

SEQ ID NO: 48855 - DNA, 1042 bp, Homo sapiens
tagctactcaggaggctgaggtaggagaatcacttgaacccaggaggtggaggttacagtgagccaagattgcactactgcacgccagcctgggcaacagagtgagactccatctcaaaaaaaaaaaaaaaatagctgggcgtggtggcgtgcgcttgtagtcctagctacccaggaggctgaggcaggagaatcgcttgaacccagcaggcggaggttgcagtgagctgagatcacgccactgcactccagcctgatgacagagtgacactccatctcaaaaaaaaaaaaaaaaataggccgggcatggtggctcacgcctgtagccccagcactttgggaggctaaggcaggtggatcacgaggtcaggagatcaagaccatcctggctagcacagtgaaaccctgtctgtactaaaaatacaaaaaattagctgggcatggtagcgggcacctgtagtcccagctactcagaaggctgagggaggagaatgacgtgaacccaggaggcggagcttgcagtgagtggagatcatgccactgcactccagcctgggcgacagagcaagactccatctcaaaaaaaaaaaaaaaaaaatactgtgtgaagatgttaattgctgcattcttttagatgggaaaaacagaaagcctaagtaggcagcacagtaggcaaatgggtcagtaaattacaaaacactctagaggaaataataatctgaggtctaaagattacatggagacagaaggacatttaagagtagggaaaagatacaaagttttacattgtcctattaaaactttatataaagctataaacaaaagtcattaaaagagagtttaagaaaatacgttagaatgctagtgttttataatggtagacttatgcagtatcttttttctcaggttacatttttctataatgtacctgttttatttaaatcgctttgcattttaaagccatttgttaccactcttcagcttcttgtgaacagaaagaatgcttctgcttccctctcaggtgagagaactggagcagacc

SEQ ID NO: 48856 - DNA, 1047 bp, Homo sapiens
aaaaaatttaaaccctaatgtatttaattttataattcataaaaatttaaatattggaactaagaacagagcaaagcaaagggaaaaagcactcctttgttttcaaattgcacaaactgtccctggagattctgatagtctctcatctctcttaactatcactgtaaacaacatagaaagcataagactgcaagaagtcagttatacacaaaacaaaatgaagcacagtggaattttctctttctttatctgtatatttctgaagttggtaaagcaactatcttctctattttacagaagagaaagctgagacccaaaaagctattcatagtgatagagctagaactaaaactcagatctcctcatctcagcccagtcttctcagtagctcagactgctttctataatgaacaagaaagaataattagggatttgtattttggcacaaaacagtatcaaatttttattgtaaaaatccacaaatctgacattttatcttttattctagccaggatgtattcttcatttgcatgtgtgtgtttctcttagaaagtggtgctctcaaacctttcaaagcacagaatttattgtaccctctttatttttaccaaattgaaacgtttcaggatttcagaagcaaagtgcaatccaattgtggctggagttttcctgatagaggatccgggtggttccctcccctccaacttctggctactgccctttatttcctttgtgcaatagaattccctgaaacagattatgtcgtaattatactgatttagtcaggataatgggaaaagcgacaaatcggatttatgtattaggtattatggagctttctttagcactctcctccaagtttaatctctgacatgtgtgatatagtaactttctgtctctgagaagcagtttggacccagctgaaaaattttatttatggagacttgtaatcagcctgatatacagagaacactctggactggaaatatagtcaggtaccaaggtctgctaatttggccattgccagtgattcaaaaccacctcccc

SEQ ID NO: 48857 - DNA, 1050 bp, Homo sapiens
ttttaaaggtatgtgtcccaggcaggaaagttgagaacgctttcctgaagtttccttcccctttgaaacataatttccatttaagcatctttttactgtcacttttctcctctttgcagatcaggcatttctccagttttttggagatgaatttcttcgcttgctcctcacaagatttatcttttgttcagccaccatgaggatgcacaagatttttcgggtaggcaaagaacattattaaagacgaattttatcattttaggtatttaagaaccatgtattatattttacctgtataaaataaggttataataaaataatattattttggataaattcaaaataatatttacaaatgtaccgtcacactggtctgctaagtaaaaaaatacatttgaatacgtaaagtataaagattaacaatattaaggcacatttgagtacctatcgtttgtttaaaagtagaacattttctggctggccgtggtggctcccgcctgtaatctcagcactttgggaggtcgaagctggtggaacacttgaggtcatgagttggagaccagcctggccaacatgctgaaactccttctctactaaaaataaaaaaattagccaggtatggtggcacgcgcctgtaatcccagctactctggaggctgaggcaggagaattgcttgaacccaggaggcggaggttgtggtgagcagagattgcatcactgcactccagcctggacgacaagaacgaaactccaactcaaaaaattaaaaaaaataaaagtagaacattttcaatacatccctgatcctatctccctctcaaatgaaacttacatcctgaattttatttatttatttatttatttagagatggagtttcactcatgttgcccaggctggagtgcaatgactcgatctcagctcactgcaacctctgcctcctgggttcaagtgattctcctggctcagactcccaagtagtagctgggattataggcgcccaccaccacacctggctaattttttgtatttttagtagatacagggtttc

SEQ ID NO: 48858 - DNA, 1022 bp, Homo sapiens
ctctaagaacatagtatgttttggctgggcgtgctggctcatgcctgtaatcccagcattttgggaggccgaggtgggtggatcgcttgagctcatgaatttaagaccagcctgggcaacatggcaaaatcccatctctactaaaaatataaaaattagccaggtgtggtggcatgcacctgtagtcctagctactggggaggctgaggcaggagaatcgcttgaaccagggagacggaggtttcagtgaaccgagatcgtgccattgcactccagcctgggcaacaagagcacgactcaaaaaaaaaaagaacatggtatgtctttacatttgttcaagtcttcattcaagagtattttaaaaaatgtttttgttgtttgattttttatttctttttaagtttactcctaggagttttatttttcttgttgctttaccacacagcttatgattttacttcccttgtagatataccttcagggaaaggatatgattaattatgtagagtactttagtttgagtgtcagcttgttactgtaaatcacagattcacattctggtcttttatgtcattccatgagagcagttattatgacccacaataagagatgactccaggaatcaggttttggagctgaaagccagatcctggatcttggaaagttcacctttatatatataagtgtgtgttgctcgatggattggcctcttggtatacagccagatgacttctccgtgcaaaactacaatcatgtttatgccttgtgtttaaaaaatcagtagttcactcagtaaactatttcaattgagagcctttaagaaagcctattatgcatggtacttatatatgaatggcagtctccttagctgttgctgatgtttctgcatctatttatgagtttaagggcccaatctatacactaaaaatatgctttggaaaattactaagtaactatctttggtcaaatctttaatgcaagttttaaattcttatatattacagaatttcacaaacttgttt

SEQ ID NO: 48859 - DNA, 1068 bp, Homo sapiens
atatacccctccctccccagtcttccaaaaacatctctgatcttctctcttccctggcccctgattgctcagttctcttcagccacactgacccccttgctgttcctgaaacatatcaggcagtcatctgccctagatctttacattcttttccctctgccttgaatgctcttccaaagatacctacattattctttaggtgtttgagcaaataaagccttttaaaaggtcttccctaattgtcctacttaaaattatatgcctccccagtactcctcatccacctttctttttcttaataatcataacagttaacttttctgtagtgactagcaatatgcactgttctaagcattttatgtgtatacgtttaattcctgcacaacacagtgtgttgcttttattgttcccattttactgataagaaaaccaaggcacagataaaggttaagtaatttgcccaagatcacacagatagtaggtagccaagttggaatgtaaaacaatggactgtaaaacctgtgctattaactatgtgctgtgcttccatatgtagcacttgtcaccttctgtgatattatataacttatttatttagttggttagtttactgtgggtcacaatctaccatttctccatcccccatccaactcagctctaggccgggcacggtggctcacgcctgtaatcccagcactttgggaggctgaggcgggtggattgcctgaggtcaggagttcgagaccagccttgccaacatggtgaaaccctgtctctactaaaaatacaaaaattagccgggtgtggtggcacatgcctgtaatcccagctagtagggaggctgaggcagggagagttgcttgaacccgggaggtggtggttgcagtgagctgagatcgccactgcactccagcctgggcaacagagtgagacatcatctcaaaaaataaaaataaaaataaaaaaatacttacataaatgtcagctccagaagatagagttttttctgttttgtttactgttgtatctctagcacctgtagcagtgtctagtccttaggtccatgag

SEQ ID NO: 48860 - DNA, 1063 bp, Homo sapiens
attgactgcggaaaagtgcacatgctgtaagtgtgtttttaagaaactgaatacatccatgtgacttgtattcagatgaagaagtagcacacacagcacctcagaaacctcccctgttgtgttccctgttacttggactttttaactcattatgagcagagtgaaaaagggcatttcagtgcatgaaaggtttcagatttttgtatcatgtctcatttgggatataatagattctctttttacgcttggaggtgtgtctttccacattatattaagctgttcatctaagttgtcagagcctttcattttcccagctgtgaatatcttaatggagtatttttctcaactgaaaataccttcttataatatgtgcataatagtttatctcttatttccactcactgtgtaagaaaacataatccagaaaaataagaattggatgaaatgaatgatgtttcgcatataatggctcttgcatgtagttgcaataataatgaagtgagaataatgttagaaaaagctttgaatactgtcagaaaatgatcaaaagcccaagtgcttgcagggttctggttgccatggtgactaagactgtcgaagcagaatggaatacttagtgagattatataaggcagcatctcgagacatgtatttgagaaacacagctgtgtctatcagtgatatccctaacttgcagtgttttgcaaaagcagaggcctccaagtcactaattatttgactacagaggagcaaatacacaaagccaaagaaggcttgggaggccactgatagtatatataatattattattatagtacatataatagtatatattgtgtgagtgtgtgtgtatatgtatatttttaattgggaggtgccccaaagtgaagtgtactagtcttaaatgaaaataattacagaaattatttttattaaatatgctcctagccaggtgcggtggctcacgcctgtaatcccagcactttgggaggctgaggcaggcagatcacctgaggtcaggagtttgagaccagtctgaccaacatggagaaaccccatctct

SEQ ID NO: 48861 - DNA, 1035 bp, Homo sapiens
tatttttagtagagacaagctttctccatgttggccaggctggtcttgaactcctgacctcaggtgatccatccacctcggcctcccaaagtgctgggattacaggtgtaagccactgcgcccgactgagatgatctgttttcttacagtatcttacacttaaattatatttttgtgatttgattgtaatcagaagaattctatatctgtcttggataaaaaatactatcagatgatataactaaggtttttttctatttttatttttacctcctgcatgaatgaacatatgttttcttacaggactgaatttgctcttaaagaaatcatgtcctctggaggtgctgaagatgatatcccacagggagagaggaaaacagttacagatttttgttatcttctggataaatctaagcaactgttcaatgggttaaggtgagtggactcttggtgttttgaacttttctttagttctgcatttgttttttttctggctgatgtgtggtaagtttccgaaaattatgggtagaatgtcatataaatttctgtattagagtgatcatgattttttctttgacatcatttttaaaattcttggataaaaaaacaataggaaaagaggataacttacactgttttagtcaacttaaaaagagctattttgtgaaatggttttgtatacataactcacaccagatctgattttaatctggttttgcacattagggtgttgaggtctgaggagcctaaaaatgcatatgcaattgaatgtggagcctcctattgcatttttgtaatttgtttacttgcttgtttcttttattctttctttctttgttttctgggatgaaatgtctgtgcctaaagtaatgatggttacctttgtctaccagattggggtggtgatggtggggggtgggtggaaaaagtaatgatgaggtgttataaaccatgctatttatgatttaacctgtatttcagttcttgagagtcttaggatattcactgacttcagacctaaagcttcattagctt

SEQ ID NO: 48862 - DNA, 1050 bp, Homo sapiens
gtggagacggcagcagtacagtccagcttccgctcggcatcagagggagaccgtggaaagagagggagagggagactgtggggagagggagatggagaggggagaggggagagggagcttatttactcattttaaaatttatttttagagatggggtcttgctctgttgccgaggctggagtgcagtggcacaatcataactcactgcagccaggctcactccccagctcaggctgtcctcctgcctcagcttcctgagtagctaggactgcaggcacatgccatgacacctgggtaatatttaaaattttcttagagacagagtctcactatgttgcccaggctgctcttgaattcctgggctcaagttatcctcccacctcagcctcctgaatagctaggattacaagcatgagctatcttgcctggctctggttcttaaaccttggaggttccatttatatggttgtatttctttttcttttctttttctttttttttttttttgagacagtgtctccctctgtcgccaggctggagtgcagcggggcgatctcggctcactgcaacctccgcctcctgggttcaagcgattctcctgcctcagcctcccaagtagctgggactacaggcccacaccaccacccttggctaatttttgtatttctagtagagacggggtttcactatgttggccaggatggtctcgatctcctgaccttgtgatcctctcccctcggcctcccaaagtgctgggattacaggcgtgagtcactgtgcccagcctgttgtatttatttttctagattacagttaattttgttttcatttcttgaaacctagtagaatatgtatctgcctataattcaagggcaattgaaagaaagaaaaataactcaaggccaggcatggtggctcacatctgttatcccagaactttgggaggctgaggcaggaggatcatttgagcccaggagttcaagaccagcgtgggcaacataatgagactctgatgctacaaaaaacttaaaaaaaaaaaaaaaaaaatta

SEQ ID NO: 48863 - DNA, 1057 bp, Homo sapiens
ggttttggtcagctgtgtttttctatgaagacaaatgatctgttcaaggtcatacatcttataatgaataaactttccaatcttaaactttttcaaatggtgtcataccaacataatacgtatgtttaaatttgtaaactcttttatcctctctactagaatatcaactagtgggtagattctgtatttactaaaacttcctatcatctgagtcttaaggcctataaacagatatttgaattaaattaaagcatgcttggggccagacatggtggctcatgcctgtaatcccagcactttgggaggccgaggcgggtgggtcacttgaggtcaggagtttgagaccagcctggccatcatggcgaaaccccatctctactaaaaaatacaaaaattagctgggcgtggtggtgcgtgcctgtaatctcacctacttgggaggctgaggcaagagaattgcttgaacctggaaggtggcggttgcagtgagccgagatcacatcactgccctccagcctgggagacagagtgagactgtgcctcaaaaataaatacatagatagatagatagatagatagatagatagatagataaatggaaaccttgatttaagtagttgcttcagtagttcatttgggctttgtcagtcaataacacattttacttctgtagtaatgggttactgataagggaaagatatgttagggtatgtattgaataaaaaggtgggaatggtgaattgaaagtatagttctttaaattatttactcatttttttaaaattgtttggtgttttattaaatacatggcactttaataacaaatgtaagctcctctttctctgttaccagagacctgtcttttattattattattattattattttttaaaattgataattcttgggtgtttctcgcagagggggatttggcagggtcataggacaatagtggagggaaggtcagcagataaacaagtgaacaaaggtctctggttttcctaggcagaggaccctgcggccttccgcagtgtttgtgtccctgggtacttgagat

SEQ ID NO: 48864 - DNA, 1027 bp, Homo sapiens
tgcccctatagttataataactatgttaatgtcagtcctgttctgggttggttttgattggttgatttttcttatattttcttctttccgtgtctggttatctttgagtagatagtagacattgtaaagatacttgagttttttttcttttttataaatttcttgagacttttcttggcacgcagttaaattatttggaaatatttctgttctttaaggtcatacttttaagctttgttaggtggatcagatcaccgtttagggctgtcatcactagggcatataactgtactaatgtgacatgacccttctgaatgccataccagggaattataaggtttttcaagtctggctggtgggaacaggcactattatcgcttgtgtgtgagttccaggcttccaggcactgttccctctaatcctctcagatgattctttcctctctggtagttttcttctacacatgggcttatcagtacttggcggaatacttgagagaaactctccctagatctctaatattttctctctgtgcagctttctcctctacagcattctgtcctgtgcactctagatgccttagcgtctctagacactcagctccatctttttaactcagggcctctgcctgagttcctcttccctgcgctacatcctagaaatgctctcaaggcagtcagctggggtagttgtaggccctcccttcttttgtcctcagagatcactgtccttgctgcctaatgtccaatgtcttgaaaaccactatttagtccagggatgtacaatctttggcttccctgggccacactggaagaagaacagttgtcttgggccacatataaaatacactaacactaatgatagctgatggactaaaaaaaaaaaaaaattttcacaaaaaaagtctcataatgttttaaggaagtttgcgaatttgtgttgggccacattcaaagccatcctgggttgcgtgtggttcatgggccatgggttggacaagcttgatttactctatttcatctgcttt

SEQ ID NO: 48865 - DNA, 1025 bp, Homo sapiens
caagccaacagcttgactcattgtcctggcttcacaagggctgagttatgtgaatctgtgattttccttggagagtctcctttcttccagcactggcttcattgtacccaaggggctcaatgtccagctaagatttctcttatcctgtataggtttctgatggacaaagagagagaatgtgtgtgtgtgtgtgtgtgtgtgtgtgtgtgtgtgtgtgtacgtgtacgcacgcatgcatgagagagagaatatgtgtgtgtgttttggaagcagctatcttttttttttttttttttgagacaaagtctttactctgtcgcccaggctggagtgtagtggcgtgatcttggctcactgcaacctccgcctcccaggttcaagtgattctcctgcctgagccccttgagtagctgggattacagtgcctgccaccatgcgtggctgatttttttgtattttttgtagacacagggttttgtcatgttggccaggctgatctcaaactcctgaccttaggtgattcacccaccttggccttaagaagcagatatcttttgattaaagggcagttcagttttatttttctttcttttttttttggagatggagtatcactctgttgcccagactggagtggagtggcacgatcttggctcactgcaacctccacctcttgggttcaagcaattctcctctctcagccacctgagtagctaggattacaggcatgtgccactacacctggctaattttgtatctttagtagagacagggtttcaccatgttggccagcctagtctggatcctgacctcatgatcctcccacctcggccactcaaagtgctgggattacaggcgtgagacaccgcgcctggccttcatttttaaatttaattttattttttttaagacagagtttcgctctgtctctcaggctggagtgcagtggcgccatctcagctcactgcaacttccacctcccggatttaagcgattctcctgcctcagcctcctgagtagctggg

SEQ ID NO: 48866 - DNA, 1123 bp, Homo sapiens
aacagagcaagactccatctcaacaaaaaaaaagaaaagaaaagaaaaactgcagcatagaagtgatgtgaactttcattaaagcttctcttttttatgttaggaacccatagtaatcggtatctagatttatgaattcattagggttgcaaatgttgaaattctaattgttttgcccatgcgtggtggctcacacctgtaatcccagcactttgggaggctgaggctggtggatcacctgaggacaggagttcaagaccagcctggccaacatggtgaaaccccatctctattgaaaatacaaaaatcagccaggtgtggtggcacgtgcctgtaatcccatctacttggtaggctgatgcaggagaatcacttgaacccgggaggtggaggttgcagtgagccaagatcatgccactgcactccagcctgggtgacagagtgaggctctgtctcaaaaaaaaaaaaaaaaaaaaaaaaaaagaaattctaattctttcattccttctttttatttattttttttaagttggagtctgcgtgatctcggctcactgcaacctccgccccctgggttcaagcgattctcctgcctcagccaactgagtagttaggattacaggcgtgcaccaccactcctggctaacttttgtatttttagtagagacggggtttcaccatgttaaccaggctggtctggaactcctgacctcaagtgatcggctcgcctcagcctctcaaagtgctaggattacaggcgtgagtgccactgtgcctgtctcattccctcttcattattagctggaatacttccagaaagagacatttcccttactgactgaaacaattttttgaattttatttatttatatatgagagggagttttgctcttgttgcttaggctggagtgcaatggcgtgatctcggtgcactgaagtctccgcctcctggattcaagcgattctcctgcctcagtctcccgaatagctgggattaaagttgtgcaccaccacacccagcaaatttttatatttttagtaaggatggggtttctccatgttggccaggctggtcgtgaactcctgacctcaggtgatagacctgcctcagactcccaaaatg

SEQ ID NO: 48867 - DNA, 1126 bp, Homo sapiens
tgccgggcatgctggctcacacctgtaatcccagcactttgggaggcccaggctggcagatcacgaggtcaggagtttgagaccagtctggccaatgtagcgaaaccccgtctctactaaaagtacaaaaattagccgggcgtggtggcaggcagctgtaatcctagctactcaggaggctggggcgggagaatcgcttcaacctgggaggcagaggttgcagtgagctgagaccacgccattgcactccagcctgggcgacaaagcgagactccatctcaaaaaaaaaaaaaaaaaaaaaagaaaggtattagtatcagttttatactgtggctatagaaattctgaatatcaaatgatataaattcctggtaaacacttcaagatgaattaattgaggcagatgaatggtgtgagcccaggagttcaagaccagtctgggcaacatggtgaaacctcatctctaccaaaaatacgaaaattagccaggtgtggtggtacacacctgtagtcccagctagttgggaggctgaggtgggaggatcagctgagactgggaggtggaggctgcagtgagccatgattgcaccactgcactccagcctgggcaacagtgaaaacctgtctcaaaaaaaaaaaaaaaggtaagttaattgttgaatgtagccttgagtaactgattgaacgggtctgctatgtagagttgttgacagttatattacatatgtagtacattttagaaaacagttgacagaattatggttttttttttgttttttttttttttgtttgagatggagttttgcttgttgaccaggctggagtgcaatggtgtgatctcggctcactgcagcctctgcctcctgggttcaagtgatcctcctgcctcagcctcctgagtagctgggattacagacatgcgccaccacacccagctaattttgtatttttagtagagatggggtttctccatgttcgttaggctggtcttgaattcctgacctccggtgatccgtccgccttggcctcccaaagtgctgggattacaggcatgagccaccatgcccagcccagaattaggattttaaaaatttttatttagttttgagatggagtctcactctgt

SEQ ID NO: 48868 - DNA, 1054 bp, Homo sapiens
ctataatcccagcactttgggaggccaacgtgggtggatcacaaggtcaggagtttgagaccagcctgaccaacctggtgaaacccccgtctctacaaaaaatacaaaaatcagccgggtgtggtggcggcttgtacctgtaatcccagctactcaggagtctgaggcaagagaatcgcttgaacccgggaggcggaggttgcagtgaaccgagattgtgccactgcactccagcctgggtgacagagtgatactgtctcaaaaaaagaaaaaaaagaaaaaaaaatggtggttttttttttcagggaaagtttttgagagaatggcacagcagattcttgtagatttccctggaatcaaaaatcttgtttgtataaacatttaatagaaaaaatttgtttacgtgtattttatttttttgttaaaatcaaatttccaaataattcagtatgtaactctttattgtagttataaactatatgtttgtacagtttgatataatttgaaaagaatattgtggctattgtattgtttgtaactgtaaacttttacttcacagggtgattttgtagacagaggttactatagtttggagaccttcacttaccttcttgcattaaaggctaaatggcctgatcgtattacacttttgcgaggaaatcatgagagtagacagataacacaggtctatggattttatggtaagaattcctatttctctgattctgaatattattttactttcctctttggaaaacaaagctacacaagtcatacacatgctttatgtatattattttccccacatcctcactccttcactcctcccaaacaattgaaaatcttatgctcgagagaagaccactgttaactttttggtgtgcatctttctagatctgtgcctcaaagtgtagctggaatcacctgggttctcattaaaaatgtagattgccggccgggtggggtggctcacacctgtaatctcagcactttgggaggctgaggcaggcggatcacaagatcaggagatcgagaccatcctgaccaatatggt

SEQ ID NO: 48869 - DNA, 1043 bp, Homo sapiens
gaggctgaggcaggagaatcacttgaacctgggaggcggaggatgcagtgagccgagatcgcaccattgcattgcagcctgggcaacagagtgagactgtctcaaaaaaacaaaacaaaacaaaaaaacatatctgtaaacatcaatagaaaagtttaaggatactcactcttctaccatatttttattaaaaaactgacttacaaaactttttaatgttcacttcctgactttgtgtatataactactcaattttttacataatagaattgtgtagttataggtatagttttgtattccattcttttccctaatgatttttgcattttgctacatggttttcgtcataatttttattcatggcctcataaggtccttgagttgctagatcttaatttaagatattcacttatgttagtcatgaaggctgtttcttttgatgttttaaatgttgtcataacacttttttttttttgagacagagtcttgctgtgtcatccaggctggaatgcagtggcaccatcctggctcactgtaacctccgtctcccaggttcaagtgattctcctgcctcagcctcctgaggtagctgggactacaggtgcccgccgccacgcctggctaatttttgtatttttagtagagactgggtttcgccatgttggccaggctggtctcgaactcctgacctcaggtgatccacccgcctcggcctcccaaagtgctgggattacaggcgtgagcctctgtgcttggcccactttttttttttttttttgagacggagtcttgctctgtcacccaggctagagtgcagtggcgtgatcttggcttactgcatcctccacctctcaggttcaggtgattctcctgcctcagcctcccgagtagcagggattgattacaggtgcccaccatgatgcccagctaatttttgtatttttagtagagacagggtttcaccatgttggccagtctggtcttgatctcctgacctcatgatccacctgcctcagcctcccacaatgctgggattacaagtg

SEQ ID NO: 48870 - DNA, 1009 bp, Homo sapiens
accgcgcctggcaaaaaaaaaatttttttaagggatagcgtcttgctatgctgtccaggctggtcccaaatgcttcaggtgattctcctgccttggcctcccaaaatgctgagattataggtgtgagccactgtgcccagccaacaaacacttatttacatggttccttgtgttgagtactgttccctgtgggtgccaggggcagaattggatacttgtgtctgcctttgaggggctttcaatatagtaagggaggtaaggaggtaaacaaagactgtaatagaggctgaccagggtgttggcaaacagaagaagcagtatgtaactttagagtcagagatgatttcataaaggagcagttacgaggggcagagttcaggtagacaaaatgagaaggaaagaacatgcaaacagaataaacaccatgtgcaatagtataatgtaatttgcaagaacatggctggttcggggaacttgaagtggtttggtatggctggaggtggtactggaaagaaagatgccaaatcatagaagagtaggctgttaaacttagattgttattttttaggtggtgcatgaacactatgaaatgtttttatattttagggaaaaatcatactgtgattcgtgatactgtttaaaatgtagctaactaaaaataaaagtagattcaaagaaaattattacagggatacactgttgtatgtggtaggaatatgacaaaataatgaaaatggtatttggtgtttgggaaacactgccataaatggaggaatacgcttgaggagtttttaagaaggagaatgacagtaggcttttgaaatgtttattctggcagcattgtggaccatggattggaatgcaggaaaaatgtcatagaagcagtaggcccggtgatatgagagtctgagataaggcaatgataagtgattgttgtgttggaaaggaaatgaagaaggtatagtggcacctgttaacagatttggtctaggttatgatgaagagagtt

SEQ ID NO: 48871 - DNA, 1324 bp, Homo sapiens
cttcagactgaaatgcggggatctagatgtgctaatgcttgtcagtaacaactaacaagtttttctgtatgtaacttctaggtgaaagacccctgacaaaagacaatcatcttctgggtacatttgatctgactggaattcctcctgctcctcgtggggtcccacagattgaagtcacctttgagatagatgtgaatggtattcttcgagtgacagctgaagacaagggtacagggaacaaaaataagatcacaatcaccaatgaccagaatcgcctgacacctgaagaaatcgaaaggatggttaatgatgctgagaagtttgctgaggaagacaaaaagctcaaggagcgcattgatactagaaatgagttggaaagctatgcctattctctaaagaatcagattggagataaagaaaagctgggaggtaaactttcctctgaagataaggagaccatggaaaaagctgtagaagaaaagattgaatggctggaaagccaccaagatgctgacattgaagacttcaaagctaagaagaaggaactggaagaaattgttcaaccaattatcagcaaactctatggaagtgcaggccctcccccaactggtgaagaggatacagcagaaaaagatgagttgtagacactgatctgctagtgctgtaatattgtaaatactggactcaggaacttttgttaggaaaaaattgaaagaacttaagtctcgaatgtaattggaatcttcacctcagagtggagttgaaactgctatagcctaagcggctgtttactgcttttcattagcagttgctcacatgtctttgggtgggggggagaagaagaattggccatcttaaaaagcgggtaaaaaacctgggttagggtgtgtgttcaccttcaaaatgttctatttaacaactgggtcatgtgcatctggtgtaggaagttttttctaccataagtgacaccaataaatgtttgttatttacactggtctaatgtttgtgagaagcttctaattagatcaattacttattttaggaaatttaagactagatactcgtgtgtggggtgaggggagggagtatttggtatgttgggataaggaaacacttctatttaatgcttccagggatttttttttttttttttaaccctcctgggcccaagtgatccttccacctcagtctcccagctaattgagaccacaggcttgttaccaccatgctcggcttttgcattaatctaagaaaaggggagagaagttaatccacatctttactcaggcaaggggcatttcacagtgcccaagagtggggtttt

SEQ ID NO: 48872 - DNA, 1055 bp, Homo sapiens
aagtgctgggattataggcagaagccaccgcctggccagactgtaatttaaataagggttaaactatgtgacaatacacttaattatcttttatccttttaggttacccatgcagttgttactgtaccagcctattttaatgatgcccaacgccaagcaaccaaagacgctggaactattgctggcctaaatgttatgaggatcatcaacgagccgtaagtatgaaattcagggatacggcatatttgccaaatagtggaaatgtgaagtactgacaaaacttttccctttttcaatctaatagtacggcagctgctattgcttatggcctggataagagggagggggagaagaacatcctggtgtttgacctgggtggcggaaccttcgatgtgtctcttctcaccattgacaatggtgtcttcgaagttgtggccactaatggagatactcatctgggtggagaagactttgaccagcgtgtcatggaacacttcatcaaactgtacaaaaagaagacgggcaaagatgtcaggaaagacaatagagctgtgcagaaactccggcgcgaggtagaaaaggccaaacgggccctgtcttctcagcatcaagcaagaattgaaattgagtccttctatgaaggagaagacttttctgagaccctgactcgggccaaatttgaagagctcaacatggtatgttccttgttttctgctttgctaatgagatctccttagactctgaattcaggacattgcatctagatacttagataacagacatcacagtaaccatgtcttttttctaggatctgttccggtctactatgaagcccgtccagaaagtgttggaagattctgatttgaagaagtctgatattgatgaaattgttcttgttggtggctcgactcgaattccaaagattcagcaactggttaaagagttcttcaatggcaaggaaccatcccgtggcataaacccagatgaagctgtagcgtatggtgctgctgtccaggctggtgtgctctctggtgatcaagatacaggtaggtcat

SEQ ID NO: 48873 - DNA, 1056 bp, Homo sapiens
aatgggaccagcggatggggcggatgttatctaccattggtgaacgttagaaacgaatagcagccaatgaatcagctggggggggcggagcagtgacgtttattgcggagggggccgcttcgaatcggcggcggccagcttggtggcctgggccaatgaacggcctccaacgagcagggccttcaccaatcggcggcctccacgacggggctgggggagggtatataagccgagtaggcgacggtgaggtcgacgccggccaagacagcacagacagattgacctattggggtgtttcgcgagtgtgagagggaagcgccgcggcctgtatttctagacctgcccttcgcctggttcgtggcgccttgtgaccccgggcccctgccgcctgcaagtcggaaattgcgctgtgctcctgtgctacggcctgtggctggactgcctgctgctgcccaactggctggcaagatgaagctctccctggtggccgcgatgctgctgctgctcagcgcggcgcgggccgaggaggaggacaagaaggaggacgtgggcacggtggtcggcatcgacctggggaccacctactcctggtaagtggggttgcggatgcagggggacggggcgtggccgcctggcctggcgtgagaagtgcggtgctgatgtccctctgtcgggtttttctgccagcgtcggcgtgttcaagaacggccgcgtggagatcatcgccaacgatcagggcaaccgcatcacgccgtcctatgtcgccttcactcctgaaggggaacgtctgattggcgatgccgccaagaaccagctcacctccaaccccgagaacacggtctttgacgccaagcggctcatcggccgcacgtggaatgacccgtctgtgcagcaggacatcaagttcttgccgttcaaggttcgaccgggtttttctcatccagttagagaacgggtgggtggtgggagtatttagagttataagtctctggaaaagtgttgagacaacagttgaaggttatagacatgatgtatgtaataactttaatactatta

SEQ ID NO: 48874 - DNA, 1046 bp, Homo sapiens
aaagctggacgtctccacttctgacatttgtgccactaattagtttctgcttggtattaaattctatcttctctgtcttactttgaaaaacttacataagtgtaaatacagttctacatatccagattttcacttcagtactcacgagtggaggtacagtttcagtatctgccctgagcatgtgaccagtgcttagatgccacatttataccctcttatattgcattttatttacatagcactataaaagcaaatctgctcaaaggaggcccaattaaaaatgcaatcttcaaagcaattagcattttatcatcaaataccagttccatcatagttaaatgaatgaccacctccctgctatatgcagggatgtatgtgacatataagagatcactgacagatgctatcccctcctttacagccaggcaaaccttggaagggacagtgccttgccaaggtcccacagctgaaacatggcagagctaggatttcatcctaattctaacttcaggaattatgctttttttcctctgtgtctcaggcttttgttaaaccttaatttaaacagaatttaacaattaatgcaaaataatttgaactaattggaatattaaactttacatttttttaaagtcatactaatacataactttttcttagctgattttttttttttttttttttgagacagagtctcgctctgtcacccaggccagagtgctgtggcacaatctcagctcactgcaacctccgcctcctgggttcaagcaattctcctgcctcagcctcccaagtagctgggattccgggtgtgtgcctccatgcccagctaatttttgtatttttagtagagacagggtttcacagtgttggcaaggctggtctcaaactcctaacctcgggtgatccatccaccttggcctcccaaagtgctgggattacaggcttgagccactgcgcccagcatctcagctatttttttacaactagtgtctcagctattttttacaaagacagcttgctcctgtgacttaaccctgttccta

SEQ ID NO: 48875 - DNA, 1101 bp, Homo sapiens
tggactgcagaggaagagcctggtgaccaggaggccagtgatgagactgtcacactcaagcactagcaggtgccccctgagccagtgggggctctgtcagtagacagctatgtctatcaatagacagccatgtaaccttaagcaagtgtcttaatctttctgagcctcaattctatcctgcgtgaatgggaatatcagtaccaatggctcagggttgctatggggaacgagtgaaatcccacatggaggctgtggggcgcagggtgagaggcagtaaagaagacgttttgggaatcttggaaaggacagagattcttcaaggaatgtggattacttttgtgattaggaaaatcacatttagaaaaaaaacaagacccgtgacactgctaacaccacccaagctcttgtgcttttgactcactcctgtggactgagcttcctgccaagagcaagcaggaatttttttatccttgcatccctgctgcccagccaaggacctgccatagtgtttgtggaattaattgttgaatgattaatatgttaccattctctgtttactggaatggcattattaagtcatcgctcagccttttcttctccaaattaaatagcccatattattttaatttatcccaaagcattttaagcagacaccatttgccaagcctcatgtatctttatgtgttaaactgccttttcctccccaggttcaagggcagacggggtttttgaggaggattcgcaaattgacatagccacagtacaggatatgcttagcagccaccattacaagtcattcaaagtcagcatgatccacagactgcgattcacaaccgacgtacagctaggtaagtgtgtgagcaggtgatgagctagcttgtcgtgtcagcagtcggtgtagaaatggggaaagaaacaacatacaacttttatgtgacctgaatgactaaaagtaatttgttttctgagaaaatgtttaaacaatggaatttgaagtacatcctttttcccacttgagtgctctgtcttgtcttcttttttatgaagcagaagattagaaatagaactaacttgagactcttttcaaactgattgacttcg

SEQ ID NO: 48876 - DNA, 1039 bp, Homo sapiens
catttccagcccatctgaggaacatttttactcacagaggttgtgtggtggttaaaggtgcaattttggaattagacctgggttcagttcctagctccagcttgtactgtttgtatgactactgtagcagaatgacattctgagtctcatttttctcacctgtaaaaagaggataatatccaacttaaagaggcattgggaaaaatggaatgagatgacgtctttaaaatgctgagcatcgtgctggcatgcgttaagcacttagtgtgtgttagccaccgtcacagttgttgaggcagaacccctgtccttgacaaacctagtctgttggggagtctgaatggaaaacgaggaaaggtatgttaggtgctgttagccaaggtaaatacaaggggtggtgtacaaacctcaggtgctgttaatggttaacctgtgttgcatcacacttcacttgttccatcagcagcatttattgaacatctactgtgtgaccatgtgctttgtagaatgggatgttcctgccctcaggctccttgtctggaggggagtgcaaatacttaccatgtaagatacttaccagaagaaccttcaataaagggctataatgctttaggagagagacaggggaggttccatttggactagaccttgaagcatataaattttagagcataaaggacattctgaccaaatggtagaacctgagcagagtccagtttagctgaagcagggcttctgcgtggggagtagcaataagacttcaagatagagtggagcagagaagggtttatgtacttctcattgtcagtcacttgtactattttacttaattgtgtgccaggtgctgagctagatactgctccacttttgaagaactactcccacccccaccattttcttttccaccattccgcttcacacactgtgccaaaggcaaacacttggtgttccctgtgtaggtcctcatgctttgtggactttatgttttttcctatattcctccatggattgcctgtcctcctttcatcatctgggaaca

SEQ ID NO: 48877 - DNA, 1015 bp, Homo sapiens
gctgaggcagggggatcgcttgaacctgggaggtggaggttgcagtgagctgagatcatgccactacactccagcctgggcaacagagtgagactctgtctcaaacagaaaaaaaaaaaagaagaagaaaggctgaatagtaatgagctaagcattcagctcaagaaattgaaaaatagaaaaacctgaaacgaataaaagaagcaataaagagaagaatagaaattaatgaaatagaaattcagaaacatcagaatcaagagttggttctttgaaaaggccaacaaaatcgatacacttccaatgaaatggacaaaaacaaggaagagaaacacagatagtagtaggaatgaaaaggaggtacactgtagatcctgtcattaaacattaagatcctgtcttgtaaataaatacaagattattttgaaaaaaattataccaaaaatattaaaattatagatgaacaaatttatagaaaaagacaacaaaattgacacaggaagaaatagaaaacctgaatattctcataactattttgaaaagctaattagtaattaggaaccttcctacaaagaaaatccaaacccacatgacttcactggctagtttctaccaaaaacttaagaaaaaaataactccaatcctatatccactgttgcagagaatagaaaaaggttataacctccaatttgttttaagaggctatcataatcttggtaccaaactcagtaaagaccatacaagacagaaaattttcaggccagtttgaaaaatatagatgcaaaaatcctaaacaaaatattaataaagtgaatctaacattatgttgaaagaacaatataacattacgaagttgggtttattctagcagtgcacatttggtttaactgtgatgtaatgttaagggaaaaaatgtcaagacaaatagatgaatcccaactatgtaaaaacaaacaaaaagtaaaactggaaagaaaatgttaatagtggttgtctctggttgacaagattctgg

SEQ ID NO: 48878 - DNA, 1029 bp, Homo sapiens
aggatggatagaaagccttgagagtggggtaaggaatttgcatctaaactagtagcctgcaaggaagttgtgaagggattgtatgaaagtgataccttgaatctaccagaatttggctctggagagcactctaacaatagggtgaagagtggttggctggaggccagaagaaggttgggaaaccattactgcggcctgagtgagaaggaatgcaagggagatgtattaagtgggtagagtctgcagaacttgggagccgatttaatgtcatcaacaagggggaaggctaagaagtattccaaacttgagagtgccgtgttcactatgccaagtccttagaggccagatgcagagtcttgttcatcttcatatctacagtgactagctcatgacatggcacatggtaggagtttagtacagtttgatgaaccaactgatttaattcattgggtgaatcgtagtgtcgtcattggaagcacagttacaaggaaaaaaagctggtttgagaatggaaggatgataagtttatagttgattgtcctgtaaaattagaagcaaaaaagagcttagagtctctttcttcctgcaaaggctggtccaaccattcactggcagtggtgcttccctgaagagttggtagaagtccctaaagaggccctgtagccttttgtcccaccctgggctagagccccttccaccagggccactggcatcaagctagccaaagaataatcctggtgcctcactgaatctgctcaaaatcctgtcaagtacatacaactactgtattatccgcatttaacagaggaagagactgaagttcagagaggaagtggtttaccgaagcctctgacataagcagatttgaatgaaagtcttcagattccaatatatcataacagagtctgctgactgaaaacaattggctctaagcttgctctccactgactcaggttggagtcaccactttcatgtagctcagagaaggttgaagataaatgaagtctcatttttgtttcttctgttttt

SEQ ID NO: 48879 - DNA, 1029 bp, Homo sapiens
aaattgtagtaaaattgaccctttaagggagataaagcaggttccctgcacagtaagtggcaccatcatctacccattcacctgagccacatatccagctgtcagtcttgaatttttcctgcactgcctccccacatcttatccattagcaagtcttatcagttttacctctagaatatatcctgaatccatttagttgtcttcgtctctgttggatgggtccaagtcaccatgactctccacctagactgctgaaatagcaccctggctggtttttctgcttgtgctcttggcctctctccagtctgttgtttacacagcaaccaaagagagattttaaaatatgagtcagagcatatctgctccgaactcttcaatgactttcagttctgtatagaattaaatccaaatttttaaccactgtgaaatacactgaggcccaaagaggataagagacatacagagagtatgaacacaaagaaataaaagaacttgaaagaaatggagaaaaaaatacagagttgatgattgccttatgacagagggatacagatcaggaagagaccctgggcactcaaggccatggggaggtgcggaatttagagcctgtgacccactgtggacctgctgtactagactggctgcagcagggtcagtctccataataccacacacagtaggccttactttcatgccagatagactgagaaagttgtatacagatgaatttattatttattaagtgtattttagtcaggcacagtagctcacacctgtaattccaacacttgggaggccaaggcaggaggattgcttgaacccagcagtttgagaccacactggacaacatagtgaaaccctgtctccacaaaaaatttaaaaaattagccaggcatggtggcacatgcgtgtagtcccagtgactggggaggctgatgtgggaggattggttaaacccaggaggtcaaggctacagtgaggcatgatcacactactgcacttcagcctgggtgacagagcaagactctg

SEQ ID NO: 48880 - DNA, 1027 bp, Homo sapiens
cctggttctttactcttgttttggtcccaaatattttatataaaagtatatttgtgatataatgcattatattctaagaaggccttattctgaagtgtccaaggagaaggtgaaacttttttaagcttcttagtagaaattccactgtcacagatttttcagaccatgaaactcctatgaacttacttagatacagctgagcaagtatctttccttctgtctcccgtcgtctctgtccaattgcatacccgtttttctatgtccattcccagcgtttatcatacacacatttatttatgttcacctttgtgtacacattactgccttttccatcagagtctttgccatatccttggcaaagagttaggactcgttatctgaaaaacagtgatctgcgttatttattccttttcatacaagagaagccaattgagattgatacatttacataaattactgtccgttttcttaatccaaaaagctttttaacaaaagaagctctttctgtagctttaataagtctggtctcataaaacagaaggatctccagtttggtaaagatatttgtttaaggttaggttggtaaaggcagggtacatcttgtgtttttgaactttttagacttttttttggagagtgattaatgaaaagaggaaaatcctcttgtcatagaaagtaacacatagaaagtacttaaaaaattgttggtgttcacagttggctatgaaatacctgttagttacccattatgacgcatgaacttagtcatgaacttggtggaaagagatgccaggttagaggcagtcatcctgcacttcctgagcctctgtcacaatgaccagcttagtgtttgcaaaaatgtgcctaccatgccccatgtctgggaacagaattagagtgatcatccctgtcgtcaaaccccttttacctgattgagtacagaacagcacttgtctctttgctacccttactgaacgtcagtgaagaaggggggaaataccagttcaaatcaaaatacacatgccat

SEQ ID NO: 48881 - DNA, 1045 bp, Homo sapiens
tcctgctgttgatagactgtccattttttcttgttaattgtgactattttttctttgtatattgtgatgttatgcttttatgttcacacaatttcagaattgctattttttcctggtgaattgaaccatttgtcatttgtgattaactctagtgaagttttcctccctttcaaatagttacacctgctccatttggttgatatttgtctggtatagatgcaatttcattttgatgttttaagatacagatcttctttcctatttttcttcttttgcattcattgggctttctgaatctgcatattagtgtctttcatcattctggaaaattctcagccactgtcttttcagacattgcctccgaaccagttattcttttctcttcttctgaaactctagctacacctatcagaatgtgttattttatccttctcatctcttaatttctctttcttatttcctatctctgtgtctctttgggttgcattctaggtaatttcttcaactcatatcttcctaacagattctctcctcagctgtggaacccatatgttgcatttccaattttagttgttgtatttttaatttctagaagtctgattttgatcttgtaaaaatctgcttggtaatttaaaaaactattacgaaaagtgtagtaattttattagtaaaagttcagtgagcacccttatgtgtagcacctgtattcagtaattgttaacattttgtcatatttgctttatttatgctttatttaatctttaaaagttgacattcactcctagcgacattctcctactcaaccataatatatcacaccttggataatcttttatagtctcttgcacttactccacatttttgcttacacatttattttatattttgcttctgatcatactgttaactccagtctttctgggcctatttcatgatgccttctatgttttgtgatttggagatagaacaaattatttcttgcaaatttttctgttggaattatttgagtcatttaggtttttcccaataggatctgcgtttgctt

SEQ ID NO: 48882 - DNA, 1074 bp, Homo sapiens
ataattgaaattgaacatctttttgtgtgtttattggttattcatgtttcctcttctgtgtgaactacttgttctaatcttttttctattttaatcaatttcttcctgatttgaagaagaaatttgaatgtatgtttggatactaaccatttttatgtattgggtagcaactgttgtagattctcctggtttgtgacttgtcttcattctctttttggtgctttttaatgaacagaaattcttgtttttaatgtattgaattatcagtcttttgcttcattattgctttttgtgttctaagaaatctttaccctcaagattataaagttattttcccaaattgtatttaaagtttttatagttaaataattaatccatctggaactgattttttgcatgtgtggtagtgaggtagaggtctgatttctgtttttttctgtgtggttaatcagttgttgtggcattatttattgagtcccacctttccccattggtttgtcatgctcgcttggtcatatatcaaatttccctatgtttgtgctgctcttcctggacttttctgtttcaattgtttatttggtttttcctgtgctaatatcacactattttaattactttaaatgtaaagcaatttctggtaactgataaatcatgctccttcaacctccttttctcttttcttttcttttttttttttttctgagacggagtcccactctgttgcccaggctggagtgcagcagcgtgatcttggctcactgcaacatccgcctctgcaacatcaagtgattctcgtgcctcagcctcctgagtagctgggattacaggcatgcaccactacacctggctaatttttgtatttttagtagagatggggtttcgccatgttggccaggctgatcttgaactcctgacctcaagttatccactcaccttggcctcccagagtgctgggattacagacatgaaccactgtgccaggcctcaacctcctttttgttatttgtgagtgtcttgtatattcttaacctattgccctgctacacaatggctgattttttttttttttttttt

SEQ ID NO: 48883 - DNA, 1038 bp, Homo sapiens
caggtgtaaaagtgacatttagagtgtatcctttatgtggctcttgatgatctgcatagtgaagcattttatttaaagtgccccttttcccaccttgtcacctgccctgtcttcttgcccattccatcttgcccattccattttctgtcatatcttgtgggttgtgtgtggtgttcttctgcctgaaatgtcttcctctatagtgaattgctgtttatcctttaagattcagctcacacatggcctcctctgcctcctacaagttcactaccacaagcagtccttatgacactccattgtagttatatatttatatgtcctttgctctcatagaatgtaagctgtgtgtggacagggcaatgtccagtttatctttctaacaccagcaactccacagaccctaacattcagtagtcactttgcacaattaaatgaagtggccgcctttgtcgtagagaattataaaatggtacaaggcaggatgcttcagtttgtatgtaactaaccaagcttctgtctcctcatttctaaaattaggaagtgaattagttctctgaggtctcttctggctccaacagcctatgaaaacagtgggaattcttacctgaatgctttcagagcttcgttcccacatatcccacaagatctaccgtaaagtaggataaaatcgtaactttttggagggtgagatggggtggggtttaaggaattatgccattcaagagtcagatgaaaagctgggcacagtggcacacacctgtagtcccagctactcgagaggttgaggcaacatagtgagatactgtctcttaaaaaaaataaaaaagagttaggtgaagtgtgctggcagggccttcctaatgtgttccggttccagtggttccctttctcagtgcaggccaggtgttcccatcccactctctctgccttcactattcccatctctaaaactggaaagattagagagggtcttcactttatatggttcactatatgtgtgtttaagggggcaatgaatgtatttttaaaaaatatttt

SEQ ID NO: 48884 - DNA, 1048 bp, Homo sapiens
ttttgtatttattgccatgatgtttgctgtctggcagtggtgtggggtgctgagtgatagctctttgcctggaggtattgtgtataatttgtcttacttcagcgccattgcagttaataaacatacagctttttgcttatgcttgatttttttttttcatgagctggttctgtcacttgtcctctttgagcagaggtgttttctcttcgaaagacttttacttcctacaattcagcaggtttccgtaggtttcagtaagcatgtatggccactggcacatgaggttattgatgtttctgagggataagagcaaaaactagaaacaaaatgcataagtaatataaaggtcctaatatgctctggaagtttcctccaaagaacttctgacagcacttttagtaagttatagactgtattgatgtaaagcttctctttcgtctgcccttgctgctttctcctgttttgtggaatgtagcatggagaaggaagttcccccaggggacaggaatgtcagcctctggaaaatggcgagttggactacataggatttaaaaaaaaatactacaatgattcatttagacatgtgagaagttattcttgggattagggtaagcagttggaatttatttgcttccattgcctgataccatctcattgtttgaggatgtaatttctggaatagttgatgtgtgataatgtgtttatatcaaaaaatagcacagatcttttaaaatactctataattctctttataccatagactttattgttaattacttaggttcagatttgtcacaaggttgtgaactctgcttggtgtgtatatatctaacttctgaagtaccagcgggaaaataaaaagtaaaccatctccttagtcacaaaggaattattctcgctagatgtgtgtttacactgaaggctctcaatgcttttgtcatagcaagtctatttgtaatccacgaaggatgtgagtgcagagcagtcaccattatgcattgattaagaaagatttagatattgataagtctatcttatgtgatgctat

SEQ ID NO: 48885 - DNA, 1053 bp, Homo sapiens
ctacttctgtccaaagcattctgtatattatcagaatgaaaaatgacagcactttgtcatctgttcaaattgatattgcactctttgcaatgacagctgaaaaggcccacaggtgccatataaagaggtgaccatgttgtcatatttcatttcggcatccctctgcaaagccataattacctaattaggttgttaattaggagattagcatttcactatattgatagaatgctctttaccggcgtggggtgagatacagatttgtctgctctaatttataatctctgcctgttttgtacttatttatttgcttaagatgctggtatggggcaattcagtttacctgagaaacagtttacaagcgaatgaagctttgatcactggattaaagttgctgagttaaaatacggacacatccccaaaattaaaataaaaattccaagttggtataacttgtattattgttaacacagtcaacaaacacaataagaattcacattgttggtataaaaaattcaaaatacaaaaacttaagtctgaactatgacagagatttatctatcctaaactaggcaaaataaattattttaattatcttcaatgacagacctctgtcatttatacttgggacttataagaatatgctaaatgttttgaatgtatttaagaaactgaagcttggttaataacttcagaacaaatatattgagtcttcagtttagacttccttagatagtcatgcatcagggcttatttcatttgtaccttctgtccattagtctgtgcttggaacattcccttcccacagtctttgcagtactgaggggcttatggaatttgaagtatttcacagtaaccttcacttggtgagctatttggagtaagcacggtttctataaagtgtgtctaacattcttttgggagagggggcggggaaaacgatttccatacattttctctgtagtgtttgtaatttgcattatgcatacttttctgcctttttttagttaaggaaattaggagtttcagaacaatgttaagagcaccattccc

SEQ ID NO: 48886 - DNA, 1031 bp, Homo sapiens
taagtgaaaaaaggatatgacactctataaagtatggtcccaattatgtcaaacatgtatgcaaagaaaagaaataggtggtgagattataagacttgatatttttctcagttttagaaatgttctttgataaacaaattatttaaaaataaatcatagtttaaaattgatattaacaaatatgagtagagtcagtgaccatcattttaaccaatagttttcactaatgcaggtgattgtgaagttgtaaatggattgtattttcaagttagttttcacctcttttattttgcacttagaacatggtttcatatgtcctgacataaatgatgttactattcccaggaaagccttcttttcccccaaaagtcctatttaagacagtattctggaagaagagttgtattcgtattggtggtatcattatcccggtgctaccatcacctcttcagtggccacagggacaacgagtaggcctgtgacagctccgtctttactttcagagggagtccactcctatctctgtggagttgaggttggcctttggtagatagagatagtgagttgaatgcttacgtatttgggaagtgattttttggtatggaaaattatgtgtgttaaggtaaactgaggcataagattttagagtttatttgcacaaacagcgattcatgaattgggcagcttcaaatcagaagtgattctggggctccattgagggaaagtaagcgggggaagcttttgtaggaagactgtggaagtaaaacaaaagatttgattgattagttatacagttgatcactaccattggaaagtcctcagttacataagtttgttggctgcttctgactagataagcttaaggttttttgttttttttttcatatatgcatttataagacatatctcaagttttgcctatgtttgcaaatcaaacaaggttaaggtcatttataaggcctaactagttttgtctgcttgaatttttcagaccaggtctgatttttttgttttgttgttgttgttgtttt

SEQ ID NO: 48887 - DNA, 1050 bp, Homo sapiens
cttatcctccaatttcccatagaggctgtgtttccagattcagggtttcatgttacacagagttattctttctggaatgtgtcccccaagcaaccccgctggaccctctgtggaaggaggggctcttctgaatgcaagattcgcatgtatgcaaaaaagcaaacatgccagccctgcgccttgctagtgtctgtccctgaaacagaaccagcaaccagcggacaaagcagtgcccaggagttgggccaggctgcaaacatcatcaacaacagtaatagtaataataataacctttattaataaagcctctgacctagaatgatctcatggaatcctagagtaaggctgggacgtagctgtcattacaattgtatgaataaagagacttgtgggtaggggggccttgtccaaggtcgctgagtggcagaaccaggcgggtggccgcagccctgacactgtcacctgtgggctgggcagcctcagaggggtggtgagtcaggcatattgttgagctctgtgggatctagacagccctgcaactgtccccagtgtgcagaaaagccagaaaattccatcttggcgtcctgacctccacctccgctccagctcacacaatctgcccagttgagttattctccctggaagagcttggtaatttgggcttttccaaactcaggaaaagcctccaagtctagaatcctccccgtggcctctccctggcctcatctcttcctccctccccttggctctccatgctacgctgagtgccgagcacattggcctgatttctgtttctcaagcagctcatactctgtcctgcctccaggctttgaatgggtcgttcccttcacctggaaagccctcttcactccctcttcctagcttattcctgttcatcctttctgtctcaatgtaaaggtcacctcctcctggaagccttcctttacctcccaggctagcttagagctacctcttacatgttctcagcaacccgtgattgtgattctccttcatggtgagatggggttgcatgtctttttcattcctcat

SEQ ID NO: 48888 - DNA, 1551 bp, Homo sapiens
ggctcacacctgtaatcccagcactgggaggctgaggcgggtggatcagttgagatcaggagttcgagaccagcctggccaacatggtgaaaccccatctccaccaaaaaatacaaaattagcctggtggtgctcgcctgtagacctggctactcagacggctgaggcaggagaatcactcgaacccaggaggtggaggttgtagcagtgagccaagattgtgccactgcactccagcctgggtaacagtgagactccgtctcaaaaaaaaaaaaaaaagtgccatgtagtccctgtgtggggcaggccccaatcagtgcatgtgggaggaagatgtcagcaataatgacctataatcaggagaccacatacaggtggcaggtactgggcagtttaactccctggcaatttaagcttgtcatttctctaaaacagtttctgccatgtcagatttgtgaaggcttggttttgccctcagccacccgccactgcacctgaccaggtctctgttggctggtgcaatccagtggtgagctgatagtaaaccccagcttaggaaacagggttgttcttcatgtggatgactctgtgccgaaagcatgggaacagcctagaaatgaaatgaaggacacatgatctgctttggcttcagactttaaaagagcttttgctgtttcctcttctgcagttaaacacagtgggaatatcacttttgatgagattgtcaacattgctcgacagatgcggcaccgatccttagccagagaactctctggtaagagcaggacaacatgtaaccgccataactgtagttgtgtttttcactgagtgataacattcttcttacttgaagggtgctcagtgagacccaagatggggtgcagttttctgggactgaaaggatggatcgtaaattggatgtgtttaatctgggcatcaaggacccatggaagctttgcattccgggttatggaactagatggaactctatattctatattaggggagcaggaacctcattccttccattgcctgctatgaaccccttcagtattccccagtatctgcagattgtgagggactgagccagcacctccaatgccaccatttctttacttaaaggaaccattaaagagatcctggggactgcccagtcagtgggctgtaatgttgatggccgccatcctcatgacatcatcgatgacatcaacagtggtgctgtggaatgcccagccgtaagtgacattttcattgttacagtaggggtgaaaggggggccacccagtgtattcacagagataagctgggaagttttggaaatggttactggtggggtgggataatccttttaaactttttactgattttttttttctttcccacagagttaagcacaaaggaaaacatttcaataaaggatcatttgacaactggtggattttctggtgtggcgtcttccttgagggagctagctcctttgtggggtggtcagtggggtcagggtggcagaacctgtggagaagtaacaagcaccttgtggtgggtaacaaa

SEQ ID NO: 48889 - DNA, 1044 bp, Homo sapiens
tccgggcgtttcgccccattggcctgggttagcgggcgacggggctctctccacgcctccccggtgtgagtttcggagctgcccacacccgagggaggagcgggtggcccgcctcgcgctctgtgctgtttcgagaagaggcagagggtggcgtgtccaaccccggaaagacgctgagagggctgtggctcggggctccctctgcacagacactaactcttcttttcccccagtatacctgaggtgcaccggaggtgaagtcggtgccacttctgccctggcccccaagatcggccccctgggtctggtacgttatcccctccaaggggcatttttttcacatttgtttcactttaagcgccggctcgtggagtcacgcctgtgccagaggtgccctcgtggcttggactgtcaccctcagtaggcctgagccactgaacaagtactaggtaccttaggaaggtcgtgtgtgaaaaatcgaacctggtgcctttaaattgtaattagctccatgtgtctccactgctgctttagtgtacctgaggggtgggcccaagggggagttttgaagttaggactggcttagagacattgggcagccaacatctgtatttcctcgtcaggaagtgggcatggcgttgttgggagattaaacggggtgtgggtgaagatccagtgagcgtttccagctgtgttgtagatgtaaacctagcagttaatgtggcaggctgtgtctcatgcctgctgagcaactgctggcttccccgtcattctgtcctcttggatttctctgaatttcattaggcctttatttaatccttgcacagtgctcccctgccccaaatgctcttccccattggtcttttttaacctgtatcttaactattcttccttggccgttagctggcacttaagggacacttagcctcctgttgaggctaaggattactagaggaggagaacttcagagtagcaaataatcagacctccatccaggaagatggacgtgggtggtctgacatgggagcctagtattttgaaagc

SEQ ID NO: 48890 - DNA, 1045 bp, Homo sapiens
tccaacccctgtgagttgttttgtggctattatttctataagcccagaacttgaagagaaaaatttttgttctggaggttcaagccttcttttcatctctgactcgtcacagatttttaccatgtgtcattttaaagtacatttacgttcagcaagtatagctttcccaggtcagtttattctgtcacccaggctggaatgtagtggtgcgatctcagctcaccacaacctccgcctcccggattcaaacaattctcctgcctcagcctcctgagtagctgggactacaggcacacgcgcgccaccatgcccggctaacttttgtgtatttagtagtgatggggtttcaccatgttggccaggctgatcttgaactcctgacctcgtgatccgctcaccttggcctcccaaagtcctgggattacaggcatgagccactgtgcccagactgtacgcctttctcttcccagccagatgggatcctttcaccagcttggtccccataacacatctgcagagctcagttttagcaattgtcagttgcccatgggacgttctttttattttattttatttcattttattttatttgagacagggtttcactctgtcgcccaggctgcagtgcaatggcacgaccttggctcactgcagtctctaccatcctcccacttcaaccccccaagtagctgggactacaggcatgtgccaccacgcccagcacatttttgtattttttgtagagacagggttttgccatgttgcccaggctggtctcaaatgcctgagctcaagcaatccacccaccttggcttcccaaagtgctaggattacagatgtgagcgactgtgcccagccattattattattattattttgagatggagtcttgatctgttgcccaggctggagtgcagtggcacaatctgggctcactgcaaccttgcctctcgggttcaagcaattctcctgcctcagcccctcaagtagctgggattacaggcacctgctaccatgcccagctaatttttgtatttttagtaga

SEQ ID NO: 48891 - DNA, 1065 bp, Homo sapiens
ttttaaatttttttattatatggagtctcgctctgtcgcccaggctggagtgcagtggtgcaatctcgactcactgaaacctccgccttccaccaaacttccaggttcaagtgattctcctgcctcagtctcctgagtagctggccttacaggcgcctgccaccatgccctgctgatttttgtatttttagtagagacaggatttcgccatgttggccacattgggcttgaactcctgacctcaggtgatccacctaccttggccttgaaaagttctgggagccaccatgcctggcccccctccatctttttactttttactgacctgggtgaatgaaccaatgtataccgatcatccctagagatcacattcagctgctccccgctatggcctcagtgcacattcgcctttgtgtcctgcgaatcgttctatgggggtagattcctagaggtgggagcatccaaggacaggacacccaccctccgaaatggctgtccccattcctggcgcccccagctctgagtgacatggcctgtttttgcatgtccccaccagtgtgacgacaggaaatggagtcttggttctgtttgcatttgtttgattctctgtctatggccattacccgctttcccatctggaggttcaccttttccaaggcagttggttttcacaggaaacgcggggctctggccagaaatgcagcgcagatgagcgcgaggagcctgtgcaaacaattccacatgcaggaatttggggctttgcagccactcctgcctaggggaaggatcgtgatgcatcagcatccctgaggacctcaagctcctgcttgtccttctcttccagaaaaaaccgggaagatcctgacggagttcctccagttctatgaagaccagtatggcgtggctctcttcaacagcatgcgccatgagattgagggcacggggctgccgcaggcccagctgctctggcgcaaggtgagaggtgctgggagggctcgggtatgttctgctacttctcgccatgtggcctcgggggagtgaccttacttttctgggcctcagttt

SEQ ID NO: 48892 - DNA, 1015 bp, Homo sapiens
ccttggcctcccaaagtgctgggattacaggcgtgagccaccgtgcccggtggtgctgttttttgttgttgttgttgttgttgtgttttttgagatggagtctcgctctgtagcccaggctggagtgcagtggcgcgatctcagctcactgcaacctccacttcctaggttcaagcgattctcctgcctcaaccttccgagcagttgggattataggcatgcgccaccatgcctagctaatttttgtatttttagtagagacggtgtttcaccatgttggccaggctggtctcaaactcctgaccttaggtgacctcccaaagtgctgggattataggcgtgagccaccgcacctggccaggttgctgttactcccatgttacagctgaggaaacagaggttcagagagaattgagccatgtgttgctgaaagtcctatagccagcaaagggtggagttaggatttgaactgagatctggttccaggaccttgacactgcactgttgaagggtccttcttgacctaggacgtgctgataaatctttgtggaatggattaactctttcatgcctgtccgaatcttggcctttctcgggtcttctgcttggcacacactcccttcccggtgtcctccctcccctagcagggactctttgtgtctcagctgctacctccctctgggaggcttccgtgaccctgcaggcttggtcagtcaccttcctgggctcctgtgacctcctgtgcttctcccagttggggctcctagtaattgtagtttttgttgacaatctgcctccctcattagggtactctctcctgagtacccagtggccaggattgctgaatgaatgagtgagagcaacataaaccctttcttggccatcgtgatgaagcctcagagcctcgcctgaacttggtgactcgcctgacatctgccattttggcttggcccgcgctggctgatggaggacatgggatctgggctgggtcctgtcctcagccctgccccagtgg

SEQ ID NO: 48893 - DNA, 1042 bp, Homo sapiens
cttaaaatacaaaaattagccaggcgtggtggtggtggacacctgtaatctcagctacttgggaggctgatgcaggagaattgcttgaacccaggaggcagaggttgcagtgagctgagatcacaccactatactccagcctgggtgacagagcaagactctgtctcaaaaaaaaaaaaaaaaaaaaaacgaatattccattacgcctcaatagtctatattttaacttactcagtcaaagccctattgccaggcagttaggctttttctatttttcttttttgtttgtttgtttttgagatggcatcttgctctgttgcccaggcttgagggcagtgtcaccatcatggccaattgcagcctcaatctcctgggctcaagcaatcctcccacctcaacctcccaagtagctgggactacaggcttgtgccaccatgcctggctaattttttaaaaaaattttcgtagagatggattctcactttgtcatccagactggtctgaaactcctggccttaagtgatcctcctgcctcagcctcccaaagtgctgcgattacaggcatgagccatggtgtccggctctattttttgttgttgtaaacagtgctgtgttggaaagcttaaatcaattaatgggattgagccattgattccgcatggtttgagagccatctctgctcagtgtcaggctgtgtgctgggactgggggtgctgggtggggaggcggccatggtcctcaacctcttggggacccctgtctggggaagacaggcccagcatggcacgccagcagaggtgggggtttagggcatctttgggagccagggagcagccataacccagacctggagagtcatgggaggcccagctgaggacacctgcagctggtgacctgagggtggggcaagccctgcacctgctgctggctgagctcatgggaggggacctctcaggtgagccacaaaggatacaggaggagagagtttcaggcagagggcaggtctgcagaggcccagagtagacagagcatgggcattgag

SEQ ID NO: 48894 - DNA, 1050 bp, Homo sapiens
cacttcgccgatatgcaaagaagaggaggcggttcctgctcgtctccgacgaggtgggcccgagcaggcctggggactacgactcccggcgtgctccgcagtccaaagccggaagagcgtggacccggaaccggatgtggcttgcggctcgggtggctgagcgcgcggggaaatggtgagattggcaccgtgtgccggagataggggcgtctgggggtggggtcccgggtctgctcaggagctggggcatgggcacttggaacggggattgctctcccgcccccactattgtacggacgacaacgcggaggcctagcattctctcccagcctagaaactgatccctagtcagccctctaccatctgttgaatgggaagcttagaccgtgatcgggccgcgacgccccgcttccattagtgcgccgaaatagagggtcacttcgtcagctgagacctcccttttctccaggccacggggacagaccaggtggtgggactcggcctcgtcgccgttagcctgatcatcttcacctactacaccgcctgggtgattctcttggtatgtcattctccccgtccgctgctcaccttccccgagccctggcaccgccagagcaactactatataggctctaggcacggcgctggcttcattgcctgcctcatctcttgaactctccagaacaactctatgaggaagatgccagtggtaccgcattttatagatgagatagctgaggctaggggagaaggatctggcccaagattgcatccttagccgctacacttataactctgtttccggcttgctttgacttttgggggagttctgttccttctgggttagcctgctgactcttaggcatggcaaacgccagtgatatttgtgaaggcctttaggatatttttttcttgtgggaaaacttgttggttattgcttaagaagtgcagtgtgtctggaagtgcagaacttggtatcctttagagaaaaaatattagtgaagaagccctggaggcccaggttgggagtcagtcgaggattcctcaagt

SEQ ID NO: 48895 - DNA, 1028 bp, Homo sapiens
caacccctgtgggggtgtcccatcactttccccagcacccacttcccacaggccttccctcctcccctgcctgctgacccggcagctcccgacagcacggccttgtttcccagggaacaatgcatctgtgtcacggacaacaatgtcctttcatgtcaggcgcactggccccggtgcacgccgggacgtggcacaaagggtgctttgtgcagctcagggatgtgagttcctggctttgccatgttggtgctgccgacccggggcctctgtccttgggtcccagttatgcaacagtcagtcgaggctgtggggctggcccaggggctttatctgtctccctctccaacttttgccaagttacccttctgggcttccgccagccaggagcccacactccctcagccctcccacacgctcctctcacctcctagctgggcttcgctgacttgaacctggccgagtttgcgggctcgggctccacggtgcgctgctgcctgctcgagggatatgacacgaagaacactcgccaggacaactccatccttaaggtaccagggatcctgccacctctgccaccctgaccacgggatggggacaaaccaggctgctcatcagaatcctctggaggagggttgttaaaaatacaggccttacctgaataggtagacatcgggaaggggcgagccctggaatcaggaaaccactatcagagggaggcctggctccgctgttggcctcagtttccccatcaagttcagagagggggccctgacagtctccagggtttggcaagcacctgcagtgggttcacgtcatgctgattgcatgccctctcttctcttgtggtcccctgacagcagccccacgagctgtggtatctttgattagtcccagcttcaaatgggagggagttaaggcacagacgttaagtcatttgcctgaagtcacagacagagctggcacctgaccaccagccagttgacttcttggcccagctcctaactcttccccaagtgacacgtggtagc

SEQ ID NO: 48896 - DNA, 1034 bp, Homo sapiens
aggcacccagcacatggcaggcactgccaggccccttcccttctgttctgtaattgaactcccactgcaggctttactcccattatacagaggaggaaactgaggccctgagaagtggctggacgtggtgctgatcaggcctagtttcagtcctgtctctgttgggttagctgtttggccctgggcaagcttcttcccctccctgaacttagttttcttttcttttctttttttttttttttttgagatggagtctcgctgtcgcccaggctggagtgcagtggcgcgatctcggctcactacaagctccgcctcccgggttcacgccattctcctgcctcagcctcctgagtagctgggactacaggtgcccgccacctcgcccggctaattttttttgtatttttagtagagacggggtttcaccgtgttcgccaggatggtctcgatctcctgacctcgtgatccgcctgccttggcctcccaaagtgctgggattacaggcgtgccaccgcgcccggcctctgtgaacttagttttctcatctataaaatggggatcactctgagtccatggcggggctaggatctgaatccaattccctgattctggagtgtgtgccctgaacactgcagtagagacttgcaggcagcagttacttgacactcatccctgattggttcggttgggttcaaacattggttcaaacatttcattatctatctcttctgagcctgttgtatctggagcagagctgggcaggaggtggtaagcagaggctctggggcctcctagaccctttgcagagggaaccggagatgtcttccaagtccccaagtctggcaccacctcgtctcaatctcactttcccctccaggtctagcagacttggcctccatccacagggccttcttagcgcatgccctcttcgcacttactcccacttccctccccatccctcgatcctctgtccagaggtcccaagggcctgttcagaccctgaactctgcccagcagcccctcactctgtcctc

SEQ ID NO: 48897 - DNA, 1044 bp, Homo sapiens
ccggggctgtccgcggagacgcctatgcggtggaggctccgggcttcagctagggcgggggagcccagcagaaggaccgagcagcctggcaccccactttgccatcctctccctggaaatctcggggtcggcgggccggccgcttcgcgtgggcgaaatcagagacacgtggtttccaaggccccttcgggttcgggaaaattttatggttcgggtcacagtaggaagcggacaatgaggcgggagggcagagagaaccgcaacacctggtgccgggtcgggtcgtttccggggctttcagtggccggaagtcgcggcgcctgtactgactctaggaagggctggagttgttttgaatgggcgcccgtaagagaggtgggcaagtacgtgttacagacggccacgccgccctttaggcggtcaaggtggggcgaggagacgttcgcccccctgcagtcggccgggtcactacccaagagcctttggaggcggaagcatggaacggtctgcaaacgttcccgagcgggcctctgcggctctggcgggcgtttcgaacttgggcgccgggcacacgcccagtcccgagagcgctgagggttcccttagcgtcgccctcaccccggccaacccgcggggcgccagagtcctggccctttaaacgccgcgcgtgcctcggcgtcttcgtttcgcgcgcccgcccgcggcgccggcggagcgaacatggacccggctgcgcgggtggtgcgggcgctgtggcctggtgggtgcgccttggcctggaggctgggaggccgcccccagccgctgctacccacgcagagccgggctggcttcgcgggggcggcgggcggcccgagccccgtggctgcagctcgtaaggggagcccgcggctgctgggagctgcggcgctggccctggggggagccctggggctgtaccacacggcgcggtggcacctgcgcgcccaggacctccacgcagagcgctcagccgcgcaggtaaggcctggcccggccggggatggggatgctgatcagcgccga

SEQ ID NO: 48898 - DNA, 1060 bp, Homo sapiens
caggtgcagccaaagctgcagaagcaggcgcaaacacagacctctccagagcacttagtgctgcaacagaagcaggtgcagccacagctgcagcaggaggcagagccacagaagcaggtgcagccacaggtacagccacaggcacattcacagggcccaaggcaggtgcagctgcagcaggaggcagagccgctgaagcaggtgcagccacaggtgcagccccaggcacattcacagcccccaaggcaggtgcagctgcagctgcagaagcaggtccagacacagacatatccacaggtccacacacaggcacagccaagcgtccagccacaggagcatcctccagcgcaggtgtcagtacagccaccagagcagacccatgagcagcctcacacccagccgcaggtgtcgttgctggctccagagcaaacaccagttgtggttcatgtctgcgggctggagatgccacctgatgcagtagaagctggtggaggtaagtgagcactggctcccagctggtctggtgatgggacagctctgcccagacccttcattcctcccctgactgggtgctgcctgggactgagggctaggcctggaacccaggtccagggccatccatgctgggggcctcaaggttctggctgcggacggagaaggcagctcttgggcctggggactctgggaaatacagcacatctgtcatttcaggcatggaaaagaccttgccagagcctgtgggcacccaagtcagcatggaagagattcagaatgagtcggcctgtggcctagatgtgggagaatgtgaaaacagagcgagagagatgccaggggtgggtagaggccctgatgtggcagtgtgagggccacagagcccagcagggtgggatggcctctttctgccccaggccacctcagggcctccttgtgtttcccccaccgtgaaatgggatgacagccctctgcctaggatgggtggccagaccaggctgggcttgatagtggtgtgcatgggaccctcttgctgttgtgctgtcttcacatccgtcccttccagcct

SEQ ID NO: 48899 - DNA, 1065 bp, Homo sapiens
ctgcgaaatgggaggagcacagccagaggtggtcatgggtctgggctttgtggcggtgggggcagagggagatggtagcctgtccagccaccagcccctctccagggccctttcttgctgtgctttgggcaggtgcacacattgagagaggagaaggaatgtagcatgagtcgggtacaggagctggagacgagcttggctgaactgaggaaccagatgggtaagctggggctggggtgacctgggagcaggaatggtgtcagagggttgtgggggtggtttagaatgccccagggagttgggtggatggaatggctttgaggcagagggaaagaggtctgtgccaggagatggcaagtctcgtcatctccatgagcctcagtgccccatcagcaaagacgaaggagtgcccgttgtcagccacccacagttgtcgctatcggaaagtggtttggaagattggctaacatccgggtgcgaggaatcatcagcagggaggccaagtttggggagcttgagaggaggtatggaccaagaggagggtttttttgagaatccagaggcttttattgtctgcgtcctttctcagctgaacccccgcccccagagcccccagcagggccctccgaggtggagcagcagctacaagcggaggctgagcacctgcggaaggagctggagggtctggcaggacagcttcaagcccaggtgcaagacaatgagggcttgagtcgcctgaaccgggagcaggaggagaggctgctggagctggagcgggcggccgagctctggggggagcaggcggaggcgcgcaggcaaatcctggagaccatgcagaacgaccgcactaccatcagccgcgcactctcccagaaccgggagctcaaggagcagctggctgagctgcagagcggatttgtaaagctggtgcgctgccccacctggagagcccgccctcctccctagccctccagacctttgttttcccacctgtaaagtggggcagtgtagccctcacttgaaatggtacttctggaggcatctgtgagccagagccctgctccg

SEQ ID NO: 48900 - DNA, 1049 bp, Homo sapiens
aaaatgtaccaaatgtgtaagcatcatgaggtgtttaagctgagcttttaaattaaaattctgctgggtgtggcggctcatgcctgtaatcccagcactttgcgatccccacacaggaggattgcttgagcccagaagtttgagaccagcctgggcaacacaaggagaccctgtctctacaaaaaacaaacaaacaaacaaaaaagccgggggtgttggtgtgtgcctgtagtcccagctactagggaggctgagatgggaggatcgcttgaacctagcaagtcaaggcggcagtaaatggagatctgtactccagcctgggcaacagagcgagaccctatgtcagaaaaaaagaaaaagccacccagcaggctgagcgtggtggctcacgcctgtaatccctgcactttgggaagccaaagcaggtgaatcacttgaggtcaggagttcgagaccagcctggccaatatggtgaaaccctgtctctaccaaaaatacaaaaattagccgggcatggtggcgcttgtctgtagtccagctacagctactccagatctgggctgaggtgggagaatcatttgaacccaggaggtggaggttgcagtgagctgaaatcacacgactgtactctagcctgggtgacagggtgagaccctatctcaaaacaaacaaacaaaaaccccaccagcaaccttgctgacaaatccacaggcccccacgtctgccaattgcctgcctgtatgaactgggcacctgggggaggggcgtggcccccaggctactcatcttggctttcacagccaaagggcctgggtggaacctcagcttactgtgtttactgactgggtaatgtggcctctgaagctgtcacctatctataaaatggggattaaaacgacactcacttgctcattgtctttcatcccacccacgtgtgttaatcgcgtgctcctgtaggccagccactgctctgggtgctgggacttggtactcaaggacagatgaggctctaggtctcacagagattatgacgtagggggatcaggcaa

SEQ ID NO: 48901 - DNA, 1044 bp, Homo sapiens
acagattcagaggagggggagtttttacaagcagggatgagcaagggcctgatctgggccatggaatctcattctatttagaggcgtggagagaagcctacagggcatgctagaaggggctcggggtgataaattgccgagttaggttggagaggagaaacatggaggcctggggtggccacagggtggctgtcagcggtcagtacctttggaggctgccagtgctggttgtcatggaaaccagccagcagtcttgtaggaagcctgctgactgggagccaggtaccatgtcctgctgaatccaggcagcagtactgtgagactggccctgttactgtccccaggtgacaggagagcttgaatacaaagagagcaagagctgctgaaggccacatgacagagctggtgcccttcctcctggggctgtggagcagctgggcaggggctgggcacatgagcttcctgagggagacctgaggaccccccacccccagcttctggggcaggggctactagggcttagaatggggtcactgacggatctttacctccctgtccttgaaggattacacagtgcgtggcctcctgggcaaagctacagatgacttccgtgaggacgggaggctggtagagaagacaacctatggtgagaaccggaagtggctgccgctgcctccctccgcatttgctttccctgagtcctctccccgccctaggccacgctggccccttctcagttccactgcacacactaggcttgggctgaggctttggccacgggatctgtgctccaggagcatcctctactcccctgcttgcctagctcaaatgtaacgtcacttccaaagactctagtttctctccatctcgtcagtctttgaccttttccttttcttttctttttttttttttttttttgagacggagtctcgctctgtcgcccaggctggagtgcagtggcacgatctcagctcgctgcaagcaccacctcccgggttcacgccattctcctgcctcagcctccctagtagctgggactacagg

SEQ ID NO: 48902 - DNA, 1049 bp, Homo sapiens
tgagcagctagtgagttgacacacccaggttctgccttaaggagctcacagcctccattttcctccagggactcttcctcagtagagctgggcagggaaccccgcactcttgaccttcagtgttacgccagtcttcttagagcctctcactgggagactgatgataggcagagtaagaggcatcttgggctgccctttggatcccagggcactgaggatacagttcagggtcccagattccatgacggggaagcctgagagtctggcctgatgctagtttgggctccatgaggcccattctgagaacgaggtcaacatgcagcccaaagccatcctggggtggcatttagttgagaaaatggaccttgtttgtttctttccagtatgtggaccagcattcgcccatctcaaggttggcgtgggacatcggttggatgcccaggcttctggagtacttggtaggtgatgtgagaagcctgggggtacagtgataaggcttgagaaaagatcctgaagctaccaggagcccagcccacttcttacctggcacccacgtcccaccactcctctcctgccctgattcctgccccaaggctgatcagctggggagtggataggtgggacggaggtaatcacaggttaataccacagtcacccacctttattcagtgattcccacacatgacatagttcgaggccctttatgcacatttatttaccacaacaactttattaggtagatactatatgattttatggaagaagaaagtaggatttaggtgacttgttctgggtcccatggccagtgaatacccctggtccggagaaggaaaaccatcattgcatcatggggcagccaggcgcgtgactctggacctaatggccagggcctgcatgtggctgggtctggacacacaaagccctagtcatgagccatctgtgtccccagggtcaggtggtgcccacatcctccagccgcgacagtcacagtccccttgtcttgcttcctgaggcacaggcaggcagacatgatctcatgccccctctcc

SEQ ID NO: 48903 - DNA, 1034 bp, Homo sapiens
agaggcctggctgcagcctgtctcagctttcaacatgccctcctcactaagcttaatcatgtctagcttttgaattaagagacctgcaactcttcctttcccttgaacatttagaggcccctgtagggatattaattggcttacctttttttttttttttttttttttttttgagatggagtctcactttgttgcccaggccagagtgcagtggtacgatctcggctcattgcaacctctgctttttgggttcaagtgattctcctgcctcagcctcccaagtagttgggactacaggcgcccgccaccatgcctgggtaattttttttttttttttgagacagagtttcactcttgttgcccaggcttggttcaagtgattctcctgcctcagcctcctgagtagctggggttacaggtgcacaccaccatgcccagctaatttatgtatttttagtagagatggagttttgctgtgttggccaggctggtctcgaactcctgacctcaggcgatccgcccgccttggcctcccaaagtggtgggattactggcatgagccactatgcccggccaatttttgtatttttttttttttttagtagagatggggtttcaccacattggtcaggctggtcttgaactcctgagctcaggtgatctgcccgcctcggcctcccaaagtgctgggattacaggcatgagccactgcgcctggcctaattggcttactttcaatattgtcttgtctcggaatagggaggcccaaggagagagagagagacaggcaacagctggtcagtggagccgtcaaatcacacgcaacatttatcgatgaagttcaccatctcatgtaggcacaatttgtggtgctgcaaaacaattactgtagtaacgtaaaagatcactgatcacaaatcagtgtagcagatataataagaatgaataaatttgaaatagtgtgagaattgccaaaatgtggcagaggcatcaactaagcgcatgctgtagggaaaatggcccgataggcttgt

SEQ ID NO: 48904 - DNA, 1052 bp, Homo sapiens
tgcagatcaactgaggtcgactgggagttgaagaccagcctgaccgacatggagaaaccctgtctctactaaaaatacaaaattagccgggcgtggtggcatatatatatatatatatatatggtctttggcctgacttgacttttcttgccacgtccctatctgtttagagggacagtgtcctggaccttaattttcgatctgagtttgagggtgcagatcctttttatcagtggcttggccctggactagtaacgcagtctctcttctgtgaagtgcgattgttaggatacttcttatggggttgaatgggactgttgaccagaaagccaagtgaaagccagtgctgttcacgtggagtttctgagtgtcagtgactggccctgctgtctcagctgaggggggcctcctcattcctcttctcaaaggtagtcaacactggaatgccctggaaagtgttgaaaaatgtggactcctgggttctacttgcagttactgtggcttactttggatgtggtatgacctggggatctggtttcataatatctccctaaatgattctaatgcttagcaaagtttgagaaccactagaaccactagtttaatccagctgctttccagtagttttttaaaaaatttttcatttatttatttatattttagagtctcgctctgccacccaggctggagtgcaatggcgcgatctcagctcactgcaacctctgtctcccgggttcaagcgattctcctgcctcagcctccttagtagctgagactacaggcacgcaccaccatgcccagctaatttttgtatttttagtagagatggggtttcaccatgttggttaggctggtcttgaactcctgacctcatgatccgcccacctcagcctcccaaagtgctgggattacaggtgtgagccactgcacctggcccagtttttttttttttttttttttgagatggagtctcactgtcttgcccaggctggagtgcagtggtgcagtcttggctcactgcaatctctgccccctgagttccagcagttctc

SEQ ID NO: 48905 - DNA, 1034 bp, Homo sapiens
cctttccgctctttgcggggacccactcctgtccgcaaatgcccccctcccaaccactcgctccggaacaggacaccacctctccctcctcaggagcagatagacatggcctcggtcctccgggcccacgcgcacctactgccagctctggcaggaaacccagccccctccgcattctagaacccgctatgtacccaaaggttcccgccctggggcgggggaggccgctcccctctcatctacgctcccctcgtgcctcctgtgctccgggaaggactcctgccactgccaagcgcgcacagactgcgccccccgctgcgcgcacattctaacccccccaggcccctgtgccccgcctttctatcccggctaattcccgtcggccttggagccccaccgaggagaaccgacttaaggacactctggggaccaccctggtggcgcacactgcggactcagccgtcctcgctcacgggctggttggggttcagtctccgggtcagccgcggactgatttggagactgtgcaaggtccaggaaccaccgaacccggagatcaggtctgctctgcgagggcgtcgcggggccggggccagggcaggggcagggaaggggcgcgggtgaggggaggatcgggggaagcggccgcggttcggggctccggggcgatgacagaggctttctcgcaccccccgggcccgcgcgcccctcccacgccgttcacctgccgcggcgccccctcctccatggcgccgctccggccgcttggggcccttctctcagccactccggtcccggaagccgcagaccctccgccaggactttcaaacttgaaacttcccgggaagcggcgccggagacgcgggatcgggcgccccctcccgagacccgctggcccgcgggaccagcgccgcctcccgtccgcgccgatccagcgcccgggaccccacgcccgaggtcccgcgccccagcgcctccctcggatccaaaattccgcgggattctgggcccagtacccgggcttcggcgcctgc

SEQ ID NO: 48906 - DNA, 1049 bp, Homo sapiens
aacctggaaggcagaggttgcagtgagccaagaactcgccactgcactccagcctgggcaacagagtgatactccatctcaaaaaaaaaagaagaagaagaaaacaagaatcgttcataatctcactccctgaaagagaactcctgttgacattttggtgtgtctccttccagcagtgtttctatgcacagatttcattactttaagtcaagctggcatcaattcctactgttttgtgactgactggccaatcaccaggcatggatctccctcgtcattttaggacggagtcactttctttgtgccatcctgtacagatggacatttcagttgaaaacccatactgggaggaacaggctgacattggtagcgttgccagtgtgccaagtactatagttcttggggagaaaggaagcggaatcgctggcccaggagttttgcacacacgtgtttcaggcttttggaccatgactccaggctggcccacagaaggccctcgtcagaagagcagtcacaggccggatgcggtggctcacacctagaatcccagccactttgggaggccaaggcaggaagatcacttgagctcaggagtttgaaaccagcctgggcaatatagtgagccctcacctctacaaaaaaaaaaattttttttttgagacggagtctcgcactgtcacccaggctggagtgcaatggtgtgatcttggctcactgcaacccccgtctcccaggttcaagcgattctcctgtctcagcctcccgagtagctgggattacaggtgcacgttaccatgctcaactaattttttgtactttagtggagacggggtttcactgtgttgcccaggttggtctcaaactcctgagctcaggcaatccacccccctcagcctcccaaagtgctaggattacaggtgtgagccattgcacctggccaaaaaaaatttttttttaattagccaggcatggtggctcacacctatagtcccagctcctcaggaggctgaggtgggaggaacacttgcatggcctggaaggtcaaggct

SEQ ID NO: 48907 - DNA, 1128 bp, Homo sapiens
ttaatagagacaagatttcaccatgttggccaggctggtctggaactcctcctagcctcaagtgacctgcccacctgccccttctctacaaaaaaatttttttaggccggcgcagtggctcatgcctataatcccagcactttgggaggccaaggtgggtggatcacctgaggtcaggaattcaagaccagcctggccaacatggtgaaacccggtctctacttaaaatacaaaaattagctgagtgtgccggtgggcacctgtaatcccagctactcaggaggctgaggcaggagaatctcttgaacccaggaggcagaggttgcagtgagccgagatggtaccattgcactccaacctgggtgacgagagtgaaactctgtctcaaaaaaaaaaaatttttttttaattagctgggtgtggtgctatgcgtctgtagccccagctactcggaggccgaggtgggatgattgcttgagcctgggaagtggaggctgcagtcagtgaactaagattctaccactgcactctagcctgggcaacagaggagaccctgtcttaaaaaaaaaaaaaaaaaaaaggaaaagaagagagaaaaagaagactagttggagactcccaaatgaattaataaatctgtcacagaaatggaaatcaaaataagaggaagtcacatttcatctcaagagcttggtgatacccagtgttgcaaagatagggaagagcaccctcacaccctgtctactggtaagggatgaatcgtgcaacctttgtgaagggcaaccagcagaacctgccaaaattctaaatgcatctatcttttgacctagccattctgcaattagaactgttcttagaggaaaaagatatatcctcacttgtaaaatttttttgaaaaaggccgggcacagtggctcatgcctgtaatcctcacactttgggaggctgaggcagatggatcacttgaggcaaggagttctggaccatcctggccaacatggcgaaactccatctctaccaaaaatacaaaaattagccgggcgtggtggtgtgtgcctgtaatcccagctactagggaggctgaggcaggaggattgcttgaacccagaaggtagaggttgcagtgaa

SEQ ID NO: 48908 - DNA, 1037 bp, Homo sapiens
ggctcacatctgtaatcccagcactttgggaggcagagatgggcggatcacctgaggtaaggagttcgagaccagcctgagcaacatgatgaaaccccatctctaccaaaaaaaaaaaaaaaaaaattagctgggtgtggtggcaggcacctgtaatcccagttactccagaggctgaggcaggagaaccgcttgaacctgagaggcggaggttgcagtgagctgagatcgtgccactgcaccccagcctagatgacagggttagactccgtctcaaaagaaaaaaaaaaacaatattcactggctgggcgcggtggcccatgcctgtaatcccagctactcgggaggctgaggcaggagaatgacttgaacccgggaggtggaggttgcagtgagccgagatcgcgccactgcactccagcctggtgacagagcaagactcagtctaaaaaaaaaaaaaaaaattcacttgaaaaagtacacacatcatgatacacaggtcggtgaagattcacacagtaagcgagcctggatacccagtactctgatcaaggagactagaagctcctcagcacccagaaactcccttccaatcacctccccgggtaaccacagtcctcacttctcccaccacagatgagattcccctgattttgaacttagtggagtgacacagtgtagatccttttgtgtctgactcctctcattaaatgcagtaagggttggccaggtgcagcggctcatgcctgtaatcccagcactttgggaggcgggggtaagcagattgcttgagcacaagagtttgagaccagcctgaataacatagcaagatcttgtctctacaaaacaaaaaacaaaaaacaaagaaaccagaaagattagccgggtgtggtgatgcatgcctgtagtctcaggtactcaggaggctaaggtgggaggatcgcttgagcctgggaaatagagggtgcagtgagccaagatcacaccactgcactccagcccaggtaatgagattctatctcaaaaattaaaaatta

SEQ ID NO: 48909 - DNA, 1031 bp, Homo sapiens
gccacctcttccaggcagccttccctgatctgtcctctaacttctgtcaacctgcaggaccacgccctcactgtgagacttctgtagcctgcctggctcctccttgaggctggaactctctccagggtggttaactctttccctctgttttccttatgcccaacactgggtcaggcagagtgggcgacaataaacgctgctaggagaatcgagccttctgaatattcacattcgtctgaggggagacttaacgactgtccatctctccccacagaggtgagcaacaagtgggcaaggaccatgacaggtgatatcccagcaccagcacaggtgccaggacaccggacgggggctccccctcagcagagtctcctcccttccaccaggccctaggaggcacctgctaatgaaatttgatcagtgccccaaccaccgccttggccagcctatgccgagcccttaccatggaccaggccctggggaagcatgtgacatcaaccaagaggtcacaggttttgcagagggggacacaggtcatttgcccacagcaccaaggaactaggtgatgaggcctggactccatcccgagcctgtggattccagagtgagctgctcagcctggacctgttgcctctcagccccagccctctgcaggccagaaaaaccacggagcacacccagaggtgctcagttgcttccacctgagaggcagggctgcacaggagcaagagtggaggccctgggtcaggcagatctagattcaaactcccgagaagggtggagggaagtgctccaagcagagcagagactgaaggcgggagagcctggtgcaccgcggacctgcagggggaaggcatgagagctcggtgcactggggacctgcatggggaaggcgggagagctcggtgcactggggacctgcatggggaaggcgtgagagctcggtgcactggggacctgcatggggaaggcgggagagctcggtgcacctcggacctgcagagggaaggtgggagagcttggtgcaccgc

SEQ ID NO: 48910 - DNA, 1033 bp, Homo sapiens
cttgacctctccaggatcaagtgattctcccactttagcttccccagtagctgggactacaggtgtgcaccatcacacctggtcaatttttgtatttttgtagagacggtgtttcagtatgttgcccaggctggtctcaaactcctgggctcaagagatcctcctgctttggcctcccaaagtgctgagtttacaggtgtgagacacattgccctgcttgaatttgttgattgcatctccatggtgttatttaacatgttcttctgtccctgtattttagtcattcaacagtgtgatctaatttagggccacttttacagcaggaataatttgcaggtggtgtatgtgtttccagagtcagaacatgtttggtttatgctcttggtgatattcagggctatcagtgatcctctcctggatcattttttaattagaggtgatttgtgttttgaaagggtcacttgggttgctggggggtgtattgtatatgagtaacagggttcttataaggacggagtcggataatcatgcaacagagcacttggtgctattcctggcacgcaatgaccatattgttgttgttgttgttgttgttgttgttgttattgttagagctgtgtgtgggggacccaagtcctgagctcggaggcattttctggccagggctgtttcctcccttctcccctgcctctggaaaagtctgcagtgccccaaggctctgggaggcatgttcaggactgcagcagccatctctgtgcacctggtggggccccttcagggaaggaaggctggagccccactcacttggttcttgcaccagactgtaagtgccctaaccccaatactctgccacctgcatggcctggggcttctggggtctggctcgttcctggcttcaaagctgtgcatgagccttctctttcagggagccctctttaactgcagcctgtatgtgggcttctcccttgcccctgcttctctagtctagaacttgtagctctgcatctgaatagtcagcttgggcgctgtaggg

SEQ ID NO: 48911 - DNA, 1022 bp, Homo sapiens
ttgcccaggctggtctcgaactcctgggctcaagggatcctcctgccttggcctctcttgcaggcataagccactgtacctgaccacttagcctcttgaaggaatctttcttataggattaaaagtgatgggaagccaggagcagtgactcacacctctaatcccagcactttgggaggcctaggcaggcggatcacttgaggtcaggagttctagaccagcctggtcaacatggtgaaaccctgtctctactaaaaatacaaagattagctggacatggtggtgcacaactgtagtcccagctactcgggaggctgaggcacaagaatcacttgaacatgggaggcggaggttgcagagagctgagatcgcgctgctgcacttcagcctgggcgacagagcacgactttgtcccccaaaaaataagtaaataaataataaaagtgatgggacctgatttcaagtagtcaaaatcgcagagacagcaaatgggctgggctatgggccagagggtaaagggatgtaattgtttaatgggtacagagttgtcagttttacaagatgaaaacagttcccaaaactgtatacctgtacatagttaagatggtaaagtttatgatatgtgtattttaccaaaattttttaaatgaaaaactttttttttttttttttttttgagacagagtctcgctctgtcgcccaggctggagtgcaatggcgcaatctcggctcactacaatcttcgcctcccgggttcacaacattctcctgcctcagccttccaagcagctgggactataggcacccgccaccatgcctggctaatttttttttcgtatttttagtagagacggggtttcactgtgttagccaggacagtctcgatctcctgacattgtgatccacctgcctcggcctcccaaagtgctgggattacaggtgtgagccaccgcgcccggcctgaaaaacatttttaagtggtgggacgtgtagggctccacggggcacctagcacaggaaag

SEQ ID NO: 48912 - DNA, 1607 bp, Homo sapiens
ggctatctgcctatctgttgtgtgttcctttaatgtatgggagtgagattgtggtttttgaatctgggtcctgtgccaggaggaataagtggtgagatacctactgtttgtgtcactcaggtcttccaccaacccctccagcctgtaaacctgccgtctggactccagaagtcatttctctctcctctgccaattcctaagcccagggggactgtgtctgagtgacgcaattgttagatctcctcagacaggctgttctctccaggaaaacattggctcaacaaattgtcaccaaacatttgtcttcagggaattctgttttttttctatcaaaaaaaatttggattcattatataataagagatttttcattttgcttggttactaattttatggaaagcctggtaggtttaaatgttaatagcttgttgactgggtgtggtggttcatgcctataatcccagtaatttggaaggctgaggtgggactatcgcttgagctcaggagttcgagaccaacctgggcaacgtggtaaaaccccatctctatcaaaaatacaaaaattagctgggtgtggtggcacgtgcctgtggtcccagctactctggaggctgaggtacaagaatcgcttgaaactgggaggcagaggttgcagtgagccgagattgtgccactgcactccagcctgggcgatagagcaagactgtctcaaaaaaaaaaaaaagttaatagcttgttgtcattgacaagtggctgtgagccaggacccacagtatattctctgtggattcttgtcaccttcattgtacagatgaggaagctgagcccccaagaggctgcggcctggcatgaccaaggtcccatagctagtttatggtggagctgggactatttgatccaagtccaaggtttggtcttctgtggttattcatgcactagactggtcttcctgggcatggtatccccagttctgtaccctttctctagaggtgccacgatgtgtgttgtctcagtaactgggagtctcctggcattttaagcccagggatgctaaacatccttcaaggctccagatagctctccccagtgaagaactgactcatctcaaattctaagtgtgcccctattgagaagctccaaaaccgaatgtcataattgacttgagtgatgtgacgtggggccaccctgggaaggcatggtcacctcgcctgcccttgtaagcagccatgcaaggtgaagttggacaagacatggctcctgtccccaaggggctggtggtctcctgtcagccctagcacccgcctgagaggagatttcacgggacagaatttggactttggaaataggcaaaccagggtttgaatcacagctggagctctctaggctgagtgagttttccttgttctccttttgagcaaaatagagtaaataataccatcctaatcagctgtgatgaggattagagaatttagcatggggttgggggagagggtcaggcacaggtaggtgctttctgagttcagcaaagggcctgggtggacacagaagcttcagagaggaggtacaggtggggctaggccctgctagggattttggattggagggta

SEQ ID NO: 48913 - DNA, 1062 bp, Homo sapiens
agccattaagacgaacaatgtttaatatgcactaatgtagggtgacttctaagataccttaggttaaaaaaggaaacaacagtaaaaacagcgttgggccggttgcggtggctcacgtctgtaatcccagcactttgggaggccgaggcgggcggatcacgaggtcaggagatcgagaccatcctggctaacttggtgaaacctcatctctactaaaaatacaaaaaaatcagccgggcgtggtggtgggcgcctgtagtcccagctactctggaggctgaggcaggagaatggcatgaactcgggaggtggagcttgcagtgagccgagatcgcgccgctgcactccagcctgggcgacagagcgagactccgtctaaaaaaagaaaaaacagcgttgatgggtgctatccatctttgcgtagaaggacgcctgagggtgggcgtatctgcgggtgtgcgcgccagctgtctgataagatgcacaagaagttgttaattgcggttgtctccgacagaattggggtcttgggtacctgggccagggcgagaaatttactaccatgtgcacagatagataattaaaaataagatgatgaagatagtcgtggctcccatccatcacgtgttaagccaatgcctagtttcacttctgttgggaggtcttatttttcccttttaatagaagagaaaagaaccttagagaggttaggaaacttagcaatatcatagccagggccgggcgcggtggttcacacctgtaatcccagcactttgggaggctgaggcgggcggatcacgaggtcagtagatcgagaccatcctggctaacacggtgaaaccccgtctctactaaaaatacaaaaaaattagccgggtgtggtggcgagcgcctgtggtcccagctactcgggaggctgaggcaggagaatggcatgaacctgggaggcagagcttgcagtgagctgagattgggccactgcacttcagcctgggcaacagagcaagactccgtctaaaaaaaaaaaaaaatcatagccaggaagtggagaagctggaattt

SEQ ID NO: 48914 - DNA, 1050 bp, Homo sapiens
gggagatgtgagtatacctgtcccacgcgctgtgctgcttccggtctgcccatcttgcccgtggacccacggtgccatggccagcccacgtccttggggcattttgcaagcagctggtctccccgccagagcctctactgtgcagggcctctggtttagggggggatgccaggcgttggggcctgtgagtcagctttttgcaaatgttggacgcctgtcactctgtctgcccatgcatccatctgtccaccttcattgtcgggaggggcctggcccttgatgcaggagcaagagatgtggtgtgcggattctgggatggaaaaagccatcccagttgggggtgggctgtgtttgcgggaccctggggcatctgagtgccactggtctggggaggagggggctgtggcccctggcaggggagagcccagcctgtgacttgctcaggcagcctcggccatctcctcaccgcatttgctctcctgagctccagtgcctgcagccacttgatctttgtctggactctccaagtccctaggcccctcatctccaggtggttggagtcgggagaagggggtttgtgttgtgtttgtatccccgtccctggggtcaggcctcttggcatctccttgtgcaagactctggggtagcctcctgacctcgaccctggccctggcccagggtgaccccctccccacatgaactctgttccccgccagacggtgcctgactttcaggagactagacctcgtaattacattctctcggccagcgcctccgcggtaagcgcaccccacccccaccccacccctcgtcctcctctctccccacgtcccacaccactgcctctgactgcacaggagctagaagccagcttgggtaaggcgggggcactgccatgtgatcaggtcagtcctgagacactggggaggggcagcagcccccacctctgtccacggcctggccccggtgccctgtggccatggagctggacttgtttccctctgcaaaacgctggagctggcggcagggccagccacactgagtagtgtg

SEQ ID NO: 48915 - DNA, 1045 bp, Homo sapiens
gcagaagccaaagccacggtaggtgtccccgctccccgctggcctcctggcccaggctctggctggagccaaggggtggtggcatgaagggacctggtatttggcatgacctctctcccctctccctggctggagatgcctggctgggggctgctgggctgagcctctctgtccctgccctcaagggagccttggtggcccccgagctctggttcccagggagatatctacggtgtgggcggaccagcagtgcccccagctgggtgcaccaccccgccaggcagctggagtctcctgcatgccctgccctgccctcctagatgctcggctctgtccccggctctgcccgggcatggcaccttcttactaactctactacttgctgcttgaacgtcaggccgagggtccctgtgctcaggcgcccccacgatggtgtggaaaacctgggagctggaccgcccgcttgctcagggccgtgtccgaggggtcccatgagattggatagggcctgggccatctggcgcccccttcactcccagctcactgaggcctgttcagcctggctgggtcaatgggacgcagcctgggacagtgtgcccagggcgaggccaggattggaggagctgggcccaagggtgaacaccctcctggcacaagaggttgctcagggctgccaggcctaaaggctgcctcataccttgcagagggaactcccaggcccaggcctactagggagatggctacctgtggctgccagctgattagccgagggaggccaggcctagcctgggctcacagctgcccatgcaccttgcgttcccctcccatagtgtggccccagagccagcactgcccctggcgagaaccgtctcaggtcactcaagtgtgtggggtctagatcagaggcaggggtgtagttgtttcaatcttggggttggctagggtgacctgtgcctattgggatgacctcttctaaggcacctgaacaggacagtctcccccgtcacttcgggccagacaccgtctctggagtaactcagccaga

SEQ ID NO: 48916 - DNA, 1033 bp, Homo sapiens
caccaacggggagctgctggctcagtacatggcagacgcggccagtgagctggggccgaccaccccctatggtgagcaggcctcacagccagggactaggggtcatggtctttagctctgattctccctccctcccttccttttttttacttaaaaaaataattatacaaataatacctgaattcattctaaatgtaaaaactctacgcagaaaaaaagagtaaaaaatggaatcttctcttaaccagttttggtttgtgtgtgtgtgtgtgttttgtttttgtttttttttgagatggagtctcgctctgtcgcccaggctagagtgcagtggcgtgatctcggctcactgcaagctccacctcctgggttcccgccgttctcctgcctcagcctcccaagtagctgggactacaggcgcccgtgaccacgcctggctaattttttttgtattttttagtagagacgaggtttcaccatgttagccaggatggtctcgatctcctgacctcgtgatctgcccgcctatgcctcgaaaactgctgggattacaggcgtgagccaccgcgcccggcctatttttttttttttgagacacagtttcactccatcacccaggctggagtgcggtggtgcgatctcagctcactgcaacgcccctgcctcccaggttcaagtgattctcctgcctcagcctcccgagtagctgggactacaggagcccgccaccacacccagctaatttttgtgtttttagtagaggcagggtttcaccatgttgaccaggctgttctcaaactcctgacctcaagtgatccgcctgcctcagcctcccaaagtgctgggattacaggtgtgagccaccgcacctggcctatttgtgtgtattttttaatggaatcatattgtgtgctatctgggaacctgacttttttttttttttttttttttttttggagatggagttttgctctgttgtccgggctggagtgcagtggcgcaatctcagctcactgcaacctccgcctcctgg

SEQ ID NO: 48917 - DNA, 1028 bp, Homo sapiens
tggtcccagcggatgctgccaggggcagtgaagtgtttaggtgaaggacaagtaggtaagaggacgccttcaggcaccacagataagcctgaaacagcctctccaagggttttcaccttagcaacaatgggagctgtgggagtgattttggccacactgtcaacatttgttagaaccagtcttttgaaagaaaagtatttccaacttgtcacttgccagtcactccgttttgcaaaaggtggcccttcactgtccattccaaatagcccacacgtgctctctgctggattctaaattatgtgaattttgccatattaaatcttcctcatttatactattatttgttacgttcaatcagaatccccgaaacctcctataaagcttagctgccccttctgaggatgctgagaacggtgtctttctttataaatgcaaatggctaccgttttacaataaaattttgcatgtgccattggtgagtacgtttttgaagagggagaagcgcccctccactgtagaccttatgaggtaaggctgcgagtgaagacctagcagaacaatccaggttggaaagaaacgaagtctcacacagggatctgaggatcctaggatggctctgtcccctcgcccagtggtctgggaagtcgccctccattgtggggttcttggagctcctgacacccagccacggagttcaagtacagctgagatgccagcaggaacagtgccgtagactaaggtaagcacaccttattttatccaacatgcctgtgtcccagcacgtgggcagtgctcccatgggtgcggctgctgcagagagcactgcaggggccacttctagtaggcacagaagacgagtttgtggcctcgactgcaggtctaacgcaggaaccctctgccttatggcttcccagcctgcatggggtccccctagggcagcccagggcacctaaagatggctccaagcgttagaaagttcttggtattgagctgcagccagcctgctatgtccctgggagtcacagatt

SEQ ID NO: 48918 - DNA, 1129 bp, Homo sapiens
agttcctccctttctctgcattgcccaagagcaacagccaaatagcggttcggcccttattttgtactgggcaccgtgtgaaacagcctgcctgcggatttcactcagtcttcaccatacctcgcagggtagagactgagactcagagatgtggcagcttgcccagggccatgcagcctgttcggtatctctgattctaaaacctgagcttttaagttttagctcactacttctccaaatgtcatgagacctttgaccttgaacctggggaggtggaaagccagcctgatggaggctgactcactggctaagacctgtgagttgtgcagggctggctgttcaagtctttgcgcttcaggttctggagatgacaaaacagaagggctcatttgaaacagacttgccaagaaattaatcctacagttagtgaacagcatggggtacagtatgtcagtgtgtgcaagtggaatactactgaggaaagacaagtattttgtaacatgttggatagtttcttgccttgccaaaaaacatgagcacatgcagtggaaactttagcctaatgctgaggcagatgagccccgtggcctagaatccacgctgtggaggttacacggtgcttaggagtgccaacctgggagtcgggcagccctggcccacagactgactgtgacctcaggcagatggctgaacattgattcagcacatgtatatggagcatctggtaagtgccaggcatcatacctaggacgggggacacagcagtgaacaaacacagaaattcttgcccttatcaatcctacatcctagtgataataaagaaagaaaatgtatcagatgatgggggatagatatgttgatgtgtgtgatgtgtttgtgtgtatacatgcagtacatatgcacacatcgcacatgtacacatgtggacatatagatatctttccccccggggccagtaggggaaaaaaatcaagaaaggctttggggttcagggtaaggatgggctctgctttaatagagtggacagggaaggctccctgtgagggtggcatttgggctgacccgggggagtgagccatgtggatgtctgagggaaaagcattccccagtgcggacagcacgtccaggg

SEQ ID NO: 48919 - DNA, 1026 bp, Homo sapiens
gtgccagacttaagtcggagacctgaggagccaggctgcaggttggcctactttgcgctaagctgggggtggaccagtggtaacctccctccgaagtgggttctgcctcctttctagcctagcgggagacaggaaggatggtgaggactcttccgcagccgaccaggagggaccaaactgtttcctttcccggctctgccttggggtgggaggagcagcacaggggttaggggtgcaaactggtggcagtggcagtggcaccaaggggcttttcgggaaggagtcgggccagggctttagaataggcaggaccagcaaagggagggctccctggaccgccgtcccctctgggccaggagcttacagaccgcagtacttgaggtttcgcaaggtgcttggagggcgtctagacggctttgctggctttcttatgggctgtaaatgtggctacattttgccgctgtttcttccccactcctgattggctttgtctttcccagcactgcagaaggatctggacgacaacctctttggacagcatcttgcaaagaaaatcatcttaaatgccgtgtttggtttcataaacaacccaaagcccaagaaacctctcacgctctccctgcacgggtggacaggcaccggcaaaaatttcgtcagcaagatcatcgcagagaatatttacgagggtggtctgaacagtgactatgtccacctgtttgtggccacattgcactttccacatgcttcaaacatcaccttgtacaaggcaaggatggaagtttggaatcccttcctggatgtcatcgggtttggggtctctttgttgtgggatgagatttgggagttctatgttgaaatgagtgagcccggaaaacggttcatgtctcagttccccttggaaaggtgtagaagttaagagtttgagatgcgtggagcagttaataccatcaaagctttgtggtgggttctgaaaatcggtccagtgagtatgtagggtcatgggattttagaggtggacatgatcaa

SEQ ID NO: 48920 - DNA, 1025 bp, Homo sapiens
gagacgtggtttcaccatgttggtcaggctggtctcgaactcctgacctcaggtgatccgcccgcctcagcctcccaaagggctgggattacaggcaggagccaccatgcctggcaaaaataacgtccataaacaaaaacacgtggccaacaggggcggagcagaaccgagtttccggaagcaaaacagggctttgtaccgaacaaagatggcggccgccggcgtcgggaggagggctgccctgaagaaagatggcctccgcgagaggaggaaccggaagcgtgggtctggcggctgcaccggttcgcggtcggcgcgagaacaagcagggtggcgcgggtccgggcatgaagctgggccgggccgtgctgggcctgctgctgctggcgccgtccgtggtgcaggcggtggagcccatcagcctgggactggccctggccggcgtcctcaccggctacatctacccgcgtctctactgcctcttcgccgagtgctgcgggcagaagcggagccttagccgggagggtaggctggggcgggggctggaggctggggctggggctggggctgggcgatggcactagggctgaactaggaccagggcatggagaatggaggatggaggccgggggatggcaccagggccgggctaggactagggctggagcggggcctgggggctggggctgggcgatggcactagggccgggttggggctggggctggggctgggggatggagcggggcccgggggctgggggtggggctgggggatcgcactagggctgggttaagaccagggcggttggctggggctaggggattgaggatggtggatggaggctgggggatggcagtagggccgggctaggactggggctggagcggagtttgggggctggggctcaggagcgggggctggggctggggctggggctgggggatggcactagggccaggccggggtaggggtcacatcccaggagggccgggcctgggcagagctgagtccgcgggggccggac

SEQ ID NO: 48921 - DNA, 1050 bp, Homo sapiens
tcaacctttttgtgtgtgtgtgtgtgtgtgtgtgtgtgtgtgtgtgtgtgtgtgtgtgtgtctacgatgtgcttatttaataattgccaaaatatttagactagagtaacttccggtgggtcaattggattgtgactttcttttgtggttttttggttcttcgattgctctctgttaaatattttcataattccccccacagaatacgtgtgtatatactgcaacttaaaaactaaaagcagtactcgaatgagttgttttaatgttgtacttttatctgtttgttttatgggttctcctgctgcctaatgacctttctgtttttataactgccggaaagccgcgaagcctctcgcatggggagctaggtccccgctgcggctccgcacttgagtttattataaactctggggttctgagtaagttttgtttgaatacagcaacatgattgtctctttctattcttatcctaaaagactctgtctggcatcttttagttgtaccctcgtatctgcttctctaataaatgttatattttttctcagtattgtgtattttaagtgacttttcatgtttccaagaaaattattctgtgtaatatgaatatttaactctttcatctccagtaataggggattttctagcccaatgcttttttaaaaattctgcctcccacccctacctcctcctttaaatgatggcacctcccctgtttctgatcttgcgtgcactcagggcctgagaagtctgtgtttcttttgtttcttttctctctccttgagatgaagagcttttcacggtttattgcggaatgaatacagaacaacaggttttccttttcaccaaagattttacattgtactgctgaagagccaagagtttccttctgagagaattggaccttcatgttccttgtaccattctaggaaattgatgcatttcttttcttttcttttttttctggagttgaattctcactctgttgcccaagctgaagtgcagtggtgtgatcctggctcgctgcagcctcgacctccctgggctcaagcc

SEQ ID NO: 48922 - DNA, 1026 bp, Homo sapiens
cagctacttaggaggctgaggcaggagaatcgcttgaacctgggtggcagaggttgcagtgagctgagatcgcaccactgcactccagcctgggcaacagagtgagactctgtctcaaggaaaaaaaaaaagtaactagacttttagaggcagcagagggaggtgtgcatggggtaaggagaagagattttttttttttaatgttctttttcacccacattctctgaggaatgtgatgtcccatctgtcactttacaggggtggagacttttggcctcagcctgtgtgaagagactggcaggaatactcacgctagggaaaaggcagcagctaggcgtgcagtggttgatggggtttgtattaaggaaacataaatttcattaacacttcagtgttgccactgacattgatggtaacacttggtaggaaaaggaagaagactgtctcaaaatgtgtttttcatggattctccctagagtcagaagtatctcttactctcctttactgtagcgttgctcactgctttttctggggcattctggccagcatccatggaactgggaatggtttatgggacttatgcagtttgcatgcattgatttttgcatctcggctgggtgtagtgggaaagagcttaatctatttcatgaagccacatgcagatgtctgcaccccccatggctgcaggctttgctttcagccttctttcaaggaaagcctggggctttctggtttctcatttatatttgtgtctgcagggtgcaacaccggaggatttcagcaacctcccacctgaacaaagaaggaaaaagctgcagcagaaagtcgatgagttaaataaagaaattcagaaggagatggatcaaaggtatagtgcatcaatatgacttattaagaaattcaaggccaggcgcagtggctcacaacctgtaatcccagcactttgggaggctgcggtgggtggatcacctgaggtcaagagatcaagaccatcctggcctacatggtgaaaccccgtctctacta

SEQ ID NO: 48923 - DNA, 1090 bp, Homo sapiens
tcatagagataatggaattgatgcagccatccaatgtagataccagtttcgtttacagagaaagattggcataaagcaatgtgtagattcccaaatcattctcaatggccagtctagtctaagccttcccaaaatatcttttataatgaatataatgagtaaacagatctttagactgggcccagtggcccacgcctgtaatcccagcagcgttaacatatccagtaaggttttctccttttttttttttttaaatcctaccctgtgggagttgcaatacagttgtagtggaatgctttcttgtacaaacataagttttacttttcccttctcctggactctccagtcaactgacggttgggttacttctttccaaatagtacctggtagtgccccaaagccagaggtggatgccatcctttcttgagtgtcaactgacacattggcctgggaaaagattctaaactacaactaattaactagaggagagatgtccttcttagacttggaatcaacagctggttactagtaaaagaataacagtagtcattgttaacctgacaatcgtatttccacaaaaacaactctgtgtaaaaaagaggcctggcacagtggctcatgcccgtaatcccagcactttgggaggccgaggagggcggatcacctgaggtcaggagttcgagaccagcctgaccaacatggtgaaaccccgtctgtactaaaaatacaaaaattagccgggcatggttaatgtccggctaattacaggcgggtgcctgtaatcccagctactcgggaaactgaggcaggagaatcgcttggacctgggaagtggaggttgcagtgagccaagatcacgctattgcactccagcctggacgacagagcaagactctgtctcaaaaaagaaaaaaaaaaaacccatgaaaaaatagccaggcatggtggcatgtgcctgtagtcctagcggaggctgggatgagaggattgctggagcccagccagggcaacagagtgagaccctttctccaaaaaaaaaaaaagtaaagaatgtaaattcataattgataacaagtttattatcaatgct

SEQ ID NO: 48924 - DNA, 1071 bp, Homo sapiens
atccacccgcctctgcctcccagagtgctgggattacaggcatgagccaccgcacctggccaattcattgtttaaaaagtgtttgcatgcttctgaatgtatttatatgcttgtgggtataatttcaggattcacagctggtaatagaagcttataaatcagggtttgagcctcctggagacattgaatttgaggattacactcagccaatgaagcgcactgtgtcagataacagcctttcaaattccagaggagaaggcaaaccagacctcaaatttggtggcaaatccaaaggaaagttatggccgttcatcaaaaaaaataaggtactgatggttggcgtgaaatgagttttctaaggtgtggagattttgacttgatcttttagtcttagaaaaactaagatcctaaacctgtagtttcagaatgcaaaagaagaagctagtgtgctaccttatgttgagacagtatttctttttggtggtggtatctttgccatggccctgtgtcttatttcagatgcattatcctcgtaccgtgactcccacactaacagagtactgacctctccaccgtttcgcctcatgcctttccctccttcctctcctagactgctggttaccttggctgggagagaggatgtagtgggacattcctgtaacactttatccgcacatctactggaaatcgttaccatgttaataacttggttttgaattcatgttaacatgtgtacccatgaacatttttcattttcttttcatagtgcgatacataggtgcatgacagcattaacctggggacgtagaatatgatcaaggcagcattactgctttaactttagaatgacttactatttattaatttaaacagactgctgtttccacaaccttagcattgaaggtctttcattttctcccatcaagctatgttagtttaggtaatgtagaaatatttaccctctggcttaagctggtttagagtaactaactagagctatagtttgcatgggaaagtctgcacgagcttcttgtcagatatttcttgctcttctgtcgcattacttactaa

SEQ ID NO: 48925 - DNA, 1031 bp, Homo sapiens
tttttttgttttgtttgtttgtttgtttttactttttgtggtgatcgaggttttgctatgttgcccaggcaggtctcagactcttgggctcaagctatcctcacacctctgcttccctaagtctggcaatgcaggtgtgagccaatgtgcctggccagcactgtgttcaaatcacctccattcatccacatccatgctcagacttcggtacgctttggcattgtgttagatgccagcgtgtgaccagatgtttagtagttcccttataagacagtatatgtcatccttaaggcacccagtttaattaaaagtaagtttacagtataaagtagatataagaaaaagctagcagtttttatctctgggcaagagtgcagatttggatgccatgaggatgccatgttccttagaggaaaaatgaagagaggaaatcagcttaattgaacaatttttattggcagggaaaactcaaggaaccatgcagtctctttttcttctttgacattttgcagctgtcatagagttttgaacttgaaggctttgaatgagctcgagtgatttggaattagttaatctgggtttgtacaagaagcagtacatgttgggataggtcatcctgcagctcatgacccctgtgtttcagctgaaggtgaaacaggctcccctgctgccctttcaacgaggtggactagacatccttactctctgttttgggatattgagagggaaactgcaaaggaacatgggaaaattataccatgtccgcatcttactcttgtaaaaaaaaattaattaaaacaccgagataaagtattctttgccattcttctcagaggtagttactcttaaccccttgaggtatgtccttctgaacccttttaaaacagctgttttgggccaggcatagtgactcacgcctgtaatcccagcactttgagaggctgaggctggcggatcacttgaggtcaggagttcaagaccagctggccaaatggtgaaactctgtctctactaaaaatacaaaaattagc

SEQ ID NO: 48926 - DNA, 1462 bp, Homo sapiens
ctcaagtgtgggccgggcacggtggctcacgcctgtaatcccagcactttgggaggctgaggtgagcggatcacctgaggccaggagttcgagaccagcctggccaagatggtgaaaccccatctctacgaaaaacacaaaaattagctgagtgcagtggcaggcacctataatcccaactactagggaggctgaggcaggagaatcgcttgagcccaggaggcgttggctgcagtgagccaagatcacgccactgcactccagcctgggtaacaagagcgaaactatcgccaaaaaaaaaaaaagacaaaagaaagctcaagtgtgtctttcatttcccctgtgagtgttcatcaccgaccacccatccccaagttctcatttctaatgtagccacaaaaggcgctacatggggaatcattttcattttgtgtcaaccattgtggggaccagaagctcaagtgtggggaatcttcggtgttagaatttgagacgttttatctgttgagtcaccagggtgataaagtggagacttagactatgaacagtctgggaacaacgttccagaaggttgtggctcttaatggcttttcaaagagaaagtcaatttcttgagagccggaggagacaggacagggccatctggaagagcttggctgcttataatggttcctttagagcaatagtctcactgcttgcctgacttctaattgattcctcctggttgataacagtgaggttgtagttgaagccttgcatatttcagtcctctcaaaagcttttctctaaatggacttgtattgccaactagaaatattataaagtgtatactgtttctcattgtggctcaatatgcgttttttccctagaagctgaattttatttttattaaagtcatcaatacaatgtaaacaaaattaggcttttacataacaaggactcattcatgatgcccatggttgtttgggcattcatagcttcatgctgtatgtgggtgaaagcactgagtttttatagatttgttgagcttttgacagatcagttagagttgagtttagttgggaaatggtgtgaactattatttgccaaattctgccaaattccttgcttaaagactaggtatacgttaatattagtatgcctttctctaaaattattaaatatattaaaatacatattcttgccaggtgctgtggcacatacccctagactcagctacttaggagactgaagcaagaggattgcttgagcccaggagtccagactgggcaacataacgagaccccatctcaggagcaggggagtgttctcaatatctgtatttgatctcaaaatggagatacttactttaccaaaagacattaatttgctgctaaagttaaatatttaaaatgttattcaattaaaataagttagattagcccaaagtttcaaaagatattttatgttgaatgaggcaaat

SEQ ID NO: 48927 - DNA, 1029 bp, Homo sapiens
ttcagtcagcaattaaggcatcttaacacagaccactcaaatattacatctctaatgtatatctaaatatcctttacattagtacatatagcatgtatatgaattttggattatatcttgactaagtatcaatgaagccaaatattacattatgcggagcggttcagttttgcaaaatgaaaagtgtttcaattgtaattaattctgagccattttgttgagaacacttgatgtgtaatgaatactcaggatcctatgggaggtggatgccaattaacctgattttaattaatattttcttggtgtaaagcagaatatgaatgaatgtggccttgtgtgaaacagagtggcgtgtgttctgttccataggtatacgtcatgtaaagctttcatttccaacctgaacgaaatgaatgattacgcagggcagcatgaagttatctccgagaacatggcatcacagatcattgtggacttggcacgctatgttcaggaactgaaacaggagaggaaatcagtaagcaaaactttattctttttcttcctaaaagatggaccaaacacagtgggaatatccctagaagattaaaattaaataaaaccatataagactatgggtcttaaactcatacctttgagaatcatataaaagttatggaccccagctgggcacggtggctcatgcctgtaatcccaggactttgggaggccgaggcaggcggatcacaaagtgaggagtttgagaccagcctgaccaacatggcgaaaccccatctctactaaaaatacaaaaattagccaggcgtggtggcatgtggctgtaatcccagctactcaggaggctgaggcaggagaaacgcttgaacctgggaggcggaggttgcagtgagccgagattttgcacctgtgctccaacctgggcgacagagcaagactccgtctcaaaaagaaaaaaaaaaagaaaaaaagttacagaccctgttcctagaaagtgtttctaggtctctacgtaaaatgtcaagggtcctt

SEQ ID NO: 48928 - DNA, 1020 bp, Homo sapiens
ctcctggtgacctcaactgtctcatggctttaggtataatccatatggcaatgactcacagatatggatctctaagccagacctctctcctgaattccagaaacagcttgctcaaagtctccacttagaaatgtctaaaaacttggctgggcgcggtggcttatgcctgtaatcccagcactttgggaggctgaggcgggcggatcacgaagtcaggagatcgagaccatcctggctaacacggtgaaaccccatctgtactaaaaatacaaaaaattagctggaaatggtggcgggcgcctgtagtcccagctacttgggaggctgaggcaggagaatggcatgaacccagaaggcagagcttgccgtgagccaagatcacaccactgcactccagcctgggcgacagagtgagacgccatctcaaagaaaaaaaaaaaaaaggaaatgtctaaaaaccatctgaaatgatctgaaatgtaacatgtctgaaactgaactccggatctccccaacttaaaaatccacatgtctaggccaagtgaagtggctcacacctaaaatcttagcacttcaggaggccgaggtgggtacttgagcccaggagttggaggccagcctgagcaacatagcgagaccctgcctctaaaaagaattttaaaaaattagccaggcatggtggcgcacacctgtagtcccagctacttgagaggctgaggagggcggatgcttgagcccaagacgctggggctgcagtgagccatgattgcactactgcactccagcctgggcaacagagcaagaccctatctcaaaaaaaaaaaaaatctgcatttccacgacctagattttcctccactcacctgagggtagctgcatccttcctggtttaggtcaaaaaccctagcatcacccaggtgcagggggatcactggaggtcaagagttcaagaccagctgactaacatggtgaaaccctgtctctactaaaaatacaaaaacattagccaggcgtggtggt

SEQ ID NO: 48929 - DNA, 1054 bp, Homo sapiens
agattgaactcagctatgcaaagcaactcaggtaagttgatattgaaaaaggttatttgttaactgcaaaatgatgtaaggataacgtatattctcattttacagtataaatgtatattttaaatatttttccttttatgtaaggtaatatttcaatagaagtgattgtttttcatacagaaaattaattttcatagaacattaaaaataaaaactaaattactgctttaaggcccagttttttttttcaacaagatatttgctgagttttggagcagcttgtttctcagtaaactttttattgaaatatattaataacatatgtacagagaagtacacaaatcataagtgtgcagctccatgaattttgacagtgtgaacacactcatgtaaccgggcacccaggtcaagaaacagaaagaccagcctggcaggccccctggccccctccagctccccactctccccccagcggtaaccactctcctgacttctaaccgcgtggattagtagtgcccacttttgaactttacatgagtgtaatcatttggtatgcattcttgtgtatctggcttcttttgttctatattacgtttgtgagattgaccatgtggtagcatgtggtgggatctgcttattttcattgctgttgagtgttttggtctgtgaatgcaccagaactcatccgttctgactaggtgattggttgtttctaatttaagctataatgagtagcgctccaacgagcattattgtacaaggctttttgtgtgtatctgaacacatttcctaggatctacgtaggcatctaattgcaaggtcacaggctactcatatgcttagctttggtggatagggttcagccatttccagtgtgcttgtactaattcacactcccttctgtaatgtgttgaggggtcatgtggaatagtattttaaaagtacttcgggccgggcgcagtggctcacgcctgtaatcccagcactttgggaggcaaaggtgggcggattgcctgaggtcaggagttcgagacccgcctggccaacatggtga

SEQ ID NO: 48930 - DNA, 2078 bp, Homo sapiens
cacgtccttgtttacacttggtgctctctgactttaaatttttaccagactgatggatatgaaatggtatttcattgtggttttaatatgcatttccctgattactaattaagctaaatatatttattgcttaaaattcttatttatttatttttgccccttttcctgttaagttatttgactctttttagaacagttggagccaggcacagtagctcatgcctgtaatcccagcactttgggaggccgaggcagggggattgcttgagcccaggtattcaagaccagcctgggcaacatagtgatatcctgtctcttaaaaacataaaaaatagaacaattgaaggagtgctatctatattctagataccaattctctgttgatcatatgtgttacaaatatcttctcccagtttgtattttttatgttcactttcctcaatgctatcttttcgtgaacggaattttttagttttttagttttattgacttttttcattatggtgtacactttttgatgtcttgtttaaaaatcatttctggctgggcgtggtggctcacgcctctactcccagcactttgggaggctgaggtgggcagatcacgaggtcagaagatcaagaccatcctggctaacatggtgaaaccctgtctccactaaaaatacaaaaaattagcctggtgtggtggcacgcgcctgtattctcagctacttgggaggctgaggtaggagaatcgcttgaacccaggagatggaggttgcagtgagccgagatcgcaccactgcactccagcctgggcgacagagcgagactccatctcaattaaaaaacaaaacaaaacaaaacaaaacaaatttcctacctcaggatccaaaagatattatcctatattgtctcctaaaagttttatagcctagccttttacatttaggttcttaattcttaatccacctggaataagtttttgtatatttttaaaagtagaggttttatctcatttttcccgatagatatgcaattatccccgtacctcttattgaacagcttgttctttccccactggttgatgacaatgatgatgatgatgatgaaaatgatagcattaacacttactgagggcttaccatgtgccaggcatatgctaagcatgaggtaatttactaatccttttagtaactcagtgagtaggtcctgcttctatcctcttttgagttgagaaacagcaacacagaagttaaatacttgcttcatgtggcatacctagtagtcaaagagccagcattcaaaccaatttattctagttccagaatccagattcttagccattaggctctgcatcttttctacatggctacatctatcctaaatcaaaagtcatttttgcatggacctgttcctggcctttcaattctttgtatttgtctatgtctttgtccctggccaatagcacaaagcctcttaattaactttagaataagtcagtatctggtgtggctactattcctaccttgttgttcttcaagagtgttttggctattaattgacctttgcatcttgatttaaatcttagaattttgttctccagaaaacttgttggggttttaattgaactgcattgaatctgtagataatctaggggaggattgatatatctataatatatggccttccaatccatgaacatggtatatttctatatttattctgtttttctttaatgttgtcttagtccatttgtgctgctataacaaaatacctgagagtggataatttataaacaacagaaatttatttctcacagttttggaggctgggaagttcaagatcaaggtgccagcaggttcagtgactggtgaaggcccattcctcagatggtgctatctaggtgttggtgttgccacatggggaagggatggaagagcaacagcagctctctgaagcatctttcatatgggcattaatcccatccatgagggtggagccttcatagcctaatcagttcccataggcaccagctcttagtactgtcaccttggaggttaagttccagcatgacttttggaggatacattcatt

SEQ ID NO: 48931 - DNA, 1024 bp, Homo sapiens
gattctcttgccttagcctcctgagtagctgggactacaggtgtgcattatcacacctggctaattttttctatttttagtagagatggggtttcaccatgttggccaggctggtctcgaactcctgacctcaagtgatctgcccgcctcggcctcccaaagtgctgggattacaggcgcgagctacctcgcccaggcttacatggccattttgaagtgattgggttctaataaaatagtttacaactcttcataacatagctcttcataacattgccttttaatcaattttcaaaatttttattgaacaactatggtgtgcacaagacaccagtctgaatctgttgtaagttacattatatacattgaaagatatctacgtggaagcatagaaagtaggttttacctctagcttgtaacatcagagtcaaaagaaaaatgtttgtatgtaaaattaaccaaaatacatttactcaagacttgttaaaaaggcagtgttagtaaggtaaatatgttcactgacttgttgaagttgtggctggttgttggagaaatggcaaagcaagagttgcttacatttgaatgttttttttttcttgcctacttactgagggaagtgacaggttactgaagtgttagttcagctttttattagcttgcttattagtgtgaagtatgaataaatccattggaaaattaagccttcctcgtaattattctctttgcagctaacaaattattcagtgacagaacctggttttgctgcctcctagtatcctctctgtctttatttatttgctctggtgctaatgagaaatgaagtatgtacaagaaagagaacagagaaacctgaataatgcatattggttagcatagtaagaagccacatgtgggctgggcgcggtgggtggctgacgcctgtaatcccagaactttgggaggccaaggcgggcagatcacgacatcaggagtttgagaccagccggaccaagatggtgaaaccccatctctactaaaaatacaa

SEQ ID NO: 48932 - DNA, 1059 bp, Homo sapiens
gtgccgctcccgccttcgcagccagcgcgggcttacctagtgttaagtctctcttcttgggtggcccacgcctaagcgacctatgcttcttgttcttctgaaatcttacagttccccttagatgtaggttggctattggtagcttccgattcagataagtttggaacttgacagatgttttcggggggctgctttagagagaggctttggactatgcaaggggaggaagggaggttcagaaaaacggggtcggggggtcggcagggacgactcttaaagtgtggaaggtggaaggctgggaggggagattaaagggcaccgaagaccagctttgtttgctcctatcaaggtgatcctttccagagcaagagccatatccatgtctagtcgcacgagtttgtgccaagtcctttgcaaaaaccttcagatgtgggatctcatgtaatcttgaagacatcttagtcgtcctaggggttatttatttaattgatgagacgcgggtggctcatgcctataatcccagcacttgggaggcggagacaggaggattgcttgagaccaggagtttgagaccagcctcggcaacatggcgagaccccgtctctataaaaaacaaaacaaaaccacaaaaattagccagcagtgatggcatgcgtatgtagtctcagctactcgggaggctgaggtgggagaattgcctgagcccaggaggttgaggctacagggagctgtgattgcaccattgcactccagcctgggtgacagagccaggccctgtctcaaaaagtaaataaaaggccgggcgcggtggctcacgcctgtaatcccagcactttgcgaggccgaggcgggcggatcacgaggtcaggagatggagaccatcctggctaacacggtgaaaccccgactctactaaaaatacaaaaaattagccgggcgcggtggcgggcacctgtagtcccagctactcgggaggctgaggcaggagaatggcgtgaacccgggaggcggaggttgcagtgagcagagacagcgccactgcagtctggcctgggcgaa

SEQ ID NO: 48933 - DNA, 1051 bp, Homo sapiens
cttgtgccttaaaggcagagaagcgaggcggatgccctggaagcacccagcatcacacccaggcttgtgcggggccaggctgggagcccatgcagtagggcagaaggcagcggaggccaggtctgtcccggctggagaacagcgtccacgcagtcctgcctggggtcaggccctcactgaccctcaggggagcccccaaggtgctgtctgtctagacaggctgtcccaccccagggtggctagtggccatatgcagggaatggtgcttctggctgtggcacgcactggatcacccaggtcccagcagacatggccgcccaaagtcagcaagcctcctttgtgctatgtggagctcacagcctcacatgtgaacacccgtgtctgggttgcctggggtgatcctccctcctgcgtggtggctgtctctggaaagcatcccttgccgctgccatgggcagccccagcccccgtccgtccaggctcacccacagtagtgatgcagacgtgacgtgggggaagggggctgagccctgtggctgggttctgacaactgtaacggttttgtcgagcttaggcccctttggagggagaatcaataaataacaaacaccaactacaaacgccagttggttccttttttaattacatttaaaaaagacaaaggcatggagctgtatggatgacacaccttgaccactgacgaggaagatttcactcagccacgtctcagtggagtctcagaggggagggtttccacacagcacggtgccaagggccagtcttgacgctgtcatagacaatgacatgcaagccccagccctggctcgtggttcaggtggccctccaacactgagctgtcccaggacgcctgccgggctcgctgagggcagggccgggacttgctcaggttgctgggtgttcatgaaggaggatcgggtctgccagatcaaactccaccctgcagcagttagcaaggaccaggccctggtctgctgaggctccactgctggccctgggttctcggctttttgttgtcaatgactcctacgct

SEQ ID NO: 48934 - DNA, 1045 bp, Homo sapiens
catatcacctagaactgtttttccactcagtgtattacagcatctttccacgatacagtgcatattcttgttgtgactttgtctttaataacaacgtaatggtcagcccattgtctggttctatcatgacttatgtaattgatacatattatcaaatatttaattgtgggatgttgaactattcaaaattaccacattaatgatacgtaatcttatgtatattctgtgataaccatcttttgtggtttaatttttgcacacattcatgacatttttcttggacaggattctttttttaagagacagagtcttggccgggcgcggtggctcacgcctgtaatcccagcactttgggaggccgaggcgggcggatcacgaggtcaggagatcgagaccacggtgaaaccccgtctctactaaaaatacaaaaaaaaaaaaaaaaattagccgggtgcagtggcaggtgcctgtagtcccagctactcgggaggctgaggcagaagaatggcatgaacccaggaggcggagcttgcagtgagctgagatcgcaccactgcactccagcctgggcgacagagcgagactctgtctcaaaaaaaaaaaaagagagagtctcaatctctcacctctctcacctgggctggagtgtgattacagttcagtgctcctcgaacccctgggctcaagccgtccttctgcctcagccttccagagtgctaggattataggcatgagccactgcacctggtgcaaaattctcataatgcaaatatttaaggcttttgatatatactgataagtcatccctctggagaggctgtctgaagtggtgctcccacctaccatgtctggaagtttctattttattaccatccaaggtggtgaatgtcttatgattattgaccattggtatctgtaaatttcttgtttgatatttttttcggcgtgttcaccttctagtttttttgttttcgaaagaacccttgcgctggaaaggatggtaactgactctttgccttatttgcagcatacgctgccttttttg

SEQ ID NO: 48935 - DNA, 1071 bp, Homo sapiens
ccttctggattcaagcaatcctccagcctcagcctccggagtagctgggaccacaggtgcatgccaccacgtccaactaatttttgtagaggcagatttttaccatgttgcccaggctggttttgaactcctgggctcaagtgattcacttgcctcggcctcacaaagtgctaggattacaggcatgagcaaccacgtctggcctttttcagtcttttctaactcgtgcctcaggacaattaaaaagtctgacatccctctcaaaaaattctaccttcagtaggaggtgttgggctcatgccaaattataaatggtcaactttcaatgagattagggtgttagcacagtagccagatatgtgcacattttaaggtttctcctctgtgatagttaaggcaagtcaagactaaagaccttctgtctaggcagggagataggtggtaaatttaaaaagcagcccgccccttttatagtcttttcaagcctaggccacgcgagctagtgtagggagcgtcattgggatcatgacgtcatctttgaatttgggcacatgtctgcacatgtgtgcctgtcattccaggattgttttgccattgttcattagttgagttcacagctgcctctccagaaagatgacgatctaattataattgctcatgaatcaatgaagaaccaggaatgttttcctgtatcaacagatgcaaacaacacagacttctctctgttccttttgccctgcttgtaaagaagagtgaatctgaaagtggggcatccagggcactgtgttctggcgctctttaactccctctaaggccgtgatgctcctctttggggcctggcgttgtgcttttaggaagagctgcttctcccaccgtcctccctcctccaggcggtagggtgcaagggagctgcctcttttctaactgctctcttcactgattgtgtagtctctcctcctccatcttgtcctgtttgtaatcaccagctagatggctgtcccttaaatattaacttctaaattgtgctaacatgcaagtattaaggttctcctttcttgctagtacttggct

SEQ ID NO: 48936 - DNA, 1927 bp, Homo sapiens
ccttaagtaactcttttatgaaataggtataataatagcatcgtgcatctcagggttatagggaagattacactagtcaatacacataatgcttctagaacagcacctggcacatacggagcagtcaggccttagctgctatttattattaattatgtggtgctagatgcatgctttgtaaacagatctcttggcttgaaaaacctgtgtccctctcctttctggacccctcaatccaaaattatagctgaggtgtttaccccaggtcaaaaaaaattccttcccactcaacgaggctaacaaattcctgaaaactgcctccttggcttaacattccccagcagctctggagagtagaataaggacccccaaaggacttaaattatagagagaggctgagaaagcattgctcagcattgcaaattgctccagaatgaaatatgtgtttgccaggacatctgggtggccctccaaccccagcagcatttaaggggaggctgacgtgtctgctggggccatagagttcatgtaaaaggggcttgcctagatgacatcaatattttcctctgaattctcccatgttctccttttttttttttttctctgagacggaatgtcactctgtcacccaggctggagtgcagtggtgcgatctcggctcactgcaacctctgcctcctgggttcaagtgattttcctgcctcagcctcccgagatgctgggattacaggtgtgagccaccacacccagctaattttatatttttagtagagatggggtttcaccatgttggccaggctggtctcgaactcctgacctcaggtgatctgcccgcctcgacctcccaaaatgttgggattacaggtgtgagccactgcgcccagcctccccatgttcccttcattccaaaaagttactagtatctgcttagggcagcgagactcaaggatgtagcccagggtggctgttgtgatcagagctgatggccctttccaggatttggaggacaggcacgtacattatcatatctggtcctcacagtagcacactgggttcagcagagcagagtggaacgtggcctggggctttatcagcagccctgagtcactctggcccacccacccctgctgttcctgtctaggcttctgaaaatgctattattgaaaattgttattcttcaggtaacattgttaaggtttccttctatcgaattgattctgatgagatgttcacaagttagagcagccaaaacagaggagaatgagtttccactcataaagctctgtggcagtcccaagtacatttcctctatggagtcattacagcaccacttcattagtagaaaggcatgtctgaaagaaaaatttccttgatttttcaaagtgactggggaaaaaaaaaggagagagaaacctataggttatgaacttgtcaatgtcagagcaaataacttttccacaattgctttaaaaatattttagccagaacaaagattctctaggtgagaagctttacaaattcagttttgtttcatttattcaagaagcatttagtgagaaccttctatatgccaggcaatgagagataataggaaatatgagcaaagctggcacagaccctgccctatggcacttacagtctaaggggggcaggaccgtaaacacaaaggcacacccatgtggtatagcgctgccaaggaagatggcacagggtgtgatgaaagggtatgatgaccttcctttctcagggtggtcagagacgcttccccaaggaagagacaggccagcatctggaggatggacaggagctgcctgtggctgggagcttttcatgctggagtcattacagacagtgagagtgatcgagacactgtgacgctggcatttgttgttattgtctaatagtaataacagctaacatttatggg

SEQ ID NO: 48937 - DNA, 1068 bp, Homo sapiens
aatagatttgattctaattgctaacaatcagtatacactgcttggacctggtctagtgattagcagctagaaggaggggaagatggggcactccttgagagatgtgatcagaatcttgtagaaggatgtgaagtttgaaaaagcatcttaactatcgtggtggaatttttgtaatgttacatttgggaaatgaaaaaaattttgaaacacagattagaatataaagctccacaaaatctttgttggatgtatggaaaaagtctcatgggagaagtttgcttattaaaaggcagtatggattttgcacaaagaaagttggagaaacacacccttgtcaccgagaagctggctctgtgctaagtgatggtcatgctttagattttctttttttccattcttctcttccctgtagctcagccctctcttcctgctatagccgagtgtaccaaagcctcgccaacctcattcgctggtctgaccaagtgatgctggaaggcgtgaactcagaagacaaggagatggtgacgactgtgaagggggtcatcaaggctgtgctggatggagtgaaggtaccggtgcaggttccagacagtcccagtcagggacttagagcagcctgcctgctggtgcttgtcacataagagcttgctcctgaccttcaaacattagaatgtctttctgcgtctctggtgttggtgcgctctatcccataactacttacttctctcaggactggtgcgaatggctcttagggaaaagctgtctagagcagtcagcccttactgagcactgcattaaatcttagtgagtcttcgtagcatcgtgctggctgagcatgcttgccagctagacaaaatgcaatggagatcgttttcacaatgactttaagcaaagctcccagcatgtcatatcagcactaccttttcatgttctgggagcttctaggattcttggtagaaaagcaggagtgagatgagtaagaaatggaactttctgtatttacttgatatccgtgatgtggtctgtgtatttgctatccagagaagtcagaaacagcataagaaattg

SEQ ID NO: 48938 - DNA, 1032 bp, Homo sapiens
ttctcatctctcttccttcaccatgaagctgatggacaaattccactcacccaaaatcaagagaacgccatcaaagaagggaaaaccagctgaggtgtccgtaaagattccagagaagcctgtgaacaaagtaagctgactctggatgtttctcctggcctcacctgcttccagcaatatgagtttgtgcgatttgtatgttccctccctggggattgagctttcagtgcatcatacctacttcgtagcattccatgggcgggacctttggtgtccttgtaaaataagaaccattaggatggtgagtgtttgccacgttagccaagctcagttggctaagacagttctccttttccagctgtgtcatcctctgggcatttaaaacagctcagcacatcatgtccacaccccaggctgctgcctccctgccctgcagttccctacgttgccttggcgcacactcaaacacagggaactctgtgatgtccagaacatccatcatttggctttagggcctgtgctctgaaacatgcaaaccccttgagacacagccaaagatgtcctcaagagttagtggcctcagcagggccagtcaagccagatatgttgaaacagctattgactttcatcaacccctcccttcggcctcaaacagccatttcaaactctgtaggaatccaggtttcctctcttccaggaggcaacagacagatttctaccagagggctaccctctccccttggatctggagcagcaggcagtagaatttatgtccaccagtgctgtggcttccaggtctcaaaggcagaaggtcagtgtaacattaagaacaattgggtttgccttgccttctactgcagaatcctggtccatggttttggggatggaaaaaactctattgcactattattatgttcaactgggtggtgaccgtgggctgaattgttcaggaaagagtccaggggaccttggataaaagtgagagtttatgcaaggtcccatgatctttggagagagctttgtggcaaaagc

SEQ ID NO: 48939 - DNA, 1049 bp, Homo sapiens
agtcccccttctcttcatccacaacaccgatagtgttccctgttttttctttttatctattcaggcatgtttgtggtggtagctcagtggttttaatgtactgcttcctgatgacaaattgagcaccttgttatatgtttattggccatttgaatgttgccttttgtgattctgaatctctttgtaatgcttaccagttatgcaagtaaaatgaaaagggtggttctgtcagatcttaacccaaatccaaggtgaagcctggtttcctgcataggcgagaaggccccagggcccagaatccctcctcaccccttctgcctccatccagggccccactctggggcaggcagtgctggctgcattcagctcagtggggggcagtttgactatgtcgcatccagcttcccatgccgtccatccctaggagtctgtctcaccatacaagggcgcagacaggccagcttgagggtgttcatcaacgcagcattgtttgaagagcagaagttagaatctattcattcgggggcctgactgcataaatacactgtggttgccgtccagcagagcatcatgcagccattaactgcactcacatgggaaaatgcccacaatggcttgttgtttaaaaaaaaaaaaagtgaaaaaatatttctgctgtgtgtggaattatgagaaatgtttaccgtctacgttatatatttttacagtgcttggatttttataatgagattgtttgaaaattttttaaaagataggcttaatattcccattagcagtgtcatagttatccagtagacttcctgaacaattgggtagtaggaatggattttcataacaaaagagtctttggaattgcaaaacttcaaatattgttttccctctgttttaacaggaatagttgtatattaagtaagacagaggatctttccatgttaaagttgttagaaaaatataactccaggccgggtgcagtgcctcatgcctgtaatcccagcactttgcgaggccgaggcgggcggatcacggagtcaggagatcgagaccatcct

SEQ ID NO: 48940 - DNA, 1664 bp, Homo sapiens
cctcgcccagcccctggctcttgccctccctgagtcaggtcacctgttcagctgaccctgctgggctggggccttccagatgtgctcatccctctgctgggagcattttcccctcggtccgtgcctcatccccacgagaaatacagcgcaaatccagccaagtgcagcaaatctagccaagtgcagcaaatctcaccagcttctttttaagccagtttcctcttggtggcaagcacagttgctaccaccccccaccaccctctgtggaaagggctatgacgctcgccttctctctgctccctccctcccagctgctcctccagaaccccccagtgtccctgcacatcccaggagtctgcttctggggaaccggaccaaggtttaagcattcaccttggggaggccacccccacccctctctccagacttggttaggggtctttggcctcacttgtgtagcacttgtcccctgacctcggtagcgatgcttcaggtctgccctccccgcgcctccacagggtttcttgttctctgaggagtaggggacaggacagaggcttttcctcagcaggcagccagctcagattggactttccttctagggatccctcttcaggttgggttggtgggaaggccgtctgaactggagcaggtgggctgtgtcagggaggcggtcaccggactggactctagccagcggttcccacctccacgcgcccaccgcccaagcagccagagctccagccctagccgcccaaaacaatgcagggcaacggttttctcctgagccaagtgtggagacctagatttccttgcacctgagggagagggaccacagtggtggcttctcacgccttggggaaccggaccagggcctgttcataacacagagatctgagctccttctcaagtcaggctgactgctttgggtaagagggcagaattttaaagcaaaaccgtgctctgcagggcgcctatttcagcattttcagactggtcttaacgtagttggttcattgccctcagaaatgaatgttgaaagcggtaagccccatttgaagcacccccgattttaacaagcttcaggacacatagttctgtgctaatatttttgttttgatgaaaaatttaaaaacactgctctcaacccccaccacaaagaacacgaaaatattattataaagaaactagatatatcccaatccctgctctgcagtggtggttcaatttgtaaagcaaaagttagaaccaaaaatgctttcaaaggtggcttcgaacaatgttcataactctctgctcgcatcattctgctttttacagagtttagagacccatttatagattcagtccacggattgtcatgcatttgcaaaaacgtctactagctctccgagttccatatttttattatcaagggacccttagatctgaggacatggggactggcagacaccagctgcagaacggaaccgtcttttaggaaacagaggccacgatgagtacatgatgggccccatctacctagtggaaaatgaagcggcatgtttttcttcacggtcactggtggctcttggcaatttctgactcagcaccattggactttctcctggcccctcctttcctctctgttgggtggggcggccgggggggtgcttttgtagccc

SEQ ID NO: 48941 - DNA, 1079 bp, Homo sapiens
aagaggcttagagaaattatgttttgcctaattgacaaaaccaattagtggctgaaacaacacagaaggccaggtttgtcctctcacttcctaacttgaggacagagaaatatattctgatgtccctaactggcagtctgctatgatagtgaccacatgcccatttctttcttgggatttcgtcccagcctgacaaccttggaacagaacaagaggacaggaggtgtcgttccaggtatgtgttagctgcaccagccactctttgtggcatctgctacccatcaaaggacgtggttgggctgggagccaagttaagttttctcattgtttggcagttgtgtccccagattttcttgcccatcttggagatcttagcacagccggggtgcttggggctcagctgccttgaaggggactcagtcccccacacaggtgattcccatgtcccatggtgggcactgagattggggtgaggggagcacacttgagggacccttcacttcctcacagcccttgcccctttcctcagggtgcgctgggaagaacccccagcggctgcccatgcccacctcagaagctgttcagtttgggcagaaggaggttattgtggccaccttctgtccacggttttcttttacatcctttccattgcactgttggtgcccacctccccattctaaaagacatggccactggctccacttaaggaaggcactttattgtcatgattaagactgtgaggccagcctataatcccagcactttgagaggccaaggtggaaggatcacttgagcccaggagttcaaggctgtagtgagctacgaccatgccactacactccagcctgggccacagggcgagattaaaaaaaaaaaaaagactgagtttttgtcaaactgagcagttcgagttcaggctgtttcccaatcatgctgtgactttgcacctagttcttttctctgagctttagtttcttcatctgcaaaatggcaattaatgtctgcctgtcagggctggcgtatagtaagtgctcagtaaattacaggctatcttttgaggagcaagaagtagactagct

SEQ ID NO: 48942 - DNA, 1058 bp, Homo sapiens
tcccacagtcatttgctttgggcttgactcaatctcattcaagtgctgagtttcatagaaaggagacatgaggctttatttaagcgtacccaattaccatcacaactttttgtcttctgccttccagagagcaatgattattaaatacttgagtttcttcacatgaaagagacagagtgagcccagaagtgttgttaacattgttaatgtaatgcttactgttaggcagcgtgactaatgacccagcaatccctcttcgctgcttctgtagagagctaaccatttccctaactgcatatggatgacaagagcatcaattcaattgttaggaaaatagatacattaaacagtttgctgggagggtagtttgaatcaactagtgtagaacgtcagggcgttggagtgaatagaacggacaaggccattggttcatcagtgaggttagaggccatattgggatgtagtcataaactggttcagggtaggagagaaaggtaaacaaaagattatttaacatgactttggaatcacagacatcttgagctagaagagaagagtaaaaatctcaaattattccctaattttgccaatgaagaaattgaggcttctagaagtgaagtaacttgtctgaagccctgcagctagagtgtggctttgtgtctcctaagttaggatagcaatataacagtgatataataacgcatgtaataatataaaaccatacaacatactgtatatgttatgattttatatttacatgttacagaatattcaatacattgtatatgcaatccattatgtattgtatcatatataacatatgatgcaataatatatgtaacaatgatacaataataacatattgggatacagtattacaataatgccagtggcttcctatttgccaggcatggcactgaaaggtctgtgtatattaggagcttccatttgggagcagttgacatgtaactaaagtgtcctggaaatcggttttttcttaagtgaaagatcagatgttggaaagggaaaccctaagtgtgacagaatttttctcatga

SEQ ID NO: 48943 - DNA, 1035 bp, Homo sapiens
tttaatagtgtctcagtgcaggacagtctgttgacgcactcagcggccttttatcacagttattgacccaggagaccggccggctggcaggcatgccagagatgacatatgcgagacttcaccaggtctttgcctcctcttgccagaagaagttgcggtagcatttgatcagtagcaagacagttttttcacaactgcatatatgggtgtgtttatgaaaagaaaacaaataactggaagaaaatgcatggaaatattaagagcagttgctgtttgtcaaatcatagatcattttctcttaaaaagaaagtaggtgggatgctaatttactgtcaggttccagcccttctgactttctgtgagtcattcttttgtctaacatgttactttggaaagggtactccttagcaatccttgattggatccaagtttgaacaaaacggctattaaagacattgggggacagttcgggaaatttgaatatgaactccatggtggattataatgaggaactgttgctcatgtgattatgtgtgaaacggtgctgagtcatgtaggagtgtgtgcttttttgaatagtcatgctgaagtatttaagggtgaagagttatgctatctataatttactctctaaaatcataatcactctgtgattttccctgtatacacgttaataaatttgtatgccttttctccaattaaaaacaatactgtaatcccagcactttggaaggccgaggcaggcagatcacatgaggccaggagttcaagaccagcctggccaacatgataaaaccccatctctactaaaaatacaaaaattagccaggcgtgctggtgcacatctgtaatcccagctactcgggaggctgaggcacaagaactgcttgagcccaggaggcggaggttgtagtgagctgaggtcatgccactgcactccagcctgggcaacagagagagcctctgtttcaaaaaagaaaaaatcaaaataaaaaaacaggttcagcaaaatatactgtataaataaatggggac

SEQ ID NO: 48944 - DNA, 1049 bp, Homo sapiens
agctgtgctatgtgtatttaatcctctcaaaagcactggaaggaggtgacagtggcctcattttacagatgagaaaactgaggcccaaggctgggcacggtggctcacgcctgtaatcccagcactttgggaggccaaggtgggcggatcacctgaggtcaggagtttgagaccagcctggccaacatgatgaaaccctgtctctactaaaaatacaaaaattagctgggtgtggtggcccatgcctgtagtcccagctaatcgggaggctcaggcaggagaatcgcttgaacccagaagggggaggttgcagtgagctgagatcgtgccactgtacttcagcctgggtgacagagtgagactcttgtctcaaaaaaaaaaaaaaaagaaagaaagaaaagaagaaaatatagctgtgtgggcaatagtcagatgaactattcccctaactttgccccaattcggtgtatgactatgtacaaatcttaactctttcagatctcaaagaaaagctctgtgtcttagtttcctcctctgtagaatgagaacagtaacagtatccttctcttatcgtgaggatctaatgcaaccacgagagtaaaatacacagaaaggagcctggtactgcatgggctaagtgcctaatgaacatcagcttactactatctctccgggtgacagagtgagactgtctcaaaaaaaaaaaaaaaaaaaaaaaaagccctgaagggtttatgtgacttgtccagctgggttgaagagctaggttgaagccgctgcccagtattgaaacaaacccttataaaatagagaagtagcttaataatagccccaaaaagacatcacagactgaagacttttctagtagtataagtacacgtgaacaagaaaatggtgacacttctgcttccagttcatgcttcttgtcagcagtattgcgagggaaaaacaacagtgatctaatgagccctgacaagagatggccagaagctgagcagttgggaagaaaactctttggtgaatctcactctgaatgtatattgtgcctt

SEQ ID NO: 48945 - DNA, 1023 bp, Homo sapiens
cctctatgactcacatgcagtgattgccaggatatattgttaatagaaaaaaagcaaaatgcaagagtatccttaatacgcttactttttctggaaaaagggagatataaaatacccttatctgctcatttctactggggaaacaacacaggaaagagaaacctgaagcagagaaattggttatgggtgggtagatgggaaaggcatgtcacaggtgaggagcggggaatagaggaaagcaggtgtgtgttggggaggcctgactctgagcataccttcttatgtagttctgactgttagaacatgtgaatgtttcacatacttgaaaaagtaaataaactggacaagattttaaaaaagaagaatgcaaaacaagtaaattgaaatgtatttcaattgaataatgtgaccatgccttaggggataggagagggatagagaactaacactagtaacctttgaacttgacattttgaccctaaacccttaagctagggattataataactgtgaactaatattaaacttcagttggttggctggtttttcacagtggtttggattagtgattctgaaactatgtgtattctaggtttgagcaaatacggaaataaattgtggataatgggagccaagtttcatccctttggagagagaagttataaagatggaaagtagaatgccaaaagtcaaccctcagtgtgttggactgcgattggaagtatcagtatcaatggattgtttttaatgtatggatgtagaaatagatatagatgtgtctgtacacaggagtgcacgtttcccaattctgtctgctgagaaggtctagaagcagtgagaccccagcaacagtgagcacaactatcatccacatattagtttctaaatatcattctcactaataggaactccttggagaagtggctgattccagaacaggagcaggaaaagatgagcctagagcatcttgctgtgccggaaagtaaggaagtgcccaaagaatgatagggacacatcaaagga

SEQ ID NO: 48946 - DNA, 1094 bp, Homo sapiens
tatttgtttaaattcattggcaaggcctatttgtaatgggagattggattagtaataacatttgctcttcacatttggttacaggacctgcactcagggtcctgggaataatcctatcactcatctcagtaataagataacctactaataatacacccactgcccagtgactgtttttattgttattttcttggcctttgattttaagagcataacttatcagctgattaggataatggagaggataattgaatctccagcattgcagcattttgctggggtatgctttgatgcctggattgagtaagagaccagagtctgggttcattctgggctttcttgatttagccaggtgaccttgggctcacctgactttagttcaccgccattttttcccttataattaccaggagttggattaagcaagtcccgaggtgtctttgaactcctctgtatgatacagctctggtccacacacaaccttctctttcctggagatgacacttgttgcctctgtcagtccttctctctgtgcccttacagcccttcgtggaaaactgcctacctcacaccccatggcctttgatcacagaccctgctaaatggaggacaggaaagggaatgagtatgtcctagagaatcaaacaaagctgacagagaaggacagagagatgctgcttagatttctgacagtccctcagtttgtagttcctctcccttggagagctggcagaattcctgatgtttgaatctgtgaggacatttgggtgtcctgccagtgaaaccccacatccttttttactcaacttagttttagtgggttcctgttctttgcagccagttgatcctgatgacatcttctgtatcctcataatgcattgtgtttctccatcgttcctttctcatcagttattacatatttgcgttactctgcttctctaagccgttaactctttgagggcagggattgtgtcttcttcatctttgctcccccagcgctaatggcagtataggaatgtggtcaatggtggtcaaaagaatgaatgactggaccactgctgcttaaaacaaaattaaaacaaggaaactaaccc

SEQ ID NO: 48947 - DNA, 1033 bp, Homo sapiens
agggacacaccacatcgcatgagacttctgacccttctcatctccacatctacagatactctggaggctttatgttagatggcagagttaccccagattctgaaatcttcctgttcatacacttagtaaaagaaacaaaaaagaagttaaaactagtaaaagatgcaccagcattagtcagtcacaggaagggacttaacctctttgagaacgtgcagcaagggaagttatcacagaagattacagttccacagctgtcatttaataccaggaggcagtggagcagtgcaaaatttgggggaaagtttgacccaataattttatactgaaccaagttatgtagaaagatagtagtattctaaaaaaaaaaaaaaaaaaaaaaaaaaaaaaatccatgaactcaaggaaaggcccatgagtctttctttaaaaaactactcagtgacaaaatgcagtgagtcaagggatcaacgaagtcagttcattcattcagcaaatatttattgactgcctgttacgtgccaaaccctgtttgagacactggggatgtaacgattcattagcttacattctgatgagaaatggtgaagtgagtggtctgtttaaataaacagccaaggccaagtaattgtcaggaataatatttcagaaggtaaatacagtcatgcatcattaggctcttccatcattgtgcaaacatatatttacaaaaacctaaatggtagaacccacggcacacctaggctataaggtgtagcctgttactcctaggctacaaacctctacagcatggtaccatagtgagtactaaaggcagtgtaagacaatggtaagtatttatgtatctaaacatacctaagcatagtaaatgtatagtaaaaatactgtatgaaaggtaaaaaaaaatggagctgtgtgcagtggctcatgcctgtaatcccagtacttgggaggctgaggtgggaagattacctgaggccaggaattcaaaaccagcctgggcgacatagcaagaccctgcctctataacaaa

SEQ ID NO: 48948 - DNA, 1056 bp, Homo sapiens
taagggttcctcctcattgctctctgtctatacctgtgctgccctccttcccaagtttaacaccattctgacttctttaaacagttaatattgcctgtctttgaacttcatttaaacggaatcatgcagtgtcatttttttgtatgagcttcttttcactcaacatcatatgtgttagattcatcctgttgtcctttttctgttgcagtgtagtcttcctttgaatatgccacatttgattcatccacttggttcgttcaacctgttgggttcttttgtattagaagccctagtaggtgagtgcaaaggctcactcagtgatgtggaatgagaaatgtgggcacatcagtccatttcctgtcagtgtgcacactcctctgggagggccagatgcccgagaagcgttccttcgcctgtcctgctcaccccttgtaccttcttctgattacatcctcagttacaaacagcattcttttctagtccaagggagtgttggcatatatgagttgattgtttacctttgctcaaggtctcatttgctgtttggttagcaaatatttattgtacctactctgtgtcaggcatgtttctaggccccaaggatataaacatgggcaggacagacattgtcccatctttgttaagcttttcatttcgggggtgggaggagaccaaacaagcacccctcaacaaattaataaattaacgccataatttgtagttatgcttagtgctaggaagggactacagagtggggtaaggtatgggagtgggggatactgttaaatagggtgatcaaagagggcttctctgaggagccaatatgaggcagagacttgacgaatgaggaggagaaagaccagtgaagagccggggggatcccaaggggtgactgctctggggatcctttctctagctggtggacgttcttatgccaccacttccatgattttcaggctttcttcacagttcacacttgcttccaggataggaggaatgtaaccagccagcctcgacaagtagcttgtgtctgttgcttgcatgcacaggggccat

SEQ ID NO: 48949 - DNA, 1035 bp, Homo sapiens
tgcttactgggaagtagcctttgtttatttcagtgatatttctcgagtgcttagaaggatgcctggcggccgggcgcggtggctcacgcctgtaatcccagcactttgggaggccgaggcgggcggatcacgaggtcaggagatcgagaccatcccggctaaaacggtgaaaccccgtctctactaaaaatacaaaaaaattagccgggcgtagtggcgggcgcctgtagtcccagctacttgggaggctgaggcaggagaatggcgtgaacccgggaggcggagcttgcagtgagccgagatcccgccactgcactccagcctgggcgacagagcgagactccgtctcaaaaaaaaaaaaaaaaaaaaagaaggatgcctggcacattttagcgattggcccataaatatttgctgaatgaatgaatgaatgaatgagagtgtagccttggtgaagctgctttctctttggggccttaaaaaaaaaaagtagaatagcagcttgtactgctgtagatgacatacaccctcccaattgtaacttctgttgattccttgcatattggttgcgtcaatgcatcacaaatccaccctcacgcaccctaggatgtgagattcgtggggcaggcagaattcagctggtgttggggaggcagatgacatatcctgcattgctagatctagagatctaggtgcagctcctgtctggggtcgggacatgttgtgtgtcagccaaagctcatgtgtcagaaacacagcacttttcccagtctacagctgcccggtgaaagcctgactgttttgcccactttcatttggtgatgtttccagagcctctttgcaatgccattgtcatttcccatcaccagcagggtagctccggttttctgtcattgccaccgaagccagcccaagcccattgttgctgtggatttgtttgcatattgcacagccatctgttctctttaccatccaagctttagattttgaaatatgaattaccaaccgctccaaggatttcaatggcttactgtt

SEQ ID NO: 48950 - DNA, 1028 bp, Homo sapiens
gtgggcggcctggctgccggtagagcacccacccagggaagaggtgaagtcggcctcgtcttcaccttctgttcgtgttgccccttaggacagagcatctcatggttactctctccatctctgtctccttctccctctccctctgggagtttctgatgcaagatcactgaaaaagcgctgggagtgagaagtaagaagcgtaagagaaagaaagtttatcatgcatttataaatgagcaaacactgtgcaaggtgcttgacacaattgctgaacctagaagcaactccatgacgtatgcattattgttcctcctttaatgaggagaaaacagtctagagagttaggtggcccatgtcaggtccctcagccaccaggcagtggagccaggcttgtgtctgcccccaaacttcagagtacttctcccttccctcctcccctccctatttctttcccatctaccctttgtccctctgtgactttttttctcttttcctttgttatctcatgagggactttaaaaaacatctcaaattatcaaagtaacacatttattatataaattttggagaatatagcaaagatcagcaagaagacatccctgccagttgacacagttgactacggtgtatgagtctcatttcccttcacggtttgtcagcactgggtatggagatgagaagacagtctttgccagttgccctgaaggaaggtgggacctgcatgtcatcttttgcacattgtaagttcatgccattgccctttctgcattgcttggtgtggcatttttttcttattgatatccacgctccttccacctctactatactgtagagctttggttcttttgccctaagaacctttttcctggatcataaattccattaccattaggaattccttattaaatcagttaatgtgagttttaattgaaaattatttttttcagtttactcttttctgaagcatatattttcattttatctctgtaatagtggaattagaagggttttttcttttttaaattaca

SEQ ID NO: 48951 - DNA, 1080 bp, Homo sapiens
ctcctgaactgttcttattagaatccagttgcttaatgactaagttactgcaaagttcacctctcacatctatctctgaaggtgctcttttctgtttttgcatcatggaactaacagggttggaatcgttttacattgcaacgcagagcctttcctttagggactctgtcctctattaagggtaaactataaggctcaggggagaggcaccatgtccatcttgttccttgctgggagtccccagcaactagcaaggcgcctggtacactgtaatcattcagtgaagattcactgagagaatgaaagaataaatgaatcgaagcgttttctgttgaatttttaatttacaacccctttcgtggtttgcttgcttgtatttttgatgaagtacagtgagggcatttccattttcagccattactgagaaagccagttgtggtgcttggatgggaggcaatttggagaccttatgatggaggccagggctgggggtcatttggaaggccaaggtgaggtcattgggtgaaccaatgataagctctttgaaggctgattgtagcagttttatccacatcatctgtcacctggtgtgcccttctaatgggacttggtggaagttttttggagttgcctgagtcaggctaatttgagctgctgcacctgatgtcaggtgttctgtggcggctgtcattttggcagcagtgtgaaaactgtctgggaagaggagagtcaattccaccagcctcttagggttatcctactttgtgagttacgtataaccgatttctacttgtgttttccttcccaccaggcccacccctgactcattcttctctccatatagctgctacatgttcagggaatacagattccttcagaatataataggagagaaaatcacttaaatgcccctcacaatttaatcatcatgactttaggattgagcacccttctgaattgtccttttattggcaaaggtgttctttcacctaaatctaaccttcgtagcaccccatcactcaaaatgaacttgctagcgtagtgagtttggctgtagtatagactgccctggttagcctt

SEQ ID NO: 48952 - DNA, 1046 bp, Homo sapiens
cttttgaaacttcactcgttccagttggtacaagtatttgccaaagccatttcctatgttcaccgtggcccctcctgatgtggctgtcagcgcagcgttgttgaacagggctattctttttacaaggtgtgaagtgtggctcttcgcttcgtctttgccatggcattaaaagaaagttccctgtcttctttcaatattagttatttcaaatgaatatgtgctacttaaaagcttgttttgtttctttgtatataatttgccttggatttattgtgcacagtttgttgagttgtatgtttttgtgaattatcaggagtaaatttgacaagtacatgtgaataacctcctgtaaatgaattttataacaaaaatgtactgaactattttttaaagttgtgcagattagcaattttttgctatagctttgacttttctatgctgtgaattaatagctgcgatttggcaaacagccctgttgtctttgttaaaccctaaattttaagaggaaatggcagaattaaaagcagaaacaagaagatggacatggattagaggttatgtattatgaagtaaactacaaggtactaacatcatttcgtctgccatttggtttgctttatgctgaaattacttggtggggatttgtgcaattcagatataaaaagtttcattatccagcccggccctccttcctagctccttttggaatcttctctgtacagtaatgaggtgcattgaggccagctgtgctgtttagttacagactgaagtttggtccaacagaaatatgtgctgatcattaggctggaattggggtggaggtgagataggaggaacagatgaacagtgacccgtgaaaggagctgccagaagcactggtggagggacagggtagaattgcccttgccaggggtaattgctgatggttatggaagtggaacacactttataaaacaataaacttcaggaaatgtagtcagcttccccacacttgtgcctgttaaaaggcacttgacctccgcctctgtgtctccttctgtacccag

SEQ ID NO: 48953 - DNA, 1417 bp, Homo sapiens
attggagtattttggatttttggattagggatggtcaacacataagtcgagtctgtttccttcactggaaattaagtcctgtgagacttcatcttattcactctagtggtcttagcacttcaaattatagatgcttagtacatattagatggatgaatgaagaattttgtcttcaaaaggcttgtttacagtggcattcaatatgtctgtctgtgagggtgtacccccagaaataattgttaaaatctgtgttacatttcctttattactggtttttttgggtggcgtcttgtagcatcaaaatagcatcagttgtctttcacaagatcatatctctttcattagcagtatatgagtagaaaagacctccacatatattcaagattcatggcattttggccaggtgtggtggctcattcctgttatcccagctactcaggaggccagagacatgagaatcgcttgaacctgggaggtgaaggatgcagtgagctgagatcacgccactgcactccagcctgggtgacagagcgagactgtgtctccaaaaaaaaaaaaaaaaaaaaaaaaaaaaaaaaaagattcatggcattttgaggctcagagtcagaaacaccttttttctctgaagctgtggttggtaatcttatgctacctgaacgttgccatatacgtattagatctcagtaattgtgtttataatagtgggaaagatataaatgaattcttggaaactgttgctttattttgcccctcacagaaagcacaggagtatggctacgaccagtcaatgatggctcgcttctgcagactgctggaagagaatgtagaacacaacatgatcagcaggctgcccattctacagctcactgttcagtacaggatgcatccagacatatgcctcttcccttctaattatgtttataacagaaacttaaaaacaaataggtgagttccccttattgtttgtgaccttattttgttgtagtttagctacttatgaagaatagacattttactgtcgtcttaggtcttgtcataaaaagcataaatcatgaagggttaataattttgtcctgttataatagccatcatgttgaatacagcaaagcacataaaaaagaaaaggggaaaaagtcacctatatttatactacccagaaataatcactggtaacattttggtatatccactttcagcagtcctttttttttttttttttttttttgaagacagggtctcattctgtcactcacacaggatgagtgcagtggcacacagtcctggctcactgcagcttcgacctcccaggctcaatcaatccacctgcctcagcctcctgagtagctgggactacactcagtcaccaccatgcctggctaatttttgtatttttctttttgtagaaacggggttt

SEQ ID NO: 48954 - DNA, 1034 bp, Homo sapiens
tccaagctatgatctccacactatttattgaaataaatagtgaaatggtgaaaggagagccgtgtgtcatacacctaatgtataggaatggcggtttaggtaaattttctttgtgctgaagcagtataaacttaactactgatttattttttaacttatcagagagcagctgtggggagtgggcctaactaggagctggcatatctggccacattccagtgcttcaaaggagtatctttctccttgagcacagtgtttatagataggagagcaggtcacattctggtcatgggaacatgatggcaattagaaggctttactcctcagaggcctcttgtggctttctacaacttactgttccatatttttatggctggtttatgcaggcaccccacaagccctttccccaacatgagagaactgcttcgtttattttatctcatcatttttcttgaaactattttgctatggaatgtcctactgaacatagtttgaaaatgttactgtaatagaatctcaactctgtagtgtactgtttagatggccttgctaacctttattaggtagaaatgataactacttgccttataggattgttaggaacaatatctgaaataatgtataagaagtttgtggtgtagtccctggtgtctggttaattggaagttcatgtttgctcccttctctgattattaacatatttacttagaaatatagatactatgtatagagacaggattgatcagcagtgtccttattagtccttaactgtgattcttatcaacaggaaactgtggagatataaatttagtacgactgggtccagaaaagtctattaatagtgaggttctaaagttcagtttggacagccaagtaaaccacagaatgagtaagtactgaatgtggtatatactagtgttttctctgttttgtttggtggaaaatgacttgggcactaaaggtaatttgaagcctccagaattagtctggctttgggaactaattttccttctcattgtgttgtatatgtgtgt

SEQ ID NO: 48955 - DNA, 1040 bp, Homo sapiens
aagggtggcagagggagggaaggttatgggaaataaaaagaggaaaaaaccactatcttatgtgaaacaaatcgtaaggactagaatgatggtcttcaggcttcacggtaggtcacgtagaatgctgtgaatgctgggctgcattttggttggattgtggttttttgttttttttttttgagacagtgtctcgctgtcatccaggttagggtacagtggcacgatcttgactcacagcaacctctgcctcccaggtcaagtgattctcctgcctcagcctcccgagtacctccctagtggctgggattacaggcgtacaccaccacccacagctaatttttgtatttttagtagagatggggtttcgccatgttggccaggctggtctcgagctcctgacctcaagtgatccgcccgcctcggcctcccgaagtgctgggattacaggcgtgagccactgtgcctggcttggattgagtattcattaaagtaagtggatgataaagtaaggctcagagcagttatgacaaatttttttgctggagtaattttaaatatcagtgttagatgtagatgcttttatttatttttaactttattacgagaactttcaaaaatacatggaagtaaagacaaactttaaagctatgtaatagagctcacccatattttttgtgtgtttgtttggtatgtatatgtggcaaattgtagaaccagaggaaggggcattcagacgaaaactccaatgccaaaatcaaacaaaaccgtgtcctcgtgtgtgcaccttccaatgcagctgttgatgaactcatgaaaaaaattatccttgaattcaaagaaaaatgtaaagacaagaagaatcctttaggtatgatacttttgtggattttaaatttgtttttgttttcagtgttaagtgtaggcaactttgaatgacaaaggaaagagcaggccagtcctggtaatagcttctacttgaatctgtggcttgtgagttcatttagcaagtatttcattgaacatttaccctgtgccagggc

SEQ ID NO: 48956 - DNA, 1056 bp, Homo sapiens
cacaattacaagttcagtgacacccttttctgcaagtgtagtgaagtccagagtttgttccacttttgagggtcttgcaggaccctaaattttctccccttttggttctacctacagtatgcagttataaaagggtacttctcccttcttctcttgtccctcagaagctttgagtttcaagtactgccagttcaaaccccatggaccattaataccctgtgctgtatgctgtattctgatttttgtcagggtgctgcattagtgttttcacacttgagctcgtcttacccttctcctggtagatttggagctggctgaggctcctgagctctctttttttgagacggagtcttgctctgttgccccagcctggagtgcagtggctgcaacctccgcctcccgggttcaagcaattctcctgcctcagcctcccaagtagctgggtttacaggcgccccaccatgcctgactaatttttgtatttttagtagaaacagggtttcaccatgttgggcaggctggtctcgaacttctgatctcaggtgaaccacccgcctcggcctcccaaagtgctgggattacagacgtgagctactgcgcccatgtggtgtttttaattttggtgattcagacgggtgtgtagtagtatgtcattgtggttttaatttacttttctagaatggctaacaatgttgagcatcttttcacagacttactggcaatgtacatatccccttcatgtatcttccatttttagttggattgtttgtcctcttatttttccttatttttcagttctttatatattctggagacaagttatttattatatttatatattgaaaatatttactcctaatctgtggaatgccttttaattttcctaacagtatcttttgaagagcaaaagttttgattttgatggcatcccatcaaaatgctttttgtatcctaagaagcatttacctaacccacggtcacagttttctcctatttttttttttctaaattttatggtttaatttttgtgtttatgttgatgaccatttcaatttt

SEQ ID NO: 48957 - DNA, 1050 bp, Homo sapiens
agtgaaacagctgttgttttaataatgtaatattttggccaggcacagtggctcacgcctgtaatcccaacacttgggaaggccacagtaggcggatcatcacttgaggtcaggagtttgagaccagcctggccaactttggtgaaaccctgtctctactaaaaatacaaaaattagccgggcgtggtggcacgtgcctgtaatcccagctactcaggaggctgaggcaggagaattgcttgaacccgggaggtggcggttgcagtgagctgagatcgtgccactgtactccagcctgggcaacagagcaagaccctgtctccaaaaaaaaaaaaaaaaaaaaaaacacaataaaataataataataataataattttttttaaagagaattttcttggggtcacacacacaaaaaagaaacctcattataaccaaacagtgtatttagtctatgtggaagtatttttatcaaaacataatattcaactatttgatctgaaaaatgttaaattactaaattattaggaacctccagttttgtagaataatctattcttagttactgggaaaaaagagaactcagacctcctttgaagatgaggcctaactggatatctgtcgttcatgtctggagtgggaagaaaaggaacatagtttgcttctttgaagtgatagtgctttatgagattgttacattattaccactgacctttaatacttggaaagctagccgggcttggtggctcacatctgtaatcccagcactttgggaggccgaggtgggtagatcacctcaggtcaggagtttgagaccagctggccagcatggtgaaacgctgtctctactaaaaatacaaaatgtgggccgggcacggtggctcatgcctgtaatcccagcactttgggaggctgaggcaggtggatcacctgaggtcaggagttcaagaccagcctgaccatggagaaactctgtctctactaaaaatacaaaattagccaggcgtggtggtgggcgcctgtaatcccagctacttgggaggctgaggcag

SEQ ID NO: 48958 - DNA, 1055 bp, Homo sapiens
ttttaaaggtgataaaggaagatgtttagtcttgttcaaaatggagagcgctatgttcatggatgtgatagcttcacattgtaaagatgtgacttctttctgaattcatttataaatttgatgtagttcaagttaaaatcccagcaggattgttttgaggtgattgataggcttattttataatttgtaaggaaaagcaaaatctattataataaagtcactttgaaaagaacagcataactagggcatggggggaatgatagttgctttatctgctacgaagctgtttcaaagccatagtaatagacacatacgagagtggcacggggcaggcggatacccggagaaacagtgggagaccctttggctcctaagaaggaactccttcttgcatatgtgtcaatcttagataaaacgagataaataggacatcacaaatcagtggggaaaggatggatcgttagaggaaactggcctgcttcattggggaaaaagcaaattaggctaagattcgtactttatagcacataaactttggttaaatcacatatgtttggaaagtaaaactaaacgaagaaaatatcaaaatgtcagtttaggtgatgaaggtaatcataaaaacataaaaagcattagccacattaatggattaatgaatattaatggattttattctgtcaaagttaatgtctttttagtgaaggactctatatttggagttaacagatgtgaagaagagagttttaaaacattcctaaactggcaagagattagtagctaaaacccacaaagcacttttgtaaatcgacagcaaaaaacagggaaatcagtagaagatggacaacaaatagtttgcagaaaacttggtggtaataagtatatgaagtgttactgaaaggaggaaaggaagttaaaataacaggtgagcaaaagtttgtgatcctttatgatctagcagtcttattcctgcgtagcctcgtcagaagaacatatacacgcctgtctatgagggttctatgtcttaggatgtcatttataggatatagagttggagc

SEQ ID NO: 48959 - DNA, 2411 bp, Homo sapiens
aacttgcttatgtgcagctgattagaagtctccttaaagaaggttatcagcttgggcagcagtctctttgcaagcgattctgggataagctcaacttattccttagaggaaatttatctctaggttggcagttgactagtcaggaaacccatgagctacaaagttgcttaaagcaaattattagaaacataaaattcaaagcacctccatgtaacacttttgtggatctgacttctgcatgtaaaatctctcctgcatcttataataaagaagaaagtgaacaaatggggaagacgtctagaaaagatatgcattgtttggaagcttccagcccaacattttctaaagaaccaatgaaagtgcaagacagtgtattgatcaaagcagataacactatagaaggtgacaataatgagcaaaattatataaaggatgtgaaactagaggaccatctcttagctgggtcatgcttaaagcagagtagtaaaaacatttttactgaaagagctgaagatcaaattaaaataagtacaaggaagcagaagtctgtaaaagagatctcttcatatacaccaaaggactgtacttcaagaaatggtccagaaaggggatgtgacagaggaataatagtatcaacacgtttgttgactgattctagcactgatgctttggaaaaagtgtccacatcgaatgaagatttctctttaaaggatgatgctcttgctaaaacctcaaaacgaaaaactaaggtacagaaagatgaaatctgtgcaaagttatcacatgtaataaagaagcaacacaggaagagtactttggtcgataatactatcaatttagatgaaaatttgactgtatctaacattgagagtttctattcaaggaaagatacaggagttcagaaaggagatggtttcatacacaatctttctttagaccctagtggtgttctggatgataagaatggagaacaaaaatctcaaaacaatgtattgccaaaagagaaacaattaaagaatgaagaattagttattttctctttccatgaaaacaattgtaaaatacaggaatttcatgttgatggtaaagaattgatcccttttacagaaatgaccaatgcttcagagaagaaatcatctccctttaaagatcttatgactgtacctgaatcaagagatgaggagatgagtaatagtaccagtgtgatttattctaacttgacaagagaacaggcccctgacatcagtcctaaatctgacaccttaacggattctcagatagacagagaccttcacaaattatctttactagctcaagccagtgttattacgttcccatccgattcacctcagaactcatcgcagctgcaaaggaaagtaaaagaagataaaagatgtttcacagctaaccaaaataatgttggagatacctcccgtggacaggttattattatttcagattctgatgatgatgatgatgaaagaatcctgagtcttgagaaactcactaaacaggacaaaatatgccttgagagggaacatccagagcagcacgtttcaacagttaatagtaaggaggaaaagaatccagtaaaggaagaaaagacagagactctttttcagtttgaggaatctgattctcagtgttttgagtttgaaagttcatctgaagtgttttcagtttggcaagatcatccagacgataataattcagttcaagatggtgagaaaaaatgtttggctcctatagccaatactacaaatggtcagggttgtacagattatgtatctgaagttgttaaaaaaggagcagagggcattgaagaacacacaagaccacggagtatttctgttgaagaattttgtgaaattgaagtaaaaaagcctaagagaaaacgatctgaaaaaccaatggctgaagatcctgtgaggccttcatcttctgtcagaaatgagggccagtctgatactaataagagagatcttgtgggaaatgattttaaaagtattgatagaaggacttcaactcccaattcacgtattcagagagccactacggtttcacaaaagaagtcttcaaagctttgtacttgtacagaacccatcaggaaagttccagtttctaagacccctaagaaaactcattcagatgccaaaaaaggacagaatagaagttcaaattacctaagttgtagaacaactcctgctatagtgccgccaaagaaatttcgtcagtgtcctgagccaacttcaacagctgagaaacttggcctgaaaaagggtcctcgtaaggcatatgagttgtcccagcggtctttggattatgtagctcaattacgtgatcatggcaaaactgttggagtagttgatacccgaaaaaagactaaattaatttctcctcagaacctgtct

SEQ ID NO: 48960 - DNA, 1029 bp, Homo sapiens
gtatgattataggaatatgaaaaataaaaatggaaataaacagtagatcaatatcttttaagttcttgactgaggattttgaattttcttggaagacattaagtatccattgaaggtctttgagtagggcggtatcttgctactgcatatttgatagagaagcaggaggttggatgaaaagtagagaacagcaaagccatgttgagatacagatggatgaagagtgtatctttgccttattccttagctaaagaatttagtcatttacactagatgcgtgacacaaaattcaggatgatgctgaaagagaatttcttgtattatgggcttcatgtagatctgtaaataccaagtttctttctctttcctttatttttttcctcttcttttctgttagttattggaggatgggactacaaagttttggcaggggttgaggagctgaattagaaaaggttgtttctggtatggcaaacagggtgtgaaaagattgtgcttacctagactgttttcttgcccattaagtaatttgtttgccactaaatttttttttttttttacagacgtatcatagtattgcttgcaaaaaatcttgaaaatgtggctgcttttgaaaccctctgtgtgtctgaggactggtggcggcactgctttaaattatttgctccttggcttttagttgggttgctactcaccagataaagaatatgcttaattctcaatatattgtagtatgtttttctaactgtttagtaattcaacgattgtgccattgtatttcagatgatagtgtggatcctttctggccagcgttacactgttttatggtgattctggatcgccttggatctaaggtctggggtcaacttatggatcctattgtggcatttcaaaccattatcaacaacgcaagctacaatagagagatccgacatatacggaacagctctgtaaggttagttcagctaatgtcaggatttaaacatcatctctataagaaagtgtgttccagctagattacttaacaag

SEQ ID NO: 48961 - DNA, 1032 bp, Homo sapiens
gtagctgggactacaggcgtgcaccaccacgcccagctaatttttttgtatttttagtagagacggggtttcaccacgttggtcaggctggtcttgaactcttgatctcaggtgatctgcctgccttggcctcccaaagtgctgggattacaggcatgagacttttaaatcagaaaggacctttataatttaattcaataccttcctttcatagaagaagggaagttaatctactttttcatgatgaaaaagttggtggtaggatgaacatcagaacctctgggagacccatttgtaatgacattgtggttaacattgtggggtaagccttctctgtcccatggcctccctttgcctgcctctttgtttctctgtggttctctaatacagtaactgccagccacatgtgattattaaaataaatttaagtcaattaaaattaaaaatgcagttatttggtcccactagtcatatttcaaggctcaatggccacacgtgcctgtactctatcctgtactgtattgaacaatgcagagacagaagatttccatcatcacagaacattctcttggatatgctgctccagatagtctagataatgaggcctaaaacttgtagtcatgtttattattagatcctgacctccttttgctgatgcttgtatcatgctaatcatgaaggatctgtaattaaataagtgcttctaatctttaggaagtaatgaattaataaagaccaagtataccagatcctatgagaaaacataatgagtataattttttcccctcattctcttcatgcaacttgaatgttgtatataaactcatttgtgggagattctaatataaatatattaatgttattcttttgttgatagggcgtgtgtgtgtgtgtgtgtgtgtgtgtgtgtgtgtgtgtgtgtatatatatttttttttttcttttttttttttttctttttgagaccaagtctttctctctcacccaggctggagtgcagtggtgcgatcttggctaactgcagcctctgcc

SEQ ID NO: 48962 - DNA, 1032 bp, Homo sapiens
gcagttcgtgcccgtcaggcggggacttttctcagaaccagtgttggtgacctcctgtctgtgtctcctctttcctaaaaggtttcctttcagaagacagtcctgaccgggttttctgtttagcacaggggctcacacactccggccacacagctagtgccttgcagccagttcttcaagtttccaagaactagaggaaaatcttaaattgtttttttttttaattttgtgaactctagctatctttttttcttttttggaaatctcttgatttttaaatattcatccaaattgttattgaggggaaaatgtaacattctgtggccagaccaaaagcacagccaaacagctgccagtgtgacgctccttacttagcgtgaccgtgaatgtctctagtgaagaagggtgaaccgttgatactttggggcatccgccacagataactggcttcagaaattctcaggtgccttcatcaagtactgtgttggtatcagtgtagctatttatattgttacactatgaactcttggccaagagacatgtacataacataaaagccatttggctggcttttcttcccccattaaatgtttgggaacctcacagtttgatgcgggagacgttctcagaaacaggatgaacaactgttttgaaataaataaataaaacattgctttaagaaaggacttattgaataatttcaggctttagttcttaaaaagaatccatgaccgtgttagtaatttcattttaatatgcacataattgtgtttgttttatgtctatataattgagatgcacattattttctgaaaagtacccgatttatcatttcatttttaatattgtgtttgaaagcaaatagactagctactataagaccatctttttatatctacagaaagaaatcgtggtgcttggagtaagtctgaaacccggaaactaatcaaggctgtcgaagaagtgattctgaagaagatgtctccccaggagttaaaagaggtggattccaaactccaagaaaatcctgaa

SEQ ID NO: 48963 - DNA, 1049 bp, Homo sapiens
atcacagactgagtcaactccaagatctcatcttgctttaatattctagtagcctaagtgagagccattttaagaaaagtttaaggccaggcgtggtggctcatgcctgtaatcccagcactttgggaggccaaggtgggtgagtcacttgaggccaggagttcgagaccagcctagccaacatggcgaaaccctgtctctactaaaaatacaaaagttagccgggcgtggtggcgcgtacctgtagtcccagctactctggaggctgaggcaggagaatcgcttgaaccgggaggcagaagttgcagtgagctgagatcgcaccattgcactccagcctggcgacagagcaagcctctgtctcacgaaaaaaaagaaggaaaaattttaaagttatgaggtcaagtgatgtgttaatgttagtcaacccaattttctaaccccttaggttagaacctgcaaatgaagaacacaatgtggaaacagctgaagattccgaaataagatacttatctgcagattcaggagatgccgatgattcagatgcggatttgggttctgccgtgaaacagcttcaggagttcattcctaacatcaaggacagggccaccagcacaatcaagcggatgtaccgggacgacttggaacggtttaaggaatttaaagcacaaggtgagcttgtggggccttagtgtttgttgaacttcctgtatgcagagctagcacctaactttcttttatggatgattcagatttatagatcgacaagaagcattctttctcctccttcacctctatctcctaccagaattgtccaagctgtaaaattagcaaaataaagtgcacttgcttttcctcttcttgcccagtttctggtaaaggtggccaggaagaatggggctaaagagaccagataattaattcccactaagaagagaagggacgagaggttaattggttgagacactggaaatgatacaacagttatataaaattaaaatgctgtcaaattaaaatcaactttaatgaggtatcgtttctttctccaa

SEQ ID NO: 48964 - DNA, 1063 bp, Homo sapiens
ccttcacatctgattacccttgacagctgattaagttcctcacctgcacccctgatatctgatgaccttggcctgcctttagcaaggatcttcctgccttgatgtctcctcttagtaattttccatccactgaccccgcccctcccttggctcctcagctaaacatccccacttctgttgtatctggaactgaactcagttctatactgaagcctctccccttttgcaatagtattgaataaaatgtctttaccacctttaatcagtgtctggctctggttccctttgacaacgatttccagccaaggagcacttaccctaggcattttgtatgctccaccccttcccaacaggaaaatggatactagtattattcccatcttacagatgagaagggtaaaatcccagagcagcacgggaagcaccgcaaggcagacccgctcagccacaagcctctgtagcagcgaatggccaactgctcccaggtgggacctaatctctaaacaggttgagagacggaatatccaaatggacaatggccaaaccacatataaaagtagaactatgggctgggtgcagtggctcacacctgtaatcccagcactttgggaggccgaggcaggtggatcacctgaggtcaggagtttgccaccagcctggccaacatggtgaagccctgtctctactaaaaatacaaacattagctgggtgtggtggcgtgtgcctgtaatcccaactagtagggaggctgagacaggagaattgcttgaacctgggagatgaatgttgcagtgagccaagatcacgtcactgcactccagcctgggcaacatagcaagactctgtctccaaaaaaaaaaaaaaaaaaagaactatgagccacaatctgcagcagctaggccaggaaaccagcccattttgtacagtaaccagcccaggaagccacctgctatgccagacttgtaggaagtcagactgtggtctctaccaacaggccaggaagccaaagaataaccttgaaacagccaacccagaatgtccaggacttggttaataactccca

SEQ ID NO: 48965 - DNA, 1060 bp, Homo sapiens
tgggaggggccgtagatctggcatctgtccttcctgggttcggatacacctttgtgggggtcggcccatcttcattttaactggacaagccttgtggagaggcagaggcggcagggtggacaggctagaagcccgcttggggggtgtagcagagagttaactttccagccagctatgatttgtaagagagcttaaaggtgggaaagaaaatccttttcttagattcagcagctttcactaatcagctgcatctctgggtgtcactgcttggctggctgctgagatatatttttttccctccatctcctgttctattagggagccaggggcccaggagacccgaagcagggttagtcttccacgaacagaggagtctgatcccagcgttcagagcacaaaagcttgtaaatcaaactgttagcttaatagcttgggccattattctaaagcagtggggctgaaaccaaaagccaaatgaaaatatagtcaatttgttcatactttagtgactgaacgactatgtaatgttggtgggtattggaagtgtacagagacaaggactgtggggggaggggcggatgttccgagggtgggggcgggaggggaatgtggagacccccccgccagccaacagatgcttgggcaagcccccttctaaaatggatgttgggtctctaattataacatagattttataataaagatccaggctccggaagtcagcaggcctcgctgctggggcacagccctgaccttcatgcctgagggaagctgaatatgcaaaaccggacttggccagcagcgtgcgagcgtttggtgagacatcaggaagaactgagctcaaagctggaggtcgaacactgggatgaacacctggggaagaactcaggatctccatcttttaaaaacatttaaaaaaatagccttactggttttggaaaagctgcatctactcattgaaaaaaatgcaaaccatatagaaaagagcatcagagaaaggaaaatcagcttcaccccccacccccccgccccaaagatcaccactgctaccatttgtggg

SEQ ID NO: 48966 - DNA, 1023 bp, Homo sapiens
tttggccttttgcttccaccatggtttttttctatgtgacaccatgcaattaccagctttctgcttcctcgtggaacaaacgcaccctcctccccaccctgctaatgaggcgattagaggatttcacagtgaccctgagcttcctccacacctgggtcacctgcagacagcgggaaccacagggcgtgctttcagtcatgcagtcagggctgacaacaaagaacaggaacccagccagcctctcccgggacgatgctggagacgggcacattcactgctggagctgcccaagcactggaattagtagatgtggctggcctagcacaaaccgctaggtccagatgcggccgtgtgcaacaggagagtaccagctcttcattagctcgtccttgctcagagctcttctagttcatatcatttgagagatcaagaaagaacatgacagtcccccaggtctccccttctgcacgcaggatagttttagtcatcccaaacccctcctgtattacagccgactacctcctctcctcttctaatctaactctactttcattaagttgctttctgcaacaggaaggtgtgtatcccggacccctccacactcttcttcatgatgtcagagcctttccatcttgttataacctgtacgaaatgacttcaagtctttttcagatatctccacgttggtcccaatgttatagctacggtccaaaatgcagagtaatttgttaactacttaatagtcaaaatgagggatacagttgagaaccagcatcccagagcgacagcatgtgacactttgtgcatgtcagttttaagtgctcgtggcggtggcagcagcatctcttttgagggcttacgtgtgttctctgctgagctgagtcctccatgcacattatctcactgaggcctcatccagtccctgtgaccaaggcaggatccgcagtggccagtgtagaactcggagcccggtcatgtgattctgagtcttagagatcctgaagcccaaactctcagccaagg

SEQ ID NO: 48967 - DNA, 1915 bp, Homo sapiens
gagtttgaatccttgcttcccagctgttagctctgcaatctcaggcagattatcttctccccagtctcagttttcccatctgtaaaacatacaattgctgtgagatttaaataaaacgaggtataaagtgccctgtagagttccagacctcatagattcttaggtctagaaactctgtctcatgatctcagccccagctcctaccttgatagacagtagtgaatgcttggatatttttaaggtttggtgattttttttttttttttttttaagaaaagctgagtaagtttgggctttcatgatataactggttaacttagaaagctaaattaaccatcctacgttgtaggtgtcatgttggtgaagacctggcttgctgagccaagtttaacttgaattcagaggaaaaagaaaaactaaactaaattgactgtgttactaattatcacatagatatacacaacccgagagagtattttatgtgtgattcatgtcagtagtaagaagaataaagtagatgctggatacaacttttaaatctgttatgcgtaagaaataacgtgtgtcttaattgctgtcctcaatttgagcagttctctagcatgtgaactaatgccaggcatgtaaatgtgggttcagtagctaggcctttcgttcagatagccagacacctcattacagtgcccctctccttcacccagcgtgattgaagcccatggtaaatgtccctttggcacatacatttttgggcttctgtgaacagaaagaaagcgagtgaagcatctgtaaaatgtatatttcatatttaggtatataaaacatatatagctatgtctgggtgtgtgaatgttcacctacctacaaagagaataaatttgatctttcaactttactgggaagcactcagaaggttctagggaccatgggggtaaaactcagcttggcaataaagtgattaaaacaaaacccttccattttgcttaaaaataccttggaagttggcaatatcaaggtgcaggctttcacaaaaacctcccacctttgctattactttttataataaaaatagtccagcctatttatcttagactcatctgttgcttcttgataggtgtgaaatcttcatcatcaaagtatacacacacccaaccatgtttttcctacaagcgtttttgtcctgtgaaatatacctgtaaacttatcccaacaaaggagccgttgctggcattgcgagatcttaaaataagttcagagccccctgctcatcctttctgatggcctgtgttttccaagatcagtaggatgttagagacaaaggtgcattgcgtgcggatggatggttggaaatgtgtttttctaaactacccatggtccactagttgaagttagcttcattaaccagtactgactctgtgtcttggagggtgggagagccagccctgccaggtatccatgtgccctcaggggtttgacccgctctcattataggagcattttacctgtcgggggctgagatggtgctgcataactctgcccccctctgtcttcagtttaaatttagactgtcctccccagaagacaactgaaaaatacctcattcattctcaagaggggcaattttaaaataaggtatttctggaagcaggggttagggaggagtaagattttttttttcctaagtattgtatatatttttttctgccattaactttttcttatattttactaaaactgaccttatcatttcaaacctgtgaacctagttctatcctgttttttttttccctacgtatttcgcttgtatacacactcacattatatatatgtaattttttttttttttggttgggaagaaaagatgcctcattttgaaacctaaaggggggaataagaaaagccctttgtaatatattgc

SEQ ID NO: 48968 - DNA, 1142 bp, Homo sapiens
gtgttgacctgtgaccagacagatcttcattggtcttggcacacttccgttcttttggaactatcataaattctagttaaggggcttttttggtttcttctttttttttttttttttttttttttttgagacggagtctcgctctgtcgcccatgctggagtgcaatggcgcgatcttggctcactgcaacccctgcctcccaggttcgagtgattcttctgcctcagcctcttgagcagctgggactacaggcacatgccaccacgcccagctaattttttcgtatttttagtagagacagggtttcaccatgttggtcaggctggtctcgaactcctgaccccatgattcacccgccttggtctcccaaagtgctgggattacaggtgtgagccaccgtagccggccttttggtttcttttttaatgttcccccagatacttcattatggctccagggcagctctgtgggatcagcagggagcagatgtggatctgttggaggaggcagtgtagcagagtggctaagagcatggccttagggtcatgttcctcatctgtcaccagtgtgtgaccttgggcagggactggacctctctaagccttagtttcttttcggagaggcagtgtagcagagtggctaagagcacgcctcagggtcacgttcctcatctgtcaccagcctgtgatcggacctttcttttttcttttttcttttttttttctttttttttttttttttgagatggagtctcgctctatcgccaggctggagtacagtggcacgatcttggctcactacaacctctgcctcccaggttcaagcagttctgcctcagcctcccaagtagctgggaatacaggcgcatgccaccatgcccacctaattttcgtatttttagtagagacggggtttcactatgttggccaggatggtctcaatctcttgactttgtgatccgcccgcctcagcctcccaaagtgctgggattacaggcatgagccactgcacccggcctggactggacctttctaagcctcagtttcttcgcacgtaaagttgagataaaatagtgttcttttaaggacgtcagaggattgtgtgggaaatagtcctggagtcccaagtataaaacatagga

SEQ ID NO: 48969 - DNA, 1024 bp, Homo sapiens
tggctcttgcctgtaatcccaacgctttgggaggctgggatggggggatcgcttgagcccaggagtttaagaccagcctgggcagaaagagtctagattagctgggtgtggcggaacttacctctggtcgtccagctactcaggaggtcgaggccagagcatcacttgaacccaggaggttgaggctgcagtgagcagtgattgtgccactgcactccagcctgggcagcagaatgagaccccatctttaaaaaaaaaaaaaaaaaaaaaaaacatcttaggtacagttggagaatttgaatatggactgtttattagaaaatgctattcagcattaaatttctgaggtgtgataatggtggtgtggttatgtagatcagtgtccttttacttaggaggtatgtgttaaagtatttagggttaaattgtcatgatgtttgcaacctactttcagatggttcagaaaaatgtgcttgcatatgtgtgtgtgtgcgtgggcatgcgtagatagaacacagatgggccaaagactggtggtggcagaatctaggtaaaggagttacatctgtatctccttcatctagattgtactagtcttttaacttttctgtaggtttaaatttttctaaataaaaattgtaggggaaatgataagaattcattgttaaagccaaacacaaagagaaaagtaaaaatccccctagatccctctgtccagagataaccacagttggtggttttgtgagcctctatcatggtattggttctccatctgcctatttaatgtgttttgggtgtcgttactcctcctttatttaacttttttgttgaagaaaccagatcatttgtcttttagaataccctacattcaggatttggctaattgtgtcctcacggtgttcaacatgttcctctttcccatacttcctgtaaactagtagttggatctagagacttgattagatttaggttctaggtttcaggttttattttgtttggcgagaatatgtcataagtgatactc

SEQ ID NO: 48970 - DNA, 1048 bp, Homo sapiens
attatgttgacgagttgataagaagtaccaccgaatggccggaaaatggagtttctaagccacctgattttaaggctgacattaggttttctgttggtctccggtggctgtccttgattgtccctggatggagtgcagtcacctttttcccagaaaggaaagatacctgcagcccgccctgggcgccaactgtcccttggcatcctccttggctgtccggcgcgtgcatttctttttcagaagatgcacctaaatcacctgtgctgctttcctccaccttctccgtatttttttccgcttgaagcatactgttctgtctgtgcagttcttaatttcctctcctcctggggaatttccaccgtgccaggaggctaggagacaaaggagatacggctgtgaagagtcacaatgtcagttctgtgtcccaaataaatgtagactttcgtgcttttctctggggtatgctttttaggtaaagtgtatctttttcgttttattttgtttcgttaatggaaagatcatttggagattgtttgctgtttactcagttacgctaactcatgttgccagttttttggcggctccagccaagatctctcgcctctgacagcttctgcactctctccttcctcctctgattacgcagcccaatctgtcacccggacaacgggggcctggaccctgctgatggctttccacacacggcagtaatgacttttggcaggccgggaaggcgtcagaggcgagtgtgctgcgtcccttctcagagagacggcaggccccctctccctgttagtaaaagcactttgtgaggttcttgggtaaataaatgagtcattttaatccaactgacaggctggcacctgagcaagctgccttccatctgtactcctaggtctcatggaggcagccaattgtcaggcccagggccttcaaggcctcaccgttgagtgtctttcagaactgactttagcaattcttttgctcgaattagcttaaaggaataaaatgaagctacatctaagttctaagagcagacagaacagaa

SEQ ID NO: 48971 - DNA, 1035 bp, Homo sapiens
gtgcctggagtgttaatgggaggagagaagagaaaatcagaaaaggccaggtaggaagaggtttgttggttgttgtttccttcttgaatgtgtcctgccttcctattcagtaaggctgggtccttctaaacctgctgagagctttgtctcaggctctgcttcctagtcccggtgcacagggacagattgagtcagtggggagcggtcacctctagacggtgctgttttttaaaatattaaacctacaaacaggtttccttctgatgttgctagtaacagtgctgtcaacttcttaactcccacctacccaatgctctatagcatccctggtttagtatacatccacctgcatgccactcatttttgtggacattaagagtttggggttttgttgtttgcttttacaaaaacaagatcattcacttatataatgctttgtaacttgctttttacaaccgaatatgtttgttcctttattaggatttgtaatgggtgtcagttgaaaatcgttgcaacaagtaaatctcaaattgtcttcattcttttgaaaacatttttattgtattatagcttaataatcagtactcaataatgatgcatgtagtctataactgaggagtaaatatgaaacctgaaacctcaaagcattggttaggattagactcagctgtgaataacaacaataataacaaataacagtggcacaaacaatatacaagttttatttttctttcacatttaagaaatctgacagagccagtccaaggctggcctggtgctccagtgtcggggaccaagctctttctgtctttttgtgccactatgggaggattccatttttaagattacctcatagtcttagatagttgcaggcactccaaccattgcatctaatttcttgccagcgggtacagagatgctcatacctgctccctctgaaggtgcttgtgtgattggcgtgttccctttaccttttatcccattgctaaaacaaacatgactatacttaactgcaagggaagcttgaaaatatat

SEQ ID NO: 48972 - DNA, 1904 bp, Homo sapiens
gtagttaggtttggtttggttttggacatgataaacctgccaagagtcaacaggtcacttgatcatgctgcagtgggtagttctaaggatggaaaggtgacagtattactctcgagaggcaattcagtcctgggcaaaggtattagtacaataagcgttaagggcagagtctaccttgaaaccaattaagcagcttggtattcataaatattgggattggatggcctccatccagaaatcactatgggtgagcatacctgtctcagctgtttggccaatgtgcataacctactcggatccccacctgacactaaccagagtcagcacaggccccgaggagcccgaagtctgctgctgtgcagcatggaattcctttaaaaaggtgcactacagttttagcggggagggggataggaagacgcagagcaaatgagctccggagtccctgcaggtgaataaacacacagatctgcatctgatagaactttgatggattttcaaaaagccgttgacaaggctctgctatacagtctataaaaattgttattatgggattggaagaaacacgtggtcatgaatagaaaaaaaacaaacccaaaggtaggaaggtcaaggtcatttcttagatggagaagttgtgaaagatgtccttggagatgagttttaggaccagcattactaaggcaggtgggcagacagtgacctctctaggtgtgtccacagagtttttcaggagagaaaactgcctgacctttgggactaagctgcggaatcttcttactaagcttgaagagtggagaggcgagaggtgagctactttgtgagccaaagcttatgtgacatggttggggaaacagtccaaactgttctgagaaggtgaactgttacgacccaggacaattagaaaaattcacccaccatgccgcacattactgggtaaaagcagggcagcagggaacaaaactccagactcttgggccgtccccatttgcaacagcacacatagtttctggtatatttgttgggaaagataaaactctagcagttgttgaggggaggatgtataaaatggtcatggggatgaaaggatctctgagaccacagaggctcagactcactgttaagaatagaaaactgggtatgcgtttcatgtagccagcagaactgaagtgtgctgtgacaagccaatgtgaatttctaccaaatagtagagcataccacttgaagaaggaaagaaccgaagagcaaacaaaagttctgcgtaatgagactcaccttttctcgctgaaagcactaagaggtgggaggaggcctgcacaggctggaggagggtttgggcagagcgaagacccggccaggaccttggtgagatggggtgccgcccacctcctgcggatactcttggagagttgttcccccagggggctctgccccacctggagaaggaagctgcctggtgtggagtgactcaaatcagtatacctatctgctgcaccttcactctccagggtacatgctttaaaaccgacccgcaacaagtattggaaaaatgtatccagtctgaagatgtttgtgtatctgtttacatccagagttctgtgacacatgccccccagattgctgcaaagatcccaaggcattgattgcacttgattaagcttttgtctgtaggtgaaagaacaagtttaggtcgaggactggcccctaggctgctgctgtgacccttgtcccatgtggcttgtttgcctgtccgggactcttcgatgtgcccaggggagcgtgttcctgtctcttccatgccgtcctgcagtccttatctgctcgcctgagggaagagtagctgtagctacaagggaagcctgcctggaagagccgagcacctgtgcccatggcttctggtcatg

SEQ ID NO: 48973 - DNA, 1013 bp, Homo sapiens
aagtggttctgctgcccccatagtccctgacatttggcaatgtctggagacattttaggttcatgtttttggtgctgctggtatccagtgggtaggagccagggtgctgccaaatatcctacaatgcacaggcagccccctgcaacaaagaagtatccatcctaaaccctgctctatgtgtatcccatggaactctttcttcataccttgtttacataaatgtcaaaagtttgttcaggtttttgagcgtgattcctccttctttgggaatcactgcacttcatacatcattttgtcaagaacggtgagttttccctagggctttatgccactgggccttggtggtatacctgtccaccttctccaggtgttctgtgggtggtcagtttgatggactgcatttgtgctgtcccctttgcaaagcacagttctgaagtgtgtttctgtctatttttgttgtccttgggtaccatcctccccacctgccattatgtcagggactgtgaacccatgggactggtttattttgccttaacattgaaatagtgtgctcctagctgattccctgtttaatgacgtctatgtgctagttttatgtcgtcggatttttcactttgctcatgttttttggttagctctcaaacagtgagtcggtccagcagcagatggagttcttgaacaggcagctgttggttcttggggaggtcaacgagctctatttggaacaactgcagaacaagcactcagataccacaaaggtatgccagggctcgggagccagaccttagtggggaaagcgtttcagacccagacagtatgtctcccgcatggcatagagaatggcttgatgacttatttcctaaaagacggagcggcagtcccactactccgtggtccagctatacaagcactttccagccaccatgtgagcttgtttctcctattgggttgctttgaagttaactcacactgaaagcacctaatggtagttggtagagagtaggtgtaaagtg

SEQ ID NO: 48974 - DNA, 2391 bp, Homo sapiens
ctatttctttatgtactagaattgtttcagacttgggctggcatggtcccgcttgttctttgctatcagagttccgtggctggcactgagttgacactctgaagtatttaattcagttgattacagtttgcatttcttgactttcattgcattttacaggtggaagagattagaaactcatgatgttgtgatcgagtgtgccaaaatctctctggatcccacagaagcctcatatgaagatggctattctgtgtctcaccaaatctcagcccgctttcctcatcgttcagccgatgtcaccaccagcccttatgctgacacacagaatagctatggtaaaaagtgtctttggtacttatctgttttgcaactttgtctctggaaaacattatttgtctttgttgattttcttttctggagtaagacttagttcagttcctagggatttttcccaaaatatcttaaatttgcatgtccctccattttcttctaattaatttctccttcaagtttaatttagatgtccttggtctgctacctgattgtatgccaacagagttggtgacgtgtctccaacacttaagaaagaaaatgggtttaagtatttgacttccagactctacctcataagggaatctttctgattttcagacatttagagtgaggctcttgtgtctgtagcactgacacagtttgaatgagtcggaacaatttagaattggattcatataaaaatctaggctttatttgtgggttgcagccactgaagttgtcatctgtattgtgcttttttaagttatcttgaggcttaatgagacatcaaaccttattgaactttatttcaaaggagcatttagagaaactctgaagtgttactttgtccccaaggatgtcagttaagtccctcagattttttaggtacagagaattgaatattatcaaatggtctagaggaccatctttttttttttttttttttttttttttttttaaccagaataacctaaaaccacacactaaccccctgtgttcttctcttccattttagggtgtgctacttctaccccttactccacgtctcggctgatgttgttaaatatgccagggcagctacctcagactctgagttccccatcgacacggctgataactgaaccaccacaagtatggtgtcaactagtgtgcctgctctctcctctgctttctggtgaagctgaccctttgggtcagatttagtatgtggttgggaaaatttcacactgctcatttcaggagtcacttttaaggatccatgatattagcaaagaaagttactgttgcctcttagattcatcttgaagtcttgatttacaaaatgcaacttgtttcttgatacgcttttaataagatgcctttttctagatgaaaaagctaaatttaagctgaacactggccatggatataaacctcgtggatgacttagcattcctttgccactgctgatgtactttattaacttcccaggctactctttggagcccatctatggtttgtggtatgaccactcctccaacttctcctggaaatgtcccacctgatctgtcacacccttacagtaaagtctttggtacaactggtatgtatgtcttaggttggatttgattagttggttttggcctgcctttaatggcaggaggagctctcttttagatctaagggaccacttgctgttgtaaacttgtttttgacacttattgcaaatccctggggctttcagaatgtgtaaagtgaacctaaaaacaaaaaagagagagactgatctagatccccagaaagttaactctagcagctttatttatagtaatagttataggctgaaaaaaaatcggcagtttttctaatagttgggctcagtgttcatatatgttctgcccttgtctctaagcaggtggaaaaggaactcctctgggaaccccagcaacctctcctcctccagccccactctgtcattcggatgactacgtgcacatttcactcccccaggccacagtcacaccccccaggaaggtgcgatccagctcgtctgctatccctctgcccaggcacagtgactcacttgcaagcctcactttgagaagcctaattatgccagatagaattctgacctaaaatgcaatgggtttgaatcagaataattgaaaatggactaacaagctgctctcaaggtgtgatctgccgacccctgggtggttccaaaactctgctttggcagaactcttgtggggaacccagcaggtcaaacctactctcttgattttttttttttttttttttttggagacagggtcttgctctgtcgcccagggtggagtgcagtggcacgatcatggctcactgcagccttgacctccc

SEQ ID NO: 48975 - DNA, 1404 bp, Homo sapiens
aataagaaaatgtggttaatattaactgcctgtacctcacagagacatgaaaatatccaatagtatttgttccaggatggcagtaccattggattcatctgctacagcaccatgcaaattgatttttgtgtctgccaagaagggtaactcttttattatccctagaggtgggtcccaaggagtcacattggcagggtattataaaaacatgcatttaattcagaaaaaataggaacagttttaacaacttaatgttttttaaacaaatggattgatgagaatataatctaattaatggattggtgagaatataatctaaatggattgatgagaatataatctaaatggattggtgagaatataatctaaatggattgatgagaatataatctaattttgaggcacatcatttagttcagattgcaaaacacttatcttttccaaaagagtacgttttgttaatcatggataagtcttcagttagactgttaggaaaatgaaatcagggctagttctttctgctgagaatcattatatagtctcatatattctcaattctcctaccaatatattattcttactggatatcttccgtaatgaaaggcttgatgcttgatgtaaaaatcaaaatatatttaaaactttattcccagactcatagattcctattctaataggaataatggatgtcttaacctacatagtagtcttttgattaatatcttgtttcataaatctgaatttcatctacctggcaaacattcatgatttaattatgggtcaggtgagctgctgtagctagctagtcagagctgattgagtatccattgggtgttaagtgtcttcagttagcctgaagttatttatttgacttaatatttaaactgtaggcgtgctgaaaggtttccatatatatatattttaatttactggtctctaaatactgctttgaagtgagcctttaagttgacttgttagtgctatatgaatttctccttcaattatacttctgttgtagttctttaaaaaatagtaagttacttgtcaatgtgcagttttttttttttttaattaacaaaaagtaagtatcttaggatttggttgaatgaatgaaacagagcagtgctcctgtgttttgttgaaaagcagctccttttgttttcatccaactgctatcaatagggcatcctaaggctgcaggacttgggtgtccccaagtcaagtttgaactcgtctcccggatgcctttgcataggtgtgttgtaaatggtcctcactgactcattacagtagagttggggctcagtgttctgttgagtctgtttgaatgttatcccttcagtaatccttagggatagggaaatgagtacgtgagtcaacttgtgatttgtgattctctcagtg

SEQ ID NO: 48976 - DNA, 1032 bp, Homo sapiens
gcagtaatagtgccaagcgcaacagagctgtgtataggaagggtgtagggaagacgggaggtgcttggtctgctgtctttgtacatggacagctctgtgactcatgccgaggctcagtggttgctgtttagtgtattctgtcactgtctgcctcacctctgtcgtaggaattgtaaaataaggtagggatttttgtcttacagctctacattggttcataagtagggtcttgatacaaattgtagactgtcgaaagttaagtattgttctcaagtagggaaagttttctgagtttgatttttcattttcagtgtttttgtgtatacttcatactgttccttttttagaagtccactgtatatgaatttgaacccaaagtcaaatggttaagtgttcagatcattgaggtccccaagctaaatatcaccatcataaaatgtaaattctgggatacaaaagtaaatctcaaattttattaaacatttttcacgatagtaattgtattgcattttagtagtcagattttagaagtttggaattttaatataggaaaaatactttgtgggcactaccggctgctaggttactcctgtggtcactatgtcacatgtgtagtatcatctcaactggcacacagcgtcattggtaacatttttggacaaagcagaattcaggaaagtttctggtagatggttttctggaaggaaccttgtacctgggattcatagcttggcaagcctcaaagatccttactcttcaattactaaaaattgttggccgcctttagcaattattcttattttgaaacaaaaaaaaccccagcttttaatagcatttttcttttttcatggggtactcttgtttatacttttgtcctcatttttaagacatttttggccaggtgtggtggctcacacccgtaatcccagcactttgggaggccaaggtgggaggatcacatgaggtcaggagttcgagaccagcctggccaacatggtaaaaccccatctctacgaaaaatacaaaaattag

SEQ ID NO: 48977 - DNA, 1044 bp, Homo sapiens
caggccggcaaagtggagctgtaaatttcaggaagcattataaaacctaatctttggggagcctttgatttaccgagcaaccacctgtgattcttaaattgaacattcctgagtaaatctggaatatgcaaatgtgaaaactgatttagggttgtgtagggaaatgcacctttaacagtcatgcatcaggcaaatgaggctcctcagaaacagtgaaacattctttgctattgccctagggagctgcagaatcttcctctaaccacctggtgtaaacttaaggggtatttatagaagatgtaaacggaaaatatcctcttactaaagttaatatcttatccaaaacactcttatatcacgtgcctagaagggcagatgatgtaaactttctctgctgcatgcatttcctggtgtcataaacacttggtacgttcctaaattcctggttagaaagcaggtggctaccagccttcttgtttccataaaattagagtgcttcaggtcctgtgactcagttgtcctcttcctcactgggttaagagtaaaaactgatactgctactgttgtggtgtaatatgatgccttctgtgcatgcctggtttcattcgtgagatgaaacttaacagtcttactagggcaaatctaatatatacctctatatgtaatgtttgcagaataatgaacttggtggaaacgagatctgaaaccctagtgctcatgagaaccttgatgtacagatatttggcactatactaggtagacctacatattcggacaccttgtatatatattttggaagaagactgattcttatgtgcaccggaggttgaggaccactggcttcaagtatcattctggctattttcatttattatttatcacagaggtatttcttaaaatagcttgtagccttttatttgtgtagtggtgggtgaattttgggctctgaattagagctgacttgttcttatagctctgtcttcatttgaagtttgtttggctacaggtatgtttatttctgggttccagggccatagtgaacta

SEQ ID NO: 48978 - DNA, 1047 bp, Homo sapiens
caacttaaaaagtgagtgagctttgagccaagaggaagggaccctgtccccaccgaacagtgggagagtacatggggctggggccggagccggggctggctgggcagaaccctggctcccacacctcttgtggttcctgctagagggctggggtctgggggcttcgcctgcaggaagaaagacgaccgagagctgtggaggggtcctggggtggctggggctcggggcagcccccggcgggaactcatcccaccatagcctcatcccagctggccttggctcagtgggccctgatctaggggcccctggcaagaggtggggtgagcctctgctctcacattgcctcacccctcaatagtgagtgctcagtgggcaggctgcaccccaccctctgggagaacaggattagtgggaagatgagacccacacacagctctgagagagtaaggcagctcaccagcactgagctacaagttgaggagccgccagggacctgcagatgcccggcaggaggaccgatccctcatggagtttacattccagcgaggagggggtgctgggagacatgcagagctgtgggcggggcttccttggaggaggggagaggtgttcgccactgaccaggggcctccttggttcttttagctggacagccaagggggcttgggccggggcaggtggccttcagatggacaggggccggctcaggagcccagcctggctcaggggagcccaggcctctgactctgctgccacccacctgtccccagtgccatctcctccatcctgggcacctggctggaccagtactcggaggatttctgtcaacctccggactttccctgcctcaagcagctggtggcctacgtgcagctcaacatgccaggctcagacctggagcgccgtgcccaccttctcctggcccagctggagcactcggaacccattgaggcagagcctgagggtgaggaggactggggtgggtgccagagggtgaatgaggaggggtcggtgctgggccacacgaagaggaggctccagggtctg

SEQ ID NO: 48979 - DNA, 1035 bp, Homo sapiens
tcacctggcaccttcagcatggcacttccctggcctggtgtcttgtaggccttttgcccagggcacgtccacaaacctctcggagatgcaggtgctagaaagctggccctgccaccctcccctgcgaatttgctgtgtgacctgaggaaatccttcctgtctctggcccctcctccacatctgtgccacaaggggctggactctgctccaagcctgagaccatggcagaggcagcgccaggcctgggtgggtcccaacaggccagggttcaaatccctgttctggctgccacgtcctggctcctgacctgggcgagttcctctcaggctgtttccttgtccatcaggcagggcgttaggaggattaaacgtgatgggtgtccaaagggccttgcacccaggaagtgcccgcatgtgctgggcactgtagctggttaaagttggggctgccctgcacccccttgggaccagcccaccttcctcctcagctgccaccagccacgcccctcccgggcctggccctgtgttcacctgactgtcaggggctgggcgtggacagggaccctggatgcccaaggcttgcggctgacctggaggtctggttctccctcctcctgcttgaggcacgattttcccatcagtgagtagcagggcacaggccggcagggagggtttctggagagatgggccggcctttgcggggctcagcactggttggttcccagcctccactttctgaggccagggagcatcctggtgggcaggcaccgcgtgtcgtcccggtctgaggccgcctctgtgggctgccatgcccaggatcaggagtgtggcccacccacaccccgggctggcctcctgtcatcttgatgctttgtctgtgcgctggggatcagggttgggtccacccacctggagctggagggcaggcccgagggcaggagggtcacggacacggacacgaggcccttgcgttccacctcccttgatggggctcatggtccgagctcatgacttgagaagtcctgggctctcacct

SEQ ID NO: 48980 - DNA, 1043 bp, Homo sapiens
ttgcacccttgtggtgtgttgaacatgtttctctgtcccctgtaatcccacaaatggcagttatatgcagaggcctgccttgatttaggtttgggttttgaggagaacactgtgagtggtgctgcgttcctccactggtgacacacgctgtcccaggatggccttgcccttggttagggtgtccccacagcttacaggaggcctcaggagagggtcttgcatgcaggaggcgtcccatgaatgccaaccccagttgctaacagtgtgaggcagagtcaggcccgcccgatctgagggcattgggcaacacatcctgtgcagggaactttatctgtgccttcattaggggggcatgtgtatctgtgtttctgtctctatgtgtgtgtatctgtgtctatgtctctatatctgtgtgtgtgtgtctgtgtctatctcaaacttgttttttccctttttgtggagaatggggtcttgctatgttgcccaggctggtctccaatttctgggctcaagaaatcctgcctctgcctccctaagctctgggttacaggcatgagccaccacacccagcctctgtgtctgtctctatgtctctgagtaggtatgtctctgtctgtgtgtctctatctctgcgtgtgtgtctctgttccaatgtctctgtgtgtgtgtctccgtctctaaatgtgtgtgcctgtgtctgtctctgtgcgtctgtgtctctgtgtctgtctctatgtgtgtgtgtgtgtgcctgtgtctctgtctctatgtgtctctgtgggtctgtgtgtgtgtctgtgtctctgtctctatgtatgtgtctctgtgtgtgtgtgtctgtgtctctgtctctatgtgtgtgtctgtgtgtgcatctctgtgtatctttgtgtctgtgtgtgtgtgtgtctgtgtctctgtctctctgtgtgtctctgtgtgtgcatctctgtgtatctttgtgtctctgtgtgtgtgtgtgtgtctgtgtctctgtctctatgtgtgtgtctctgtgtgtgcatctctgtgtatctttgtgt

SEQ ID NO: 48981 - DNA, 1051 bp, Homo sapiens
catcctcaaactcacctgcaaaacctgcgtcacatatcatgatggtgaaatgatacccgcattggcatggcagtgcgtagtagaaattatcagagggttgttgactctggtttaggcgccaggttggaggcagcagtgatcagcagaaatggaagtcagagtccccagcctaggcctcctacaggggacagaccacccaccccagggacagggtcccagcagcgtcaagtctgtgtgctgcctggaacaaatctacttgtgatccttaatttggaacagagtagaggaaagcaagcagccttgggggccggacttacaccctgccttggcactgacacgctgtgtgacatcaggcaagttgttcgccctctctgggcctcagttttctcagttttacaacagagatgatgactgtggcctcatctttctggcagaggctgtctggaaaagtgctttgtccccattgaggtgtgctaaaggcggcgccagactaggctctagggtacgaaggggtgtcaggagttgatcctgcctgccaggcttctgaacgtggcaagaatttgcctctgggctgcacagtgacaggtgtcagtgatgcccccgtccctgggagtctcctagtcagagccaaagagggaggggatgccaggcataggtgcagcctccaggggcaggatctgtctcctgcacgaccacagcatcactacctagcagagccggctgggcctgaatgtgtgttgagcgacttgacggggcctcaggttcccagaagccagggggaggggagctggagtgtccccccagctggacaccgagtctggccagcagctccctgagtcaagttagcagcaggaaagaggagcaaaagccaggcctcggcctctgctatctgcttcctggacaggatgtggtgccgagtaaacagcttcgcgaggagtcactgctctggctctgagtcacagctcctagcgacagctgcacagtgtttgtaaacaatgggcctcacacccagccagggcctgcccctacctagaaaggtgcctgtgggttg

SEQ ID NO: 48982 - DNA, 1621 bp, Homo sapiens
gactgagggcatcagttcttctgtgactgttggtgggggccctcccttggttcactgccatgtgggtctctctgtagggcaggcagctcacggcatcagaactcacttccccagagtgaggggtgaaggtggggaggaaaacaagagcaaacaagcaagacagaagtcatagttttttgtaaatcttggaagtgacctcacatcacctgtgctgtgttctgttggtgagaagccagtcactaaatccaatcaccctcggaggaaggggatcactcagcaacttatgtaccaggaggcagggatctctggggccagtgtggaggctgcctgggacagtgtctgagaggaggcagtcaggcctgattctaaacataacggaggctgggcgcggtggctcacacctgtaatctcagcattttgggaggccgaggcgggtggatcacctgaggtcaggagttcaacaccagcctggccaacgtggtgaaaccccgtctctacaaaaaagaaatacaaaaattagctgggtgtctcggcaggtgcctataatcccagctactccggaggctgaggcaggaaaatcacttgaacctgggaggtgatgagtgcagtgagccaagatcatgccactgcactccagcctgggcgacggagccagaccctgtctcaataaacaaacgaacaaacaaacaaacaaacatcatgggagccattggaaggtgttcccattggaagatgctcccatatgccacagggggccgatatctgatttttgcttcattttcaacccgttcatggtgcaaatgaggaaaccagaccaagaagggagtgactttccccagatcacagcaccagtgcccagcctgtccgacttgtattccgggctgtgtctcgcccctgtgagaagtttctttcctcacagttgtaaaggccagaggtccaaaatccaggggtcagcaggaccctgcagtctctgaaggcccttttccttcctaatccttccatctctaagtctgtgaggcagctaacaggttttgtagtattgtctcacattagcgtggtgatgtccccaggaagtagacgttagaaccatccccattgtgcaggtcaggagactggggaggccctgaaaggcacaatggctagtttggggtcacagaactggcaagaggcaggagcttggtgacccagatggcttcccctctctgagcctcaggggctgggagcatgagaacacactggttggctgtcccagctcccagggtggctgtgagtacctggaagtgccccttgtctcccctcacacatctgccatcactctccccatttccttaacccccagcactgctgccacttgatttttacgaacatctgaatatgacgaacatacagatttttacgaacatctgaatatgacgaagtagcaaaggtggatattcactcattcatttcgtatctgtctcctgggcccaggccatgccggggcggggggtgggggtaacaagaatccggggagttgccaggggaaggggaagtgctcatctggggagtgcgtgggcacagagagattccagaaggaggtgtcctgtggtcgtggttgattcgtggaggggaggtgtggtga

SEQ ID NO: 48983 - DNA, 1647 bp, Homo sapiens
agccgggcgcacccctgcgccgcgcgcgggcccaggcgagcggcctctgcgagccccgggtcccgccctggggccggcgatgtgccaccgaggctgaggatgatggtagattgccaggtgagtgcgcgccgtccccagcctcgcgtcgcgggtggagggaggaccgtatgccccagcccacacccaccggggggagggagcccggcgccgcgtccacgctgagcgtgcgcttacgcagctccgcgtccaaccccgcccgggacagtagggaaactgaggacaggagaggggcagggactcgcccggggcacacgaagttggcggagtccagagatgaagggagggttccggcctcttaggccaggaagggctcggctcacccttcccgtggggtttgctttgggaatgacagcctctaagatcctggggacccctgcccatctcccatgtgggctcatttgcctgggcttctccgcgcacgtacaggcgcaggcctgcgcatacatgctcacacacacgcagacacacacaccacacacttcctggggctcagagtaggacgggacgctggggaagtgactgggggaaagaagaaagagggcgggggctactctgccacgggcaggggcatccagtacccagcaacatgcctggggccatggcacggggtggggggcaaggggaggacacgccagcttgatgggcggggattctccaaggttcccaggatctgtctgggctggggcagcctggagaggacagattgtggggttctgtgttcaccgctgtgatcacctggaagcaggaaaagaccccttcagtgtggacggggctgtaggaaaggaagcctcaaattcctgctctataaattggaatgtttggcctgggtgactccaagggtcccacaggctcgtagacgtgtctgtcggccttaggtctccactggggatgcccccactacccaccgaggtctgtggaaaatgccttcttcttggaggttcttctgagcaagagaagccgggggggctgaagggctgagggcctggggtggtgcagagcgtggccaagcactggacaactcttgtgggacaagactgtccttgttggagcctcagggttcttatttggaagtggggccagagccgttgccctggttggagtgaggaggcctcacgagtgaactggacaccccaggaccagcagagggaaagaggggagcaaatgaagcttctgaggcgccttgaattacccctggagcctgcaggttctgctcctttgaccccctgggactcaggagagctgctaccttgacaacacccaaacaaaggtgtgtgttttgttttctgggttttctgcctgaggctgctgctgctgtgctagtgccggccaccagggggaggcagtgcccactgtactcattggagcaactggagtcagggagagcccggcagggtccctctgggggaccccggcctctacccaatgcacaccccccattactagcatccctctccacaatgttagctgctcagaggcgggagggggctccaagagcttcctctttcccttcagcaggtgtgcccaagcactcaccctgggttgtgggggggcagcgttgggcttgggtgtggctctgaaagtgaccca

SEQ ID NO: 48984 - DNA, 1018 bp, Homo sapiens
aatgagtgcaggttgaaagaaaacaggtgaattttagtggcatatggatgataaagctgtaaataaaattcttttgatgaaactctccggttacgagacaaagactgtaactgaacaggagctggtgtgactgttaccagacagaggcaactgatgaaaaagccctgtgaaagataggatgtgaggtgagcatgagcttgagctgagagacagacacaacagtatctgaaaagaatacatactctttccatgcatatatggaacatggatggaaactgaccacctactttgtccagaaaagaagtcttaagatatttcaaggaatcagtgtcgttatctgaccgtatcccaatgtcattaaaaaaaatttgagctatttttttttgttttttagatagagtcttgctctgtcactcaggctggagtgcagtggcatttcatatttggaatttttaaaacacacttataaattacctatgagttaaagaattccgaatggctattagaaatatttgggactaaaggataatgaaaatgctacgtattaaaatttgtggaacagggcctggcatggtggctcatgctgtcaatcccagctctttgggaggcgggtggatcacttgagatcaggagttcaaggccagcctggccaacatgataaaaccccatctctattaaaaataaaaaattagctgggtgtggtggtgcaaacctgtagtcccagctgcttgggaggctgaggcgggagaatcacttgaacccaggaggtagaggctgcagtgagccaagatcgagccgctgcactccagcctgggtgacagagcaagactgtctcaaaaagaaaaaatttaagatttgtggaacagagctaaagcagcacaaaaaaacatagcccctaaatgtatgtgcatctacagataaatagtgccatttatacacacatacactgtatgtctgtatttttaaagctaaagaaaaataagcatgcagcttaagttggaacaactcaaagtaaatg

SEQ ID NO: 48985 - DNA, 2782 bp, Homo sapiens
acagctgcgggcatgggaagggctagctgagctcttcacctgcatcctggctgccgtgaggattccccgtgttagaggtggggacgcctgctggaggccgcctggctgatgtagggctatcgggaagtgccagggcctgtgttcccaactgtcgcccccttcaggctaagtctcaggcagggacagacccagaaagaacacagtctgccctcagagagctctttgcagtgtagtgacactggggtttctgcagtcagggaggagggagggtggccaggctgacagctttttgcaagaggagggggaccagcaccagctgggaggcataggctaggacaggcccacgtggaggctgggcaggaagggcctgctgaggtcacacagctgttggtggttgggccagggcggcttcctcctttcagaatgctagggtggctctcaccactggccgcctctccttgccaggcctgccaactcaggggacagatggagcaggagtggagaaagggaaaggcaggtctggggtgtggtcgtgttttcttaactctgcttctgtcttgctctcccctcccctggctttcctctctgcctgctcctgtctctccctggggtttctggtggtggaaaagctcaagcctttgcgaagctaatgacctgcctctgtgcgaagcttacgggaggctggacctcgacacagactctgctgatggcctctcggcccctctgctggcgtccccggagcccagtgctggccccctacaggtggcagcccctgcccactcccatgctggtggccctggccccactgagcacgcctgagcctccggggccacgcttcgttctcaggaacaaaacctgaggcagccctttggatgccctcacagccttgcttctctcagcctaggttcccatttggggacttcaggaccccagagccactaggacttccttgggaagcccgttagcccagggtgggtcccaccaggacagtagggaaacagttgtttccctagccatttccgaatagcccatcattccgagtcatcatctctgtttgctgccttcctggccagccaggtggaagaaagtttccaagctaggtctggcccgttggggatctcagcagtggggcaggagggtgcctgatttcggggagtcctgacccgagcctgttgtcagagttgggaggggctctgagcagtgttgggcaggccgggtctcccatcccgaggccagcgttcctgtgcagagccccatccactggttcttgccctgagccacatatgtctgtgccatgggctgagtgccacgacaggcccgtgtgacagctgctgcccacgcatgtggaagctaggtgggactcattcctaattctgccgttgtaatgagacttgattaaaacaccgccacttttttgcattgctgctctttcttcctcattccttgtcagtccaggaccatccttggtctcccagcagttgtccgagcagcagctcctcagctctgcctggacagcctggcccaaggtcactctctcctcattggcacctggtaggtccccagtattcagtgaatggacctgctgccatcattgcacatccaggcacctgtgcctctgctggcatctcatcctcactgctaccagagccggtgctcctagtgccggtattttagagaggagaggatgtggacttagaaggggtgaggtgtaccacggccacagagctaggaagtgaagtggcaggaatcagaacttgaacctgatggaagtctagacccagtgtcttttggtgccaggctcaccttagaaatgcagaagtcacaacactgggcaggaagtgtggggggagcacagttcgtccacaggaagtatgggggagcactgtgggggagcaccccaccccagttcctccagcaccatccatgtgcttcatcttctcatgggggaggccatcgtctttcccgatgtatgaatgaggtgacagcccaggatccagccttggggacaggtaagaacacagctgacccatcaccacctgaaccagagaaccccacagccaagcagaaggcaccagacagacaggagcttgaggcccagtcctggctctggacctggcttctggggtggcctagggaagttgcttcccctctgagggagaatttccccattgatacgtgtggtgatctgttcccgcactattttagctgtggaaatgccttgtacttaaccactgaggaagaaaaagattacaaccagatggaagcatatatgaagcgagagcccggaaggaactggccagactttgtggtgggatcccacttaccctgttcctaaaatcctgagcgataagacctgccatcagcttcattttctgcttggccaggaccatcattcccatgtgaaaatcaagttatttctccttcttaaagccaagccgctctgctgaccttttttcctctccagctcatggccttggcagcagagctccacggggaagcagctgataaccatttgcagttctctcttgggcctacgtcagacaggttttgtctccatgactctagcaaaactacacctattaaggtcaccagtggcctccacattgctaagccccggcccattctcagtccatgtaactcttttatcccaagctttttattttgagggcagtggaactcatggaagtacttgtcagtttgcctctctgagcacattctccttcgtccatcaccacaaccagaatggatgatgattgcatatcctctggtatctagctgtatt

SEQ ID NO: 48986 - DNA, 1004 bp, Homo sapiens
ccctgtgactgcctttggcttggggacatggcaggtaaagaccggcatctggtgtgcgtaactctgggcccttgaccttgctgccatctgcttggccttatgctctgtcactgtaggtccagcgtcggaagtggaagctgaacctgattgcagagttggagtccagagttctggctgagcctgtccctctgccagccgagtgagtgcatggctgcccccctagggcctgttttacttgagttcaacagcagagccctggcttctgctggccagcttgccccttttggtgggacttttagtcactgccttgacctcaggtgggagctctcattatcagtcatctgttgggcttgctgttgacacctgactgcccttgtgaagctacctgagaccgcctcctgacatatggaggaaagtcttattttgagtcctgggtgtcacccttttttcaggtatagtaaacttatcctccacagggcccaaggccctgtggctgagggcagataatgtaggtctcaccgtgagggtggtcgtttgaaaaagtgccctgaatgatttgtctgctctctccctagaatatgccctacagagataggtatattcagccacattttccattcagggtagcaaacagtatgccagatttggcttgcagatggggttttggcccacatattttttaaaatttcacataaaatattcattgaggagtccagatttttagcctctcttgtaaagttggactctggcagtgcagatccacattcccacatggcatcaaagttcccctttgaagagcacgccctttgcctttctccttcacttgtctggccctggtgggctgtgtagtctgccaccctcaggggattcgttttccagccaaaccttgctcggccactgttcttatctccatgcagcccaatggaactgaaaaatctggagtataggccagtgaaggtcagggggtgctttgaccattccaaggagctgtatatgatgccccg

SEQ ID NO: 48987 - DNA, 1068 bp, Homo sapiens
cccgcgctgcgaaccttgcgggcgtccgtctggagccgcaggctcgggtgctcccgcagaaacgcccgcacgtcgcccggcaactcgctcatggccgacgcgcccgcggagcagcccggcggaagccgctcgcagaacctggagccgggggcggggctctgggcgggactcagcggcgccccggatgcagatgcctcctgcgtcccggaagcgcccgcggggccgggtgcgatggcggcggtggctgcgttgcagctggggctgcgggcggcggggctgggacgggtgagcgccgggtgcggggtgcggggtgcggggtgcggggtgcggggtgcggggcgcggggaggggtcccggagctcagcccgcccgtccgtgtccgcaggccccggccagcgccgcctggaggagcgtcctcagggtctccccgcgcccaggtgagggctgcaggccgggctgtgatccaggcgcctgggcagagccacctgctgtctgccctgcactttgaagggttgtcgtggggattgaaatgaaccaactgccggctgagcggaggctccctgggagtgacaagttccgtattaaaatgctttcagtggaattgtggtcgtgtgccgggcatgtagcgagcgctttgtcctcacaacgcgagaggtagctccttggtcgttcccctgttacagagaaggctcgagagttacttccgaacgtcccatccagctaatgggtggccagcccaggctgaaagcccagggctctgaaagtaaagcgtatctaaccaccgcggcttacgtgttcctctcagtgtgcagcacagggctgttttgccgtgtgtagagtgctgtgcaagcctgccccaggcctgcctttttataaaaaaaaaaaaaaaaatagtatccgcaaggcccctggtgcttttcagcggatggaactcatcctctgagagcttaaaggcactttctgtgtacattcttccctctttacatttacgatgagttgtaaaaatggaaagctgttaagagagctctgtgagccattactgaattgatatatttttctacataacac

SEQ ID NO: 48988 - DNA, 1020 bp, Homo sapiens
agtgaaaacatttagggacacccaaagaatgatgcagtattaaaggggtggtagaagctgctgtttatgataaaagtcatcggtcagaaaatcagcttggattggtgccaagtgttttattgggtaacaccctgggagttttagtagcttgaggcaaggtggaggggcaagaagtccttggggaagctgctggtctgggtgctgctggcctccaagctggcagtgggaagggctagtgagaccacacaggggtagccccagcagcagcaccctgcaagccagcctggccagctgctcagaccagcttgcagagccgcagccgctgtgggcagggggtgtggcaggagctcccagcactggagacccacggactcaacccagttacctcacatggggccttttctgagcaaggtctcgaaagcgcaggccgccctggctgagcagcaccgccctttcccagctgcactcgccctgtggacagccccgacacaccactttcctgaggctgtcgctcactcagattgtccgtttgctatgccgaatgcagccaaaattcctttttacaatttgtgatgccttaccgatttgatcttaatcctgtatttaaagttttctaacactgccttatactgtgtttctctttttgggggagcttaactgcttgttgctccctgtcgtctgcaccatagtaaatgccacaagggtagtcgaacacctctctggcccctagacctatctggggacaggctggctcagcctgtctccagggctgctgcggcccagccccgagcctgcctccctcttggcctctcatccattggctctgcagggcaggggtgaggcaggtttctgctcataagtgcttttggaagtcacctacctttttaacacagccgaactagtcccaacgcgtttgcaaatattcccctggtagcctacttccttacccccgaatattggtaagatcgagcaatggcttcaggacatgggttctcttctcctgtgatcattcaagtgctc

SEQ ID NO: 48989 - DNA, 1050 bp, Homo sapiens
tctttcctcactgttcgtatctttctcaagtaattcctgtgtgtcaggtgtcaggggcaggcctccaggagcttccagagcacacctccggagctgactgagagccctggccgggtagtgtccaggaagagctcctggcgccatggagagaggagagaggatgtttctggcctggatggctgggtgggccaagaagcacttgggaatttagttatggattagagattcatcttggtaaatcacagcctgttactagttgggaacttcagtcttccccaaaccttccacatttcaaagctggtgctttattgcctcctgcctccctttggcttttatctccctacttgcaccagcagccgtctcagcagtagctacatcagcctgatggatagagacttcatgacgtgcagcagctggaacttttgtttataaagcatctcttttcctcacatttattttgaatttcttacgtttcaacctatgcagattgtccagaacatcgtgggcacagctctgatgattttagtggccattggttttaaaaccaagctggctgctttgactcttgttgtgtggctctttgccatcaacgtatatttcaacgccttctggaccattccagtctacaagcccatgcatgacttcctgaaatacgacttcttccagaccatgtcggtgattgggggcttgctcctggtggtggccctgggccctgggggtgtctccatggatgagaagaagaaggagtggtaacagtcacagatccctacctgcctggctaagacccgtggccgtcaaggactggttcggggtggattcaacaaaactgccagcttttatgtatcctcttcccttcccctcccttggtaaaggcacagatgttttgagaactttatttgcagagacacctgagaatcgatggctcagtctgctctggagccacagtctggcgtctgacccttcagtgcaggccagcctggcagctggaagcctcccccacgccgaggctttggagtgaacagcccgcttggctgtggcatctcagtccta

SEQ ID NO: 48990 - DNA, 2008 bp, Homo sapiens
ctcccccttcagccccctgcatgtctctgactgcctggagctcctttctcttctggggaagtcgtgagcccaagcagggctgtagaggcaggtcattcggtactgggccatcttttgtcccatttctatgattaccgtgacaagggaagtctcgagcttggctgcagccaggatgctgtcttgttatcacgttgcttcataaagaagaatacttggttattcagaatgaaatgctgggaacagaatatctgaatccacatcagtggtctcagaatcactttgttctctggaacatcatagcacatttcttgagaaatacagaaccacatttttgagcttagatctgtcctcggtctcctacaatggttttgtgtgttttagactccagctgacattggagagacggcctaatgtattatgaagtctgtggaaatgcctttggaaaggctgagactcaagtatctctctcttctttcccctcagacgattgcctacagcattttatgggacttgaagtttttgatgaggtatgtgcattctggttggttttagtatacgctccttctacaggttgagcattgcaaatccaaagtctgaaatgctccaaaatgggaaaaatcttgggcaccaacatgacgctcaaaggaagtgctcattggagcatttcaggttttggattttcagatttgggatgctcagccaataagtatataatgcaaatataccaaaatctgaaacactttgggtcctaagcatttcaggttagggatactcaatctgtatttctaaactcagttaactattggtttgagtagacttctctgggtctaaaccaagcttgtccagcctgtggtccacggggtgaacatggcccaacacaaactcaaaaactttcttaaaacattgagagttttttttgtgatttttaagttttattttttagctcatcacctatcattagcattagtgtattttatgtgtggccaagacagttcttccagggtagcccagggaagccaaaagattggacccccctgtctaaattgtgcctcttagaaacaggttctgaagaggatgttgcagagcccctagaatagtagagactgaagccgtctcttctgacccttatttcacgggtgtggggactccgggtctgagtggaggacagacctgaccacggggacccagctggtcaacactgaagctgtgactaggactcggttgtgtgtgtgttcaggtagcctgtcactgtcgagttgtaaagatacctctgtctcctgagctatgtaaggttttacatgggtgtaactcgagtctgaggtcctgtgcgcatgcctgcctggtcctgcttggcagatcactgggtttggagaaagggaagtaagggccttcttatactggcagcaaggtctccctgcacctggtctcacagacaggccagatcctggtgaggcttagcttccagcccacatatctgttcctcaggaacctggccctgggaggaggcctgttgctgctcctagcagaatcccgttctgaagggaagagcatgtttgcgggcgtccccaccatgcgtgagagctcccccaaacagtacatgcagctcggaggcagggtcttgctggttctgatgttcatgaccctccttcactttgacgccagcttcttttctgtaagtattcctacttgcctgaaccggtctggtttcctgtgaatgctgtccctcccccaccccctccctgctcacccctccctggttgggtattaaccacagcctgggggagctgctgaaatggagcaaacttttttttttttttttttgagacggagtctcgctctgtcccccaggctggagtgcagtgcgtgatctcggctcaccgcaagttccgcctcccgggttcacgccattctcctgcctcagcctcccgagcagctgggactacaggcgcctgccaacacgcctggctaattttttgtatttttagtagagacagggtttcaccgtgtt

SEQ ID NO: 48991 - DNA, 1311 bp, Homo sapiens
gcccctggtgttgctcttctggcacaagtcaagggaagagcactagcgggtgaaggggctgctcacatacaaaacccaagtgggttaggaccatatctgtaaggcaccatatctgtaaggcagcgcaggctgccgccgtcagatgatctccttaagagtccgtctaggtggtggcagagcatggctgtgggagcttccatgcccttttgtgggcagcttgggagggcagctacttgtactcgcccaaaccccaatcagacagatgcaggcaagtaaacagggttcgaagtcaaaatatggcttcttgtggacagaatctgaccaagcccaggtggggctttgtttctctttattcacatagtacttaaagctgccagaccaggcttttacatgaaaatgacctaatttgaagccgatagaggattaccatggaagtcactgatcagataaagtgacacatccattttttcacatcttcagaaaacaagagcaaaactgaagtgacaagatttgaccagaaagtgtgggctgctgaaagcaagacctaagtaagcttagtttcccaggcccagtgtcttccagtattatgacaatgacattaagtctttcactgggccgggtccatgatagacattccttttgtgaacttcttgactgtaggaggttggccagagcgtcaccatcttcagatgggcagagggaggttggctggccgcactggcttgtggtggcctggagactgagtccgcatcctgttaccccaaaggctgggttcctcactgcttggttgactgatctttccttctggcctgcagaggctggtccacggggacgagcagtctggttagtttctgctggcaggctccccacagttgcatctcttgtctctctgcctctggcatcaagctgcttgctctggcagccagggacagtgtcctcttgctcccaggagccatgctctgtagaaactgctgagacgtgctctatgcaggagcttggcatttggaagccatgggaagggtccagaaactaatgaactcagcaatccaaactaatgtccatgcctgcagctgctcctcattgcctattagacactctgtaaaatgtagcttctaagcagtttatacccataaacagcaatattagcacttaatgggttctgcctggtggctcatcaccaaggtgacagaaaagctgcatggggccttcctctccagtgtgacctttggtgtttttaacctgtcctcaagagtggcagagctagtcctgggccctaggagctggcctcggccctagttgaagtgctgggga

SEQ ID NO: 48992 - DNA, 1014 bp, Homo sapiens
agtctccttccagaagtgtccaggtggcattctgagcaacagggaagcctttgaaacaggcggttgggtaactgttgagagcattcgggaactgggtggacaggatccgatcctacaaagtgaagggacacaactcccttccctctttcttgattaagcttgacagaacaaaaaaacaaaaacaaaaggtggtggtggttacgcagatttatgccttttacttctaaaagaatcccgttatgtcgacaaattaacagccttatccccgcagggagagccttgtgtggcccacttgccgttttttcctcggtttacttaatgtgttcgtgtggctttgctagagttttaagtagtgatggttaaatttttaaatttttctggaggtggtagtgagtcatcaaactctgaggcctagacttatcggaaggcttgtatatgtgtggtttaaaaaaaaaagaaaagagtaagtgaccgttttctgatcagctattgagctcttccgttcctcctggggggtgatctctttctagtgtgacctcaccatcggttctcattgcaacactttctgtgagccaatattttaaatttggagggaaaaagtaatcaacttgacgaagcattttttccctaagattctgattttgtgcttaaagacacaattttatttgtttatttatttttatttatttattttttctttgagatggtgttttgaccttgttgcccaggctggagtgcaatggtgtgatctcagcacaccacaacctccaactcctgggttcaagcgattctcctgcctcagcctcccgagtagctgggattacaggcatgcaccgtcacacccagccaattttgtattttttttttttttagtagaaacagggtttctccatgttggtcaggctggtctcgaactcccgacctcaggtggtctgcccacctcggcctcccaaagtgctgggattacaggcgtgagccacggcacccagcctttaaagacacaattttaaaaac

SEQ ID NO: 48993 - DNA, 1071 bp, Homo sapiens
aataattacaaagggtccccccacccccgcagccctccagccctgccctgcccggccccactgagcagctggctctgcctctgtggagcagtcaccccctgccaacgtggcctcagtgctttgggccctttttgcccatctgcttggtccttgtgcccctgtgcccagcacccaacctgccatcaccctgcactcagagacctaaaaaggcagcgtgtttgttgcttctcctctttgggtttccctttcttctcctgggaggggtgtctgagtcacagaagtgtggggaccatcaggtcgttgctccctctgcttctcttgtgtcctccctccccgtcctggtgacatctcgtggccaggtccatgtctcactcagtacatctgtagcagagtggctagtgggagggctcagtcattgtggggttgactgtgggctgcggctatgcctcgtcacctgctgggatgtttcatgtcgtctagattcaggatgcccaggcagcaatgaggctgtacgtcatggtgaagaaggagtgggagagcatggcccgagacaggcgccccctgctgactgctccagaccactgcagtgacgacgcctagcagtcctgccctgctgctgctgccgccccgctacagaggcaatgtgaccagtcacagggacagatcacatctccccagagtggcaactctggtgaaaccttttcagaatcatggcagaggggcgtggcgtggtgctactgagaaggtcctccttcctcttgactttgtggtctgaaacctggtcttactgtccatgtgtgtttgggcccggatggtcagggtggggagcagggacggccatgggcacgcctggccacgctttaccgactgctgaccccctgggccaggtgaggttggggcctgtgggccgccagtccatacggtgctgtcactgcccatcttcggtgacaccctggggtgaggtgctcagcaccttcctctcgaggagccacattttcctcctttgtgttaggggacataacaagctctgctgggcttgagggacccagaccaggtgtctgcagtcagctc

SEQ ID NO: 48994 - DNA, 1074 bp, Homo sapiens
aggtgttcatgcttgtttacagagggtgaaactgaggtgagaaccccccgggcagtgtcctcacagaaaggtcttctgtgtgctcctgctgtaccccctcagagactgctgccgtggggactcgtccttccctcctgactctgactccatccctggcaccttgcgcagcacatgttcaagtctttcttgaagatgatgctaaggaccagacacagtggcttatgcctgtaatcgcagctttttgggaggctgaggctggaggattgcttgaggccgggagttagagaccagcctgagtaacataggggagaccccatctctataaaaaattttaaaattagccaggtgtggtggcgtgtgcctgttgtcccagctactcaggagactggggtaggaggatcagttgagcccaggaggttaaggctgcagtgagccatgattaccctatagcactgcagcccaggtgacagagtgagatcctatcaaaaaacaaaacaaaacaaaaaattgcatgctaagattgcaagatgagctgttaaaatgtgttatttgcaacttcctgatgtgtagaaccaactcaaaatacaagtataatataggaataagttggttgctggttaactgttgactgtttttctcctacttccttgatttcaagattttgtttttattgtctctgactgttgggcatcagcttaagtcagtgcaataaatttccttctggagttgaaattcatatcagtgccttgtttccatgtgtgtgtgacacacttggattccctacaagatgttacttgcagggcagccgcgttggctcacacctgtaatcccagcactttgggaggccgaggcgggtggatcacctgaggtcaggagttcgagaccagcctggccaacatggcaaaaccctgtctctactaaaaaatacaaaaattagccaggcatggtggcgggcacttgtaatcccagctactcgggaggctgaggcaggagaatcacttgaaacctggggtcggaggttgcagtcagcaaagattgagccactgcattccagcctgggtgacagagcaagac

SEQ ID NO: 48995 - DNA, 1041 bp, Homo sapiens
gtggtgagcccagcagaggagacaaaactcactgggaggcatggactcacctgctcagccctgaagcctgggagccctcgggcctccttcccagcgtcatgctgcccatttccgagctgcgtacttccacccacgtcacagttagggaaactgaggacagagagagatcaggcaggccgcccaaggtcttgcagtgagtcatgaccaggactcagccccaccagaaagcctccacttcccactttccggggttcacaggggctgactctcccatctcggccgggcctaggaaccagtattttcagcaaaacctggtgcggcggctgtgtcttgcaggtgtacgtgtctgagattgctcccccaggcgttcgtggggctctgggggccacaccccagctcatggcagtgttcggatccctgtccctctacgcccttggcaagtatggccccgcactcctgtgtgcaggctggtgggaggggtgggtgccgccaaggtagacgtgggtggaaagggaatgatttgtcccagaacagatcctgggctgagaggcaagagatctggcatcccggccccactcagtcagcaccttgctgggcacctccaggcagggcctgcccctctagccacaggcccagtctctagctggggcagccagggcttctcctggacccacagtcgccagactatcttttaacggcagaaagcttccatcaaatgccatctcagatgggaagtccagatagaaaagaaatcacagtgcgtgcagctgctcagttgagggggcgtggaggtcttgggtggaggcctagggccttgcctgcccaacctaccccttcctcatcctgccctggccctaagactttccaaggacttcccactatgtgccaggggctgagcaatccctgcagccccaccctgcctggggcaatcagggtaggcttcctgtaggagatggcccttggactagaccttgaagggcagatgaggttattcagaggctccagagggaaggggctgtaccaggcctggacctggcccct

SEQ ID NO: 48996 - DNA, 1050 bp, Homo sapiens
cagggctagaggccaggagaggcggggagctgagcagccaggggttccgggccccaaacgagcaaggagggcaggcaggcaggtggcaggagctgtctggggctggtggcccgaagggctggggtaggacagggctgacagggagtggccctgggggccagggacgaggggctttgctgcagcaaacacagaatgagcctggctgccaagggggccggggccgtgtggccctcacgcggtgaccgccggggccgtgtgtttgctcaggttcaatgatgaggtgaagcacatcaaggtggtggagaaggacaactggatccacatcacagaggccaagaaattcgacagcctcctggtaggtgacttctggctccggccggctcccaccccagccacaggggacaggtgcttcctcccggccctgagcgagtggccatgttttctgtgaggattgattcttcccagtgtggccaagatttagggaattggtttttaaggcactaggacagctagagctatgtcccagcctcctgaattgggacttctgacccccaaagcctgagcaaggtggttgaccctggtaaacagtgcaggggtggggtaggggcagcccaggccaccagcagccccagattcctctcatgcccatcctcctgcgagagcagaaactgacgcccagtggggcttccagctggggcctggccgggtagccccattacacatgtatggcttcaaacagcttcttctccgactcacccccaccctctgtcccagccagaatgcagttagaggcatagtccttgaaatgattttaaagttatgcctacattttcttttcttaattacaaaagttgtatatattgagaactcctgattagagcccccaggctcttagcttccccgctatggccacagaaaagcacaaggtcaagcagaaatccataatctcgggctgagcgtagtggctcatgcctgtaatcccagcactctgggaggccgaggtgggtgaatcacttgaggtcaggagttcgagaccagcctggccaacat

SEQ ID NO: 48997 - DNA, 1051 bp, Homo sapiens
gagggaagaggtagtctctgaggctgtgcccagcctgtggcccagtgaggccagggtggggggctgtagccagggagggagccctacctgctcactggagcggcagcacctgcctgagtgtggccaccaccagacccccaccccggggtttccagacctctggagcagggagcttggctgtgggtgtctcacatccactggctgaaaacttcccgcaccttcggtccttgctgtcccaggggatcaagtcagtgttagctggtggctatgccgacatctgttccatcagacccacggggcatctactcagagatgaggttgtcctggccacgacccttgggcacctcccaggccaggggcgctggggctaagtccacagacagtcccctccagggcagccaatgtggggacagggcagtcactgacaatgaccccctctgagccctgctctgtgagtggccctggggggccgttaacactcttgtgctctgccaccagccgcccatcagccggccgccatcccgggagatcgactacactgcatacccctggtgagtggatcgtgggctgcagacatgggcatctggtggcctctttgttatgggggcatgcccgccgggtctgggtggtgcctgtgagcggcccagcagggtggaggccccaggctgcctgttgccatctccagggcactgagcccagtggctcccaaatgccttctccctcctggcctataactctccaggagcctgggggagtccttctcctgtaggcagctgttaaccctctctaaaacagctcaactggctcagatatttcagggaattaaaccctttttgaattttatctgcactatataaaagtggtatatttgaggtcacaggtgtaatccacttactgacaatacagttgcttggtgggaacagtgaggctgtttgaaatcacagaagtcccaactgtcctgacagtgtggcagcagattttgggagagagcttgccttgccctctcagggtgggcttcattgcagtacaggtggcaggaagagcttcgttt

SEQ ID NO: 48998 - DNA, 1057 bp, Homo sapiens
gtttgcacccaggctctgtgggggaggcctggggcatcttctcttcggccactcgctttccatggcctgtaattttctccccaacatcctattgtgcaaaagttcaagcgttcatggaagctgaagcgacgtgatggtgaatagccgtcttctcaccacgctgccgccatccgcgtcaccccaccccaccccagccatccaacagcgggtctgtgtcaaagtgaattgcacaccagtgcagcccccctgagtacctcagggggcccaatatttgtttagcttctgaaatttcaagcttatatccaatgaggcaaacaaatcttaagtatatgttttctgagttttaacaaatacccacacctgcccacatccaagcccagtcaggaccttagaccaccgtccccacctggaaggttctctcaggccagtgcagcagtgttaaagcttcttctctgacctgccttctacgagcagggagtctgggccctgagtctgccccatgttgcgggcagagccaggcttggagtccaggccctctcggattctgcacagcctgggtccggagcccagctggttcccaggatggccacatggtggggctcggggaatccagtgggtgtagcatctgctctctttccctcctgccaggtcaaacatcaagccagacaaagccaatgccaaccaccacagtttccagatgtacacgtttgacaagaccaccaactgcaaagcctgcaaaatgttcctcaggtgtgggaaaccccctgctacagccctcacctcgctccacgcccagcccaggcccctgagagagcttagtgttctatctgtcccatgttccctgtgggaggccctgaggggttaagggagtataccccacaagagtcaggcccgtgccaggcatggtggctcaagtctcagcactttgggaggctgaggcaggcgaatcgcttgagcccagtagttcaggaccagcctggcaacgtggcaaaactctgtctgtacaaaaaataccaaagtcagccaggcgtgttggcctgctcctgtggccccagct

SEQ ID NO: 48999 - DNA, 1062 bp, Homo sapiens
agcggaagggctacagctacgagctcaaggagatcatcgagctgctgttccacaagatgaccgacgaccccatgaacaacaaggacgtcaagaaggtggggccttccgggtcccccctgctacccaggaacgtgggggtggcctggagagaggcactgggttccagaccccaggggaaggggactcgaagtcagccgctgatgctggccgggtgggttggggtgggcgtctccgctctgcaggaaggctcctctctgagtcactgcctcgccgtcgtgaccactgctcatagcaggcctgctcctcgccgggcccagcgccccccagaaaggtgggcaagaccagaatcccactccccagtgaggcgactgaggcagaggggagaggccaccccaaggcctctagtgagggtgggactttcaaccttggctttccatctggccagcctgactctagcccatgttgtcccttgtagcaagcaggctttcctctcccgtcccaccctgcggtgcttggaggagggctgtgggtaggtctggctgtggcttgtccgagactctacatgtagctggctggggcctgtggctgctggggtggggccagggctgcaggggtggggcctgtggctgctggggcggggccaggactgcagaggtgggcctgtggctgccagcgggtggggccagggctacagggacggggccgaagctgctgtggggcaggaccatggctatagggctattgctggctggctgtctggttcagtcctgcttcagctgaggcttctgcccatggcacttgagcagctaccgtgtgcagccctggtggggtggggggcgggggtcaggagcccttgttctgaaagtccagtccctggcctccagggctggcagtgtagccctcgtccagacccagcaagtgcagactggatgagctgttgagggtgaccctccctgccctcatgcccaaaacaagtaactggggcccatgaggcagtcctgccaccagcacccaacactctgggaagaaattcctttccccactgatcaccccacccccagc

SEQ ID NO: 49000 - DNA, 1097 bp, Homo sapiens
cacggaaaagcacctgcgatacgtcggcgatgaaagaaaaaaaaaataagcttctgaagggcattatgatactgcccccttcatctttcattttagaaagaaattaaaatgtgtgggtgcagaggaggccaaggacggccgcaccctgcaccatcagcacctggcgggtccgtgctgccgtgagctcctgcgcgaggcggtcacaaatgcgtacagtgagcaggacgtgaggagaaaagttcgttttgttttgttttttaagtttttacatagaagtaatacttgttcattaaacagcaagaacaggctgggcgcggtggtcatgcctgtaatcccagcactctgggaggctgaggtggaaggatcacttgaggtcaggagttcgagaccaacctggcaaatgtggtaaaaccctgtctctactaaaaatacaaaaattagccaggcgtgctggcgggtgcctataatcgcagctacttgggaggctgaggcaggagaatctcttgaacccgggaggcagaggttgcagtgagccacgattgcgccactgcactccagcctgggtgacgtagtgagactatctcaaaaacgacaacaacaagaataaaacagcatggccagcaggcgtcgagcatccccatgagccaggccctgtacccagtcctggctctgaatcccattgccacagggaaggtggtgagagctgagatcagaggcctggagcaagttgactgggactatgtgacaccaaagctgtccttgcagcctctggggctgagaccttggaaggagacactgagcctgtgcctcgagcacctcccaggcagggccctgttcgtgtcttgaagcattttcctccaccttttcctgtctgtgtggacactttgaaagccacgcagggaacatgtcaagagaagctctctctgaatcagaagagtcacagagacaaaaccagacagacaacgaaaatgaacctcagcgaaccacacaggggtctgagtcgaagcctcacccttggcaggaccccggccccacccgccctgcagcagataggcgctgtttgttctctcctgaacgtggggcttgggcttctggct

SEQ ID NO: 49001 - DNA, 1140 bp, Homo sapiens
ggctagagaagggccaaacgtctgggcctgagttctgggcttaggtctcccctctctgtgggcgggggtacaggtgggtgggttcaggctttcctcggggagggctctcccatcgccctgtcgccctcccaggagtgcacactgaaggtccaggatggaaaatttaagctgcaagacctgctggtggtccccatgcagagggtgctcaaataccacctgctcttgaaggtgaggctctgggccccgggtgcctgcggggtcatcactgctggagtcagatgagggctggcagcttccagggggtataggttgcagcccacagacagattaagttgaatatagacaagtcagttcatgcttagctcataatcaccgctcaatgcatgtgatggccgattatcacagtaaatacacagaggaaaatgatgagtccaatcactaaagaggtcagaaaactgaaagagacagaaaagcgtcctcacaccaggaataagaaagctactgtggttggtctctgagcttcctggtggccatggcagaaatggacatggaagggcttcaggaaagccagacctgggagggaaggcggtggtttctgcccggcaccttgcgaggcccttttcccgtggaatgctggcacagcgccttgctttttgctgccttcatggcccttctcacggtcactcccttcccttatccacaaggtttgggagcgcccctgccaagaagtggggtatcccctgtggaggagtcactctctgtcctttggtgtcgggcagccaaacccagcctggctggcgggtgggggtggctttcttctgaggacttggttctgtgcacacctcctgccccaggtaggggccagggcagaggccagaacccccgagtggtaacacatgacactcttctcacccttccaggagcttctgagccattctgcggaacggcctgagaggcagcagctcaaagaagcactggaagccatgcaggtgtgtgggtaaactgaggcaggggagaagccaccgtctggcttagcccgtgttcttggactggaattgggctcattaacgagcctcagttttgactgtggacagtttcctgggacagcaggagttggggcagggcagggcagggcagtgg

SEQ ID NO: 49002 - DNA, 1298 bp, Homo sapiens
tggcacagcatgagggtgagccctgagccagtgcaggcctcggtgctcagggcctgggggcaagattctgagccctcctggggtcttctttcctggggggatgtcaggggcttctctttcctccagtgttggccctttttgggggtgggatgggaggttgagagctccagcctgcatcccagccgggacctgacctagaaccacctgggactcaggaagagcaggggcaccccctctcccagcacgccggcagccctcctgcggcccggtagcttcgggaaggggagagcagcctcctggccgttgaatgtgtccacgtgcagggagctgtcaggggaggggcctgttggttgcgcacctacagcctgctgggaaaaatggacgggctcactgcagccccgagctgctcattaaatctgtgtgcgtgtgtgcgtgtgtgtgcaccgtccaggcttctgatctacggggagtactgcagccacatggagcacgcccagaacacactgaaccagctcctggccagccgggaggacttcaggcagaaagtcgaggtaagtcctgccaggcgttggccctggccctggctccaaggttgcagcttgcaggccagagctcgttaggtaccagcctctctcttgcccatttgttgggaaggtggtgatgggggtgatgacgtaatggttttttgtagatttttcttttttgcattgtgttgggttggggagtgggttgggtggaggtcaccatcccaggccaggacacagtgagactccccatggagaaacgtccttgggactgaatctgactcagctgggggctctggctgacccctgatcctggcctctgctgactccagggagccccaggtgccatttgctgggaactgtgggaccacccacccctcatccatcctcaccccaggcccagggcgagtctctatcaactgggggctctgactgacccctgatcctggcctccgctgaccccagggagtcccgggtaacatttgctgggaactgtggggccacccacccctcatccatcctcaccccaggcccagggcaagtctctgtcaacatctagtgtttctcacgtgagcccctcccagcccctcctgttcccagctggagtttccaggctccatctggttagtacaccctggtttctgcgtggagcctggtgaagagccccctggctctagcagtggtggaggcagcgtggccccccagtagagatgcacgatgccccccaagtccagtcaatgaatgggggaatgccctggttcctgggagtggccc

SEQ ID NO: 49003 - DNA, 1087 bp, Homo sapiens
agaggcaggggaggtgatttgtgtcatcgctggtggcagtttctaaggcagtcgccggacctggctggggatggacctttgagatgggttagtaagaaaacctgtgagctcacaaacacccttcctgccttcatgtctgttcccaggggagcctctgtcaccagaatgtgggcccaacccgtctgacggctgcctttaccccggcttcagttctcccgcacggctgagcgacacccagatggacctctcatggtggagggcgggtggggagagaggagaggatagtgagcgagggccacagccctgccccttgctggctgtttaacctcagtttgtttgttttaatctgcacaatggccacagtgctgttaccgccaaggattctgtgaggcccaagagaataactgtttttctacaggcgctggcacacagaggggcttgcccatgggtcggtggctctttgaatgctggttggagggttcgatcagtctggtctgtcccagggccatctgccctctgccaactttgctcctctgaccggctttcatccacctcactcacgactgtagtggtgcagaaaatgaagtacccggagcaacagcttcctccgcctcctttgcccgcctgcctgcgggaggctccacaaggcaggagctgggctcacccccggcttcccctctagagaggcacagatgctttgcccacagacggacgccgtgtggcttgtgcattgcagcgtgtcctccagggaaggtgctgagggccttcctcgaatgcacacgggccctccctctctcaagtagaccttgaatggtcctccccaacccaagccttaaaaggcgacagctgatattcaaaggcgaggtttgggatgaggccgtggcacacagcgtggctggggaacccgttcctgagtaccgcagggattgctcctgccccggcttctgtccctgcctcgcctccctgcgtgctggccatggaagggggtgctctgcatttatttccgtccttctagcagtgaactttgccacccactttgagcccgggatgtgagatgtgtccttgtgcaggggtgagggcttgcagg

SEQ ID NO: 49004 - DNA, 1208 bp, Homo sapiens
catctgagcaggagcatccttgaagggagagctgcccctgagtgcgagcggggagggagattctggggccagggctctgggcgagggcttggatgtgaggctgcagctgctggctgctttagtgtggcgggtcaccagggcccaaggtctagctggcctttcctttcctttcaaggggctgcttctctgggcaagttaaatgccacacagggcctcagtttcccagtctctgaaacgaaagcatctgcccagatggtctgtgaatcccactgagcttgaggaatccacaattttatgatttaggagcctgctttgcataacactggtttcactttcctgggagttgaagtgattttcaggcttaaacaaatgtgatcgtgacacggcagggaatgtaatgtatccgcgaatgtagagctgcatgctttattgcatcataaaatgactgtgcagctttaaatgtgtcatgttagcatcattgggataattttttagggtgcataaaatgtagaaggagtttctggtgtcgaggaggtttggacgtcttctttctacatggggagtgagtgggagctgcctgctggcggcgacctgggaggggagaggccgtgcttctcccattggatcctgccctggggccttggccactctgtgctgtgccctttgtctgcaggggtacaaggagtgaggaacaaaccgctgtcctctatggcccaccctccccgccgttgtcctcaccctgcccacctctcccagaggaagtttgtttagataccatctcctgagctcatgtatgttcatcttcactctgggaggtccgcgttgtggaggacgcctgagtgtggagcccgagttgagctgggagaggctgggtttgggacaccttatgttcaccccagaggattgtttttccaaaggggacaagtttgaaagcagactccacgaaaacggccccacgagaaacaagcaaatgaatccagccctgttagacagcccccggccccaggcacatgcaaagcctgccctggtctgaaggaggccggaatgaagcccccttccccagaggaggtgttgacaggcatccccccgtccctccctggtggcccgaggctcgtgtggggatggaggggagactggagagacggaagacggggcgtttcttaaggcgggtgatggccgggacagaaaggcctttgtcccccgccccc

SEQ ID NO: 49005 - DNA, 1094 bp, Homo sapiens
atcatgagggtgccctgactttgggaaggggccttaccctgatgtgatccgtgggggatgctgtgtatgactacaggctgaggggtcccaggacgatggtactggagcttttgggtggcgcagttgccccttggtgggggccatttgctcaggttcacagaggcactgggcaggggtaaatgttcctaaacccacggggacttccgttgttggattctcagaggacacagaaattcctttgaattgaggtttttaaaaaatgtgaaatataggatagacttttttttttttttgagctggagtctcactctgtcactcaggctggagtgcagtggcgcgatctcggctcactgcaacctccgtctcccgggttcacaccattctcctgcctcagcctcctgagtagctgggattacaggcacgcaccaccacgcccggctaattttttgtattttcagtagagaaagggtttcaccatgttagccaggatggtctcgatctcctgagctggtgatctgcccacctcagcctcccaaagtgctgggattacaggtgtgagccacctcgcccggccatggatagactcttaaaattaaatattaagcacatacaaaagaatatttagaacacatttggggcataaagaatagcagtcaaaaccccggtgcccagcaccctgagtactttctagaggataactaatgcctctgaggccccaccagtccctccgccaggtgcataggctattttccagctggtgcaaagtctgtaataggcaccgtttaaaacatgtttaattgtttttaaaagtatcatttctggatacaaagactatgtgttttttgtttgtttttgtttccagaaatgatggttccttctcctttccaccagcccatgacaatacagtactgtcagtggcgtggttatactccccagcctgttttttttttgttttgttttgttttgttttttttacatattaggcaggaaagagattcatgcaacaaaaaatcagtcattttaattgctcctgcacaaaatactagacttttgatctcttctccaaatccattagacattcttccaaactggag

SEQ ID NO: 49006 - DNA, 1040 bp, Homo sapiens
tgcattccccttcagagtcgctgctagttgcctggctcgagtgagtggcatttttcattttgccgctcagctgtcttggggcctgggggcggctcccacctctcttcctgcactctgccggccccctagaagaaacttctgatattgatgttgggccccacagccctgccattgcccaatgcactggctgagaagtgcctttcctgctcgcttttgtttttccagcctcctcctggtggcaaaacctgaatgtgaagctgtgattgcacatgttttgtaattatcactactcgatggtcgcttgtcattctgaaggcaagtaccccaaatttttctgtccgtgctttccacaagaaaaaagaaaaaaaaatgaaggataacacaggctgagttagagaaagtaatttataatgatttgcttctgaatatgcagcaatagtagctgtagatttccaaggcagataggtgagtttccggggcaacatattcaaatgagtttgataatcttgccatttggctccgttgggctgcgtgtgcgtgtgtgtttccagatgtgtggtaatggctgataaggaaggtctgcggctggggccaggtctgtgcagttcctgcttactgattgctaatgacagtcggagggtcggggccagaaagctcttctgatcggcagagcctctgagagcaggctgggtcggcggatggctcatcacatggtcgccagtgtggctcagggctccaatttctttttaatttttacttatttttgagatagggtttcactgtgtcgcccaggctggagtgcagtggcatgattctagctcactgcagcttcgacctcctgggcttaagtgatcctcccacctcagcctcccgagtagccaggaccacaggtgcatgccaccacatctggttattttttttttttattttttgtagagatagagttttgttgtattgctcaggctggcctcagactcctggcttccagcaatcctcccgtctcagcctcccagagtgctgagattgcatgtgtgagccac

SEQ ID NO: 49007 - DNA, 1033 bp, Homo sapiens
gactgcccagtgcagcagtgctggtgctgtggccctgtatggtggacgagggccaaaaacaccatcatttactcaggcgaaagagtattttgtgcctagaggcccagagagggcttctgttcacaccccggtactctggggccttcttggggaggtgagcttcacggggccctcagcactgactcagcagcttggacagtagtggtgcattgagaagcttgcggggaggacggagccctggctgcacacctggcacccgacggccccgtggccggttgctgtgtcctgggagcagcgggcatgtcgtccgactccactgggagagggtgtgctgcatgcctgcatgcctgtgcccacgtgcctggtgcccacgtttgggctcggctggacacgtgctttgttgcaggggctgctttcctgcaagtgcatttgccgtcctgagcctgctcactcatcgaattccacgtggtcgtctgggagtgattccgggtgcttcctggtttgaatttcacgggaccctggaggacatgaactcagaaagtgaggcgttgatggtcgcttttattggtatattagatgcattgaggttttgaaagggaggacttgggattcttctgtgtctttttaatgtcttagagcgtctagaaatagcatttgctcttcagttctctagaggggtctcccagaagaacaaagctgtgtgtggcagagtggttccctttagaatgcggagctctgggggagagcctggcgcttgggctggagccggcccaccaggacacgggctggagccccattcgctcatctgtgatttggggcacagaatttacccggataggaagcagctcaaaatacaagctggttccacccctttcccagtaagaggattttaagtttcttggtcaacatgattttataagcttttagggatagatgaagtagttcaacatttacttaaatatttaatttgctcaatcgtttacatctttaaaaacatgaaaataacatgttcttgtaagttgcccttttttac

SEQ ID NO: 49008 - DNA, 1049 bp, Homo sapiens
gcgtggggtgggaggggcgccttcagaccctccctccactctctgggggaaggcagagaaggaaggggggtggggtgggaggggcgccttcagaccctccactctctgggggagggtggtgaaggaaggggggcatggtgggaggggtgccccaggccctccctccactctctgggggagggcggtaaaggaaagggggtggggtgggaggggcgcccccggctctccccactgtgccgtctgtgccactgcagttggactgccaatgactggcattctctttgttactttcagcctggttgtttcaaaactcattaggcttggcatttctttacaaaggctggcatggcccgagccgagcggagagtgggaattgatttacgaggatggcggtggatctaggaaatgtcagcgtcccctccagagtccataaatcagttttgattccagcgaggccttctcccatcccctaaaacatctcccagggggctttccaacgtggtggagcttaaagttagtcagccgaggagctagtctcctgggtttgctgaaccagctggattaaagagctttctcctgattctgtctccaggccaccaaggtcagctggggcgtggctgtgaggttccttctgtcttttgtatgagggacaagtgccagccaggatcggcctgggcttgaaccgtgatgggatggagtgaccggcatccgggaggggccttggggagcagtggccttcctctggtgtggcctgagggctctgagctggcctggtgggcttgttggcctgggcagggcagggcttgctgggttcgatggtctgtagggagcgaggatgaatttgaggtgctggggccgcatgtgtctgtgtgcccagcgtgggctggcaccggcagccatctccctgtcgtcactgctcttggcaacatgtttggggccttggctgaaggaggtatggacaagagagtgtggacaccagagggccacaccaggtccttgtccctccccccgccgccggccagccaggctgaggcaggcctgagggggcc

SEQ ID NO: 49009 - DNA, 1041 bp, Homo sapiens
taaaggggaggatggcactctctcaggcaggctaggacagggagtgaggcccagagggggtaggcaaagtcccaactgcatggcctctgtgggatgggcagggcccctctgtgctgtgttgacattttcagtggcataagttttccctttggaggttatgcgtctttgtgacttactagaaacgataaacaaataaaacccttctagccaaaaaaaaaaaaaaagaaagagttttctgtttttctcatgatgggttcccagctctctgttaagtcaaaaaatattcagcttgacattccaccattagagaatcattcctttgacttgagagtttgtccctgtcggcgtaggtaatccattgggctccaccattgccttttgagtgctgagtttgtcacctcctctcctgaaaatgggttcacatcaggaacaggtaaagaacttggcccctggaagaggaggacggggatagggcccctcagggaagggagatgatttagtgagctctagggctaggctgtcataggcctctgggtggggagcaggtctggggcctgctgggtgggcttttgtgcaaagagatttgcagtagagaaagaggaaaacccagggtgggatgtacaggggacaggaccccgtgagagtggcaacctcgtccttattagtccttgctgagtgttcccaaagctccgggtttctttgtatgtgtctcatttaatcctcacatttgatggacggggacgctgaggcttagagggggttgggtgagtggccatgggtcacacagacaatggcagagccgggacattctcttcaactctgccatgccagcatcttccttcacaccccttgacctaaacagtcccaacatctgcattcagaaggtacttaattaatgctttttgcatggctggaggcatccggggtgtcctttgcaggggaaccgacaaagttgtgctggtcctggaggcccagccgtgagcctctagccaactctttcttccagctcagcttctgggatcaatacacaggcactcccgg

SEQ ID NO: 49010 - DNA, 1035 bp, Homo sapiens
tgggcttcccagatccccagcagcaagggcagtggcgaaacatgcagattccttggccactctgcccctggggactttggggctggagccctgggtgatccttttgattctcaatctttaaaaaacattactgtgaccaggtacagtggctcatgcctgtaatcccagcactttgggaagccgaggcaggtggattgcctgagctcaggagtttaagaccagcttggacaacgtggtgaaaccccgtctgtactaaaaatacaaaaaattagcaggatgtagtggcacccacctgtaatcccagctacttgggaagctgaggcagaagaattgcttgagcccgggaggcggaggttgcagtgtcccaagattgtgccactgcactccagtctgggcaacagagcgagaccctgtctccggtggggggaagaaaaaattattgtgataaaataacataagagttaccattttaaagtgtgcatttcagcagcatcgaacagattcccagtgttgtacaaccatcccctctgtcttgttctggaattttttcatcaccctgaaacaaaatcccatttcctcttgccccatccaccagttcctggtaactactaatgcattttctgtttctgtggatttgcctgttctggacatttcatataagtggaatcctacaatatgtggcctttagcgtcggcttcttgcactgagcgtgaagtttcaggtttcacctgcgctgtggaagccgccagtgggtcattcctttttgtgactgaatcatattttactgtttggatcgaccacagcttgtccatctatgcacctgttggtggacactgggctgttttcaccttcggctcctgtgaatattcatggtcatttagtcctgagccctctggcccataggccccctcccttccagggctcaggagaccatcaccatgaggatcccaggagctgacattgccccttggaccctgaaggctgttcctcttgagggaagagctggtggtgactggcctcctagtggacgtgttc

SEQ ID NO: 49011 - DNA, 1103 bp, Homo sapiens
gtgtgtggccaagacctcaagagcagtgtttcagtgaatgccaggccccacgggccacctagcacatggatatccagttttcccagccctatttgttgaaaagactgccccgtggaatcgggacaagagcctctgggctgagcctctgctgtgttctctgaccgtgggtggcctcccatctcttccctgtgcctactacatcagtggaggtaggagcctaattgaagacttggttaatcctgatcgattggtagtggctgactggagggctcagctgagaagggtcccgaggctcagccattgattagcgttgtctgccgtgggtgtggtatgagagcatgggtacatgtgccaggggtttcccactcctgggctagctggtctcaggtttcgtgtccccagaaagaggagagagcacaatagctgaggggtgctttccagaagcctgccttgttcttgccaccactggtaaggtaggtcctgataagagcatgtgtagggggggactcagcctgagtaaagcaaggactggatgctgggtgggcacctgcagaagtgctgcgggtgtctgtgacaggctgcccggtgtttgcagaattgcattgatttttctgagatggctgaggtttggggagttgctatagttgtggccagggctggtgctgggcctccccatccctccacagtggggctgttgccaggagggtggtcctctctgcttctgtgtgctctgcttagctcagctggtgccaggacatgcagcctcagatgatcggagcctgggaagacagggagccaggggccactgcctactgtgcagagtgacagggactttggtgggcagaggtgtgttagacagttgagctagtcaaggagggcttcctggaggaggtgctggggttcgagatgtgagctgcagttcaccaggtgaaggtggtggtatgggaggtctcaggggcagcatgtgcaaaggtccagaggctggtggcggtggcctggcctgctcaggtttagaagggaggtctgcttggagtaggagactgggaggggcaggagctagggcagtgccagagagccctaccagagagatttggggtgctatc

SEQ ID NO: 49012 - DNA, 1078 bp, Homo sapiens
cctgccaggtggtccactgcacctgccttctggtgcctcctctcatccaggctcggtggagccaggcgggccctggaggaggcaggcgggtgagagcaaagcttccgtcagacctggacgcgagttggactctgtagatacttggtctcgttgagcctttgtttctgcagggatcaaatgaagcttgagactgtccccttggaggtgttgctgtaaaggactcggtgaaaaaatgaacggcaggtcctagtcatttttattagcattttcttcctcttcactcaccccgcaagttccagtaggaactaaaggatccagaaggtttattccggaagtgtttctcttctggctgctttcctggtatttttttcaaagggttgcattaaagagattaggttttggctcaaataagttgtgtccggcttcctgtgctgcccggggtgggcgtgctggggccgagttatggccgagcgtgaagggtgagtccgcagcccttgctgatgggagccgttggccctgctccccgccacggcctgtagatcctttcctgttttcctctgtgccctgtgtctgggcggtttgtccagttgcccagctgggaaggagtgtggagaagcccatgggtcgccagctctggcggcttcttccaggggctggtttgccccagcttggaatccggtcgggcatttggagggaggattctggtgaggctgcggggtttctgtggcttgcttctgagattctggtccctggactctgcagatcatgatagttccgaccgtagggactctgatctcattgcgagctgggactgagcacaggtctgcgggagggaaggaaggcaccccggcagcgcactgactgtttaccatgtgccgtggtgtcgcctgtgttatccccacctaagcaactggtgcacggtaacatggctgtgagtttcttgggtcctcaaaccctcgctgtcctccctccccaggtgcctggtcatggcattgtcattgggatccgtccagctccttcgcggggccctgggcaggtggctttccctgagcctgatgtcctctcctgtgacgtgagg

SEQ ID NO: 49013 - DNA, 1062 bp, Homo sapiens
ctaaagtgctgggattacaggcgtgagctgctgcgcccagccggactagccacatttgagtgtttggtgggcacaggtgtctagtggctgccctattggacggtagatggatagaacgttcctgtcattccagaaagttctgttggaggactgtaccagattaatggagactgaagaggcatggcagcagaaactgtgtgtgatcccatattggaacctgggccagtttttttttttttttcttttagctataaggacattttggttgtcctttatatattagggaaatgcaagtaaggtctatagataagataaccgtgtggtgtccatgttaatttcctggttttgctgtaggtactgtgattatggaagaggatgtccttgttcttaggaattacacactcaggtatttagggataaaggagtgtcattactgtagttaatctcgagtgttcagaaacacacacacacacacacacacacacacacacacacgcacgtggacagagagggactctaggataaaacagatgagtctgttgtctatgaacagcagccgacccctgccaggatgggaggagtggcctgaggcagaaggggctggggtgagcactgcctgctgtgaggcagggtgaggggtcagcaggggcgtatgtcctggctgggggaccctccgctcccagggcgttctcagtgctgcttggtttacgctcttaggctctgattctgacgtgcactatgtctaagtctgtccatttgtctaaatttccagtgagcagggacaggctctctgaactgctcttggagctgggcagtttgtccataggggacggttattgatgaggatgacaatcctgggctcttattgggctgtgtgtgccacaccctcccctcgcgaatccccgtgctgagctggattggggggctgatggctcccacaccccagtgcccactctggtcatcagggcacatgattaatcccgtgaggcaggtggcggtagaaaaccaggcctggcataaccactcaccctggtctccctgctggagtcagcagacaggatt

SEQ ID NO: 49014 - DNA, 1050 bp, Homo sapiens
gagctcttagcccagtgcctggccttctggaaaacctggcggccgtggagcgcctataatcactgtgagtcagcgcaccgagacgcgtagccagtcttggccggaagggcctggagctctgtgccagagcctcactgtgcacatgaggagacttgcccgagctctcctgggaggagggagcagcgagggtcacctcccataaaggtcagcccggccccacgctcctcctgcatggtccagctggggcccaggagtcagcccctgagacagtgtggcacctgccttgacgacgcaggccttgtgctgccgtccttggcgagacaggactttcttgcatccccttaggcgggggcctgctgcccttttgcatcccggccactccatttgcccctgaatcctgggcctacccatgagctcactgcttggagcttggttgtctgtctgtgcagtgggccagtgcacacctcacaggctctgcaggtggtgagtgagttggctgttgtgcacgtcagcatcctccctgcctgtggtcattgtcaggctctgctattactccatcaccattgcccaggggtcgatggccaagccacctgtgttcaaactgcagctccccagctgaggcctgctggctatgtgactcaggcaagtggatttgcctcccccggcttagtttccccttttgtacccctctcaggtcatgccggctagatgccagctctggagggcgaggcaggcctgtcctgtttcccactccagcactgccggtgacccgttgccagtaaggggcagtggaagggcccacataggctgaagggcgcccctgctctcggtgggctgccgtgggttctgcagggcagagaggcctgtccctgccattgtgtccccatcacaatagattgtttcagagaccctaaagagacgtgactgtcctgtgagcatgtgagcttggccggtgaagcttgccatccaggatgccctcgggcctcacctgtggctcagacctgggctcctggctctggggtcttggctctccggccctgcgccgcctct

SEQ ID NO: 49015 - DNA, 1033 bp, Homo sapiens
tggctggcccagctgttggcctggcagcagggaatccccctcccgctccctcgccccctggtgctctgcccaccagccgaggggcctggtgctggttcgcctggaatttccagaaagtacagcttctcagttgatcttcgcattttctgacttctcaggaactaactggctgcgtgctttttatacattcccaggactccctcctccctaacccaacccaaagctgagataactttttaagaaattctaaaagtaatgtctactcgttggaaaaaaaacaaaacgaaacaaaacaaagcaaaagaagaaacaactcagaaaggtagaaagacagagtaccctagacaccctttccccaccaggcccccagacccgctgggcccaaccccacagctgagaaccagagaccctccccaggggcttgggctgagggtcacagggtagggaggggctgcagggcccaggggaggctgggtagacgaggggatcatggcacctctggagatcatcgagttcctgacttgcagacctgtttttaattgtcagaacccccttccctccctctctccctgtgaaccagtgaggaagctccctccttctcaggaatccagggaattcattcagagccactgggttggggaaactgaggctccaggagggtcagcgacttgtccagcgtcacctgggaagctgtgctttgtgcctcctggccccgtgggctccaggtcttgactctgcgagtaagcagggaaggagcagatgggcagtgaggtgctggctgcccgtctgagagctccccggagcgggggcctccagcaggggccgtgcctttgtgctgagcggaagcggcaggaactgagcttcacggagcagcctgagctggagggtttagagggctcccctcgggctgggggaggccagagctgtggggaggagtggggaggagtaggagtgggagtggagtgcaagtgggggggtggggaggaacgtggggggggcgttggggggagtgggaagcagcgtggggggagtg

SEQ ID NO: 49016 - DNA, 1027 bp, Homo sapiens
tgagtagctggtactacaggtgcacaccaccacatccggctaatttttgtatttttagtaggagatggggtttcaccacgttgggcgggctggtctcaaactcctggcctcaagtgatccaccagcctaggcctcctaaagtgctgggattataggtgtgagccactgcacccggcccatatgatatttagctttctgtgtctggcttttttcacttaacaatgacctctagttccatccacattgctgcaatgacaggattttattctttttcatggctgaatagtattctattgtgtatatatgtcacattttctttatccattcattcactgatatttaggttgattgtgaatagtgctacggtaaaggtgggagtgcagatatatctcaaacactgatttcctttcttttgtttacatgcctggtggtaggattgctggatcaggcagatctctttttagttttttgaggaccctctgtactgtttcctatagtggctgtattagtctacgttctgaccagcagtgtactagtgttcccctttctccacatccttgccagcatctgttgatttcttgttgataatagctattataactggggtgagatggtatctcgttgtggttttggcttgcattcctgtgatgattagtgatgttgagcattttttcacatgcccgttggccatttgtatgtcttttgagaaatgtcttaataacagattatttacccgtttaaaaatcagattattattattatcattactatttgctttttttttttttttttgagacaaagtcttgctcagtcacctaggctggagtgcagtggtgcaatcttggcttactgccacctctgcctcctgggttcaagcaattctcctgcctcagcctcccaagtagctgggattgcaggcgcccgccaccaagcccaactgattttttgtatttttagtagagacagggtttacggtgttggccaggctggtctcaaactcttgacctcaagtgatctgcccgccacg

SEQ ID NO: 49017 - DNA, 1151 bp, Homo sapiens
cagcgaactcccctgccctgaccccctcagctctgatgagcccccttcttcaccggggccagccccaggctcaggtgcccggtttttggtcccctgaagcttcgtgttctgaaggactctttgcctggagctggggacgctgtttggcttctgaatccaaaagataaacaagaatgacaaatacaggaccgtggaggggacaggactgggcagtgggagcttgaactttgggccagactgagcggctgcgcccctgagttaggtctcctgctgcctggcagctgcaggttttgcaatcctgatgctgctggaaacagtgtttctgttttgtggggttcatctgtcagtctttacagagtttgtgtaaggatgaagacaaatcattctcacagacctactccttgtcccctaggccagcttggccctgaagtcatcagtatttctgttggtttgttttgtacttttgggttcaaaggcagcgcgaacacgcggtatctttccgtgacccgccaggtgcttgcgggctgtggccttcccaggattggggagcccgtctccaagtttcctcaaggcctcccagccctgtgttctttgaaatctgcataggggtggggagggggtgcctgcctgtcttctgttgttaaggactttaaaaaatgctgtgttggctgcctccagggtcatccttccacagggggatcctttctgcagtggctggagtaggagagggtcccccagcctgcaatggaggaggtggcagtgagatcctcctagtggaccctgggaccagcatcctctggccggcgggccagggagggcagtttccccagccctgcccagccctgcctgtcctggcctcaccctcgaacaccgtgtgcctccccgctcctggtcttgaatgtgtgtccagttttcagccacatttctgggatcatcacatttgtctcatacacgtaggacatctccagaggcagggggcgtgggagctgcgtgccctagggcaggtggacgcatacacgtaggacatctccagaggcagggggcgtgggagctgcgtgccccagggcaggtggacgccccatcccctttgccagctgaggggcagaggcctgaggtactgagccacctggacttggcgtggccttcctgac

SEQ ID NO: 49018 - DNA, 1026 bp, Homo sapiens
ggcttagcaggagccctcagaggcctccctgggagccagcgcctcttcccgcaggatgtcagtggtcaggtgcaggtggcgggggtggcggtcactgctgcagagggcttccccggatctgttctcagagccccacggggactgggaagtctggactccattttatggctggagaaactgaggagaagggtagctgttggggagcagggctgggcctcgaaccaaggtggctgcctttgatatgagttccaggggctgcccaggctgacttgctcgggcaggattccctgctgcttgcaggctggggctcagggcagaggcagggcagctgggtccgcacagaggaggcttgggaggagcccagccttgcctggtggactcgctgggtccgggggctgcccctccccagctgtggtttgggaagatgggaagaggagggggccgtggctgtggcaggtggcttggctcagctcctgcactggaagttcaagccagagacttcctggggtctctggagccattggccaggcagcaatacgaaccctgacagaggccccttgagccctgctgctggggggtggacgggtgtctaggggtcccgctgctgggccggtagaggggtgtttaggggccctgctgccggactcgtggagggcgtgtaggggcctggatggtaggaggaccagatgggtgtgtgtctgtgtggctctccgctctgattgaatcctggcactgtcccctcccaggtaggcaacgacctccagagcctcagtttccccatctctgtcatgagaacagtcatagcagtcccctcgtagccatgctgtgaggatttgctaagggcaggcacagaaggcacacccttcgcacagtgcccaggaaatgaccgtcacctggactgtggcacgtagtgccctgtgtcgctgaggctgatcttgccatccactcctctgtcccgtggagggtgggccacctttgtacggctgttgcctgcacggggacggctgcagatgctcccttaaccct

SEQ ID NO: 49019 - DNA, 1108 bp, Homo sapiens
tggtttgcccagtgtcgagacagggcccatgaccctgcccgctgaaggggtctgtctcctgtagtcactctttggacgccccaggcagagtaagcgctccagaaacgccagcagctggtgttcctgtcgctgctggtggccatgtgactggtggatgtttttgatgggcagcctttctcgcatccatcatttcctgttagtagtctgcattcatttttttcctgtctcaagtatattcagatagtcttgttgacctgattaatttcaataaatacttattaaacgactgggtcaggaagtgggtgggtcgtggcacccagtgtgatggtgtcacgctggcatggacgacatgccgccaagcgggtcaagaagcgggtgtgcgagcgcatctccctgcccatgtctccacagagaagcccggctcagcaccctcagggggcccgtccaggctcagcagcagcagctcctccgagtctgggagcagcagctccagcgggtccagctctgacagcagtgactcagaatgaactggcttcggacagaacaggacagatggatgtcgcacacgccgagactctgccgtacccctctgtggttcatattactacttctgttccatggtgtgcaggtctgcttcttaattcagtgttatgatatcttccagtttttgctttcataggtcagagatctatcttgtgtgtgcgttagacttgatgagaaggtgtgaactctgcagaaagtctcttcttcatcactgaattcagtcacttggagatgacaacttcaaatgctaacccgatgaccccagaaaaccgtgtgagattcgtaccgaagaaccttgtggaatccctttgcttaggcccaacctggtcgatagctcgagaaagaattttttccaaggaaatgtctcggatatgggtactgtatttgaaagctgttagctttgtcaacacgcattgtccttgtcatttgggccccgagctctgaccctcgtgtctgacgcggccacctctttctggaggggctgaggacagatgtgcctgcttgtggagaccaggctgggcctaagcgaagggtcatcgcagccccagcccggagcgtggagccc

SEQ ID NO: 49020 - DNA, 1059 bp, Homo sapiens
attggtaatttgtgtctttttttcttggtgaatctggatagagacataccaattttattgatctttcaaagaaacataattagatttcattgatgtttttaaaaaaaatttttacttttatttatttctgatctttactgtttcctttgcttagtttagacttggcttctttttactttttaaggtagaagattagattaccgacttgaaacctttttttaattttttattttttaaatttttttgagaaggagtctggctgtgttgcctaggctggagtgcagtggcacgatctcggctcactgcaacctccgcctccagggttcaagtgattctcctgcctcagcatccctagtagctggcattacaggtgcccgccaccgtgcctggctcatttttgtatttttagtagagacagggtttcaccatttggccaggctagtcttgaactcctgacctcaggtgatccacctgccttggcctcccaaagtgctgggattataggcgtgagccaccgcgcccagccctgcgttgtccttttttcctgaacatactcctttttctgaagtttactttgtctgaaattaatatacccacaccagctttcttttgactagtgtttgcatggtatatttttttctcacttttttccttttaacctacttagaacattatatttaaagtggcatttgtgtagacactatgtaagtggggtcttcttgtttttttaatccaacctgagcatctcttccttttagttggtgtgtttagaccatttatatttctttctttttttctttttcttgaggcagagtctcgatctgtcgcccaggctggagtgcagggacaagatcttggctcactgcagcctccgcctccctggttcaagcgattctcctgcctcagcctcccgcatagctgggactacaggtgcccgccaccacgcccggctaattttttgtatttttagtagtagagacgaggtttcaccgtggtagccaggatggtctcgacctactgacctcgtgatccacccgcctcggcctcccaaagtgctgg

SEQ ID NO: 49021 - DNA, 1102 bp, Homo sapiens
tttataaataacagcaccactgttataaatgttaatcaaaggacttgatttttggaggaaaggggagaattatgggtatgtgttctcttccagcatgcttttccttttcacgggacccagaatgtcatgttaagatgttctcagtccttgcatagactgttttgaaatccccgagcagcccatggtattattgtggatgacacaggacccataaaaggggcagagagagaaactcgttccccctgtgggtcctgctgcctttcccaccctctcgcgcacagggcctacccaaggtcctctcccaggcactgctgccattgccaccctctctgtgcactgggtcctgtgggtgatgatggcagggtggtcctggaggtcccactacatccagaggaagccgtcagaaccctggttttatactgagacctcgcttactgtgtcttgaacccaaaagaccttgcaaaggccagtcctctggagcctggtaaatactgggttgagtttaacgagggagctgagcatagaggacggaaacccaggcttgcagaccgagcagggaagctggcagctctgcccctgctcctgaaacaggtgctgttggatagacatggtgctcacgcctgtaattccagcactttgggaggcggaggtgggaggatcacttgaggccaagagtttgagacgagctgtctctacaacagattttaaaaacgagtcaggtgtggtggtgtgtccctgtagtaccagctattcaggaaagtgagatgggaggatcacctgagcccgggcgttggagactgcagtgagctgtggttgcacagcactccagcctgggcaacagaggagaccctgaggctgatggatttccatgactgagcactatttagcaattgtgcaattttatcagttgagctgtggggttagagcccaacagcaaaacgacctgacctgcatggccttcaaggctgtcggccgagcgggggcctggaccgctgctctgtgggttgggttgcctctggggacatctcctgagaggagagcctgggatatgagagcctggggtgggcttctccagagctgggtccagcctgaacagtgaagg

SEQ ID NO: 49022 - DNA, 1247 bp, Homo sapiens
aaattgttacatttataacaaggtaagaagatgcgggcctggcacgccgcttgcagtaaggattggggcgctgtgcaacgcagtgggcctgggcgctttgcagcagctcttgggcaggcccaaagcgcttcacctggctgggtgccgtggctcacacctgtaatcccagcactttgggaggccgaggtcggcggatcacttgagctcaggagttcaagaccagcctgtgcaacatggtgaaaccccgtctctactaaaaatacaaaaaaattagccaggtgtggtggcaggcacctgtaatcccagctactcggaaggctaaggcaggagaatcacttaaacccgggaggtggaggttgcagtgagccgagatcatgccactgcactccagcctgggtgacagagcaagactccatctcaaaaaaaaaaaaaaaaaaacaaaaaaaacaacacacacacacacacacacacacacacacatatattcattttgttctctcctgcgctgccaaatctgttaacaaattttaaatatttttttgagctacaactaataatgtcctttgcaagcacacagctcctttcctgacacgtgacctggactctctgtgtcttcagcccacagatgacatagtgctaatggcccaagctttagagaaaatttttctacaaaaagtggcccagatgccccaagaggaagttgaattattaccccctgctccaaagggcaaaggtcggaagccggctgcgggagcccagagcgcaggtaaagggagctggggcaggcgaggggctgggcctctctgcagaggcccacgggtggatgggctgggacgcgatcctttagccatctgagctgtttcccatctgtcgtgacgagctcgtgggtgccgggtcttggatgagtgtggcctgtgggtgatgttggaggggcagctggcccggggatacggaagacattaacgccatagctggctgcctttgagcccacgctggggaggagctcatggtctaggaggatcacctgtccctgctctccacctcccaaatcctgctcccccttccagctccagccctgaggtcacttcttccacgacgcgtggggcctgttcccctcctggggctttgtctctttagcactcatttgattctctgtgacctgagagtcactatcacctgcctggttccctggtcaagtaagaccgcgtcttgctgtcagggagcatggtggtgattagtgtcgtgag

SEQ ID NO: 49023 - DNA, 1044 bp, Homo sapiens
ggtttgatttgggatgtcatctcagaccctggggtaggggtgtgtgtaggagagacacctctaccccccgggaaaaggcttcccttgctggtttggctttctgaaatccaaaaagttgacagtcactacaggagtagaggcaggtgacacggagtggtcaggctctggcctgggggggacagggatgtaacaggggctggtccctggtgtccagacgtgatccttctgtttactttgtttctgggagctgggagaagcgaaggccatgtttgttttgggcagacatgttctgaatgtccaacactgccagccacactcccaatgttacctctgttcgtccacgtggcaccctggagtgatgcaaggtcctcctccctttgctgcggccccaggggacttgggatctaggggcacctccttttctccccagccaagggggcccatggtcacacccagttctagccactggctaggacgtcccggcccccagaatgtccttgcatgagtgaagctgtggcctgcgggaggcatgactctcatgcctgcgcatgggctgtggtgggaagcactcggtagacgacggccttgctaagctctcagcacaaaccatctcttcacagcgaggtcagctgggggtggagagccgggctgtgaatcctggtgtgccgacaccgcgggcgctccatgcctccctctcgcagggcctctgtgtcgggtgtgcagaccccaggggggccccttaccgcctttctgcatgggcctctgtgtctggtgtgtggaccccgtgggggccctgcaatcagccctttcagagtctccactggaccttgggttctggaggggccttgtggctggcggctggccctgccctgggctgcctttgtgtccttgctggccgttgagggtgggggaagcaggagcgcctcgttctttaacttcccagggtcttcttgctgtgtggccgcctgcaggttgaggagcctgggacaggaagcccagggtcttgatcctgggctgtgcctccactgccgactgctgagtgct

SEQ ID NO: 49024 - DNA, 1025 bp, Homo sapiens
gccatgcgtcactggagccttggcctgacaatcccacaaggagcaaaatgtgcaaaggggcagctgtgtgagcctgcgggtccagggtgccacccgcccccatctgcccacaccacaggacagagccctgggtatgctgaccaggccctcgctggtaccaggggctgggtaggaggcaagggtcaagcacggtggctccgtgggctgtggactcacagacagatgtgctgcatgcccacgctttgctcttagctctgcctccggtctgtcccggcaacaggcctgggggcgtcctgcagtcctcggcatttgtggttgggggtgagcagagaacatagacgaaataaccaaggggatggtctgagagctgcggccctgctggccccttgtcctggctcggcatggctgagtgggacagcagtgaggccaggcctgtctcctggggccggggtgttttgtgagtttggttcttgtcaggccggctgagaggagatggagcagacagatggatgctaggtgggcctgccgcagctttgttttaggaagtgcggagcaccagggcctgaccctgaggctgtgtccctctaagagcacggtgtctccttccctctaaagggccaggtgctgtcctcactcactgcccctctgaagagagtcccctgcctgagtcgtggctctcctgcccttcccagacccgtgggagaccctgactacgtggcggtggcctggggttgggagggcctgaccagtgtctgtggggccaacttcctcgttcccagcatgtgtggagggtcgggcctcctcacgcgcctcatgagggtcccacgggggtagagcgtcctttgagtcctctctattcgaggagtgggtagagaggcgggtagggacggagcttggaagaggtgacgggttgtggccagaaggctgtgggggcgtcatggcaggaagggaaaccttcagagaggccgctcacccagggccgtggggccatggagaagcacaggccctgggttcagaaagcagga

SEQ ID NO: 49025 - DNA, 1035 bp, Homo sapiens
agtatcactctgttgcccaggctggtgtgtaatggcatgatttcccttcactgcaacctccacctcctgggttcaagcaattctccctggctcagcctgccaagtagctgggattacaggtgcccgccaccacgcctggctattttttttaattttttttaattttttagtaaagatggggtttcgccatgttggccgggctggtcttgaactcctgacctcaggtgatccacccatctcagcctcccaaagtgctgagattacaggtgtgagccaccatgcctgaccgagagctcttttaaagagaaagtgtcactttgggccattcacctgttggtggtttaaattgtaagtcttctggccactcctgattgagctcgcagtggagccaggacctgtgcgtgtggctggaggctcggaccctgttgtgtccgtgctgttggctgtctgcgtctcgcaccagtctgtggctgttccctgagagtcagttcgcaggctgcctcctcacagggccttcggagcctggtgttgggaagatggggcgtggaacatgcccccgcccccctccttgccgcaggcccccaaggtactgagttcgtcagaagttaatccggtattgtgggagacaacttttccagccacttggaaaagtgtcccgctgagggtgcagtgatgttcaggagtcgccggctggatctttctgagtgtggcttgataaccagctgcagcattttgcaaagcacccagtggactcgggtgtgatctgcagaggcggctgctggccaggcctggagtctggggcagagggagtgccctcagtgcacctgtgaggacctgggactaagagtcggtacctgggagctgtgggactctggggcgggacggccttagcctccgtgtgagcactgaccgagatgaggcacagatgcatctgtgtgaggtgcccggcccctgcaggagtgctgagtattgtagctataacctgtcatgtggcagaaggaagaatctactataagcggctgagaggatgccctc

SEQ ID NO: 49026 - DNA, 1434 bp, Homo sapiens
gatctttaattttggttgaaagctttctgctcagaaatagatactgggatttctcccccttacattaaacttggtcattgtctgcaaaagttaaccaggaggggagactgtagtgcattggtgggcagagtaattgggctggaactgcaagaggcagcttcgtgtgtcccgtcctcccccgccctaccctgtgagaaggaacagaagaggaaaagagttttctttttaccctgctcttttgtaggcttttccccttactcttttctttaaaatggagggttttttttttttcctgggtccatgtagtatgcctggggagatcctggaatctatgcaaagttgtatggcatttttctggggaaagtagtttgttactggcttccaacggggtctaaggaaggtctgaacccctgcaaggggctggcctcgggggttagggagccctccctccgggttcttccctggcagccctgatgcagcctctcatttgcaaataaaggtctgtgtttgccgttttctctgttgaggccttgatgggtgctggtggttactgatcatgaaagataaggcacacgctgtaacaggacgggctgcaggcgagcgaggggcatttctttctgaccttccgggtagcctcagaggcccggtgcctcagcagggcaccgggtgcctggaaagactgtgggagcagctccagcctgagccctgccgttgggacatccggggaggagggatttcaaaagctttctccgagtgggcagtcactccatttttatttttgttttgtttttagaaagtagagtaattactttcctttgacaacagctcgcgcctgcttcggaagtgagtgagctttgaatgaaggacgggacttgcaaacagtgcctgccctacactccgaagtagtcatacccagaaagtgaaagtgggggtgtgcagagcgaagcagccaggcctgctgcagccggtgctaccttcctctaccctcttcctccaggctctggagatgccagccgcgggagccctgtgcaccaggcggcagtgatggccttgtgcgattcctggtgccaccaggaagtgccaccactttccctgaggcatggtggctcagggtttcccaagtggggtgattggcacaaaaccaacagctatgcccagttgtcgatgggaagagccatgttttgctgtggatacacacggtaccggggcggggtatggggaaccggggcctactcttcccagcgttgctgcctgggaggtgggggcatgcctgaagtcgtgctgcgggtctcttggttttcaaagcagttaacgcagttggtcagaggatcctcctcttgcttccttgaccggtcatcaaagtataactgacctgacggggttcctgtcctaggcaggttcctttttttttttttttctcttctcctcttgaga

SEQ ID NO: 49027 - DNA, 1027 bp, Homo sapiens
aatgatccaaatggaagcacagagaaggagaaagagagataaaccagctaaaccagcctggagctggaaacgtgtggggtgaggcccacaggccgcaggggcctgcggggtgcagagggagtgaagagatgtcagagaggggcctactgcccccacagggcccccttgttccccccgagtgggttccccagtttcccacccccactgccttcccatttcttggttaacattttctttctttttttttttagacagaggctcactagtggcacgatcttggctgattgcatcttccacctcctgggttcaagagattcttgtgccttagcttcctgagtagctaagattacaggtgtgcaccaccacgcccggctaatttttgtatttttagttgagatgaggtttcaccatgttggccaggctggtctcgaactcctgacctcaagtgatctgcccgccccggcctcccaaagtgctgggattacaggcgtgagctactgtggccggccacatttcccttctggtgcgcgtcctcctgtagctgtgggatcaggggaggtagagatgtcttgtaactgactcaagtttggctgcttgccgcaggagaagcgaggtgtggtgaaaggaaagcaacttttattcagatgctagcaggtgggagagtggccaggctcaaggctctaaggaaccatctcagctttttggactgcgtgaagggctttaggaaggagaactcggtgtgggagacatgtgggagtagggcagtggtgcaggtgtcttgagtaattgcccatccggaggtctagttggcatcatcttgaccttggtctggtggtggtggactcattgttcataactcccctagacaggaggattccacagctgggttctatgcctggtttatttaaaaatgagcccctggcatttctaagcaggcacagaatgagataagtgagcactgtggctggtgggaaagggagggaaacaggtttaaagtatgtttcaaggctgcattctgagactagga

SEQ ID NO: 49028 - DNA, 1044 bp, Homo sapiens
tgtcatgtttaaagatagagatattaaataatttgacctaaatgaaagtgtagagaagcacaagggagagaagatcctgtcaggacggtgatgactttgggggctgggagagggctgtggccatgagggtgctgtggagggggcctggagtggctggcaaagctcttggcttgcgtggtggtgacaaaaagtgtctgccctatcaaagtccatgaagcttggctgggcacggttgctcatgcctgtaataccaggctttgggaggccaaagtgggaggatcgcttgagcccaggagtttgagaccagcctgagcaacatagtgagacctcatctctacagaagatttaaaaatcagcagggcatggtgctgtgcacctgtaatctcagctactctggagactgagacaggaggatctcttgagcccaggaggtcaaggctgcagtgagctgtgattgttccactgcactccagcctgggcaatagagcaagacactgtcttaaaaaaaaaaaaaaaaaggccgggcgcagtggttcacacctgtaatcccagcactttgggaggctgaggcgggcggatcacaaggtcaggagatcgagaccatcctggccaacatggtgaaaccctgtctgtactaaaaatacaaaaattagctgggcgtggtggcgcgtgcctgtaatcccagctacttgggaggcttaggcaggagaatcgcttgaaccagggaggcagaggttgcagtgaatggagatcgcgccactgcactctagcctggcgacaaagtgatactctgtctcaaaaaaaaaaaaaagaaaaaaaaaaagatttcattaagctaaaaaaaaaaaaaaaagtctctgatggtttcctagtatggtttgaatggagccggaaacccccatagcccacccacctaccttcaagagctcatccctcacattctccctcttctgcctccccggggggtgggtgcatccactgctttccccactgcaggcgctttgcacggatttgaccttctaaaggcaacgttgcacccacagt

SEQ ID NO: 49029 - DNA, 1034 bp, Homo sapiens
agatggcagagaaagctccattcaaaatgtcctgctccaaacctgagattcttatcctgtcttagtaaaacttgtaaaaatgtgatggatacattacaatctctgtaaccgcccaaagagttcaccttgcctgctgtgtagatagcgccattttatcaagacagaggaattgcagtggagaaagaataattcatgcagagccggctgtgcaggagaccggagttttatcgttactcaaatcagtctccccgagcactgggggatgagagtttttaaggacagcgtggtgggtggggggaagccagtgagccgggagtgctgactggtcggaaatgaaatagggagtcatagctgtcttcttgcgctgagtcagttcctgggtggggcccacaagatcagatgagccagtttatcgatctgggtggtgccggctgatccatcaagtgcaggatctgcaaaatagttcaagcactggtcttaggttttacaatcgtgattttatctccgggagcagtttggggagagtcagaatcttgcagcctccagcgacatgacacctaaccgtaatttctaatcttgtggctaatttgttagtcctacaaaggcagtctagtccccaggcaagaaggggttttgttttgggaaagggctgttattctctttgtatcaaactataaactattaatataaactaaattcctcccaaggggagttcagcctacacccaggaatgcacaaggacagcttggagcttagaagcaagtggagttggttcatctctttcactggctcataattttgcaacggcggtttcatctctaccctgacaataccttttagttttcttacccactggggtcgagacttaattgaagacctcagacggacagcataacacggaacctgagaccttgatttgcggggacaggcttaaagtgtattctggagttggtgcccccaccccaggggccggctcagagggttcactttccagcctaacggcaggggaaccagaggctgccgacctggatctc

SEQ ID NO: 49030 - DNA, 1097 bp, Homo sapiens
ggacgtgcccaggggaaagtgtcggcaaaccagatccgcaacttcaggagaaggatgggctccgcgggctaggcgggtccgaaggagcacagtaggacctgcggcctgcacgatttccaaagagggtttgagaacttccgtattcaaagaggaaagagcagacagtagggaaaaatggaaagaaaaaaacgggagggtggataaaagaggccagcggttgcattcttttgaggcgttgatgagccttccctgaatccccgttttacatgggaaaggtggaagaggaacagtaaactgtgcattcatcctgtgctcagtgaacctgcatctttatggaagaacagtagaggagggagtcaaagatgcgtttgtctcccgtgagcggagggaagacttctagtcctgtctttgtcccatacctgtgcagataagctgttaatttacattttcagggtgaaattcagcagaactctgttttaggacaaagttcttggaaaagaaagaaagaaaaaagatgtgttgcctgtaatcccagcactttgggaggccgaggcaggcagatcacctgtcaggggttcgagaccagcctggccaacatggtgaaaccccatctctactaaaaatacaaaaattagccaggcgtgatggcacgcgcctgtagtcccagctacttgggaggctgaggcaggagaatcacttgaacccgggaggtggaggctgcagtgaacccagaccctgccactgcactccagcctgggcaacaagagcgaaaccccatctcaaaaaaaaaaaaaaaaagatcttggggaccacaatgtatttccttgtgagcaaacagtgaggggggccccctggggaggggagtggccttctgtctttgcatctgtctatttaggaagacactgggaggtagttttgggtgacccagttcccaagcttaactcttctttttggcatagtgagtttggggtcctgagatttttattttccttttacctctttaagctggaggagaaggaaacttctcagggattatcccagcacattatcttatcttcctaggcttgagataagacagaactgcctttgggctgcct

SEQ ID NO: 49031 - DNA, 1026 bp, Homo sapiens
gtctgggcaggtgatggttgtggaaggatgcaggaatgggaggtctcagagctgatgatcagggcagtgggtgggccttctgggccaagtgaccagtgagtcctactgctcttgttccccgagtgccagcaccatcactggaagtctgggccagtgtggtggctaagtggcaacatgatgggctgagcgagaccatgtcagctgccatccgagggaggtggccacgggcaggtggttcaggaatcacggccagcgcctgctgctcactgctctcttattagagtggtggccttcttgggctgggaggtggtggtgggggatgggggaccagactttaaggaaaaatggaggccacactgtgaaggaccctggccacaagctgccatctggcctttgggactttgtattttgagtagaatgaccatgcactcacgtactcctccactcgctcatctgttcattcatttatccatctgctcattcattcactcattcgttctggaatagggctgggtgtgctgttgggtgcggtgcagggctggagacaaggaggcaagggtcccagccaggggtggcttgcattaattcatggcatctggggggtgttgaagttcatgggcagtagagagatgtgaccgaggccgcagtgccatgggggagtggtggagagaggaggtgcggctcacgacttaaggatggaacattggaggcgagacactggagcgtgcgggcccccaggggacaggaggaggcaggagggtgtcctcagggaggaggaggcacagcctcagaagaggttgagaccaggcagccttgtccaccaccctgcagggcccgagcagggcgggtggagggtggtgagaggtgggaacaatgcatggtgcctgggcaggtgcgtaccggagactgcagcgcggagctggtgttttggtgtgtggagctgccaccgtgggctgcttcctccagacctgtcctgcctgccacatgcactgctctacagggctggtttgctgcagcaaagaactc

SEQ ID NO: 49032 - DNA, 1050 bp, Homo sapiens
aaatcagggagtgtgatgtttttgcctttgttgttctttttcaagattactggccgggcgcggtggctcacgcctgtaatcccagcactttgggaggccgaggcgggcggatcacgaggtcaggagatcgagaccatcccggctaaaacggtgaaaccccgtctctactaaaaatacaaaaaattagccgggcgtagtggcgggcgcctgtagtcccagctacttgggaggctgaggcaagagaatggcgtgaatccgggaggcggagcttgcagtgagccgagatcgcgccactgcactccagcctgggcgacagagcgagactccgtctcaaaaaaaaaaaaaaaaaaaaagattactgtggctattttgggtcttttgtggttccatacagattttaggtttgtttttctgttttggtggaaaatgccattgggattttgataggcattgcagtgaatttgtaggtcatttttggtagtatggacattttgacaatattatgtcaatccgtgaatatgggatatctttacactaattttgttgtcttcaatttctttcatcagtgttctattgttttcagtgtacagatcttttactcattggttatatttattcctaagtatttgttctttttgatgctattataaattggattgttttcttgatttcttttttagataattaattgttagtgtatagaaatgctacagttttttcatgttgattttgtatcctgcaacttgactgaattcgttgattagttctagcacttattttatggagcctttaggattttctatgtgtaggaccttggatctgcagtgagacagttttatttatttatttattttgactaatttatctgactagaatttccagtactgtgttgaataaaagaggtgagagtgggcatccttgtcttgttccagatcttagaggaaaagctttcagttttcccccactaattatggtactggctgtgggcttttcataaatggtttttattgtgaggaggtaagctccttctatacctgttctgtgtagagt

SEQ ID NO: 49033 - DNA, 1049 bp, Homo sapiens
ttttagattccacatacaagtgtgatcaagcagtatttttctttctgtgtctggcttattcactgtacataatatcttccaggtccatctgtgttgtcacaaatgacaagacttccttcttttttgaggttgagtaatattccattgtatgtctctgtatatcacaatttctttattcatctgttgacaagcagattgattctatatctgggcaattatgaaatgtgccgcagtaaacatgggagtgcacataactcttagcgacgcagatttcatttcctttggatatatacccagaagagggattgctggatcatatggtaattctgttttcagttttttgagtaacctccatactgtttttcagaatggctataccaatttgtgttcccaccaacagtatgcaaaggttcaccttttctccacattctcctcaatactcatctcttgtctttttgataatagccatcctgacaggtgtgtgatgccttattgtggttttgatttgcactccctgatgactggccatgttgagcaactcttcacatacctgttggccacctgtatgtcttctttggaaaaaaatgcctatttaagaccttagcctgctttttatttgggttatttgtatttttgcgattgagttgcgttacttatgtattttggatgttaacctcttatcagccatatagtttgtaaatagtttctcagtctgtaggctgccatctcgttttgtttgtttcctttgctttgcagaacctttttcatttggtgtagttcctgtggtttatttttgtttttgttagttgtgcttttggtgtgataaccaaatcatcaccaaggctaatgtcaaggagcttatttccctagagttttacagtttcaggccttaattaaattaattagtcttagtttaagtcttcagtccattttgagttgatttttgtatatggtgtgaaataagggtccagtttcattcttctacatctggttatccagttttcccaacaacatttattgaaggtactatcctttccccatggtgtatt

SEQ ID NO: 49034 - DNA, 1052 bp, Homo sapiens
gtagaaagtgtgtagcgaagtgtgtctgcagaacgggtagaaagtgtgtgatgatgtgtgtcttgagaatggagtagaaagtgcgtaacaatgtgtgtctatagaacagggtagaaagtgcgtggtgacgtgtgtctgcagaacggatataaagtgtgtggtgatatgtctctgaagaatgggtagaaagtgcgtggtgacgtgtgtctgtagaacagggtagaaggtacgtggcgaacgtgtggctacagaatgggtagaaactgcttgatgacgtgtgtctgtagaacggggtagaaagtgcgtgatgacatgtctgtagaatgggtggaaagtgcgtgatgacgtgtgtctgtagaacaggtggaaagtgcatgatgatgtgtgtctgtagaacgggtggaaagtgcgtgatgacgtgtgtctgtagaacgggtggaaagtgcgtgatgatgtgtgtctgtagaacgggtggaaagtgcgtgatgatgtgtgtctgtagaacgggtagaaagtgcgtgatgatgtgtgtctgtagaaggggtggaaagtgcatgatgatgtgtgtctgtagaatgggtggaaagtgcgtgatgacgtgtgtctgtagaaggggtagaaagtgcatgatgtgtgtctgtagaacaggtggaaagtgcgtgatgatgtgtgtctgtagaacgggtggaaagtgcgtgatgatgtgtgtctgtagaacgggtggaaagtgcgtgatgacatgtgtctgtagaacgggtggaaagtgcgtgatgacgtgtgtctgtagaaggggtagaaagtgcgtgatgatgtgtgtctgtacagtgggtagaaagtgcgtgatgacatgtctgtagaatgggtggaaagtgcgtgatgacgtgtgtctgtagaacgggtggaaagtgtgtgatgacgtgtgtctgtagaacgggtggaaagtgcgtgatgacgtgtgtctgtagaacgggtagaaagtgtgtgatgacgtgtctgtagaatgggtgggaagtgcgtgatgacgtgtgtctgtagaatgggtggaaagtgcg

SEQ ID NO: 49035 - DNA, 1045 bp, Homo sapiens
aacacattcttcgtccagctttgttcccttgctggcaaggagttgtgatcctttggaggagaggaggcattctggtttttggaattttcagcctttttgcactggttattcctcatctttgtggatttatctacctttggtttttgatgttggtgacctttggatggggtttttgtgtggatgtcctttttgttgatgttgatgctattcctttctgttacttttccttctaaaagccaggtccctctgctgcaggtctgctggagtttgctggaggtccactccaaaccctgtttgcctggatatcaccagcagaggttgcagaacagcaaagattgctgcctgttccttcctctggaagctttgtcccagaagggcaccctccggatgtcaaccggagctctcctgtatgaggtgtctgttgacccctgctgggaggtaaacacccagtcaggaggcacgggagtcagggacctacttgaaggcagtctgtcccttagcagagcttgagcgctgtgctgggagagccactgatctcttcagagccagcaggcggtgatgtttaagtctgctgaggctatgcccatagccaccccttcccctaggtgctctgtcccagggagatgggagttttatgtataagcccctgactagggctaatacttttctttcagagatgccctgctcagagaggaggaatctagagaggcagtctggctacagcggctttgcccagctctggagggctccacccagtttaaacttcctggcggctttgtttacactgtgagggaaaaacccacctactcaagcctcagtaatggtggacgtccctcctcccaccaagctcgagcaccccaggtcgacttcagactactgtgctggcagcgagaatttcaagccagtggatcttagcttcctgggctctgtgggggttggatccactgagctagaccacttgcctccctgacttcagcaccctttccaggggaatgaacagttctgcctcgctggcgttccaggcaccactagggtatgaaaaaaa

SEQ ID NO: 49036 - DNA, 1047 bp, Homo sapiens
ttattttattatttttttcgagacagagtctcactctgctgcccaggctggagtgcagtggcacagtctcagctcactgcaagctccacctcccgggttcacaccattctcctgcctcagcctcccaagtagctgggactacaggtgcccaccaccatgcccagctaatttttttgtattttttttttttagtagagacggggtttcaccgtgttagccaggatggtctcgatctcttgacctcatgatccacccgcctcagcctcccaaagtgctgggattacagttgtgagccaccgtgcccggcctatagtaggatgatttataatcctttgggtatatacccagtaatgggattgctgggtcaaatggtatttcagtttatagatccttgaggaatcgccacactgtcttccacaatggttgaactaattaacactcccaccagctgtgtaaaagtgttccatttctccatatcctctctagcatctgttgttgcctgactttaatgatcgccattctaactgtcatgagatggtatctcattgtggttttgattttcatttctctaatgaccagtgatgatgagctttttttcttatgtttgtcggccgcatatatgtcttcttttgagaagtgcgtccattcaaatcctttgcccactttttgatttttttttttttttttttttggtaaatttgttttaagttccttgtagattctggatattagccctttgtcagttggatagattgcaaaaattttcttcccttctgtaggttgcctgttcactctgatgatagtttcttttgctgtgcagaagctctttattttaattagatccatttgtcagttttggcttttgttgccattgcttttgctcttttagtcttgaagtctttgcccatgcctgtgtcctgaatggtactgcctaggttttcttctaggtttttatggttttaggtcttacatttaattaagtctttaatctgtcttgagttaatttttgtataaggtgtaaggaagggatccaaattcagttttccg

SEQ ID NO: 49037 - DNA, 1242 bp, Homo sapiens
cacagcaaaagttgggaaagctaacgttggcacacagatccccagcctggtcctgactcgctcaactacccaggagcacctgcttggcccagcgtcccctcatagtttcccttcatctggagtcgtttccagcctttacctctcttgactcttgatgttttcgaagagtaaggttgtgagtagtggcccttggtgtgtttgtctggagtttccttgcggtgtgtcctcccagcgtgtcacctcaggggcaaggtactgggacatctccgtattggtgactccagcttcaccccttggtgcaggtggcatgtgctggccttccccacttctaagcttgctgtttttgctttagaatgcattagtaatttgtggggagaggctttggactgtgaatacgtttctcatcagactctcacctgctggtctctccacgtgtggatggcttccagcctcagtgcatctttccattttgtcagcgtttgccccacttgcttgcttctttattcatgtgtttgtttatatccggatggcctcatggatcttactttattcaataggtcataattcattactttcattatttattttgttgcttaaattgtcccagattttagctgagtagttttgaagaataagaatgtgcagggtatgtgccctacaaataccaaattttgcttaactttgcattaccaaaaacagtgtggttttggttccggggcagtcacatggaccagatgaataaaccacatgtagaactgagaaaagagatgctttgcagggaatctggtgcctttggggtggcctcaccgagggagccgcgctggctggtcaagaacatggcggcatagacatctctatgggaaagtgccgtaaaacctcaccccacctgagccagaaataccccttcctcggagtaaagatgcaaacctgaaaagtaaaatttaagaattttgagaagataaaggcaaatacttttatgatgttcgtgtagagatggattgccaaaattataaaaagcacaaatagaaaagattgttaaatgtaaccatatcaaaatgtaaaactttcctgtgacaaaagaacatcataaacaaaatgaaatgataaactgtacccattgaaaatatttgcagcacacgtgacctgatgaaggactgtcatccagtcctttcgtaaccacaatccagaaagaattctagaatcggtaagaaaaagatgcacagcccaaggcagatatggaca

SEQ ID NO: 49038 - DNA, 1033 bp, Homo sapiens
tggcggcgtgcatgtgggaagtgcttgcaagaattctgtggaaaatggtgttcaggcctagttcacatttccagaggagcctgagcttcggggacgctcctgtaatgctagtggaagcttcctgtgatcaaaagtcaaattttagcttttctttaatatcttttattgatttttcctcgtattagaaatgacatagttatagaaaatgtagaaactatggatgaacaaaaagaataaaatgtaaattacccgtaatcttatcacctatgaaaatggttaacattttggtaaaaattctgatagtttttcttgatttgtatgtgttatataggcctacaacacagtggggagcctactgtgctttctgtcgtaagccacgtttctgcttggtacggtactgtgcagtgagtttctgctcattggccagatatctgatttcagccgttccagtgactcccctgtggcccttctgtgatctcagtgttgctggaggtcaagttgtctcctctccatctgtgcagtagtctccgtccagccacgatgatttccctcaggccacgttcctgcgaggggaatggttgttcatatttaaggactttgttttttgtttgcttgtttttttttggccaaatctgaacctaaagattgtaacattttcctttctattagtttgtgtaggtgtcttttcccatgtcttcccatatcttgggcattattaaaaattacttgcccatttgaaaggtgaaaaatagtgtctttttctatggtaaagacatagaaaaacttaattctgggtaaaattgcagattctgggtaagagcatctgtcccttactctccttctctggtgaatcacttgtttgttatctttgcccgtatttttttgggcaagagggtatgtttctttttcccctgcttggtcacgtttctcatttgctgtgcatttgtaagtgacttttcaggctgttgctggcctctgtgtttctgtggacttggcagataaatagaaggtggtctccttgtaaccagagaca

SEQ ID NO: 49039 - DNA, 1044 bp, Homo sapiens
gcaagattaagtagcgtggttcatgtcaagagtttgatgctgcctggtccaaaaatggataaaggctgattgctgctgctgctgctgtgtcgtcatggttacagtggcaccacgcctgcctggctccctcttctgtaaagaccatgggtgttcaccctctgttatcacttctgattttcatgtcagaaagaggatgctgggctccctccccgggctgatgccagccctgcccacatgctgtctccgctggtgtccccaggcactacatggtcctagcctgtgctggtttcccctcagccccattaacacactcagggctcccatgtctaccttcttactgctgttaagttaggacagtcatcctttgaggtcacggtggaggtcacgaaatgatttcagttgtctgtgttcacagagtagtctgagatgctacagttagttgcctttgtaagtacagaagacagtagaattattgaaaagcctagagccttttcacgttgttagttgctcatttaatcaatcaatcaattattttttttgacacttggtctccctgtgttgcccaggctggagtacagtggcacagtcatagttcactgcagccttgaactccttcctttgggtcttgtgtgtggcactcacctggtcatcccctccctgtcttagataacatccctgaggacctcagagaccctttctacgttgaccagtatgagcaggagcacattaagccgcctgttatcaagcttctcctgtccagcgagctgtactgccgtgtctgcagcctcatcctgaaaggggaccaggtggccgccttacagggacaccagtctgtcatccaggccctgtcccggaaagggatctatgtgatggagagtgatgacacccccgtgacagagtccgacctcagtcgcgcacccataaaaatggtgagtggtctgcggtggccgcccccaggggccatcctctggagccgtgggctctcgtgtggcgcacctggtgcatggatggtgtgaacacggtgtgcggcgaggtggtggagac

SEQ ID NO: 49040 - DNA, 1074 bp, Homo sapiens
acccttggatcttttgttattctcccgcaggtcttggaggctctgttcttcttttctccattgcagtttctgcctgttgttcagattgggtagattctcttgatctgacctcaaggtcaatgattctgtcttctgtcatctcaactattgctgagcccatccagtgagttttaaaatgtctgttactgtattttccagttcttcatttggctctcattaccagaattttctaattttgtttcaggagaatttgtgattacttgggagtgatttcatgccagttgctttaaaatccttgtcagatagttccaacatttgatttatcatggtgtttgtgccagttcatcatcctctgattaaagtcatttctgatggcttcctgatcattttgtctattttgttaggaaactctgggtactggttttattttagcagtagtcaccttgttcaggtttagcatgcaggcctgtcctacttttgtgactgtggttctggtgatagtctgaccttcctagcctttgtggtgctgttttggtcgcttgacttagcctctcccctggggcttccatgggtccccactgatgttgctcgagggcagcaggagctccttaggctgggcagcgtgctgcctctggatggacatgggagtctctgcgcacaggaccaagagcttcccaggctgggtgtttgttttacacccctgcctctgaggggtggaacatttcagcatcaccgtcaggtgcgtggagtgtggctcctgtgccggtgtccgcccctcccctcggatggcttccctcagtggggagaggagtcccgtgaccagtggggaaggagagtgcctcctaggccaggtgctggtgatggtggtcccacttgctggattcccttggtgcagggtgtgtctagtttgtgggaggggtgtctcaggtccgcctgatggggaaggagagtgcttctgggctgagggatctcttgctgatgtccctacctgctgattgttagtagggcttgggctcgcctggtgtggtaggtggaactcctactcaatccagggcagaataagtgtacctgggt

SEQ ID NO: 49041 - DNA, 1901 bp, Homo sapiens
cttatcccttggggataagaggggactgctgtacttttgagtaatttataaatgacagaaattgattgttcatggttctggaggctaagaagtccaagattaaggtgccaacagatttggtgtctggtgagggcctgttcctcatagatggcaccttctgagtgtccttatatggcagaagaggacaggctccctcaagcctccttagtctcattcatgagggtagggcccttgtgacctattcacccccgaaaggccccacctctcaccactgccacattggggattaggttgccgtgtgaattttgcaggggcagaaaacactcagaccacagcactcctcaatgatttcaaacttttaattttcaagtgttcagagattttcctgttttgtcttatgtatttcccatatgatttcattaagataacctagtttgatttcttttatacttgttaaggtttgtcttgtggcctaggatatgttctcttttagtgaatgtttcatgggcatttggaaaaaaatgagtattctgctgtaacttggtggagtgttctatcagttgtattctgctagttggttgtgttctgatttatatctttgttgattttatgtctagtaattctgtctagggggtgttgaagtccctagctatacttgtagatttgtctgttcctctttttagctgtgtcaacttttttcatgtactttgaggctttatagtttggtgcgtggactttcaggatttttaggtctttctggtagattgatccttttatcattatgtaatgtccctttttgcctctcgtaatttttctactttattaatgtagttctgctttttttaaaaaagtgtttgaatggcgtatcttttttccctccttttagtttttaacctacttaagttgttgaatttgaagtgtatttcttgtaaagagcatgtaatgatgttatgttttttaatctaccctctaccagtctgtcttttgattggtgtatttagagtgtttacatttactaataacattatattgttaacaattactatttataacgttaggacttgagtctgacattttatagtttgttttctgtttgtttcctctgtttcttgttcctgtttctcttctcttgacttcttattggttaattgaccattttttaggattttctctagatttatttatattgtttttgggtgtatctctgtataatttcttagtgactgctctgggtattacggtatacttatgtgacttacaacagtttactgatatccttattttactgttttcagtgaaatgtggaaaccttttttccatttagccgcccttgctctctccacttttaaataccactgtcttgaccatctgacagtgttaaaatttttgtcatcgtatgtaatttaaaaaactcataaggagggtagtctgttgtatttactcattactcatgtctctgcatttttcttcctggtcctccaagattccttattttcttgctctttggacagcttcctttagccattctttaaggtttgacagattattttatttttcttcaccagaaaacatctttatttcctcttcatttttttaaggatagtcttgctggatatggaatttgtggttgattgacagttcttttccttcagcacttgaaaactgtgccacttccctctggcctccatagcttcagatgagaagtctttggagctggtgttcccttgtatgtatcgtaccattcccctttggctgcttgaaaatattttgtttttagttttagaagtttagtcatgatgtgtcctggtgtggatttcgttaggtttatcttttttggagttcactcagtttcttaaaacatttcattcattcctgtcattcaacatgtttgggaagatttt

SEQ ID NO: 49042 - DNA, 1561 bp, Homo sapiens
gatcagttgagcccaggagattgagcctgcagagagccataattgtgacactgcacttcggcttgggtaacagagcaagatcctgtctcaaaaaaggttaaacttacatgagttcagttgggcattacattgtgaactgtggggcccttcgtatccttttcaggcctcctgtagcaatggaagtgtctgcatatacagagacccataatgacgggcttgaggaggctggctctctaaagggcagatgctactggcagaacaggggagtagagggagggagactcccctgagggaatctggaatgttccattagagtgaaaactgagtttgtagtctaggtgtgtgagaatcagatggaggtaagggaacgaattaagagaagcaaagacaatagggggaagtggaggggagtgcgtgatgtgcacaccgtgtgggaaaggctggtggcctcatgggggtagtggctgcagagttggaaggcgaaattagactggaaaaagtgctgaggccagagcgcagaatgctttgagtggctgattcgtagattggggatttgctctgtgggaattggggaaccactgaaggtttctgaggaggggagagatgtatgaaatctgagcttttcagagaagtccctgctaggatacaatggttaatgcccattgtaaggtataaagtgaagacttttgttttggacttttttttttttttttttaatagagacaagttctgtcagggatggtctcgaactcctgggctcaagagatcctcctgtctcggcctcccaaagttctgggattacaggtgtgagccaccgcgcccggccattttggacctttgagagaaccacttttatcgaggtgtgatttacatctggtaaagcacacatgttttaagagtgtagtttgaggaatttaaaccactgtgaccacaaccacaatcaagacagcattctcattacttcccgagtttcctttgtgcccctgcccggcaggacccacccagggcttcactgctctgctctgttattgtagatgagtttcctctgtgcatctaatctgacttctttcacttagcgtagtatttttgaaattcatgttgtgtagatcttttttgcttagtaataatattccatggtatggctagctcacgttttagaactccattcatctgttggtgattatctgggggcatttccagcttttggctattatgaatagagcttctgtgaacattcatctatgtggacagatgttttcatttatcttaaacagctgtgcttgggattactgggtgataataagatacatatgtgtaactttgtaagaaagtgcccagttgttttccaaagtgacatatttatttggccagcagcttatgtgaattccagttgctttgcatccttgccaacacttgatgatgtcagtctttttgattttagttatgtaagtaggtgggttgtatctcaccgtggtttttgtatgcatttccctgatgacttatgatgagcatttttatatgcttattggccattcgagtacctttttctatgaagtatctt

SEQ ID NO: 49043 - DNA, 1053 bp, Homo sapiens
ccctaatgccacttctctttgggtaacaaggccctctggggtaaacctgcggtggctgccgagacagtcttatccacacagtcatcgggacaaacctgaaagggtctgaagttggcctgactgcctcgtgtccacataagcgatgcgtttctacctgtcacaacctgtggctccctgaagacaagcctgggagctgcactgccccccggctctgctaactacagtcatccctgcacttcctcggctttaggatgctgaaaaccaagatctgttttagcagagctgtgaggaaagaacgtggacggacagcgtcctcagtgctgttgggagcaccctccgctagggtgcggggagcgggcccctctgcacgcaggtcactggttcctcggcctcctgccgcccccagcgagctaacggctgtgctgtcctctaggccgtcatttccctgatggagatggggttcgacgagaaagaggtgatagatgccctcagagtgaacaacaaccagcagaatgccgcggtgagtgttgggctgtggtgagtgagtgtgggctgtggtgagtgagtgtgggctgtggtaagtgtgggctgtggtgagtgagtgtgggctgtggtgagtgagtgtgggctgtggtgagtgtgggctgtggtgagtgagtgggggctgtgatgagtgagtgtgggctgagtgagtgtgggctgtggtgagtgagtgtgggctgtgagtgtgggctgtggtgagtgagtgtgtcaggctgggcgagtgctgggagcctcactcgtgagcgccccgggcgtggtggaggccgtgtgtttgcctactttcacatgcagccggctatgtggcttttaaagtgagacaattggatagatggctcaaacagtataaaaatttaaaaatacggaattctaggtttttaaaagggtgccttatatgtacatattttatggatgggtaatttgttcatttttttttttttttaatttttttggagtcagggtctcactctgtcccccaggctggagtgcagcggtgtgatcacactcactgca

SEQ ID NO: 49044 - DNA, 1050 bp, Homo sapiens
ttcttgactttttaataatcatcattctgattggcatgagatggtatctcattgtggttttgatttgcatttctctaatgatcagtgatgttgagccttgctctgtcgcccaggctggattcttcctgcctcagcctcctgagtagctgggactacaggcacacacccaccacgcccagctaatttttgtacttttagtggagacagggtttcaccatgttggccaggctcgtctcaaactcctgacctcaagcgatctgcccgcctcggcctcccaaagtgctgggattacaggtgtgagacactgcgcccggccaactgtcttcttttgagaagagtctgatcatgtcctttgcccactttttaatggggttgtttttttcttgtaaatttgtttattccatgtagattctggatattagacctttgtcaggtgaatagattgcaaaaacgttcccttctgtaggttgtctgttcactctgagggtagtttcttttgctgtgcagaagctctttagttagatcccattgagacaaatgcttttctagtctattttctcatcttttcagggtcctgttttaagtaagggtctcagttcccactccctacctcccatgggcccaaggcgcacgttctgtctgtgtgtagacatcagaccccgccctcccagggcagcccctgcgcacaccctctcccagggctagctttctgtctcttccttcttgggtttctcacttgtggatatccctttcttgtgaggttagctctgcatgtaaaagtttctctttttttttttttttttgagacagtttcactctgtcacccaggctggagtggcggtggcacaatcatggctcactgcagccttgacctcctgggctcaaatgatgctacttcagcctcctgagtagctcttacaggcacgcaccaccacacagggctaattttttattttttaaaattttgtacagatagggatctccctgtgttgcccaggctggtgttgaactcctggcctcaagtgatcctcctgccttggcctcccaaag

SEQ ID NO: 49045 - DNA, 1048 bp, Homo sapiens
gggggcggtgggcctggggaccgtggcccgagtttctgagcacacctgtaagttatcctggcttgaatccaggcgccccagtttcctctgtgttgccacattcgtcaccttttgaaaaacttgatattttacagttccttctgaccactcatccacaagccccccctgttcggcagcctctctgcggggtgggggccctgcccagagaccgggagggtcatttgccgtcgggggtgtccatgagcgaggggccgctcaggctgccagccgcctccatggcacagtctgcagggctgaagggtccctgcgcctgtgtgtgtggaccttcctcgcccgcgcctcatctccccattcttccttctctctcctgttctttgattcgggttttacttcctccttggaggtttctgtctgtctccgacatgctcagatggcagatctgctccatctgcatgctgtcgtctcgtgtggcactgatcgtttccttggggtgtgtgacattgtgctgtggcctcacctgcggagctcgtgttttccatggagttccatgtggccaggctgtagacatccacctggggtgattctgagtttgcttctgctggtgatgagtggggcccctgccccaccatgtcccgcagtgtaacccccggcttcgcagctcaggtcttccctgcacagggttccgtggagacaaatgcttttctttgtttcttttaaaatttaatttaatgttaagttctgggatacatatgcaggatgtgcaggtttgttacataggtaaacatgtgccatggtggtttgctgcacgtgtcagcccatcacctaggtatgaagcccagcatgcactagctatttttcatgatgctctccctcccccagaccccctgatgggccccggtgtgtgatgttcccctcactgtgtccatgtgttctcatttttcagctcccacttataagtgagaacatgaggggcttggttttttgttcctgtgttagtttgctgaggacagtggcttccagcttcatccatgaccctgcaaaggacgtg

SEQ ID NO: 49046 - DNA, 1060 bp, Homo sapiens
tctaggccctgtagccaggagctgttctggagggcatctccggtccatcccacggctcctcctgcctggggaggacagtgatggccgccgcagacgctgtgtggcagccatgcctccactgggggctggcagactcatgggggtggagcctcagatgattctgttttcttcagtgaagccagagagggtcttcagcttgccctgcacctgcgccagctgggccgacggtttcctcacagggcacaggctgagtatcgggccagcactgagtgaccgtcaccaggcgttcctgtccctttccactggcttcagtcccacctgcagggaggctcttggccctgccaatcccctgccttgccctcagctgatcctgctgtcttgcaagaaagcaatgtcatctcaactctcagaatcaagagttctaggacaggggagcaagtcatagatccaagtaggtttggtggacatttagagaattgatctccttttttttcaccacagttccagacagaactccggaagatactggtgtctctcatcgaggtggcgcagaagctgttagcgctgaacccagatgcagtggaattgtttaagaaggcgaatggtatgagtcaaccccgatgctgcattccagggcggttcactgccggccttggggagcgtctgcagctccacgcactgaccactgaccggaacctcagtgctttatggaagcgctgatgagggcctggggcctgcctcaccggcaactcctgttgatgtgcctgagggcgggcaggtggagctcagacagataattgctgcaaatgtttgtgctcagataaggcccctgaacctgaggctggagccctcatggccctgtcgtctccctgcagcaatgctggacgaggacgaggatgagcgtgtggacgaggctgccctgcggcagctcacggagatgggctttccggagaacagagccaccaaggcccttcagctgaaccagtgcgtggggggccacctccttcccttgccggagacacctggggcctggttttgtggggctcccaccgtgggtgac

SEQ ID NO: 49047 - DNA, 1034 bp, Homo sapiens
cgtgcggccgtcctcgagttctgcctgccgcaggaccaggtgtcttgttcttctcgatctgtcccttggtctggtggagcctgacttcctcgggtgccaggaggggaaactgtctggaggcctcgtattccagcgcagcagctgtggagggggtgccagccgtatgcagtacgtgaggcagctctgagccgctcctccctgcaccagccgcctccccttcctctgctccttgtagaaccttctgccatctggtgtgctttagtgttctggaatattccatggtgtctctgctgcaggtctttttctctttgctatgtccggcacattgactctggagattcagatgtttgagttctgggaaatttagtcctggaaaatgttctgaattggttttttgatctccttgttttcttttctctttctgtaactcttatgagttggctggtaggcgtgttttctgagggattccttgattttatcttctaagcattctgtagcctctttgatctggctgtaacatgtttaaattcctaggccagttctcctcctcagatgatgtcttctagtgttctggtgtgttcctccgtgggccgtctgtcctggctcataaacactatcctcttccctgctgactcctcactttgtgctgctttctgttgttcctttttttttttttttgagatggtgtctcactgtcactcacccaggcttgagtgcggtggtgtgatctcagctcacctcccaggttcaagtgattctcctgcctcagcctcccgggtagctgggattacaggtgtgcaccaggacaccgggcttatttttgtctttttagtagagatggggtttcaccatgttggccatgctggtctcgaactcctgaccccaagtaattcacccaccttggcctcccaaagtgctgggattacaggcatgtgtcaccttccagaggccctggatcttgatagcagcgctttgggactgggtggctggctggggcactgcgctttgggtgtggaccctgccattttgccccc

SEQ ID NO: 49048 - DNA, 3109 bp, Homo sapiens
ccctgtcttgggcacaggtggggttggagcccccatggggcccgctgggaacctggaccaagccttcctcggagatgggaggaagccgcggggtggagcaggggcaggtaggtgaggttgagctgcacttgagttccctctggagtttccttcatctgccccacacccaaatttgcactttaatttgaccatccctgggggcctggctgctgacagaagggctctctctgccctccactccaaagtgggtgcccccccacccttggccaggacagggagggagccgctggctgctgccggaggtggtggctgcacagaggacgcctgactgctgttcaggcccgcacaatgtcccgtgccccttcctcactcgtttgtaatcgccgtctgttttgttctgggtaaggaaggcaagagctatagataaaacttaaataataataatttaatgtgaatgggttctgagctctccctgcgccccgggcgggccaggccgagcattttgcactaatgtgtcccacggtgggcgtgagtcgggagtgtctgtggacgtgcgtggctgctgagcggacctgctgtgtgctccctccacgtcctgaatgtaccgtggggcgggggcggcggcccgggctcagaggggccttccagagtgccttagcatcctttgatcatttttcccaaggaaaccaattaagaaagccggacccttccctcctttgtttacaagatgactaattctagaatccggggttgtcctgtcctgtgagtgtgaccctgactcatccagaccctgtagagagagacgagccactcagtatttatgagatgtctgcacctttatccctaagcctgactattagcaatacgcatatcctatatagaatctattacagagctacgttatctccacaccttttgaggaggacagaagggactggaccgtgttggagctgccgcctggcaggtggtgggcctgggatctagccgcctctcctgccctgccttcctcttccccaaggggatgggcccaggaggcagctgggttgcatggagaggtccaggagggaccggaggtgtgacagatactgtgagcccggcgggccgcgcctggctgggtgcctcggtacttgaattctgtcttgttttccgcattgtgtctgtccacccgagttctctgtcgtcacttaactttgcattggatttggttgttgtactttgcccctgaatgtggacaaagctgtgggcaagaggtcagcaggacccgcctgggggtgccggcgttggtgactgcgggtcggggctcctagaacataggagccggctgcctggcctcctttctcctccaggaagagtcattctttggcatttgtgtttagagccaggaggaaggcggaaggtagggagggagggctggtccccctctgagggggctctagtgcctgaccctgacctgtcctcattcgacagctgaaactgttaagcgctggcccagtccccccaccccacccagccgtgtactgcctgggctcccctcaaagggaaatttttatggaaacatcttggcagcaagtggaaaaagatctatggcccatgaaccaactgaaaactccaagaaccctctgtctgcctctgccagcagcgagtcctaagcgcagaatccagagctcgtagctgtcctcagctgtaactactgtttcagaatgttgctgctgcatacttttgtcatgtcagccagccagctccgtgggtgagagtgtgcgtgtgcgcgtgtctgtgtgtgtgtgcgtgtctgtgtgtgcacgtctgtgcgtctgtgtgtgcgcgtctgtgcatgtgtgtgtctgtgcgtgtgtgcgtctgtgtgtgtgcgtctgtgtgcgcgtgtgtgtgcgcgtctgtgtgtatgtgtgcacgcgcgtctgtgtgcacgtgcgtgtctctgcacgcgtgtctgtgtatgtgtgcacgcgtgtgtctgtgtgtgtgcacgcgcgtgcacgtcaccaccggagcatttagggtttggtacaagatggttctaaaatggcaaaggtttttcgtgtttgtttgttttgtttctttggaaaaagaaaaggaaaggaaaatcatgcagaatcgcaagcattcagactggacgaccggctcgtattccgatcagtcgcttccattgttagcatcgtacacgattgtgatttttatgtcaaaagaagccaaaacttgcaatactatttttagcagacaaaaaaaagaactaagtataaaatgtataaatatttttgacttgaagatttggatggcactgggtgcaagtagagcatccatccttcggatggaatgtttggaaaaaagagacttttaaaaaggagacggttgttttaaagagtctgtttaggggttaaagtactgtaactcacgactgttaaaaaataaattttcctgtgctgtaaaggaaggtttcacagtaccactgagttagatttcagccacagatgcttagctttttttttttgtcttttttttaaggaggaagcctttgttttgttttcctgagccctcactctgtttttgtgctgttactcggtagagtcaagactgttactttttagccatggctgacattgtatcaataactaaaactgaaacattcaaaagcgaacagggaaaccgagggcttcaagcgtgctcagagccgtttcagacagtggaaatccatgacaaacaaaaggatgtgatcattaattgtaaagcgctttgtaaaattcacatttacaaaataataaagtcagttcaaacctaagtttcctggacttggcttggccctgtggggtttgggggagacacagagaagccaagcttgggctattgaaggcaggggtggccaatggtcccccaggggcaccctcaggaccccgtccctgttagcggcgtccccaggccagctgtccacacaacagggcagggatctggctgtggggttcaaggtcacctgacccatctcttgctctccccagtgttttacaagggaaggggcaggtgggtaggatgtctgcaggtactagtgtgcctgctagaggggggccctgtccggacccgcaggcaacctgccagg

SEQ ID NO: 49049 - DNA, 1857 bp, Homo sapiens
aaacgtgacctctggtcttctggctgaggccaggagagccccaggtggtcacatgggccccaggagcggccggggaggctcatccagggcatcatggttctgtggccttggggaggggcgggcctcccggcaggcaggtggctgagctcacgccgccccgtcctcacagtgtactgtcagaacttcgcccccagcttcaaggagagcgagatgaacgtgatcgccgcggacatgtgcaccaacgcccgccgcgttcgcaagcgctggctgcccaagatcaagtccatgctgccggagggcgtggagatgtaccgcacggtcatgggctccgccgccgccagcgtgcccctcgaccccgagttcccgcctgccgcggcacaggtgttcgagcaacgcatctacgccgagcggcggggcgacgccgccaccatcgtggctctgagaactgacgccgtgaatgttgacctgagtgccgccgccaaccccgccttcgacgccggcgaggaggtggacggggctggctcggtcatccaggaggtggccgcccccgagccgctgcccgccgatggccagagccccccacagccctttgagcagggcgggggcggccccagcaggccccagacgccggcggccgcggcccggaggccggagggcacctatgcagggaccttgtaagcggagctgggtggctgcgcgagggaccgagtactagagctgcttgcatgcgttactaatacaaacaaatgtgatcaagccacttacctactgaactgctactgttgcctgagaaaaatgtgatttttattctgcttgtatttaaaattgatgaaggaaacaaatgcattcattatactgtaaacaattaggccactggcagcctcctgcgaggaagttcccagggctcccttttgatattcacaaggtcagcctccaagtgtagcttccctcccccttcttggggagggtgggaggccgccaggcccctggtgcccagccctgccccttcctccctgcccttcctgctcctcctgcccggaagacgaagcaggggccggcggtggtctgtggcgagggggctgggctgtgcgtcactgacccttccttccttccccatggaacctctctggggcgacggggcagggctcaggctccagggcctaactcctcgtttttccttctttcggagactcggggccaggcccaccgggccttccacctgtgtggggtgtgtgcacgagtgtgtgtgtgtgcgtgtgtgtgcaggggtgtggtgagggggcagtgatggctgtggcccacccctcggggtggagaaaagggtactttactctgcccccacaccctgtccttgttctgcccgatccgtctcggctctgcagcccctcggtcccctgacccccagggcaccgctgaccccgcctggcctcccactgtcccgcccgggcccactgtgggacgtgcacagctgatgtagcacacgctgccctctgccgcctcagccactttgggattatgcttgtcttgttttttttaggttttgttgtaatttagatctatttcatatatggtttggaaactttcagactcaatagaacaaaaactttgggtgggatgggtgtccctgtccccagcccaccatggcttggggtgggtcatctgtggccgttagggtgcgtccccctgctcccccgcccagggccagggaccactcgtctcccactgggggaaaaagggggtcccgggtgggcgactagtacgtgtgaagctgagctcagggccggacctggggagcgggggactccgctcgggcaggaggcagcggccagggctgggccagggcgagagtcggtcctc

SEQ ID NO: 49050 - DNA, 1034 bp, Homo sapiens
tccagctcctcctccccctccacctccccccctccccctcacccatctgtgcgcctcttcggaccctatggcccgggaaggccacgagccctttttctgtttggtggctgcaggctctggggtctacatcacacgcggccagctgatgaactgccacctgtgtgcaggggtgaagcataaggtcttgctgcggaggctcctggccaccttctttgacaggtaggtcggggcaggagtgctggagggcacaatggagctgcggagggttctggctcctttagctatgagctgtctgatcgtccagggttgtggcattgaaagccctctcgcattcctgacttcagccgtggccggtcggccccaggacggtggagaggctcccagggagggagggaggggctgtctttcgtggcctttctcaaacgggcttgtggatgcaacccccacaacagaaaaatgaagagccacacttattctgttgtgctgatgggccaacagaacccttcccgaggacacagcggcttcctcagacgtccccggagtccctgaggacaaggctcaggtcaccttgcagccccatcacccggtcatcttctcagcccagacgcttttcctttgtcctgtcccttagagggtggctgggccggctcctgccactgggacacacgcagaccagccaagggtgaggccaagtggcctcccagcagggcattcgtgcgggcgggtcgcctccaggtaccctccccatcatcctcaccctgcctgcctttccggtccctccaccaggaacacgctggccaacagctgcgggactggcatccgctcgtccaccagcgaccccagccggaagccgctggacagccgggtcctgaacgctgtgaaatgtaagagcctgggggtctctcgggtgggtggggccggggctgggttcagatcccagcctgaggaggactgggtgggccgcgggggtgctcccggccacctgcagcttccgtccctgggggccgagcatggtctgattgaggggaagatga

SEQ ID NO: 49051 - DNA, 1092 bp, Homo sapiens
agtgtgaccggcaggggcctcttccttgctcacaagcccatcgaggggcctcctgccaccctggaacccagctctggccccgactcacggggcctctgaatggcccttccgggggccacgagggatgagccgtcctgtctctgccatgaacaagtctctctgcgggttctccgttaaagcccagttgtagcctggaccttgaagctcagctcctgcagagggtgagctgggggccggggaggtggaggctgcgtgaagacattgaggcacctttgcggacgagcttccactcggggcggggtgtttttagccagcagcacccggtgcacggcaaggcagaaatagaagaggcttttttggccgctctggtgctgacagtctctggctcttggggagctgggcaggggctggggaggggcgggtgttccaagcacaaacaacttctgctgtttagaaaaacatctcgagacgaggtggttgtggatggggaattatttctgttggtgaactctttatgtaaatgccacgcaccgtgcggcttctccgcgtgtgtaatcacagcaggctgcaccgggggtgggggtgtgtaattatgttttaaaataccacccgggttgttttgctgtgttccctgagcactcgggtaattctgggcttatcctgcgatgctctgccccaccgggaaatgctgcctgacccctgtagtggccgggcaggggctgtgcacccacctttgaggccccctttctggcctctgttctgttgcagcctctgcttgggtgtccctgggccttgggaagctccccttcctgggactgacaggtgcagtgcgtaccacgctcatcctgggccagtgggtccctggggagggagtgtcagggtgactccagggtgggtggtttcagaccccgcatggttctcaggagtggaacacctgctgccttcagtggggcgcccgctgtggattcaggatgtggggtcctcagaaaccaaggtttcagccccccagggctgggtggcctgcccctccctgacaggcgctgggtgcaaaggtgactctgggaccctccctgcctcctgccctcctcaggc

SEQ ID NO: 49052 - DNA, 1045 bp, Homo sapiens
gcctgcgtggtctctgatggtgtcacctgggcgagtccccgatgacacactctgccttggggacaggaacagggctcgccatctgggacatcctgccgtggtgttggcccgtgggcagggatctcggggtgttttgcctggtgaggacgtggagcacctcagaacccaatcagtaacccagggagttgagaaaagtcagggtgaggccaatgagacccggtttccctccagacctgcatggccccctccttctgacgttcgttcatttgttctttctgagcgttgttattgtggtaaagtggacgtgagaggggccgttgcagtgacttttacgtgcgtggttcggtgatgctaagcgcattcccactgttttgtgagcatcactgccatcggctccagaacttcccatcttccccagatgaacctctcatccccatgaaacggtccctccccgttcccccacccagccccggcacccaccctctgtttcccgcctctgtggacctgacgactctgggggccgcctgcgagtggagccccgggatgtgtccttctgtgtctggcagcttcctgagtgtggtgtcctccaggctcagccgccctctcgcaagctcccctggtgtcgcccggctgggagcagaagggcctggaaggtacggcgggggctccttctgggtccctgaaggccccaaccccgcgccccgggcagcatttgtccttgtgtttgcttcgccccgtgtggtccagggaggctgcccacctgcctaccctcagtagctgggccctgctgcccgggaggctgctgctccgggccctctcgtcgtgaccctggtgcaccttccctgtgtgggggcgcggttgttcacctccatgcagttagctcattgctctttatgagctgttcccagatgtcaccatgctgagaggtttggagggcaccgtcctggcacctgagtttcttcacagggctgtcgagggtgaaggtggcagttctgctacagcggccagtcctggggtgacaggaggccacgggtcccccagtacc

SEQ ID NO: 49053 - DNA, 1027 bp, Homo sapiens
ggcaggggccaggtttgatgggactgttgagctggtcgagaagcccagagggtcccactcactcggggatcccacgttctccgagagctgagcaggcccaggtgccctggcgggctgcagggtcatgccggcccctcgcgtcgggagcaagctcctgggggtgccagtgaggattctacttagtggcccccacatcttcccccgcagctgcacccatgagtgtgggcatggggactcgagagaccagcgagcccctttccatccgggtttccaggagacccagagaggccaggatatgcgtacaggtccttcctccctccctcctccccctccctcctccctccctcttccctccttccctccctcctccctccctcttccctccttcctccctccttccctccctccttcctgatgtgaatgtccctctctgccttcatttttcttcctcctggctttccctgctgggcttttctgcatttccccatgtgtcagcatccacgaaacgggctgtgtcttaacaggcacggtgtggcgtggcatggcgtggtaattggtgatggtttgccttcccagttatggcgtggcatgattaaattggtggcacctttgccctgtggcacatgagagaatggcatgccttataattgtggcctctgtgctcccaccaagtacagcgtggaagtcgtttctggtctttctggaggatgacagaggcactgccccagccagcactggtagttgatgggccctgtgtgttaggcgcatgctgtgtgccaggccctggggacactgaccagcagggtgagcccccctcactgccagaagcactggacccagaacaggctcactggccaggaggcagcgagctgggaccatggacccacccccaaagctgggtggaaggggcaacagcagggaaggcaggtctccccgagctgcagtgaccacactaaatgccacgtctgcaccagttggccccacagccggccctgggctctggccatcaggaggcacctgggcgggg

SEQ ID NO: 49054 - DNA, 1314 bp, Homo sapiens
ttgctccatctctgcctgcatgcatggctacttagtagtcagcagatatccaagggacagttccgaaattgcaccctgaggccggctctcaggatcctgggccccgaggctcccggctctgtcagccactgccgcctttaggccctgccgcctcagctgctccaccccagggctggcaggtcccagttctcaggatcgcagcccctcagggttgtagttggtcttttgataattttggtagttgtttttgatgagggagttagtctaatattggctgctccctcatatccacagtgggaatctctggggcgttttaaaagttaaatatatttatttttgcatagctaatgtgtgttcactgtcttaaagactaggaaaaggtcatagagtgaaagccattctcccctgctggtcctcacatgcacactctgtccttacacacacactctgtccttacacacactgtcctcacacacactgtccacacacacacacacacacacacacacacattctgtcctcacacacactgtcctcacacgcaccctctgtcctcacacataccctctgtcctcacacacacacactctgtcctcacacacacacactctgtcctcacacaccctctgtcctcacacacacaccttctgtcctcacacacacacactctgtcctcacacacacacactctgtcctcacacaaaccctctgtcctcacacacacgcaccctctgtcctcacacacaccctctgtcctcacacacaccctctgtcctcacacacaccctctgtcctcacacacacacactctgtcctcacacacacacactccgtcctcacacacacacacacacacacactctgtccccacacacacactgtcctcacacgcaccctctgtcctcacccacacacacacacactctggccctcactcacactctggcctcacacacacacgctgtccccacacactctgtctcccagaggaactcacagctggcacacatcccgggagcttcctccatgtctgacgcatgtgcacgtgtgtgtggggggggttgtgcatttgtgtggttgggggcatgcacgtgtgtatggcggtgggtacacacttgtgtgggtggcatcccgtgcattgcccttcatttgtccttagtgtcctggtcgtccttctcagcacacacagaccctgctagtgtcttcacagtgacccgtgccatgtgctgtgataggtgggattgattcaacctgtgcctatggctggacaagctcttgcaaaggcagggcgggccacctgctgcctcgaggatg

SEQ ID NO: 49055 - DNA, 1071 bp, Homo sapiens
agggcacagctgtttaagtgatttttgttttttttgttttttttttttttgagatggagtctcgctctgtttcccaggctggggtgcaggtggtatgatctcggctcactgcaacctccacctctcgggttcaagtgattctcctacctcagcctcctgagtagctgggataataggcgcccaccaccacacctggctaatttttctatttttagtagagatgggatttcactttgttggccaggctggtctagaactcctggcctcaggtgatccacccgccttggcctcccaagtgctgggattacaggcgtgagccaccgtgctcggcctttttaagagatttcctaatcttgtttgtgcatacccttcccaggtaggaaaaactctatactttatgggagggaaaggctcgtcctggtcctggtgatggacatgcagagaacttgcaggctcggccacaggtcaaacgtaaatctggaaaatggcccctcttcttatctcagagggaggtgtttgcttctgcaatgtacgtgacctctttcctggattgaagaacaaagatgaccaataggcacaggactcgagcccctcattggccctgcaggcatctccacaggatcagcccacagagtcagaccccagcctccagggccccctcgctggtgcgttgctcccaggtgctctgcacagcatggccgagaccagcccaggggtcccgggagctgctcatccctggtccccgccacgtaatgggaatgcggctcaaaccacacgtttgacaggagagagacagatcgacagacctggcccacaaccagacacagaaacagtcccggggtgaaagggctcaacaacaacaacgagaacaaaaattagaagaaaacagtgacggcaaagtcgggcttcttctcttggggagacacaagaagacaggcatggggttgagcacaggccatgtacctcatgtttctgggatgtcctgtgaacgtataattttatttatttacttatttagagacagggtcttgccctgttgcccagactggagtacagtggcacgatcacggc

SEQ ID NO: 49056 - DNA, 1006 bp, Homo sapiens
tcagccttccacgtagctgggactacaggtgcccgccaccacgctcggctaatttttgtattttcagtagagacagggtttcaccatgttggccagatggtctcgatctcttgacctcgtgatctgcccgccttggcttcccaaattgctgggattacaggcgtgagccaccgcgcccggcccatcgagcatcgtttaagtgcattctgtggtgttcacagaacgacaaaatcacctgcggtgttcagagaacaacaaaatcacctaatgatgcatttctcaggatatatccccgtcgttaatcaacacgtctgtattcagagttatgcaaccattaccatcgtgaattttagaacatcttcatcactccaaaaaccacaccctttagtagtcattctcatttccccatccctcccccacccccactgctcccggctctaggcaacaacaatttttttttttttttttttgagacagagtttccctcttgttgcttaggctagctcttggctgtgtgcgatcttggtgcgatcttggctcaccgcaacgtccgcctcccgggttcaagcgattctcctgcctcagcctcccgagtagccgggattacaggcatgaaccaccacgcctggctaattttgtatttttagtagagacggggtttcgacatgttgcttgccgaggctggtctcgaactcccgacctcaggtgatccgcctgccttgacctcccaaagtgctgggattccaggcttgagccactgcgtccagctaaatcttttttttttttttttaatctttttaaatgatctgttctggacattttatataaatggaatctcataatatgtgccctcttgtgaccagcattttttttcacacttagcgtaatgtttcgcttagcgtagcgctcatccgtgctctcccagtacttcattcctatcattgctgaatgacattgtatggatattccacattttacttacccattcagcccgtgatagacattt

SEQ ID NO: 49057 - DNA, 1050 bp, Homo sapiens
cgtatttgattttcttgagacttcttctttgacatatggattacttagatgtatgttatttccatttctagatttccctgttacctttgttacgatttctagtttgattccactgtggttagagaacacactgtgtaattttaagtcttgtaaagttcttgaagttttctttctggcccagaatattgtctgtcttggcatatgttccacaggcacgtgaaaagaacatatgttctgctgttgttgagtggagagttctgtaatgtcagttagatcctgctgatgttatttaactcactctatctctgctgattttctatctagttctatccttgtttagagaaggctgttgaagtctctactagaattgtgggtttgtctttagttctattggtttgtgcttcatgtattttgtagttccgttgtctggtacatggacatttaggattgctgtgtcttagtggattgatgctttaattattatgtcacgtcctactctatctctgataattttatttgctctgaaatatgctttatttgaagtaaaacaacccttgctttcttttatgtttgcataatttatctttttctattctttttattttaacctacctatatcattatatttgaagtgaggtgttttttttgttttgttttgttttgttttgttttgttttttgacagagtttcactctttcacccaggctggaatgcagtggcatagtcttggctcactgcaacctccgccttctggtttcaagcaattctcctgcctcagcctcccgagtagctgagattacaggtgcctgccaccacgcccggctaatttttgtatttttagtagagaaggggtttcaccatgttggccaggctggtctcgacctcctgacctcaggtgagatccacctggctcagcctcccacagtgctgggattacaggtgtgagccaccgcgcccagtcaatagaatacattttaaaatatgactcagctatatgctatctaaaagaaactcacctcaggctgggcacggcagttcacgcctatgatc

SEQ ID NO: 49058 - DNA, 1034 bp, Homo sapiens
tcttgctctgtcacccaggctggagtgcagcggtaagaccacagctcactgcagccttcacctcctaggctcaagcgatcctcccacctcagtctcccaagtagctgggaccacaggtgcgctccaccatgcccagctagtttatttttattttttgtacagacagagtctccctatgttgcctaggctggttttggactcttgggctcaagtgatcctcccaccccagcctcccgtgtagctgagactacaagcacgtgccaccatacccggccaattaattctttatgtagcctagatattagtcctttgttaaatgtgttcctggcatgttttttctaccagcctgtgtcttgtcttttcatcccattacctgtgtcttgtgctgagcaaaagtttttaaattttgataaagtccagtttatcagtttttttcttttatggaagaactctctgcctagccccggattctacaaatattttattctcttgtgtgtttttttctttcccctctagttttatgtttaagtctccaattcattttggggttatttatttatttatttatttgagacggagtttcactcttgttgcccaggctggagtgcaatggcatgatctaggctcaccacagcctccgcctcctgagttcaagtggttctcctgcctcagcctcccaagtagctgggattataggcatgtaccacattcagctaattttttgtatttttagtagaaacagggtttctccatgttggtcaggctggtcttgaactcctgacctcaggtgatccgcccgcctcggcatcccaaagtgctgggattacaggcataagccaccacacccagccttttttttcttttcttttcttttttgagacagagtcttgccctgttgtgcaggctggattgcagtggtgtgatcttggctcactgcaatctctgccttctgggttcaagcaattcttgtgcctcagcctctcaagtagctgggattataggtgtacaccagcacgcccggctaattttgtatt

SEQ ID NO: 49059 - DNA, 1068 bp, Homo sapiens
acccacacctggggctccccacttcctggcctgccgctttgagggagcagaagccgccattgaggacaaggtggaatcggctcatttcacgcagaaccaagagcgtcggcctggaggaggtcacgtcctctactgggcctcacgtcactgtttcgtgaggatccgattgctgttcccccagccccatacgcgacagtgagtgggggacagagctcccgggctcccagaaggaggccgtgcgagaacccattcccgccagcatcccccggccctgccgactccgcctcggctgggaaggccacgcttcctgccgctctgtgtgaggtgtagacgccgaggctgagtgatacatccccgagccccgcaggtgagctgggaacagaatgtgaccaccgacatgggccctctgggagtcacaggggatggtcgttcggaaggtccagcttcatctgtcggtgcagtttagggtgtgacttggtggaggcacggtcagtattgagtcaatgttgaaccagagataggttccttgaggaaggcaggcagccttgctgtgacagaacgaggaatggttttgacctgtccgtctgtgttaattgaagggatgatacataattttaaataacctcagaaattattaacatctttataaagaaccttaatgtttctggaatgaagaactttgttttctttttcttcttttttctttttttttttgagacggagtcttgctctgtcgcccgggctggagtgcagtggcacaacctcggctcactgcaagctccgcctcccgggttcactccattctcctgcctcagcctcccgagtagctgggactacaggcgcccaccaccatgcccggctaatttttttgtattttattagtagagacggggtttcaccgtgttagccaggatggtctggatctcctgacctcgtgatctgccctcctcggcctcccaaagtgctgggattacaggcatgagccaccgcgcctggccatgcctggctaattttttaacaaattatttgtggagactataatcttaccatctctcctggtctctcact

SEQ ID NO: 49060 - DNA, 2028 bp, Homo sapiens
ccagcactttgggaggccgaggcgggtggatcacgaggtcaggagtttgagaccagcctggctaacatggtgaaaccccgtctctactaaaaagaagtacaaaaaaacccaaaacaaaactatgattggactgatattatttacgtggttttcactcccaaaggcacacctttgcgtataaagcacaagtcagtattcatcactgattccttattcacttttcaaactactttcacttaccttttattactttataaataattttaagcacaattttgttgcccccttgcctgctccccggtgtgggggtggccagagtccttggggtcccctcgcatttcccgggtgaccacacagctgccccctgctcaggtgtcaccgcctggggaccttctcctctgtgaagggcctgttctgggctcttgcccctccctcctctgtgcgtttcccttttcttgatggatttgtagaatttgtagaattctttccatactctgaccacacgccctttgctgaagatacatatgttgcaaaggtctgtccttctcggcttgttttttctcttagtgttggtctttatttttcaatattttaatgaagcacgacttatcaacaatgtcctttgtgccctgttagggtttttgttgtttgtttgtttgttttgccaaaggccatgtttctcttctgctttttttgttttgttttgttttttgagacggagtcttgctctgtcgcccaggctggagtgcaatggcgcaatcttggctcactgcaacctccacctccgggttcaagcaattctcctgcctcagcctcccaagtggctgggactacaggcgcccgccaccacgcccagctaatttttgtttgtttttttctctgtcacccaggctggagtgtagtggcgcaatctcggctcactgcaacctccacctccgggttcaagcgattctcctgcctcagcctcccaagtggctgggactacaggcgcccgccaccacacccggctattttatttatttatttatttatttttgagacagagtctcgctctgtcgcccaggctggagtgcagtggcgcgatctcggctcactgcaggccctgcctcctgggttcacgccattctccgcctagtcccaagtagctgggactacaggcgcccgccaccacgcccggctaattttttttgtatttttagtagagaaggggtttcaccgtgttagccaggatggtctcgatctcctgacctcatgatccacccacctcagcctcccaaagtgctgagattacaggcatgagccaccaccaggccaatacattttttaaaaattgtagtcaaatatacacaacatgaaattcaccattttaaccattttttaagcgcacagttcagtggcagtaagaacattcccatggctgtcaaccctcacctctgtttgcagaacgttttcatcatccctgaccgaaactgcacccattgaacaccaactcccctccgcagtcccccagcccctggaaacctccgttctgcttcctgtctctgaactgtcctgctctgtgcccgcgtgtgagtggaaccccgtggcgttgtctgtgtgtgcctggtggctttcactcggcatagtgtctttgaggttcaccgggctggggggtgcatcagaatttcatttcatttttgtcgtggtatgggcaggaaacctggctcagagaacatttgaggaactgggtgtttagagtcactgaggagaggaggctggatagattgttgggttagttacagcacttcttcgagttccgcagggccgggaaacgctgccccttggggttctctttgctactggatggaaatcatttgcttttcttttggttgcatataggagacttaggatgtcacggggtatggggtgtcatcactactgagttgcaaatcaggcagaggccgcgaagggtgcctgtttactttatttccaagttttcgatgactgttctttgcaggatctcttcgtgaccacacgtaaccttcatgc

SEQ ID NO: 49061 - DNA, 1987 bp, Homo sapiens
agcctccgggctctgccagcccctcccattggagctgccctgcacggcgcccggcctctgggctctgccaaccccttgtttccacagtgagttcaggattgtggagggacctaccccacctggctacccagcattggcaggtggggactttgcttcagatgtttaagaaaaaaggtaaaagataaagtaattaaacttacagaaaaatgtcaagtattgtacaaagaacattttcccgaacgatttgaggtaaacctcccctgcatacctgtgtgtcttgttccagtgtgggcagagggctgcccgccacccgcctgtacccaccccctggcagccgcctcccaggcccctcctggccttacaccagcagatccagtgcagacccctcagtacagttacttgttgagtctctttaaatttaattaaaaactttttttttttttgagagtcttgctctgtcgcccaggctggagtgcagtggtgcaatcgcagcctcaaactcgggctcaggtgatctccccgcctcagcctctggagtagctgggactataggtgtggatccccacacatggctgatttaaaaaaaatttttgtgcaccaccacatctggctaattaaaaaaatttttttgggtcgggcacagtggttcacacctgtaatcccagctacacaggaggctgaggcacaagaatcacttgaaccctggaggcggaggttgcagtgagctgagatggcaccactgcactccagcctgggcgacaagagcgaaactcagtctcgccaaaaaaaaaaaaaaaaaaaaaaaaaattgtagaaatggagtcttcctatgttgcccaggctataaattcaaattttaaaaactttctgattaattatacataaaatttaccgttttagctttttcagtggaatgaagcatgcacatttttgcgctgccctcagcaccatctctagaactgtttcatctgcccaaactgaacccctttccccattagacacaaactccccatccttgccccagcccctggcaggcacctttctacttcctgtctctgtaggcctgcttccgggactgcatgtgagtggagtcccacagggggtgtcctcgtgtgactggctcatttgctccgcaccctctccccacggctcctccgggttgcagggagtggcggagcccgtcccttctccaggctgcgtgatgtatgtgtgtgtgtgcgcccgccgccatttcctttgactgtcacccattggcggaccctggggccacttgcctcttggctgtctggtgctgccgctatggacgtggcgtgcgcgtctgtttgagtcttgctgtgtctctgggctcttccagcctggtgtattctgtggcctttccatggccttcgtgaccctgactccggggtctgggccagtttgacagatttgatagatggaccctcgaggtaggtttgtctgtggcctcctggtgattggcgtcttgggcagggacgtcagagataccgccttcttggacgttgccccaccagcggagaccggacattgcgtaggaggtgtctgtgtgatggatgagtctcggaagcagccctccagcaacccgcctttggtgaaggccccaggtgtgcatggggacagggctggacacaggaggggctggggcatgcagtaggggaggggttggctacccaggaccaggtctgggtgtggaggtctttgacctgggagcggggaggctgcaggttggtgagtgggtgttgagggtctcatcggaacccactgctcctggaaagacgggtcccctcctggctggatccatgtccctcagttgtccctggagccactgagtgagggacaccctcagcgagcaccaccttccctacctccccgctcttcctcaggctgtggggctgtagaggaactaggagatggggttgtggccaggtcttgggtctccccacccagtgatgcgggagaagttggggtgagg

SEQ ID NO: 49062 - DNA, 1023 bp, Homo sapiens
taccttctcactcctgggcactgcctagagtcagggggcagctgtgggccttccttggttcttctgcggcggtcttggagggagtcagcgttggccctgcctttggatcggagcagaaggaagttgtcccacatcttcctcctcccagggacccctgaggcatcccctctggccagggcccccacccaggccctgggcatctgcctcgggggctgtgcccatctcccttctaccacccagctggtgtctgtgccaagaaaggggaagtaccatctttgctgaattcttgacttttgtgctgttaaaaaatcagctttaacagagttttgctcatttaatttcatttccattgcacagctaagcgcctttgttaaattttgtatattgatactttttgttgtcagcagtttattctttttttttttggatataaatccattagggtgagagaagattaaaaagatacattacaattaaaatgttaatgaaatccgtatcacacaacttttgaaaccctttaggcattaatcttgcctgtgtcatgtccattaactttggctattcttattccacactgacccctgctgagagatttgtgctataattggatttttttttaataaaaaagaaaaaaaaaaagcttttaagaaaatagaggttgagtggtcggccgtggctcctaaatgaagagggaaagtagaagaacatgactcactctgttggggctggggtcccccattctgaatggggacaggggtcacccagggcctcccccaactgtggatgtgccaagtggtgtagaggtacatgagttgggggagcctcagaggagggagggcaccccgagggtgggttcaccttcttggggagaggcccccagcgctgggggaggggctaacaggagccccccaccaggtggggttgtggggggtgacatggaggctcaggcagagcagaacctgaagggccttgagttctctgaagtctgtaccccctacccttcgcctggaagtcaggccttcg

SEQ ID NO: 49063 - DNA, 1194 bp, Homo sapiens
gtcttccgggcaggatgtccctcgagagctgtgcttgcctctcaccaacttagaactaaccccactcccaggctgggcacggtggctcacacctgtaatcccagcactttgggaggccgaggtgggcggatcacttgaggtccggagttcgagaccagcctggccaacatggtgaaaccccgaatctactaaaaatacaaaaattagctgggcgtggtggcaggcgcctgtaatcccagctactcgggagggtgaggcaggagaatcgcttgaatctgggaggtggaggttgcagtgagccgagatctcaccactgcattccagcccgggggacagagcaagactccatctcaaaaacaaacaaacaaaaaagccaactaccccccggcccccccaatacaccccggaaaagcagccctgctgtttggaatctgaccccttaaagtccttctgtctgtcctatctgggagcctctagatgctgccaaaggctttcccaagcccagctctcacatgtttcctgcaaaggacagtggctgtcccctgagcctgacttggccaaggggctctgccgtgcctcccgggaggaggtgagtcactgcagccgcccgaccctcagccttctctggagcaggaggcagcagctgctttacagctgcataaaacattagagggaaatttaggacaaaagaggaagacgattagagcatccaatttaaaccgagggagggcatacggaacccaaaacggcactgccctaattcaggagcagagggaggcacgggctctgcaaccgctgacaagaaccaaaatactcacccagttttcttctgcaaaagagacccaaagttgcctgacaagatgcccacagatgtcccaggccctgcgggagccgacctcctccccaggggatgatgcagcccgctccgtgcccatgccagctggccaagggcacagcagatgccccaggtcaccatccttccagggacctggctcagagccatgggatgttctgttctttccgccaagactctgtgggcaccgctgtggcaggccagagcaaggctgagaagtggccgggaaggagccacatccaactgtgcaggcagctccccccagctccctccctgctctctgctctccctggaccaactggcccagcctaaggctgtgcagggactggacagcagggtct

SEQ ID NO: 49064 - DNA, 1020 bp, Homo sapiens
cacccagctggcaaatcccggggaagagcggcactccgggcgttctggcacagacggctggaagactggtgggaggtgggaggcgcccctggaagggctcctttgggccctggcggccgagtccgtggctcatcctcctggcaccagggcatctggggagcatgtccgccctctgggctgtccacagtcattgtgtctccagagcctgcagcacccgtgggcgtgttggacatcttggcaggtgctggcttctggtctgtgcccacagcctgaggcccctggggagacatgaggtggcttcccgacatgtcaggagcggtttccccccaggctctctggacaagcgtggggtcaggtgatgcccacgcacctgccgttgtcagcagtgtttcttcccctgcaggctttgaagacgacccccaggctgtgctgcagacaatgaggaggtacgttcacaccttctttgggtgtaaggaatgtggtgagcactttgaggaaatggctaaagaatccatggactcggtgaaaaccccagaccaagccatcctctggctgtggaagaagcataatatggtgaacggccgcctggcaggtgagaagcccctgggcatggggggctcagcacgggcggagggaggccctggtcctgggacagcaaggacggcacggctgccgtggggcttgtccctgagctttgcggcctcgtgccacccactgtgctgacgggatcaggacttgggtggctgagagctgccagagctgcagcctttcccaggctgcttctgtccccggctttctagatgcttctctcactccgggggctcttcgaccccgtggaaatgggtgtggctctttcttcccccatcggtacccactggtagcccgttagactctgaagatgtttttgactctggaaagcttggaacgtaattaatttttgatgaggaattttagtagtatggaaatctgttgtccaaacgtaaaccaaacctctcaaagtgctttgttttgttaaaaaaa

SEQ ID NO: 49065 - DNA, 1105 bp, Homo sapiens
ccaaaaataagatgcatgatagaataatttatagtgagcactttggatagagtttacttacaaagtgatttgtgaaaagtacaggaaatcttgaaggactggaggtgcctcagatgaatgcatgaacattgcccaggcagctttttcccccacggtgccatccagagttcagaaatctctagctggcctcatttcctttaagaaagtgtcctgctaatctgtccatcatattagtggaggacagtgtggctcttagtggtggtggccgccggccagctaattcgctggagtcgcacagctgtcgctaggcagacctgctctcctctcccggcttctccgtcttccccttagtctagttaggcttggagcttttacacttgtgctctgggcaactcctgaggccagggtattaataagttattcttaatatttttctgaagtttacttggatgtctaaaataaatttgattctggtaaattaatcatggtactttttaacctgcacgggagaaaatatattggactgagctgaagatgccggcgtttctggtctggcatcgccacctgtgagcttcagctcgggtttgaggaactcttttggtggctggtgtttctggtctggcattgccacccgtgagatttcagctcgggttttcggagctctttcggcagcctatgttttgcacagtttgtggtgcagcagctgatcagagtttctcctaaaaagacagagccctgggatcttctcagccagacgcctccccaagctgtgttgatgtcggccagcctcacggcccacacaagcccataggcagttagccccggctgccggcgcatgtgcactgccgcgcgcccttcatacagtcagtgacggcagaggggaagcccagcgggcgggcaggcggggtcagcacagctcctcgtgaggaaggcagaataaatcagcaagcccccgccagctccatgatgagtcacacaccgtgaccttgcctgtcacctggccggagcgaggccgtgggcgcaggtgggtgagctgcaggcacgggctggagaaaggcatggccgtgggcacaggctgtcctggggagaggcgcaggctagatgc

SEQ ID NO: 49066 - DNA, 1095 bp, Homo sapiens
agcctctccagtagctgggaccgcaggtgtgcgccaccaacgcccagctaattttttgtattttttttttagagacagggttttaccatgttgcccaggctggtctcaaactcctgggcttaaacgatctgcccacctcggcctcccaaagtgctgggattccaggcatgagccaccatgcccagtggagagccttcatctttcagaggcaaagcctggtgggttttgtgtagaaatgacgtgctgagatttgttgtgggacagttctgaaagtgggtggagactttggcaaaacaggattcaccttgagctgataattattgatccaagaggtagaatgtgtgggatttgttacatttttatctctattttatttgcatgttagaaattttccatagcaaaaactttagagataggaacaaaaaaatttatggttccttttagcctccccaaaatggcataggtgttccagggtttgcgggcagtgtctgggatggtgttggaaaccacttcacatgtgtctgtgcacgcatccttgccttgaaagaccctgctcagatgctgccagtactcgctggagtgagaacacgggaatgtttttgccaaacagcctggaccgtatctgattaatctgcacgtacttgcttgctgtcctgacttaagtgccggccgctgacagccgcgtctgttaccagcgctttcatccatcagggtgtcatttaattaggggcccacagccttgtccctgctccgtgatgtgcaggttcagcacaaatccgcttgttctgtgactatctgtggtaggagaggcatcgtgctgttggtggagttctctctcctagctccacatagacgctctgtgtgatgagggcctaactgatgacctagagggggcaggtgggctggtctcgcaggtggccgcagcctggagtggggactgctgggtcctgggcttcccgggagtccagtgctcaccacactgaaggtcatgctcctgcttttcagactgggccagtgccattcgcgtcgcagctctggactgcatggaagagaagaaccaggccgtgtgccatgactacgacatccacttctacc

SEQ ID NO: 49067 - DNA, 1036 bp, Homo sapiens
ggtgctcaaagtgaacccacaacttagaagtccaaatactctggagacttctctataataccccaaaacaacctataaagcaatttttttaactctacaaagaatttcattggtgggctccttgatcacagatgcacagcctttgagaaatctttcaccaaactgctggtagtgttccgcactttattgtttagtgctttcatctggtcgcacgttgttaaccagtcacgaagttactcgcctgctctacaggttagagttggcgtgggagggggcattcacaacacccttcccttaaaatggtatttaaatcactgaagtaggaggtcctcccgacccagtgaggtttggcaggacttcctgtgttgtgctaacctcaaattacatgtttcagtgggcaagatctgtaacaaattgctactctttcttcctgcacctttgtttttatgccttacacccaatcctgctgtatttttctcatcgcaaacagatttgtaaagaaactttttttcaagtctaagtagggcttttgtatgttactgtaaatggttatctttaaaatgcattctcctcttagagagctggggccttttgattctaatggattcctcctctttgatctcatgttttcttatgtccctgttgacctgactcagaactgaggtcagagactggaagagatggacagaaaaactgttcagtggggtttttagacactgcttttaggaaaacaaacaagtaattcaatcacgtagggaacccttcagttcttgtgtgttattcagtggcagaaacagatatgttcattaaaatgcaggtggccctggcaggacttggtcactttttttgtgggttttggttttgatttttttttttcagttgagtcgctgaagtctaaagatcgtaccagattcaaatattgcaaattctgtaaccgaagcagcacataggcagccttgagaactgtccctggagctcagaaggaaggcccctcctgagagccacacagtaacgtccatacccagtggtgtgatga

SEQ ID NO: 49068 - DNA, 1032 bp, Homo sapiens
gagaagcatttaacccacatccttcctgctggccacccatgcctcgggccttggcaccactgtgcccctgaccataggctcattccctgcctttggggtctgggctcctccctggccgctgtgctctggtggtgccctgttcccgtgcattgctgcgtcgtctcccagcttgtaaaacgatcaccatccccaaccgcagccaccaggctggctcttcactgctggagccctggtgccctggcctggcccttggcgcatgtgggtcaggtttaccaagcagactgggcgtggccggcgctggggtggtcttggttcctgtttgtctgtcccagccctgcttggggtctggctggggtcaagggcaccccccacctggtgttcctgtgttccaggacaagcactttctcagaagcccgtggccctgctgacgagagacagcccacccccagcctgcaagagaggcagccagaggccaggtatctgctggccgctgactgaccaggtccgcagtgaacagaggcgggcctgccgactgactgtgtggcatggagcatggctgttccccaagtgcacacctgaacacttggaggaataaagttctgtttttaattgtggagctggacacaggctgttgtggttttgttgtcctgaggtaccgggcagtgtacagggaccccccacctggctggggtcaggctgctgcctagtggctgagccaccctagtgcaggcagttcgggaacaagcagggtgctgggggcccagagctggggtcctggaaggcctcccgtaccccggctgccctcctgtcagagaagcaggctttctttcgcccatttcctggaaagcatctgtggctttgtccttcaggctagccggcaccctccccagatggctgccagccctcgcgctgccctggctgacccagggggttccctggaacagatgacctggctaccccgacacggcggcagcccccaccctccactgttccttttgcatgggcctttattggcataagactagcccccat

SEQ ID NO: 49069 - DNA, 1039 bp, Homo sapiens
accattaaagaagcttggggcagcagcgggcggcgtctcggcatctaaaacgttctttgcttttcatgtcacgttcaggtatctcaggagattacatttcagcttgaaaaagggtcggtggaatttaaaagaagaggaacagttaattgaattaatagaaaaatatggtgtcggtaagttgctgacagtttgttcttctagtttcttttttttgttttttgtttcttagaaaagagatcaagataaagacagagcaagctctgtcgtccaggctggggtgcggtggtgcgaccatagcccactgcagcctcaaacttttgggctcaagccatcctcccgccccagcctcccaagtagctgggactgcaggtgtgtgccaccacacccgacgagctgagtgttctgtagcgaagtctttgcttatatttgcaatgtccccttagagtaaatcctagctgtggtattgccacgttcaaggacacaccagatactgtggctctgccctgtgagagcagcacccgtgctcctcctgctgccccacactgtgaagagcgggaatcgtgggaggtggctggtgcggaagcctggggggagcagatatgtgagggccgtggtgtgcgcttaggacgatttttccttctcagttacatgtttggcagaactttcctaaggggctgagcatccaatgagaatcagatgctgccaaattgtaggcacccaacatgcttgaccccccagcgtgagagtgcacaggaggctccactctgatggggccacggcgagtctcctggggaacagcaagcctgtcctggggaagaatctttggatgaaggcatttccatggggtttggcttttgcaggtcactgggcaaaaatagcttctgagctgccccatcggtctggctcccagtgtctgagcaagtggaagatcatgatgggggtgagccactcgctccttctttatctgaaaccagacaatggcctggtcaactggggggtccagcaggcaggaggaggggaggggaggggggcgttcggt

SEQ ID NO: 49070 - DNA, 1066 bp, Homo sapiens
cggctgtgttcagcggctgctgtgccccagtggtcccttctctgactgggttcagggtggggaggctgcagccgtacctgcagaggcttcacttgtctgcctgtcccttcctgcagaagttgcttcaagctgttgccaaatacggggagcaggattggtttaaaatccgggaagaggtgccaggtaggagcgatgcccagtgccgagatcggtgagtcgcacagcgctgagcgagggaggggcccgtgtgggtcactgaccaggtgcactctggtgtgggctgtgggcgggctgggggacagcggccagcgctgggcgagggaggggcccgtgtgggtcgctgaccaggtgcactctggtgtgggctgtgggcgcttgcttgccagggttggcccggctgagctgtgttttccaagcctgacttctgtattgctgtctgccggagcaacgcatgggctccacttgagacagctccctgggcggcttttcctgaccctagttgtctcagttctctcagaatgctgataggcaggacctctgggcacacagctgcagctccctccttttcctgcttattttcctttcaaaaacagcttcgttgagataattcacacaccatgcgatgcgttcatttaaagtgtatatttccgaagctgggcgcagtggctcacgcctgtaatcccagtactttgggaggtcaaggcaggcggatcacttgaggccaggtcaaaaccccgtctctacgaaaccccatctctactaaaagcacaaaagttacccgggcatggtgggggtggcgcctgtaatcccagctacttgggaggctgaggcaggagaatcgcttgagcctgggaggtggatgttgcagtaagctgagatcacgccacagcactccagcctgggtgacagagcaagactgtctcaaaaaaatattaattaattaattaaaatgaagtgtagaaggccaggttcagtggctcacgcctataatcccaacactttgggaggccgaggccggcggatcacctgaggttgggagtttgagaccagcctgaccaacatggag

SEQ ID NO: 49071 - DNA, 1033 bp, Homo sapiens
ccgccaggtttctatgtgttgccacctccaggctgtggccctagggaaggagcctgcccagccctctctgccactaggccattgccgcagctcctctgggccttcccagtcctccaggtctccccatgcagcggtgcatgcccagtttaccggagtttgtctcctttcttatttctagtcttcttctgtctccatcagcctcgggagtttattctgttgatgtttctaaagcgctttttcctcgtgtgagttcttgccgcttttctggtttcctgagtaaggactcagttctttactgacttgggtctcttgtcttgataacgaggcttgttaggccaccctgagagtagcttggcgtgaactcttcttctcatagatttccaaagtagctctagtttccatttttattgcctctttggacctaggtgtatctaggagtgtatgtttccgtttttaaatagttggatttctgggagttcttgtggtggttctttatctgaatttgattggaacatgaactaggggcgagatgtataaaatctccatttttcaaatatattttacttttttatggcagagcacctgattatagcagacccagctaaacttgccaaaactgtttttaagaaaaaggtatgttctctgtaagtagggcctactctatatcagctattaaattgagtttgcctttaaagatgcttaattctgccgggcacagtggctcacccctgtaatcccagcactttgggaggccgaggctggcggatcacctgaggtcgggagttcaagaccagcctggccaacatggagaaaccccgtctctactaaaaatacaaaattagccgggcgtggtggcgggcatctgtagtcccagctactcgggaggctgaggcaggagaatggcgtgaacccgggaggcggagcttgcggtgagcggacgtcgcgccactgcactccagcctgggcgacagcaagactccgtctcaaaaaaaaaaaaaataaataaataaatacaaatcggtttttcttctat

SEQ ID NO: 49072 - DNA, 1013 bp, Homo sapiens
cagcgcccaaagtcggggaaactgaggcccggcgtggcccccgtccggccgagcctgggcgcgcggggattctggccctgggagcccctcggctgggagcgggctgcgggctccgaggaggctccggcggggcggccccggctgcagggcgcccgcgtgcgtctcggggactgcgccggcgattccgcggtggccgagcctcggagggggtttccccagttcacgcagcgagcaggaggcggaactgggcctgggccgggtctgtctcccaagccagtgcctaaacgcccatcgtcctggcgcatcctggggttccctgggcccagccgagtctgggtggcgtccccgcagctggggctggagggaccgcctgctgcgctccgtcttggtgggcagccctcatgaccagcccttgggagaggggtgcggggagagggacagcccctgatgtcagtggctcagcacgtgtgactttgacctccttcctgctgatcattgctcacctgagcgacacggggagggggaggcagcagcctcgtgtgaggcttccagaggaaagcgtctccgccggcccggaggcgctgaaccagcctgcggtcgctgccagctctgcctctggccggctgttaactgagtttacaggttcacaagcatttcgggcataaacaaggggctttgtgaaggagtgaggggacctgggctgctgatgcggctaacggtgctcgcgggtggatgctttggttttgttccagttgggcagggccccagtcagcctccagcagggagagccacgccaaggacgggggagggcgtttctctttgttgttgggtgttttgggctcccgggtctgtgctagtgattcctttagattttctctgctaatgtttcattctcccactctctctctagcgtccttctcccttcagacttcctggaccacagttcctaagaaaaaagcttgacaaacatttgttagtgtcaggcactgccacgttccaggcgttgttctgga

SEQ ID NO: 49073 - DNA, 3247 bp, Homo sapiens
aggatccgacaggggctggtgacctcctggatgaggaggaggatgaggacaccggatggagtggggcctacctgccgtccgccatcgagcagactcaccccgagagggtccctgccggcacgtcgccctgcagcacatacctttcctttttctccaccccgtcggagctggcagggcctgagtctctgccctcgtgggcgttgagtgacactgattctcgcgtgtctccggcctctccggcagggagtcctagcgcagactttgcggttcatggagagtctctgggagacaggcacctgcggacgctgcagataagttacgacgcagtaagtgagcctcacggcgccctctggcacagcgcctgtccgagcggcttctcccggggagaacctggagccatcctacctcttgggtggcctggtttgatttccaggacaaggcgatttgcgtgacagcctgctatccactttccctttgactttgcttctggttacacgtgggaatagaaccggctaaagaggactggtgagctagaagctgtgaattggatgcagttgggcacttacagggctgtaccctcagtaaaggcaggctgcagtcgccagcttgctaagtattccaagaggaggaaaatttttaaaaaattataatcacctaaaaggttataagctctgaataaaaaaaaaaattttttagctgggcgccgtggctcacgcctgtaatctcagcactttgggaggccgaggtgggtggatcacctgaggtcagcagtttgagaccagcctggccaacatggtgaaaccctgtctctactgaaaatacaaaaattagctgggcgtggcggcaggcgcctgtagtcccagctacttgggaggctgaggcaggagaatcgcttgaacccgggaggcggaggttgcggtgagccgaggtcacgccactgtactccagcctaggcgacgggcgaaactctgtttcaaaaaaaagaaaaattattttcttcctgagacagtgtctcactctgttgctcatgctggagtggagtggcacgatctcggctcactgcaacctccgcctcccgagttcaagtgattctcctgcttcagccacccgagtagttaggactacaggtgcccgccaccactgctggctaatttttgtatttttagtagagacgggggtttcaccgtgttggccaggctggtctcaaactcctgaccttgtgatccgcccacctcggcctcccaaagtgctgggattacaggcgcgagccactgcccccggcctctgagtaaaattaactggcatctgtgaccacaggtctttgaaaagtgcctgcctccgtctgtggtctccctctgtagtggctgcaggtggatgctgcactgacccagcatctctgcttatcaggaggctctggagccacaccgcagaagcacacgcccttttgagccagacatgctgactttctaataaggatgttctctctccacagctgaaagatgaaaattctaagctgagaagaaagctgaatgaggttcagagcttctctgaagctcaaacagaaatgtatgtaagcttttagttaggaatgcaatccacaacatctaatacacagggaaatccgtttttaaatgataatgaagtaatcagagtcaaaccagatctgggttttattgtatataaatgttcagcatcaaacacatttctgtgttctgcctaaaagtttattttgagacagtcttgccgtgtcacccaggctcgggtgcagtggcgcaatcacggctcactgcagccttgacctccttggctccagcaatcctcccatctcagcctcctgagtagctgggaccacaggcgtttgccactgcacctggctaatttttaaatcttatttttgtagagacagggtctcactatgttgcccaggcttgtctcaaactcctcggctcaaggaatcctcctgcctcaggctcctaaagtgttgggattataggcatgagccacggcgcctggccaaggtttattttaaactttaggcaaaaagccaccaaacaccttgttggagcagcagtgctgtgagagccgctccctgcacgcctgcctggtggctacaggtccaggcctgaggctgccgctgcctcccctctgtgcctgagacccattccatcacaggctcttagcgggttttatctggctcatgaggtatctttttgtagtcctcttaaaagtagccacagaaattaacaactcgggtttttctttaacaagggtgaggacgcttgagcggaagttagaagcaaaaatgatcaaggaggaaagcgactaccacgacctggagtcggtggttcagcaggtggagcagaacctggagctgatgaccgtatgggtttcttctctgaatcggacgagctgggtggggcaggagcgctcctgagaaagtgctgttgtcctcagcagccggtgcagcctgcccttgggagcggggccatgtggctctctgggactggtgttctttgacgtcgctgtctcgctgtgcctggggatagctggcccacgagggcatccgtggggagtggggggccagagcacagacactgcacgatgagcccttcccaggggtggtctgagagtggaggcgggactgggaggggcacaggggctgtgaagggccacagccaggttgggtgccctcctgctccctgggttggggcccgtgtccggtatgaatgtgaggacatcagtgatgctttttgtggtttttcttttttgggtaacagaaacgggctgtaaaggcagaaaaccacgtcgtgaaactaaaacaggaaatcagtttgctccaggtaattaaaggaagggacttcagtgtttttctttgatttgtggagtcacataatgaattcagtaagaaagaggcgaaagactctgctggggtttcccctgagcccaagcagagaaaggacttcaaatgaggacagcagccgcttcctgtcagggcgtgaagcagagggaggccctggagctctgttgggagtttggggtctggcacggggcatccacttgtaggagtccctattgccatagagctaggtgctgagcatatactggagtgaaggggaagccattaggcccccagtcccagaggcgagcccccagttaggccagagcatgcatcttgagtgccaggcccccacgggtaagccctcgcctcgccaggtggtgactttcagccgggttgcctcggagctgc

SEQ ID NO: 49074 - DNA, 1056 bp, Homo sapiens
gaagtgctgctgggtgcccggggtgtgcaggagtgtttgtgtggttatgccaggatctgaggacattcgggggttgtcacaagacaagaggacgcgcttgccccggctgggcttcaaaatctgctgaggagccgctttcagaccacggacaccagggccagtctgcaagtcaggccatctccagggtcacaagtctgggagcttgtgttttttttaaagttttctcggctgaccgggcgcagtggcttacgcctgtaatcccagcactttgggaggccgaggcaggcggatcatgaggtcaggagattgagaccatcctggctaacagggtgaaaacccgtctctacaaaaaatacaaaaaaattagccgggcgtggtggcaggtgcctgtagtcccagctactcgggaggatgaggcaggagaatggcgtgaacccaggaggcggagcttgcagggagccgagatcgcaccactgcactccagcttgggcgacagagcaagactccgtctcaaaaaaaaaaaaaaagttctctagactgtgagaaccactgcagtggagactccatgtgcaaaagaaaaaaaccaaatgtgaggtcataaagacttcctgccagcatggtgggtgacattgtttctttgcagattttggctatggaaaggggaaatgttctaagcagagcccgtcaggagcccacgggacacattttggaggtagagtagttcagcaaccttttcttcttgtctccatccaacacagtgccaggcacgtgtctggtgggactgtcaatgtgactggctatgtggtgtagctggagcccaaaagagcaggtgggggtgggatttcaagggttcagtcttgatcctagagtagcagcgaggtgacatcagggagcggggaagccccacctggggggctggggccacaggagccagctttacatggggctcacagctgggagggtcgagtgtggctgcttaagtccccggagggtgggaaggcggtggcaagagggagaagggaaaagtgggcgttatttaggctacctaggtaggaa

SEQ ID NO: 49075 - DNA, 1059 bp, Homo sapiens
acggaccccagccactctcgggggcagacgtcagaatccgttcctgagcagctcctgtgccctgggggcagtcacagagccccccaacacccccgtgctctgcaccagcctctccctccacacccgaagcaggcgtccatctgtgtcctcctggcagcccctcaaacacacaccaccccatgtcacacgggtatccagagcaaggctggatctgggctaggtgacccctggggcctcagacctctgagtgggccccagagcccagctgaggaagccacacagcctccaggacgtggcacggttcccctccacttggctgcaagtcgcctgccatggggcgaggaggcctgcaccccagtataagggcctccccagctgagtaagaagctgcttcccctcctctcataggccaagcctattgtgtgaaaccatctcatggtcttggtgacgtagaccatttttgaaaccgtctcatggtcttggtgacgtagaccgtttgcttctttaactccagccgcggaatgacattagtggaaccgggctagggaactgctggaagttcaggatgccaccaccttgaacacctaggccagggatccccaccatgtcccgggtttctttcttcgagagtatagaaccgttcattcttgctttgtgtcccattccatctcttgaaaaaatgtagtctttgaatgtgtgaaaatctagggacattcaatctagtcttttaaattatttttccatatttatatttttaaataaatgcatatattgagtcttaaaatctctttctggccaaagactgaaacctggaagcaacaatatacatgcatatcccgttctcacaatgtccttgtttgaaaggctgtaaaatccacaggcaaaaagtttggtctcaaccctcaacagctgactatgatcttgtccggttcatctctgctatctttaaaatcctacattcggctgggtgcggtggctcactcctataatcccagcactttgggaggctgaggcagatggatcatctgagtggtgggcaaatcacaaggtcaggagttc

SEQ ID NO: 49076 - DNA, 1077 bp, Homo sapiens
gcccgggggctgccatctgtgaagctgctgggcgctgatacccggttcgtggccgggcacagatctgcagtgcctgcccgggggctgccgtctctgaagctgctgggcgctgagacccgggtggcggccgggcacgggcagcctccacgcctgggtgggaggcatgggtcagatttttttccagtggcaactcggagagtttaaaatcaatgagatttgattttggtaacaaactgttggcgtgcgagagtagaagggcagccggagcagggccgggccccaaggcctcccgggcccccatgtcatggcgggaacagcaggtggctgccgcccacacaggtgctctgggggaaggagttgaggtgggccccacctccctggcccatgagtccctcaggcgggaggagctctgctcactggggtctcggcgggggtccaggggagccactcaagtggaactggggcctgtggcccccggcaggtcccaactctggcccaccaggccttctggcaattgcttctccgcgcaagacaccaaggccaggtcgtggggtttccctggtagctcctcgaggggctctgggcagcaggtctgggggtggcggagctgggaggccatgtcccccagccggccgtgcttcctcctctgcaggcgggagtgggagactcgtctgcaggagacgctgggcccgcactatgtgctgctgtcctcggcggcccacggcgtgctctacatgtcgctcttcatccgcagggacctcatctggttctgctcaggtgggcgcggctggaggggtgggcgcggctggaaggtggcagcgtcccacaggtgagctgagggctgcccctcccacagaggtggagtgctccacggtgaccacacgcatcgtgtctcagatcaagaccaagggggccttgggcatcagcttcaccttttttggcacttccttcctcttcatcacgtcccacttcacctgtaagttgcttggtgcccgcaccgcaggtgctgtgtgagaacagcttcctctcctgaccgggaccctgtccaaggcaggggtcctgaccgctggcttcatc

SEQ ID NO: 49077 - DNA, 1237 bp, Homo sapiens
ttgcgagggagcaagagtggatgcctgcattggccagctgtctgcaactgaggtccccgcgtcccatgcagtaggccaggcctggccaccacttgtccctggactctggacagccaggctggctctgcagagcagctccaggtctcatggccctgatgaaaccacggcacctcctggccaccctcacagtaaacattgatggttaaggatacagtgctttcaagggagcccaggacttggcactgacttgtcggtttccagaggcttttggaaacaaaaacgaagccttcagcttgtcagcgccaatggcccgtgtggttcattatgtggaccagcccctgccacgctgcagccgagcactgctcaccctgggggcaggcatgcagaggtcatgctgttgatttcattccaggcctgcgccacctccgggagctcaaggctagggaggattggccagaggaagcacctggtgctgaactaggcttgccctgctgtgaacttgcacttggagccctgacgctgctgttctccccgaagaacccgaccgacctccgcgatctccgtcccgcccccagggagacacagcagtgactcagagctggtcgcacactgtgcctccctcctcaccgcccatcgtaatgaattattttgaaaattaattccaccatcctttcagattctggatggaaagactgaatctttgactcagaattgtttgccgaaaagaatgatgtgactttcttagtcatttaggatgatttaaggatatagtattcctggtcatttaagaatgttcattcattgaagccggagctgtctctgccacaggagagccacatggtcggtagtaaccagggcctctccaagcccagctgtgagtcactgcccagtgagtcccgcgcttcctttaaggtgctgggagcaaagagagggtgactgaggcagaccccaacccctgctctgcaccatctgggccctcgccgtgtttgaacctggctgaatgagtggagggcgctgtgttctcaatcagcgcctccgaggagccgtggggttccttcggcattagttcacggtttttgagagaggccttagttactgcagtgaatttctttcctgttgcaaagacgcttccagcctcactttactttctgtggcctgatgaggaccatgggtgattttgtgtacccaaagcgctggggactgcccaccgtgtggcccagtcactgggaaggagccc

SEQ ID NO: 49078 - DNA, 1049 bp, Homo sapiens
aggttttaagctctgcagcgtcactccctggctctgaactcccctcctccaggcctgagggttcccagggaggagaggtaaggagtgccgacgccagggccccccgcagcccaggcctccccagcagctcactgtccaggcgcctcttcctttatggaggggcggtactgggtaggaagaggcagtttagaaacaagagcacctcgaaggtggtgttcctgggggaaaaaaaattgcacttgttttaacaaaactgtttgggagctccaggaggggtgcagggggtttgagttgtcgcctcagtcccggtcctctcccttcaacagcacgggaattgtcttgaattgtgaggtgtcaggaggtgaagctggcttaggccgaggctggacttttcctcccagccctcccctaagctaatggttgtttcgggataacagctttacattaagacaggaatcttaagctaacactggcttttttttcccttttgagttatgttgattctaatggcatcacaaagcttttgaaatggaactgacagcttggattggacagtgacgtgcatgttgactttcgtccgtgttttatgtgtgttcttgctgttttgtagctttcgcgctgtagttcaatgagttcattatcacgtgaagtgagccagcattttaatcaggtacctgcggctggtggtcctcactaacatgagagctggcgtgtgccgcctgtgttcctgagcacgcggtgccggttcgccacgtgcgctttgccactaacctcgcccgttgtctccctcagcgtcacgtgaccaagggtacagggttccttttttttttttttttttttttgagacggagtttcgctcttgttgcccaggctggaatgcaatggtgtgatctcagctcaccgccacctccacctcctgggttcaagccatcctcctgtctcggccttcctgagtagctgggattacaggcatgagccaccacgcccagctaattttgtatttttagtagagacggggtttctccatgttggtcaggctggtcccaacc

SEQ ID NO: 49079 - DNA, 1017 bp, Homo sapiens
cgggacgtccgaagaattgtaatgatttttctgtcactttcagagcagacctgagtaggtgtttcctgaagttttgaagtgtcatcattaatcagatgctaattctgtttaggttcagtctgctgaccttttttctttttaaaatcttggcagattgtttgggatgaaaagaaaaaccagtgggtgaatttaaatgagccagaagaggaggtaaattgtcattctagttcctgttgggtgtgaggtgtgagtggagggaacagcctcatgtggccctgtgatatttgggtggctgttgccccttttggagcctcctgactgtgccatcccagtgggtttctgtgcacacagtgggtgtctgaagctgtgtttccctctgcagaagaaagccccgcccccacctccaacctcgatgcccaagactgtgcaagctgccccgcctgccctcccagggcctcctggagcccccgtgaacatgtactctagaagagcaggtaagggtggccttggagtgggagcttgcttgaacgattaactgtcccagagagagaggccaatgtgtagctgttgtgcgtggggaggaggtggcttcccgcacgtccctgcgtgcttttcctctgacgcagtgagcgcagagcatttggaagctggaggccacctggcgcgttcacctcaatttgcttccctcccctttgcagcaggaaccagagctcgctacgttgacgtcctgaacccaagcgggacccagcggagcgagccggctctcgctcctgcggactttgtcgctccactcgcgccactcccaattccttctaacttgttcgtgccaaccccaggtaggtagcacgagcaccagcccctccaggtcagcccccagtctcctgacctttgatcctctttctatgagtctctcctaaatctcccgttaaaagaatgacctggccagcatgcagagagcctggggttggtttgtggttttttttttgatttgcctgtttctgcatgagtgtgccgcgt

SEQ ID NO: 49080 - DNA, 1092 bp, Homo sapiens
cagcccggccgtctctttttctacagtagaatttcttttctaattttttgatctcacaagaggatgtcctggaattcagtagaatttctaacattgtcactggttttcctgaaagtgagatttatctcattagacatgtttggtataaatacctcctctgtttgctctactcctaaccaggagggatggttgcttttatacagaccgcattctggaaccttctttacagatacccagcccttcacgggcatcccatcagtaggcgattgctatagtttgaacttgcattaggtgttttaccctttaaaatactgtgtccctggaaaagtaaaaatgagggttgagctattaaaaattgggacttgacccaggaataaatatttttaaaaatcattgtatctttgagaacacccatcgcccccctctggccagtcttccctcagtgcatgctcacactccgtttcttccagcccggaatctccatcgaacgccctcatttgcattctgagtgctgagtgctcccagacggagctgcttattaagtgcggctggctcttctctagtcaggccaggtagaggctctgggaggcccagtcagggggctgctctccccagcccccttcctgcctccctctggtcaccagagtcatccggcctctcagtgatgtatttaggaaacacgcctggggaattgcatccccctctctctttcggttcctgtgaggagccccaggagagcctgttctgcatttccttgcgacagaccccctcgaggacggtgccagactcggaggcccccccagggtgggatcgtgccgactcgggtcccacgcagccacctctgtctctctcacccgctcccgaaacaaagagacccggacaggcagccaagaaagaaacgaaggaacctaagaaggtagtacagcctgcccacggtgcgcctggcggccgggagggtttgggcaggaggcacgcttcccagagcgccatcctcttaattcaccacacatgcaaatagcctcctgatacaaacagccgagtgtctacagtgcacacggcatgatgggtgtctgtgtatttgtgccttcagat

SEQ ID NO: 49081 - DNA, 1064 bp, Homo sapiens
atggagccctcccgcagcagtgtcctggcactccgagttccgagatggagcagttggacaggccaggactcagtcagccaggagccctggggatcgccaaccctctgctggcggtgcctgcaccgagccctgagcactcgagcccgagcgtgcggctgctgccctcaggtgagcccaggtgcgcggctgctgccctcagacaagcccctgcttcctgtgggctgagccatggcctgcacccttgcctcctggagaactgctttcagatgtggactgttggaggcagtgtctcacaccacctcggtggttgtggggctcctcggtctcctccctcttcccttcatgcttcctcccctgaggagcccatggaggggaggctcatggctttccatgtccataaatatccatgtgctggcgacactgccctgagcgcccgctgcctgctcagcctccctgcttgtttctccgggagcctcagccgcaccgtgtctgggcggcgccctcggctgtgcccctctgtaacctgcttctcccagtcggccccgtcggtggaagggccagcccagagctccagggagtcaagtccagatgccccctcctctctcgcgcttctcggcttccttcgtcagtgaacctcaccagcgcggcctgcacgcaggtccgcatgcctggatgagcacgggctccttcctgctcgcctcctgcttcttccccagaccctccagactctccatctcacctgaggacaagccagggtcctcacggtggccacaggccctccaagcttggccctgagccctcctgccctcgtgccatgtccactcccacgctgtggaccagccacactcctgatttgggcccactgcccaccctccctgcctgatgtccagtctgcttcgtcctcagacaccgttaccacttcctggttgattgctgtccttagcgctttctcttactcagttcatctgtcccgacccccatgaggacccagcatttcttttgttgttgaagcatccagggcccagcatggtgctggtaggcagcagccctctcaggttttatgt

SEQ ID NO: 49082 - DNA, 1033 bp, Homo sapiens
aatcccttggggaacagggactaggactgtggtcagcgggcgtggtgggtgggagacgatgatgagtgaagtgtccagaagagttcacagctcacagggcgatgctcggatgcaggggagcctcagggcagtacaaggctttgtccatcggcgatgctcggacgcgggggagccgcagggcagcaaggcttctgtcgtttcaggtgtttaagttcatctactcctgccgcctggcggaaatggggctggccacgcaagccttccactactgtgaggccatcgcgaagagcatcctgacgcagccgcacctgtattccccggtgttgatcagccagcttgtgcaggtgctgcccctggcgcctgtcctcgggatgctgtgctgactgcagggaaggagggcttgccagagcccccgggcatgggggtagcgatggttcagacgcgcattgtggtaggcgctcagaacctgcctcttgggcggataaagatctttgaatggcttcgtgttttgcgtcttagcctgggaactctcaggcaccgtgtgccagcacagagccttggcagcgagtttcacaatcagaaggaactacctgtaggatactcttcttttattgagacgcagtctcactctgtcacccaggctggagtgcagtgtggtgcaatctcggctcaatgcaacctccgcctcccagattcaagtgatgctcctgcctcagcctcccaagtagctgggattacaggcgcctgccaccacgcttggccaattttttgtatttttagtagagatggggtttcaccatgttggccaggctggtctcgaactcttgacctcaagtgatgcatgcatctgccttggcctcccaaagtgctgggattacaggcgtgagccaccacgcccggccaggatattcttattttgaggcaatttagtctggtggttgatagcttaagtgtccagagtccagcagcctttgcttgagtcctggctgtactgctgcaggcctcagtttcttcgcctgtaaaacagaggcgg

SEQ ID NO: 49083 - DNA, 1070 bp, Homo sapiens
ccaaatcaaaataattcacttcctctacagtttgccattcttaaagttcgcaaccaacgaagcaatccagaggacggaagcctatgagtacgcccagtccctgggtgccgagacctgccccctgcctagtttccaggtaagcaggtgctgccagcctgcagctgtcatggctgggcaggcactcagtgctaacaagcttttggctacttagattgtttgaattggtatcgaaaaaaatgatgtgagttttttgggggaggatcttgagaagacatttgatctaaaatgctaagaaacaagatcccattgaattgaggctttccgtttgcatttgatttcaattattttcatgagctttttttttaagggagacagggtctcactctgttgcccaggctggagtgcactgttttgatcactcccaggctcaagtgattcacctcagcctccagagtagctgggactacaagcagcactaccatgccacactaattttttttattttttgtagaaaaaaactgtgttgcccagactgatcctaaactcctgggctcaagcagtcatcctctcagcctcccagagtgttgggattacaggcgtgagccaccgcacctagcctgtatgagctttttttttttttttgagaccgagtctcgctctgtcacccagactagagtgcagtggcacgatctccgctcactgcaagctctgctttctgagttcacgccattctccttcctcagcctcccgagtagctgggactacaggcacccacgaccacgcccggctaattttttgtatttttagtagagatggggtttcaccgtgttagccaggatggtcttgatctcctgaccttgtgatctgcccacctcagcctcccaaagtgttgggatgacaggcgtgagccaccgcgcccagccgtacgagctatttttaatatttgagggcggtattctctgatgcagtgtgggggtggtgtctataaaacatacatgagaggctgagcatggcggctcatgcctgtaatcccagcactttaggaggccaaggtgggtggattacctaag

SEQ ID NO: 49084 - DNA, 1274 bp, Homo sapiens
tggctaactttttttttttttttgtagagacggggtttcaccatgttgccaggctggtctcgaattcctgggctcaagcaatccgcccaccttggcctcccaaagtgctgggattataggcatgagccaccgcgcccggcctgatcagtatgagtctattatggatgttttataactgattgaagtcatgtaacctgttagcttttattaacatctttctctactgtaacgtttttgcctcccagccagaagttctaaattatgccctggatgattttggtgaaaggggaggctgccttactggagtcactctccgtgttgacaggatattcgcggaggcctcctgttagaactggggagttgactcgagcgtgtttcccagtggatggggcggcgtggtgggcagcgctgcgtgattagccctgtttgtgattagcgtgcttgtgttttatgctgaaaatggataaaagcagcaaatatctacaaatacccactaccacagggactttgaaactcaggaaaataatgaatcgctacgtgtctttagtctccaaatggtgaataagtgtgtttttgaggcctttgggttgtttgtgtatctgctgctgcgtgaggacacatggcctgtcttgactcatgtcacgtgagcgccgccgataacccaccaaggtccctgaaatgccttttgcaggatgctttggagtctgcaatgaagaatggcctgtggggtcacgctctgctacttgcaagtaagatggacagccggacacacgcccgagtcatgaccaggtacagtcccacagtggcctggtccagtggcgagccctgctggctccctgtagcacgcggcgtccgcaccctgggggcaggcggcaggcggatctcacttgactgtgctgtgctcccacacgaactcgggcttccttggcctcgaggcttccttgggtcgtgttgtggagagcttaaaaagtttttaattaactgcatggtttttagtacttcatgtaaaatctcagtgaattcctcagtcttcatcttttatagctttttttaaattttgagttttgctctgttgcccaggctgaagtgcaggggcgcgatctcagctcaccgcaacccctgcctcccaggttcaagtgatcctcacgccttggcctcccaagtagttgagaccacaggcacccaccaccacacccagctaattttttgtatttttagtagaggtgggttttgccatgttggccaggccggtctcaaaactcctagcctcaagg

SEQ ID NO: 49085 - DNA, 1034 bp, Homo sapiens
atattaaacaattaccgacttttgagttggaagtctgtcgtgataaatctaacctgtgatttaagctgtgtgagcacattgaaaatctaggctcagaagcatcagtgacaagctgattgtttctttttcaatttattttaaatgcagtttcatcaagaccaacttctcctgaaaaattttcagtgcctcatgtctgtgccaggtttggccctggcggtcagcttatcaaagtgattcccaatctgccttcagaaggacagccggccttggtggaggtccacagcatggaggtaatggcacacgcagaagcgtggcgtcactgctctgctgccctggggaactctctgctttgcagtttgtcatcttcaattgtcagaccttgtctctggacatacgtccttggaaaatgtttattcctgtgaattttcaatttgtagggtttttcttctatttgatcatatatttttcctcctagaagtcagtattgtaagcgtctgccttgggtgttcaacgtggtttgattgtatatgcattttctgtcctcgttttggggatgtttgctttattggtgcttttcaatgatagatgcagtgggtgggcccggtgctgcccaggtgaggggggcgggtggggtggacgtgcacggcgctgccgaggtgacgggggctggcatgcgcctcttcctgcagcttctgcaggcttctgtcacatgtattggggttctgcctcagtatttggggagagaaaatggatttcactacttaaaataaagtttgaaatcatggctgtggtccacacaggccatgttccatgtaacagcctcgacagagccttcacctgctgtggggcggggcaggtgggccatgccatcctctcctctcacgggcagcatccgtgcctgggttggccggcctgccagcagggtggctgcgcactggctgccactgacccacggccctctcctcgtaggccttgctgcagcacacgtctgagcaggaggagatgcgggcgttcccgggacccctggccaagta

SEQ ID NO: 49086 - DNA, 1033 bp, Homo sapiens
attcatgatttataaatgccatttatttattgattccttttttcaaaatccaaaaagaaatgatgttggagaagggaagttgaacgagcatagtccaaaaagctcctggggcgtccaggccgcgccctttccccgacgcccacccaaccccaagccagcccggccgctccaccagcatcacctgcctgttaggagaagctgcatccagaggcaaacggaggcaaagctggctcaccttccgcacgcggattaatttgcatctgaaataggaaacaagtgaaagcatatgggttagatgttgccatgtgttttagatggtttcttgcaagcatgcttgtgaaaatgtgttctcggagtgtgtatgccaagagtgcacccatggtaccaatcatgaatctttgtttcaggttcagtattatgtagttgttcgttggttatacaagttcttggtccctccagaaccaccccggccccctgcccgttcttgaaatgtaggcatcatgcatgtcaaacatgagatgtgtggactgtggcacttgcctgggtcacacacggaggcatcctacccttttctggggaaagacactgcctgggctgaccccggtggcggccccagcacctcagcctgcacagtgtcccccaggttccgaagaagatgctccagcaacacagcctgggccccagctcgcgggacccgaccccccgtgggctcccgtgttttgtaggagacttgccagagccgggcacattgagctgtgcaacgccgtgggctgcgtcctttggtcctgtccccgcagccctggcagggggcatgcggtcgggcaggggctggagggaggcgggggctgcccttgggccacccctcctagtttgggaggagcagatttttgcaataccaagtatagcctatggcagaaaaaatgtctgtaaatatgtttttaaaggtggattttgtttaaaaaatcttaatgaatgagtctgttgtgtgtcatgccagtgagggacgtcagacttggctcagctcggggagcct

SEQ ID NO: 49087 - DNA, 1043 bp, Homo sapiens
tcgatctggggcagctggacccaggagccaggttggttgtgcccttcgtgtgcctgaccctggtgggtttgcctgtcagttctgctggcttggagcaatcctggaggtcagaagcatcatctcacaggctggatgggatcctgctcacgggaacccagtcctggggagcagagctcacccccagccagcctcaccacacagcccaccaccgctgcacccacccccacctcacgcctgtgcttcctgcagggcctggggatggctcctgggggaggactgggctcctggcacatactctgtcctgagatgaggaaacgtgtctgtggcaccagcaggagccagagagggtgtcagggcgggccagggagagcgcgttggtgggtatctgggatgagccgtgatcagcactggccggagtcggggggctggcaccagtcccctgcagggtagctgctgtcagacctggcttcccaccaccccaggctgcctcaccatgtcctgactgtggcgtcatgggcctcagtgtcctgcggcagcatccctggccggtgggcgggggaggaggaagcctcgggtcccagcccctctctgattgtccgcccagctccatcgtctacctggagattgacaaccggcagtgtgtgcaggcctcctcgcagtgcttccagagtgccaccgacgtggccgcattcctgggagcgctcgcctcgctgggcagcctcaacatcccctacaagatcgaggccgtgcagagtaagtgtggccccatcccgggaacaggctctgcctgcagggggtgccatccccccgtgccccagacacgctggctgtttgtgccagttgctacccacgggtgtgagcgttgccgtccgagttggggtagggcttttctggaattttctgaatggcactccgcccccacctgcggcggtcacagctgccggtggagccacctgggaacgagtccagccacgggaaagtgggtgcctgcttctctccccaccctttcctcctgaattttctttgttgggtattatttcaaa

SEQ ID NO: 49088 - DNA, 1079 bp, Homo sapiens
gcacagacagggccctggttggtctgtgtgggccgtttgcaacctggctccaggcagcccctgtgcccagtggggtgtcctggcattgagggccttcagcaccccactcaggccacgcttcctgggccagtcacagggatgcctggatgaacagacaggccctgtgttcgggaattaccctctggtggggtgacgggcaaaggtgcaccccgacgcagcagtgtccacagagcacaaagaggaggcaagactccatggtgctgggcctgcagaggaaggagtgatttaggctggcggtgggtggaggagtcagcccaggaaggcttcctggagggggcggcattgccaccctgcgtcttaggggacagggagctcagggagtggcagctgcccggggccgacagctcctgttccctgcaggtcagtactgtaccgaggatgtggacgagtgccagctgatgccaaatgcctgccagaacggcgggacctgccacaacacccacggtggctacaactgcgtgtgtgtcaacggctggactggtgaggactgcagcgagaacattgatgactgtgccagcgccgcctgcttccacggcgccacctgccatgaccgtgtggcctccttctactgcgagtgtccccatggccgcacaggtgagtgccttgaggcccaggtgggcgcagggggctcacatgggccaggcctgagctgtgtgacctcacccagggactgtggccctcctgcacccaggataacctgaaagggcctttctggtcagggaggccggtggtcgctgtgagtcccccggaacgtcccaagtgtcacgggatgcccgacggggtcacggcgggcagctcctcctggggtgtcagtggggttggaccccagccgtgggtggtgtgccatgcctggcccaggggccgtgcccactgaccgccgctgcctgcccaggtctgctgtgccacctcaacgacgcatgcatcagcaacccctgtaacgagggctccaactgcgacaccaaccctgtcaatggcaaggccatctgcacctgcccctcggggtacacgggcccggcctg

SEQ ID NO: 49089 - DNA, 1050 bp, Homo sapiens
cccttgaggctgggggcaggtcctgctggtgagggaggggtcccaggggcaggggcaccctcaggctggccgcctagcgattggctcctgcaggacgtggccacgggctccctgggagcagcagctgttgggggtgtctggggagaagacccccatttattgccctgtgagggaccacactgctgccaggggacccttgggcttctgtggcaggacagtgggccgggattggcagtgaggcccaaggagggcaggtggggctggacctgtggctctgctggggagcaggtgggatgtgttaagatgctgatttcagccgggcagctcctccccttcccttcccagggagccggggtgtgcagggccgttccttcccctctgggaagtgcagctcctgtgcaccggagaggcccccgcactgtccctgcccgtcccaccaactgtccctgcccgtccctccactgtccctgcccatccccctcactgtccctgcccattccccgcactgtccctgctcatccccaacactgtccctgcccatccccccctcaccgtccctgcccatcccccccgcactgtccctgcccatccccccccactgtccctgcccatccttgccttgggaggtgctgtcacctggtggagccatgggaagcacctctcccacccagggtctctggttcctgtggcgggtgcagagccagccacatcactgacaccccagctgggttgggtccagctgaccccacacccccacccctctgctcggcctctgcctgtgcccccatccctggccctgcatgaccataaactccttgagggcaggaagtgagtgagtcctacccgcactgagtccctctcacccctccttctcattttggggcggagggaactgtcttctgtcccctgggggtggcagatggccgcttagcttagaaaggaaaacagcacaatttagaattcgtcctgggtgaaaggtctcggcagcatctgcctcctgctgctttctggagtcgcatttccatggagcggccctggcagggagggtgg

SEQ ID NO: 49090 - DNA, 1018 bp, Homo sapiens
gctcccagcttcctgccctcttccccgtagtggggttacccagcgtgactcatggcccgagccacaggcacccgcccagggagccacggcggggagacctggctttattagagatgcgttcgtgcctcatcaagtccaaaggaggaaactggcgcgtccctcactttccctgaaacaggctcccccacagcccaagcggtcaggttaaggtgcatttgcagacagatgccctagtaggaggctggagcttttggcccagaattttccctgctgtaggcccatggtcaccgagcctgcccgggggctgaggccctgaggaggtgccattgccccacccaagcctcagacaagtgtcctgccctcgaccctgcgggaggcagcagctcaggccctgaccctggccagagagggcagctctctgaggctgctgtggccgtggcaggcaggggctgggcttgccgggccgtcgagtgggcacagagactatctgggaaggaggtgggcggtgagagctgactccccgcagccgggggacagatgagccccgtgccgcacagcagggccgcgtggtggggccccccaagttccgctcggtttcagctgttgacgagcggaaacacacagttactggaaatgagaggtttgggggagccgccaggggttgaacatgtgtggtttccctgacggcttttcagtaagagatgcttgagctcaggctgggcactggctggtgcgcggagggggctgggccagagtcccccccttgggcctccactctccatccttatagagggacctgggttggtcccagctcccggggtgcagcccctgggtggcccctcctacttccccttcagtggtcagaaggaggctggcctcattcctgtctgacggagagccaggtggggaggccgggcggggctgagtgtccagggtccacatggtggcggggctcaggccgtggcgaggtcctgtcctgggcctccagggtctggcccagcacagagctctgcagctc

SEQ ID NO: 49091 - DNA, 1061 bp, Homo sapiens
ctcgtcttgggcgtggccaggggaggaacaggttgattctcctcctcatgctgagctgagcggaaaggcctgtgacaggacctcctgtttatgcagaacctggtcttcaagggcgccagggttagaaaaacatgtttaaaaacatgcagcatccgaggtgggcagatcacctgaggtcaggagttcaagaccagcctggccaacatggcgaaacccccgtctctactaaaaatacaaaaattacccaggcgcagtggcgtgtgcctgtaatcccagctacttgggaagctgaggcaggaggatcctttgaacccaggagacggaggctgcagtgagctgagatcgtgccactgcactccagcctgggtgacaaagtgagactctgtctcaaaaaaacaaaaaacaacaaaaaaaaccccacacagtgtcaaatagaaagtctcacctactcagactggggagacatcaggaacaggaaggcctggggcggagactggggtgggagcctggagtgctctgaaggaagctggctccttggggcaggccctgcctctgaacagcagccaacatgttttccattgaaaagaataataatagaaaaagagagagggagaaagaaaacagcaaccctggcaggaagagggtagggcagggcagacagtgcaccaggggaagtgcttccacagggcagagctgggtgcggggacccccagatgcgggcggcaaactggagaccccacaggagccgggactggcttcattcctcattccctgcacctgtgatgggcagcagcggccaccggtgcccactgggcagttccaggccgggccgagggactgcacccttttgctgtggggaggggacctttcctgtttcatgtctcgtctataaatagtgaaaggatgtggctttgcagaatcgattgggcgtctagcttgccttcctcaataatgcagcgatgacagctccacactcaggacgccgctgttacccagcctcgtaaaagccctggcagacggccgcccaccctccaggtgtgccagtgcagttttcatcccca

SEQ ID NO: 49092 - DNA, 1152 bp, Homo sapiens
gccctgccagactcctcagtgagcctccagggtggggggcaacgctttggagagtagcccactttgtctctgcttttcccccactgcgtccaggcggcacatcaggccaccccaccctgcttcaagcaggacgtgttccctgctgctccccttccccccatttctgactacagaactctgggcagaatgttgacgcccctttggtttcatggaggggcttcctgcggacccgtgccccagcaacccatgatactgagcagagtgcgtccggggtagggggcggacgatgccccttggctgggtgcaggtccccgcccccagggtaaccagggccttcggtggtggtggtgcgggtgagactgacctctcttctcctgcccctgcctaggcccgcgatgctcccagcccggtgagacctgcctgaatggcgggaagtgtgaagcggccaatggcacggaggcctgcgtgtgagtaccacccctgcgggacctgttgctttgtcgagggcagagcccctgccttctgcagccgcgcaggggacagaacactaggccattgtcttctggagatggcccagagtctgggcacggtcacgtgctgacttttattggacaaagtctggcaattacttaatcaccagcaattatgctgcgtgtggagctggtctggctgctgagggcttgggcactcctccgtgggccacctcaggctccggggtcactaagtgggagtcccagtaccccaattcttctttaagtccccaagaaacagttgatctgccaggggaagctctggaccatttactgagaggcccagcccccaccaccctgccaacttggggcgcctcctctgggcgggtgatgcctcctgggcacaggtgatgcctcctctcgggggtgatgcctcctaggtgggtggtgatgcctcttgggctggtagtgatgcctcctctggcacaggtgatgccacctcctgggcgggtgatgcctcctctgggtgcgtgatgcctcctgggctggcggcaatgcctcctctgggcacaggtgatgccacctcctgggcgggtgatgcctcctctgggtgcgtgatgcctcctctgggcacgggtgatgccacctcctgggtgggtgatgcctcctctgggtggtgata

SEQ ID NO: 49093 - DNA, 1022 bp, Homo sapiens
ggggacaaagatgggggggtggggaggtctcgtctgggtccaggctctgtgtattgtctggggggctgtcaagcttggttcctccggccctggggggtcctggtcagtgtccagctgcttctgcccagcatggatccaggccagggccccctcggcagtcagcagcgaggaagccacctccccagggccaggaccttttcagaccacccccagccatccgtgggtcgggaccatgtcccaggagactacggagcctgtacccgggcctgggcctctgctgttgtgaagacctgccccctgccgacgtctcacctcctccagcaggtccaccctggactgcctgcctccccccccgacgcctcatctcctccagcaggtccaccctggactgcctgcccccccgacgcctcacctcctccagcaggtccaccctggactgcctgcccccccgacgcctcacctcctccagcaggtccaccctggactgcctgcctacccccccgatgcctcacctcctccagcaggttcaccctggactgcctgcccctccacacctcacctcctccagcaggtccaccctggactgcctgcccccccccccccccaccaatgcctcacctcctccagcaggtccaccctggactgcagcctctgcacttcttccttcattgcactgtccactcctgcgggcagagccaggcgctgggtcacggccggccggctccccacccacacccccaggctccctcctgtccccagggagaggcagagccagaagactcaggcccaggcctctgccgcccccgctgcctgcctggcgctggccagaggtctcagggctatgccgcctaagtacgtcggggcgggtggctctgcgcagaggctcagggtcccggccacgctgagggaggtcaaggctgaggtctcagcggcgttttcgatgcggtgccgtggacggcgcattattactcacggtacgagtttgaagtgtcacagcgcgtaccaaaagtaataatgtcccg

SEQ ID NO: 49094 - DNA, 1041 bp, Homo sapiens
aggctgctggaacgggcctacagtcatggcttccaacggagccccagaagctccaggaatatgaaggaggaccctgggcctgatggtgagcatggagagtccgagaagggcctgctggctgctcagccagacgtgtgtgaccagtggtgatgtgggccaggtggcccaggccggggtcccggggagcgcacactccagggctggcccaggtggtgactggcgctgacgtccccagtggagcacccttcagcgaggaaggcagtttgcagaaacagggagttcctgggggctgggctctgggcacctgtgctggaatctgtgaaggcctcacctgtggttctggccctgggatcccctgtaggcaggggtctctgtgaggggcccccctcagcccctggggtgcttcagagtaggggcgagggtgcggctttcccagctgaggaggggccagtctgtgggttccttggggtgccccccaccccgaggaaatggcttgtgtggttctgatgcctgcagggcatcctgtgctgggcgtgtcctggggtgtggacaggggacggggtcctgttcttttggcagaaatgatggggcacctgacttaggagaccctggagcagaccccactactgagccaggccacaggccacgggcctcttcatcggcggcctcctcgtgtgagaaagcctggcttgttctgcaggggcctctgcctggacttcctagctgttttccagggaccaaatcacagttcacctgctgccctttctatggacctggcaggctgggttggctggcactggccctgctgccccactgggccctgtccccatctcagcttggagattctggctaacctgggtgtcctcgggacctggggcctctgatggtgcttggatgggaccctcctgccgccctcacctctccagggcagcacccaggctcaggcctgtggagtagtggcttccgggacactggctactaacagcaggtgctttgttcctgctttggtccctgaagagaagggagggccagagggcaggg

SEQ ID NO: 49095 - DNA, 1051 bp, Homo sapiens
ggacacccggttgtccttgttgaagtcagccatgagcaggacctggccaaccagcgccggcagggaaggcaggtctcccaggttcgcctggcgtttgggaccaaaagaaaggaaaagccagctgatttgatgtctgggagcacgacctggcctttacctggtcctcctggcggggtggtctgccggccagaccagcacatctgccaggttaggggtcccagcccacagctacacgggtggaggacgcagccagcaatgtgtcagctcactctgctggcctgtgtggctgctgccagacagacctcccgcctcctggcagccttgggtgcacctggggagctcgggggtgggcacctgggcagagaagcctcagagcttccctgaggatgagaatcggcacagggcagagggcacgcactggctgaagccctgggaagcggcccctttccacaagccctggtctccattcggggcacctgccctgctggacacacggcccttgactgcaggagcctcccctcgacctcagctgccagcccaccggcgcccccaacccttgcccccagccctggagaggctccttccctggcagggctcatgcccaggggctgggggatgggaggtctgcccagggtccacttgggcccatctgtgcctttgcgctgggcatgttggtgccagggccgcctgctgggcatatgaccgtggtgtggactcctgccctgccccctaggagagctgcctgaccttgaggaagctgagggtcatctcccggaattccttgatggaggtgccccgggtgggcttgtcaaacagtaccagctcccgccggggggccgcatccgaccgggccttggagtcgagggtctcctcaatgccacacttgatggttacatccttgtcccgccagagcccgctgtacacctggacagggccacagaggtcctccgtgcagacatccccctcccactgcacgggcagtatcagccccaggcccacccgccctgccagtggctatacctgctggcccggggccaccgagaggcaggtc

SEQ ID NO: 49096 - DNA, 1860 bp, Homo sapiens
tccaacttcccctcccgcaaattaagcgtagagtaaggggagagagtaacatgggtcggatttttctagaacggcccttgtgacagtgagctttttggtggcagggagcttctttggtccgccttcctggagaccagatgcagcaaaacgcagtctttttcttttcgagacagagtctcagttgcccaggctggagtgcagtggcgcgatctcagctcactaccacctctgcctcctgggttcaagcgactttcctgcttcagcctccagagtagctgggattacaggcgccagccactaggccagctaactttttttttttttttttttagagagacgggtttcaccgtgttggccaggctggttttgaactcctgacctcaagtgatctgcccgcctcggcctcccaaaaaacgcagtgtttatgtgatgctcctctgtggtgtttgcaagatttatacaaaattgcggtttctttttttctctaggacgtctgctcactggagatgacacgtgcgtggggtgttgggtaagttggtgcattggagctggaacagggtcaatcctccaatgtaactaagccctcctgtgcaacatcttaagtgactggagggaccagtcggtcttgtgttcacattgaggctagaagctgtctccaggggagtaaaaacggattatttagtcttcaacaggacactgcccctagaggcgttgcagctgtggctgccgtgtcacatctgtgtcattaggtggcagagattagagaggctatgtctacgctcagcgttctgccccgtgaacgtttgaatgtttgatagtctcacactcctgttttgtggacaggcatctgttttccttcgctggtatctgggagagagggtgggccctgtgagtgggctttctaactctcgcgctgggctaggctggcctctaggggtctgaagggatagtgggaaggtggagggtgccttcaccaggagcagccttcatgagtgagttttaagaacctgtgaggatcggtcaggtcaggtgaggtacgcgctggatcatgccgtacaccgtgtcaggatcacgcaggacaggactggggaagggtttgctggcgtctcggttaatagcagtaacggcagccgcttgtgttcttgattctttgccaagcattcttgttatttaacacgggaaggaggtgacttcgcctgtgatggacttccagtgtgagcactggccagagtgaccaggctgaccagcaccagccctgatccaggtaagaggtgaggcggaggcttgccctccttccctgcctgccgggtgcgtgtgagcggctgccctgcggatgctgtcctggacctgttggcaccacagacagttgctctgctgtgcctgtggcctcggggcaaagagaaagtggcgatttctacactcagtgctcgggaaccagtgggcactgagaatggtttatggcctgacattacttgcaaccaaagccaggcagcatttggattttcgcttttggaaaccaccttacctggtttgctccatgagggaggggcagcaacatcgctgggaaccctgaggtgtagatatgtataaatgagctgtgtgtgtatctgaagctcgggcacttgtggggttaccaggagtgtgcgtctcactcccaggcctcgttctggaaacgattctgtaggtctgtctgggaggccttaggcaagtttgattaagaacagtcgagctggataaacaggctgttccttgtccagcactagtcatcccaggggggcgggggcggggctgcaactcctgtgcacaaaggaagggccctgggtaggggtcaggagctgccttgcccagagatgtgtctgg

SEQ ID NO: 49097 - DNA, 1081 bp, Homo sapiens
tcctcccagggctccaggtcagtccttgggcccccagcccagccgcctccgtggactcctggggcctgtgcctctgcagcctccactgccctggccacacgctgctccatgtatcacacccctcccagcccagggccttttcccaagttgtacctcctcctccctagccctggccacacctgacctttgcgggttcaatccctcagcccagctcaagcactgtcttcctggaaagccatctgccaccccacctgtctctgctgagctggctcaggggctgtgtggcatttcttcatggactactggatgagtgccacccacttcaggaggacagggtctgcctgtcccggtccctgctgtatccccagagccttgcagggaccttggcacagactgggtgaataggtgacccccgccctggcccggccagttctctccctctcctctacttcatggctcctgtgctggatgggacctgctctgtccagtgggtgagcagagcaggctggccgggctggccactggatccttctggggattgtaggcagtgtgggcatgggggtctcctgagagaccctggccagaagacacaagagagcccgccctggggggccccagccctgggccctgagctcaccttgaccccatccgaagatccaagagggctggccctggggggcccccagccctgggccctgagctcaccttgaccccatccgaagatccaagagggctggccctggggggccccagccctgggccctgagctcaccttgaccccatccgaagatccaagagggctggccctggggggcccccggccctgggccctgagctcaccttgaccccatccgaagatccaagagggctggccctggggggcccccagccctgggccctgagctcaccttgaccccatccgaagatccaagagggctggccctggggggcccccggccctgggccctgagctcaccttgaccccatccgaagatccaagagggctggccctggggggcccccagccctgggccctgagctcaccttgaccccatccgaagatccaagagggctggccctg

SEQ ID NO: 49098 - DNA, 1024 bp, Homo sapiens
tttctcctcactggcagagcagaggggaggggcagtcagcatgcagggatggctcaggggctctgtgtaaggctgtcagacacctctgtacctgcccagctgctggggcggccacccaagacacaggcatccttcagagatgcctgcccccgccccaacctgctccctcctcagcccagccctgcagggacgccccaggcagccccagagcagaggtggacccggagtgagtggcgcagcactgtgagcactgtgggcccggtggtgcttctcagaggcagcttaggggtcaggatgctcatcctctgcagagtcactggggactgggcccttggtgcagggcccttgggtgctggggccagcatctctgaggccacatttggctacaggctctcagcctctggagggagaggcagggacctgtccttcccttcaccctggcgaccacatgtcacacctggcctcagggtgacttgatccgttggcctgaatcagtgccagcctctccttgggaccctggctgggggcaggtggggagctgagcgcttacatttcagggtctccgtgctcatcaggttcgaggggaagtccaagtccatctggccctgatgggaggtgggggcggggaagggatgagacatccttggcagggagtgggccctgagtggtggccctgagcctgtgtccacccagctgtcatggggatgggcagccagccaggccctggcctggggcttacccggcggtacttctcgctggtctccttcgtgtggatcttgtcgatcagcttcttctgctggttgagccggttctcccttgcccggcgctcctcgatgaaggacgcctccctttgcctcatgttcctctggggacatgcgggtgggcacagggttggggagctgtctcaacaaggcccctaatggcagtaaagccagcgggcggttggccatgctcaccttactagactttggaactgcatccccggccaatggccacacccttttcctaaaccacttgtgcccgt

SEQ ID NO: 49099 - DNA, 1079 bp, Homo sapiens
agcgacaacgaggaggtggtggctggcccggcccccgcccacgccaaggagggcttgcggcactttctggaccgcgtgctggaggggcgggcgcagccacagctgtcggagcgcatgctagagaccaaggtggccgagctgctggcccagggccacaccaagccacccgagcgcagtgccacaggcgccaagagcaagtacctcatcttcaccactggctgcctcacctactccccacaccagatcggtacacccctgccgccatgctgcccgcctcggtcctaggagcttgggggaggccgggcaggggtcctgaggggcagacagcaagcaagtccacaggcaaagctgggatcgttcactcgcccctggggtcacaagcccagacctggggcctgtgggatgagcagtgaaaacaaacgcaggcagggccgctggccagcaagcaaccgacgggcctgattcaggtctggggcccccggagcaggcagtgcccacggacctctgtggtgctcacagccccagagacaccactgaggtaggaagctgccctggagtgatgtccttggggcattggacagggaccctcaccgtagccctccctgcaggcatcaagcagatcctgccacaccagatgaccacggcagggcccgtgctgggtgagggccggggctccgatgccttcttcgacgcgctggaccacgtcatagacatacacggacacatcatcggcatgggcctgtcgcccgacaacaggtgggcctcttgccagtgtcccaggcggggtgcccgcaggcggcccacacctagcacagtgcccctcgcccaggtacctgtacgtgaacagccgcgcctggcccaacggtgcggtggtggccgaccccatgcagccgccaccaatcgcggaggagattgacctgctggtgttcgacctcaagaccatgcgggaggtgaggcgggctctgcgtgcgcaccgcgcctacacgcccaacgacgagtgcttcttcatcttcctggacgtcagcagggacttcgtggccaggtgcagggcgcggcgtggtgcagggcgggtgtgggca

SEQ ID NO: 49100 - DNA, 1048 bp, Homo sapiens
accaggcctgtgccatggagagccggcgctttggtgaggctggcatcagaatggtggctggggtgggcgctgggttcagagtcctgggtggccttggcgccgcccccaccctgctgatccacagccctggtgcagaggagacccgtggcatggaggaggagcccacccacctgcctctggttgtctgcgtggacaaactcaccaaggtctacaaggacgacaagaagctggccctgaacaagctgagcctgaacctctacgagaaccaggtggtctccttcttgggccacaacggggcgggcaagaccaccaccatgtgagtgtcggaggggcagggcggtgggcatctgctgaccagagcaggagtcctagtcagggcagggtggggcccctgcagagggcgtggggtcatgaccccgcccacctacccaggtccatcctgaccggcctgttccctccaacgtcgggttccgccaccatctacgggcacgacatccgcacggagatggatgagatccgcaagaacctgggcatgtgcccgcagcacaatgtgctctttgaccggctcacggtggaggaacacctctggttctactcacggctcaagagcatggctcaggaggagatccgcagagagatggacaagtgggtgggctgggcggggggcggggcaggtgggcggaggccctggggctctgcatagcagcagccccatgccccacctccctgtcccaggatgatcgaggacctggagctctccaacaaacggcactcactggtgcagacattgtcgggtggcatgaagcgcaagctgtccgtggccatcgccttcgtgggcggctctcgcgccatcatcctggacgagcccacggcgggcgtggacccctacgcgcgccgcgccatctgggacctcatcctgaagtacaagccaggtgagtggggtgccgtgtgggcaggggtgcgggcggcgcctcccctgccccctgaccctgggtctggccttgtcctaggccgcaccatccttctgtccacccaccacatggatgag

SEQ ID NO: 49101 - DNA, 1695 bp, Homo sapiens
acagtgggtaccggtggagccctgccaccagccccacccctgacagctgcccccgttctcccaatgacctggggaggggtcccgggtgcttggcttccttcggcttccccccactccttggggagtccctgcccctctacccgagaaggtgcttggaggtggggaagcagaaggggctgtgctggccagccctttatggacatgggttggggcgagagaccccactccttcctccccgtgcccggtctttggacgtttccctagcgcctcctcccttgccctgcctccactttccgggaagcactgcccctcacaggaagcgcccgcgctgtcaccatggcaatctgggagggagagggcctccaggcgtgtacccagtcctcaggctcctgggaggaacctgccagaagcggggaggccgggcctggggctacctcctggacggacccctccacctgatggcccctcaccctccccaggcgggggccggccccagcccagactggaagatgagattgacttcctggcccaggagcttgcccggaaggagtctggacactcaactccgcccctacccaaggaccgacagcggctcccggagcctggtgagacccccgcttcccctgccccacggccctgtccctagcccagtgctctcattctaacctgtcctctctcgcagccaccctgggcttctcggcacgggggcaggggctggagctgggcctcccctccactccaggaacccccacgcccacgccccacacctccctgggctcccctgtgtcatccgacccggtgcacatgtcgcccctggagccccggggagggcaaggcgacggcctcgcccttggtaggtcttggtcgggggtgggcaggggcagcagggcgccctgcagaaggccgccctcacacgccccctcctgcagtgctgatcctggcgttctgtgtggccggtgcagccgccctctccgtagcctccctctgctggtgcaggtgagccagtggccgcgggcagggcagggagggtgccacacgctcagaggtctcaggccccactccccacaggctgcagcgtgagatccgcctgactcagaaggccgactacgccactgcgaaggcccctggctcacctgcagctccccggatctcggtgtgtggcccccttcagccctgaggctcccgcccaactctggccgccaactgaccctcgcctcctccttcccacagcctggggaccagcggctggcacagagcgcggagatgtaccactaccagcaccaacggcaacagatgctgtgcctggagcggtgagtggccgccccggcactgccacccccacccacccaccccccatccccacctccacctccatttccacctcccctggccaactttaccccaggccctgccaccctcacctgcacgctaaccttcacctcccccgccgccctgcaccctcacctcccctggccaacttcaccctgggctgtgctcccctgccaccccagggctgaggtgggctgagtgcccacttccagactgggccactggcacctcgagggcatggggaggacccagcgatccccccccacccaggcataaagagccacccaaggagctggacacggcctcctcggatgaggagaatgaggacggagacttcacggtgtacgagtgcccgggcctggcccc

SEQ ID NO: 49102 - DNA, 1030 bp, Homo sapiens
gcccctgactgcagcccctggtgtggtggctttgggagtgacctgcctgggttctgtgtctgaggccagtgaggtcagcagactccatcttaggtgtcctcggtgcctgggggacaagccagaggctggaggagcagcatcccttccaggctgcacacttgtcagtgccgggttctggggagagccgcacgggaaggagaggtcgctggcggcatcgtttgctgctccccagagacagacctgggcccttccctctgggactcccaatctggacggggttcctggcttgctgtggggcatgttgaggccggaggctgggcttgtggggctgcacggccctgcccaggagaactcagcactgcctggacggcgagactcagcttctgagctgagggctctatcaggcctggaagtggaccctggggaggggtggggcagggtagttctgataagtcctaggactgttcgcttccgggttctgagccctggcgtcagggaggaagggcatgtccagaacaatggccagaaccaggcccggccagctcggggggtgacgggggcgggtggctggggcagcgctgccgtgtgcaggggccgagccctgcggggccgtgagccggccctgccttctgcttccttcccagatgtagccgcctgtcccgggagcctggactgtgccctgaagaggcgggcaaggtgtcctcctggtgcacatgcctgtgggccctgccttcagcccttccaggaggaccagcaagggctctgtgtgcccaggatgcgccggcctccaggtacgagagcaaagggggaagtcgatggggggatgtccctgcatgaacctctccctgtaagaagcggccggctgggcgcggtggctcatgcctgtaatcccagcactgtgggaggcccaggctgttggatctcatgaggtcaggagttcaagaccagcctggccaacatggtgaaaccccgtctctactaaaaatacaaagtagccgggtgtggtggcacacacctgtagtcccagcta

SEQ ID NO: 49103 - DNA, 1051 bp, Homo sapiens
tgagtgcccgccggcttcgctgccggtgcgcgtcccggggtcggggcctcagtgctgctctgcctgtcctcacgccttgggtggcgctgggcaccggccttgtgcgccatggtgggcgctgaagttctgggggcacttatggcgcaggctcggggtgctgttctagcttcaataggagggagactgttgcagcctcagagcctccgcctgcatcccctgccctcgagggcactggcattctgtctttgggactgagggctgcaggtggactccggaggagggtgataagcccagggtcctgggacaccctctcacctgcacagatgggtcctgagggtccagagagcagagctccctgcaggaacccaggatgcaaagctgacgtttttctggggggactgaactgggagactttgcgactgcattcgtacagtactcctggcagccctgcagaagaggtgctgtgagcccgttttacaggcaaggaatccgaggcatggagaagttaagtggattgtggcacagctgaggcgctgtcctgggcagcctggttctgtgtgtgtggcctcaaggggccagagtgaggccggcttcctcctgggctcagtgcccctggatgggaggtgggcatgaacaggagaggcttccgagaatcagagtgtgctcagccaggaaaggcggaggccacctattcaggaaacggggctgcagctgctgtgctgagcccgggtgggtggcaggtgccagtcctcagttcaccggcctctgcagcttcgtgtctgcctcaccgggagacctggcagggccctccctaggcaactcctcccattcccagtgcccagtgcttggaagggagggccctcaggcagcccagacgttggcgggtggaggggggtgtgccagccaccgtccagctgctcttgttcctgcgacctcttttcaggaggaggaagtgggggatggaggctcctgggctggggaaaagggctaggaggggcctggaacccagaccctagagccagctttgtacctcaggcccctgcctttggcg

SEQ ID NO: 49104 - DNA, 1046 bp, Homo sapiens
ggctggggtctgcccaccagggcctccccacgtctgcctttgagggtgcctgccatgccctgggggatcctggcatctttactggactggaagcaggagacagaacagtgtctgtcccggggtgacttcatcaggagaccgcccacatagagctggaccccgcagctgaagcggaaatgtgagacaggctggcacctccggaaaaactgcctttcagccttggtgttccgtgcaaggtgaaaagaaataggtcctcccagtttacagcttgaaatcaggctagtgagtggccctggagaccacgaggggagaatttaaaggccccggctggcagggtctaggtggctggcagaggcacatgcagaccctgcctggagcctgccctaggacgctgggcgggtcagtctccgtgcaggatgtgagcagcgtccctgggctctatccgcgaggtgccagtagcgtgtgcaggtacatacacgtgcgtgcacactgtgatgacacccggaaatgtctcaggatgttgaaatgtgtccttgggggcagaagtgtccccagttgagaatctgccccagaggaacacacccacaccaggcctcaggattttgtgttgatcaagttccaaggaaaaggaacatctcagccgggcgtggtggttcacgcctggaatcccagcacttgaggccaggagttccagagcagcctgggcaacgcagtgagagaccccatctctacaaaaaaaaaaaagaaagaaagaaaatgagagatccaggtttaaaaattcataaacaccacaaggaaacaatacactatgagacccagcagaagcaacagattgactctagacccagatactagaattatcagagagaatataaagtaacagtgttttatatatctaaagaaataaaagagatttctggaaacatgaacaaggagtggtatttatagttccttactccatgaaaagcatgatctcttaatgctataaagaagactaggccgggcgcagtggctcatgcttgtggtcccagcactttgggaggccg

SEQ ID NO: 49105 - DNA, 1073 bp, Homo sapiens
atgtgcgcctgtaatcccagctactcaggaggctgaggcaggagaattgcttgaacccgggaggtggagcttgcagtgagctgagattgcgccattgcactccagcttgggcaacagagcgagactgtctcaaaaaaaaaaaaaaaaaaaaaaaaagcaggcatttcacagccatgttcatcgcatcaatattcacaatggctaaaacaggccgggtgtggtggctcacgcctgtaatcccagcgctttgggaggctgaggctgacagatcatctgaggtcaggagttcaagaccagcctggccaacatgctgaaaacctgtctctactaaaaatgcaaaatttagccaggcgtggtggtgggtgcctgtaatctcagctactccggaggctgagacaggagaatggcctggacccaggaggcggaagttgcagtaagccgagatcgtgtcacttcactccagcctggacaacagagtgagactctgtctcgaaaaaaaaaaaggacaaaatgctgtaggattccactgatatgacgtacctggagtcagcagagccacagagacagatggtagaatggtgagtgccaggggctggggtccattgtttaatggctacagtttctactgggggtgatgagatagtggaaaatagtgatgacggtgcacagcgttgtgaaggcaggaatgtacctaatgccaccaaatttcacacgcggaagtggttaagtggtcaattttatattatgtataattcagcacacagaccagcacggccccaagtgcggatgcagtaggtcacggccagccgcccgccgatagcctttcagtctgagggacagcacagacgtgatgtgtggccgggcatggcccccagtctgtgagccatagagggtgggactgggtgtcccagcaggaatcggggtgtggaggagctgcctagatggtctggagagggcagatggacctcgaggggagggtttgggctcagcagcctctcacccttgctggccaggctcccaggattccctgcccagggacctctcaccccctcagctggtggctctgcagccaa

SEQ ID NO: 49106 - DNA, 1887 bp, Homo sapiens
ggactggaggtctgagatgtttactgtgaaactgctctggctgggtggagacactggagggcaggaggccaggagagctgcctggctgtgggaaaagctgagtgggggaggagggctccgcaggagtgggccttgggaaaaggagggcgggtccctgggtggaggggccagcaaaggctgtgcaggctctggcttggggacactgaggagctccgttttggatctgcccactgtgagatgcctgggaggcgccatggagaccttggtgggcaggtggtgccgggatcagagtctgccaggggagacaggttttaggagtccctaggtatagatggtttttgtcgtccggaaaggttggaagaaggggccaggcctagtcctgagtgccaccagactgagaagattggggtcagggaggagggcaagggcagccagagaaccaggaaaacatctcatcattgaagatacggttcaggaaggagaatggccaaattccagatgctgttgagaagtagatttaaatagattgaaagtaaaaggatggactgggcacagtggctcatgcctgtaatctcagaacttgaggaagctgaggtgggaggatcaagtgagacaggaagttcaaaagcagcctggtcaaaatagtgacatcccgtctctacaaaaaataaaataaattaggacctatagtcctagctactcaggcagctgaggcaggaggattgtgggagtcgaggagtttgaggcagtcatgaactatgattgcaccactgcactccaggctgggcaacagaaaaagaccccgtttcaaaataaaaaaaaattattacatgatataaggacattatatagtaataaaagggtcaattcatgaacacattatagcaattataaagatgtatggccgggcgcagtggctcacgcctgtaatcccagcactttgggaggcccaggtgggtggatcacaaggtcaggagatcgagaccatcctggctaacacggtgaaaccccgtctctactaaaaaatacaaaaaaattagccgggcgtcgtggcaggcacctgtagtcccagctactcgggaggctgaggcaggagaatggcatgagcccgggaggcagagcttgcagtgagccgagatcgcgtcactgccctccagcctgggcaacagagcgagactccgtctcaaaaaaaaaaaaataaataaagatgtatgtaccaagaacagctccccaaaatatatgaagcaaacattggcagatttgaagacagaagtaagttctacaataatagttgtagatgtcactcaacctatttcagtaatggaaaacgtatctaggtggcagatcaacaaggaaatagagggtctggacagtgctaaaatcaactagaaaggacggacacagaacactcacccaacaacagcagaacacacagtttttaagcacacggaacatcctccaggacagaccatgtgttaggccacatattaaaatatattaaaagaagttttaatatatatatatatatatatttttttttttttttttttttttttgctttctttgttgccctggctagagtgcagtggcacgatctcggctcaccgcaacctccacctcctgggttgaagtgattctcctgcctcagcctcctgagtagctgggattataggctcccgccaccatgcctggctaatttttgtatttttagtagagacggggtttcaccatctaggccaggctggtctcaaactcctgacctcaggtgatctgcctgcctcagcctcccaaagtcctgggattacaagcatgagccaccgcacctggccttaagatattttctttttttttttttctttttgagacagagtcttactttgtcaccca

SEQ ID NO: 49107 - DNA, 1043 bp, Homo sapiens
accgtctggggcgtagcgcagggcgttccccgagatctcgcgctcgccgaccagccacacgtacccggagcccgtcatgttcagcatcgcggctgcgcggtatacagtggcagcatcgtcctcgctgtggggcagacggggatgacgggccaggactccagcactcccaccgcggcgctccgcaggcccaggtcctcctcctctggagcagggacctgcccagcccccatcccctcctagagcgaagcctgcagacctcgcagaggcgctgcggcccagaacccaggagcctcccaggcctccgttgctggctcttaccttgggggagcagggatggggttagatgctggcccccttaccttgggggagcagggatggggttagatgctggcccttaccttgggggagcaggggtggggttagatgctggcccttaccttgggggagcagggatggggttagatacctggcttatgggactgacttccttcttgtgacctgcacctgtgctccccagcacgcccttccctccacctcagaaggctctgatggggtcccaggatggtaatggatcaccattgatcacttgctggccagataccaggcactgctcgaagtgttttacggggattatgttgtttaactttcacaatatctctgtgtcccgaggggaagcggaggcacatgggacacacaagagttggtaagtggcagagtcaggacccgagctcctaagacctcctagacaggccacacccctctggtcctctatgttcaaacatgtgaaatgaggggttgagtggctctccaggttggtgagatattggtggatccagcgtcctggggacggccagagatgagaggcggctttccccctggagtctgcataagcagctgccttcgcccagccacccaggcctggggcctgcaggaggacagagcccagacaggcctcaccttgcaggcatgtgtggtcttgagctctgccagtgtgcttgcaggtgggcccctgtggacagtggagcaggggacctggtcctctg

SEQ ID NO: 49108 - DNA, 1058 bp, Homo sapiens
agctggccctcctccctctcaatagcgcgtcgcggcagcactgtgtctttttggttttgcaaagcgccgcgtccacccccggtgctctataaataagaaccaacaatcaatacccgctggccccgccggccgccagggaccccagccctcagcgcccagtgccgccctggcccggaccggccacaggacaggggcaggggatctccgcagccggactgaccccaccctacccaaaggagccccccacccacgcctccctctgaataagctcgcagccccagagaccaggtgggagctgggctgccctcccctgcccagacccccagctggcagtgccccccacagttcagccttgcagggcggggccagccccagatgccacgtgatgccagaactggccccagaggacggtccctggtgcccagagaggctcgggtgagggttccgctgggaacatgtccctgggagggcaccatgagggtctctgagctgcacctggcctcgctccaggcagggccctgggacccagtgtcaccctctgaaagtggcccatcacctgcacgacatttgtgcttgccccccgtggctgcctgccccaaatcgctgtttctcctgtctgcctggacaccccctcttccccagcctgcccagcccacgatccctgcgctattccccctccctgttccctgcgggactcctggctcagactttgcagcatcagctctgcccgctttccgcagcagaggtggctccaggaatggtgcttccacctgctccttgagcctccagtggcccccaggcctacaggctctcactgtccacccatcctgcatgccaagtcccttccccaggaagctgagcagccaggcctcatgggtccctcttggggcaccctggtggcttcatctcgggatttggcttgcttgatgccaagtcctgtctgtgccctggaggtctgccccgcttccagtgcactgaggggcaggtggctgcaaatcgcacttcctcccccgggcgtaagcttctctctggtgatgctgcttatgggctgggggctt

SEQ ID NO: 49109 - DNA, 1085 bp, Homo sapiens
ccgcgaggccctcatcgccctccttgtggtgctggcgggcatcagtgccagctgcttctgtgccctcgtcatcgtggcaattggtgtcttgcgggccaaggggtgcgtgaaccctggggccgggagaggatgggagtgaggccaggctggctgccctgggcccttggtcttgcaagaagggctttaccccctgggtgggctgtcacctggggtaggaatggcgtttcctaggcgtgtgctgggggagctccgggggcccagcactgttccaggactcatgttggccttcgtcccctcagtgaaacatgcccgagacaagtggacaacaggtgagcaccagggaggccctcgagggaggcacgctgtctcaggggaggcccttggcggggggagctatcccaggggagtccctggaggaggaggggtgctgtccctggaggaggaggggtgctgtccctggaagaggaggtgtgctgtcccaagggaggccctttgtgggggtgcactgtcccagacgccagcctgtcctgggggaacaaggactctaccagctcgtgatgacccggcccgtcatgcaggttggtggagaattttggggtccaggaagatctcatggacctgcacccggtttacgtggagtcccagctaatggacgctgacctggaggtctccctggtgccaccactagaggatcagagccttgtggccatccccatggaggcttcttcagaggagccgccaccacccccgcccctaccacctgagtagagggctgagggcagctgggggaggggaattaaagcgtatttagtggctgtgcactgtcctccctgcaggccctcctgagggcagctgggggaggggaattaaagcttgtttagtggttgtgcaccgtcctccctgcaggccctcacacccctcacggctgcatcatggggggtgcacgcgcatatgggtctcatcaaagcagagtgcccaggccccacagcaagttcccctgttcctctgccccctggcagtaagccatacccctaatgtttccaccttctctgccacagctggtcagcccggctccttcctgcacc

SEQ ID NO: 49110 - DNA, 1731 bp, Homo sapiens
cctgcgcatcgaggagctcttcagcatcgtccgaggtggtcctgccccggccctggggtccgctctcccgtctggggagtcttcccagggccttccccgtgtctcctctgtgtctgcatctgggctccctgtgccttcaccgtgtctgctctgtgtctgcgtctggggctcccagggcctttgccgtgtctgctctgtgtctgcgtctgggctccctgtgtctgcgtcttgggctccctgtgccttcgccgtgtctgctctgtgtctgcgtctgggctccctgtgtctgcgtctgggctccctgtgccttcaccgtgtctgctctgtctgcgtctggggctcccagggccttcgccgtgtctgctctgtctgcgtctgggctccctgtgtctgcgtctggggctcccagggccttcgctgtgtctgctctgtgtctgcatctgggctccctgtgccttcgccgtgtctgctctgtgtctgcgtcttgggctccctgtgccttcaccgtgtctgctctgtgtctgcgtctgggctccctgtgtctgcgtctgggctccccgtgccttcaccgtgtctgctctttgtctgcatctggggctcccagggccttcgtcgtgtctgctctgtgtctgtgtctgggctccttgtgtctgcgtctgggctccctgtgccttcgccgtgtctgctctgtgtctgcatctggggctcccagggccttcgccatgtcggctctgtgtctgcatctgggctccctgtgtccacgtctggggctccctgtgccttcgctgtcgctcttgcaggggggtgcaccgggcagtgctgggactgtccccactgcggcgtcccccgtgcctggatcagggcaggtgtggcagatgctggacagtgcttctgggtgtccactgctgtgctgccttggccttggctcctgctggggactggcccctgggtgttgctctgtccaccctgtggcattgtggtcaaatgcatcagcacgccagagtgtcggggggatgtctggtgcctagcaggtggtctcatcatcgtcctggggctggcaagcacgtgtcctttcccacaccgcacacactctgcaccagcctgcacgtgcgcacgcatccatgtctgtccctgagggatgttcttcttcttgtagacttcccagactcccggccagccatcgaggacctcaagtactgcctggagaggacggaccagaggcagcagctgctcgtgtccctcaaggctgccctggagactcggctcctgcatccaggtgctgtgtgctgcccggccacccagcactctgggcttagacactcaccaggggacccatgtccagggagcctggggcctagtctgccagccctggacttgtaggtctaaggaagaaatgggttgagaagcaattggtgaggtccttaggggatctgaggtgcccgtcagcttgcttgtttcttctttggagggagtcaggactgaccggtaggtctgaggtgatgagacttagttctctcagaacagacctccctgcagggcgggacctgtgaacaggtagaggtggggatggggggacaagggaacgaggctgcagtggggacctgtagaccacctaccggcatggccagctgtctactcgggtgttgcccctgggaggctgtggtcccgggcactgcatgactgctggcttctgccctggctgtaggcgtcaacacgtgtgacatcatcacc

SEQ ID NO: 49111 - DNA, 1031 bp, Homo sapiens
gcctggtctagggtccggccacccgtgggagccttggctggggctgcgtgggggatgggaggcaggtagctgtgtgcagggaggagggagaggcggggctgggctcagctcacacctccatctgggcaggttggggctggctgcttggccctttgtcccaggtggaggccaggccctttggtaaccaaagctaggtgtgcacaggcagggtgggtggagcgagaacagaagggtcctgagaagccgggaggctctgctgggaggctgggctgagctgggacccacctgcctgctctgttggctgtgccaggcaaagtccctgataggctgcggccaggtgcgtgcggtcccagaccctggccacaccctctgcccatcctgcgtctcggggtcttcaggctgcccaccgtatgagtcacggggtgtcctgtccccacagtgggaggggagggctgtgcgagtcagcaggcaccagcccagctgaggagacctggggaggcaggacgtgaccagagccccgggccccagctgagggcagacaggggctgcctgtccaccccccgccccgcaccgcctggccaggctgtaccaggctcagggcccatgtgcacccagcccccgcggcccccctgctgggaccggtcatgtgcacgagtgagggcactaatcccgcggccctggcagccagcccttctgtgttctcagccgtgggggctgggcctggagggcttcggggtcatctgggttagctccacatatccagggcgactggaaaccccatttgctgctggacttcggggctgtgggagagctctagccaccagccctgtcctgccttgagcacctccacctggggtatctgtcccaaagcatgagtctgggagggccgggtgaccccctccccaagtgggctggcagtgggtgggtgcctgtgaggtctgtcccagcctctccctgcctggcctcctgtgggatgagcgttggagggccaggtgggcctagccacaggcagggcagttaagggacaggag

SEQ ID NO: 49112 - DNA, 1101 bp, Homo sapiens
ggccgagggctggggctggcggggccgctcgctgcctctcgctcgcagcagcggcggcaggcgcgggcgagggccacggggagaggagacgcagccccgcgggtggcacgctcggccgggccccggcccgcgctcaacgggcgcgatgctcttctcgctccgggagctggtgcagtggctaggcttcgccaccttcgagatcttcgtgcacctgctggccctgttggtgttctctgtgctgctggcactgcgtgtggatggcctggtcccgggcctctcctggtggaacgtgttcgtgcctttcttcgccgctgacgggctcagcacctacttcaccaccatcgtgtccgtgcgcctcttccaggatggagagaagcggctggcggtgctccgccttttctgggtacttacggtcctgagtctcaagttcgtcttcgagatgctgttgtgccagaagctggcggagcagactcgggagctctggttcggcctcattacgtccccgctcttcattctcctgcagctgctcatgatccgcgcctgtcgggtcaactagcctcaccgaggtgccggagagggagcgctggacaactagaatgttgacctcgagccgaggccctacttgcagcgcaccggaggagaggctctctagtctgaaggcaccgccggcttgcgccgagctgagtgccgggtttccctattccaatcctgtttgaaatggtttcttcagcagggcttaaaagagcagccttcatcctgaaaatgtatttccttttgtttaatgctttgagtagataatcctgaattgaggtcatgaggaggccccccaggccagacagtcctgaacccctctgacacttggaaactgaatataagtaaaatgtccaggtggactctgagtatttcctgtggatcctgggaaagtactgttgcacaaaggctgcaaagctggactcaggaatgtcctccaaccagcagcgctgacctaagagctccctgtgccgtctatccagaccagacttcggtagatgcctttgttagatctatcacatgtaaacgagcttgtatctccttccctgtgccacgagagagattggcttt

SEQ ID NO: 49113 - DNA, 1043 bp, Homo sapiens
gtgagctccgtgcccgcaaacaggtggcggcctgggggcagggcaggggcaggtgagggggagcctggggggtgggccggggtgggccgggcctcacagggcagcctgtccgccggggctgtgctgttcctctccatgtaggggccggtgagggggagtgtggggggtgtagggggcttggggtgggccgggcctcacagggcagcctgtccgccggggctgtgctgttcttctctgtgcacgggccgaaggcgccacagctgctgttctcctgggtctggggagggcagggaggactcaggacaggctcagtgggcagacagaggtcagagggctcgaggtgagggtgggtggggcgggatgactcagcaggtgggaggttgggggtcagtgagggcctagggttgggtgcctcaccggctgccccgtggtgccgcaccagtgcttaatgagactgctgttagtggcgttgcctgtggcactgctcatgatcatgtcggagtccaactgggggccagaggggtcgtgacggtgtgctgcaccctctctcaggactcacccggggctctggcgcccgcggggtccagcccagccctgcccactgctgccctctcctcccctgtcccaggacagggcccagaccctccgctgaccctccatcagggcagggcgggcctcccctcctcccatccggcctgctcaggctctctgggcgggggcggtggccgtcctcacctgcacgatgaggtgtgtgagcggcttcgtcagcaccttgaggatgtcgggcgcctgcgccctgggtgtcaggctggcggcacccagggctagctcacttagcctctccagcagggccgtggcgctctccagtggcagcaggaccagcactgtgagccagttgaagatcccgtgcaccgccgagccgctgaaagccctgtggccgcagagagtgggcagggtcaggtgggggggcccgggctggggctgccactgcagccccagcccagcccttccacccacaactcacctctgaaattcatcccggt

SEQ ID NO: 49114 - DNA, 1043 bp, Homo sapiens
ccctccaggggctgccggacttggaggagtccacacacaggtgcagtctggagggcttcctgcagggggtggagcaggaccctgcactgggagggtctaagtggatagagacagggcagaggcaagaagaacgagcgtgggttccagggggtgccgcacttgtctcttcctgtcagcggcggtgcagcatgacccggagtttcgggagctgaacctgttgggcctccgggcagcaggccgcagacgggctgttttagagggagaaccagctggactaaatgagactggggttggggcacagagctgggggctcagactgggggaagtgtcctggaggcagaatcacagccctggcagcggcagggcagggcccagcatcggtgggactcggcctttgcagatgtggaatgggggctgggagggtcgtccagatggggacctgctggaggtgagtggctgctccttgagggagcaggggttgggggaaagcatctgagggtgctggaatagaggggcttagagccccctgagatgctgggggcaggcccccagggacacagcaaagagctgagaaaatgtggaagtgaggaggtctcaagggaggagacgcagggagggtgtgaaatgtgtgcaggacctgtggggtccaaggaggcagagcagcagggctgaggctggcggccagggaaggggtccaggaaggcgggggcacagccagcctagggccccggggctggtgacacactcctgtctgtggggctgagaggaagctggccagttctggcagcggggcagggtggacagtacctgcagggcgctgagcatcctgtctgcggggctggccagggcagccagcagggctgtggtagtggtgccgatgttggagcccagtaagagggggtacgcccggtccagactgatcaccccgacccctgggggaactgggagtcaccacaggaccccagcccgagcccccgttcccgaggcctctgtcctgcctgctcacccatgaggggcacgacggccgccgtgaagacgctgct

SEQ ID NO: 49115 - DNA, 1106 bp, Homo sapiens
tgcatttttttctagtcttaaaactaaaaacttgagtctaccatttcttggttgcactgaaaataccgcccagcctgatggtgttcccgtgctgtccctcccccttcccttctccccgcgtctacctccccaccccgttctgttccccctccctccttctccctctccctcaaatccgtgagttttggaagccccagggcctctctcccccgcccctcctggatgaggccaccatcccccaaaccggcttgttttgcagtttccccaggatcctggaagctcgctggcgctcgagggtggcggggacacgggggggtgggtgaaggttcgttaccttttctagtgcgttctatcatagttaacggttgcacacttttttaaaaaaagtaaatggatttgccacaattaaatgtcataacatttatgacagaatataaaatattaacatattttaagccaagttttaggtgtattttttgaatcttggttataaacccaattttaaagggcgatgtatccagcgttgtgaaggcaacagagtgtacccatatttatatttttataaaatacctataagactgtgaatctcttgtgctaatggctgagttaattgaaggatcgttttgcccctttttagcctcccagagcttcgaggactcaattcgaacccgaaatcctgccgtgggggaggggttgcgtcgagacctgggcccggggaggttctcctgcgtcactttctgtcctgaaaggcgcccttcctggtttctgtggctccaattttctatgcagccccacaccccttgttgttttgatcctgagaaataaaagggaggctgaattattcaaatttaaatgaggtttccccttcatggaagtgctgctgacccttcgtgcagaaatggggagcacttgaggacacaggtgggtggaggccctttgtgcgtggctggtcgtattcgggcagccctccgtcgctttttataaaactttgtgtgagaagaatatattgataatgtcagtgaaacaagcagacattgaaatggaggcacagattactccacaaggagttcttctgtatattttttctagatgcaaataccttttta

SEQ ID NO: 49116 - DNA, 1058 bp, Homo sapiens
tcggggcagggccctgtggcacagcaatgtccccatctccatcctcacggccaccctcctcacagggcctggtggggcagagcccgtggcttcaggagcagctgtctcagctgctggtctcccacagtgacccagtcacggccgcccagtgtgccatggaactcttgctgcccgaggagcggctgccggctgcggtggctgtggaactccgccggttcaggctccaggggaggtgagcgccgccagggtgaccccagccaggggtgggttccgcccagggtggcccctacccttgggacgacagctcaccagtcttcacgccagtggcttgagaattagaaatcaagacaaaacaaagagcgcagctatacacagagcagacaagacagcagggcccagccctcctcctctgctgccagatccatggccagcccgacccatgagggaccctggggggacagtcaccagggccactgggaggagaggcaggagcaagggtcacgctgggctggactgagccggtgtgggaggaggagccaggacctgagatgcccccaccaaacaggccctgaatgctcccctcctgctccgaggtcagagtgggtgggggaccagggacatgggggcgctaccagctctgctcctcccagggcgactgaggctgactcgaggctggaggtgaaggacatgaaggaccgttactaccagctgcccatccccagggagaacgtccacctcctggcctcgtgggaagacctgaccagacacgagggtgcactcctgcaggtggttccctcggccgctggggcagcgcccggtggtgggatccccctgccaggcactggaggagcatcaggggcatggcattcggagagaggcaaggcctctgggcatgagcccgccaggtgccccagggctgctgtgagggcagccgttccccacactgtgctgctgagactccaggatgctggctgctggcatttacccagtgctgccagcctgtggaaggtgccgtggaatccccattttacagatggtgcccgagacgtggggtgcct

SEQ ID NO: 49117 - DNA, 1556 bp, Homo sapiens
tttttttgagacagagtcttgctctgtcgcccaggctggagtgcagtggcacaatctcggctcactgcaagctccgcctcctgggttcacgccattctcctgcctctgcctcccgagtagctgggactacagtcgcccgccaccatgcccggctaattttttgtatttttagtagagacgaggtttcactgtgttagccaggctggtctctatctcctgacctcgtgatctgcccgcctcagcctcccaaagtgctgggattacaggcatgagccaccgtgcctggccactatcattgcatttctaaagaaataagtaagaagtggggaaaggaggaaagagaagagagagtaaaatataagtgaacaatcgtttagtaaaatgggggtagttgcttacacattcccaaatcgatgtcccgttactccccattctcagagctttagtcaacctacttgtgggtgtcactcatggtggcttgcttccttgtgtgttttctaagttttcattgtgagctcatttactggaactttttccctctggtgacctagggcccacgtgtcccggcaaagtgattaaagaatgatgttttgtttctgccaacttaactacagatagaactcactagggctagaactcactagggctagaactcacgaaagctagaactcatgagagctagaactcgctagagctagaactcactagagctagaactcactagggctaggactcactagatataactcactaggcctagaactcactagagctagaacttgccagcgctaggactcacaggagctagaactcactagggctagaagtcactaggcctagaactcactagagctaggactcactagacctagaactcgctagagttagaactcgctagagctagaactcactagaactgtaactcactagagctggaactcactagggctggaactcgctagaactagaactcactagagctagaactcactagagctggaactcactagagctagaactcactagggttaaaactagggttagggccgggcgcggtggctcacgcctgtaatcccagcactttgggaggccgagacgggcggatcacgaggtcaggagatcgagaccatcctggctaacacggtgaaaccccgtctctactaaaaatacaaaaattagccaggcatggtggcgcgcgcctatagtcccagctacacgggaggctgaggcaggagaatggcgtgaacccgggaggcggagcttgcagtgagtcgagatcgcgccactgcactccagcctgggcgacagagcgagactccgtctcaaaaaaaaaacaaaactagggttagaactcacaagagctacaacttactagagctggaactcactagagctataactcattagggctagaactcactagagttagaactcactagagctagatctcactagggccaggactcactagagttagaactcactagggctaggactaagttcctggagctccttcaagttgcttcaagttccagatgcttgagatgctcaggctt

SEQ ID NO: 49118 - DNA, 1015 bp, Homo sapiens
cagaaacatgcacacagctgttcacagcagcactgtttataacagccagacaagggggtgcggcccgaatgtctgctggacaaacagcccgtggtctgtgcacacagtggggcaggactcagccacggaaaggcagttccagcacatgctgctgcagggatgagttttgaagacaccatgccaagtgaggtcagtcagccacaagagaacagaaccttggccgggcgcggtggctcacgcctgtaatcccagcactttgggaggccaagggaggtggatcacgaggtcaggagatcgagaccatcctggctaacacacagtgaaaccccgtctctactaaaaatacaaaaattagccgggcgtggtggcggacgcctgtagtcccagctactcgggaggctgaggcaggagaatggcgtaaacccgggaggcagagcttgcagtgagccgagatggcaccactgcactccagcctgagcaacagagtgagactccgtctcaaaaaaaaaaaaaaagaaaaaaaaaacaacagaacctgtgtggtctcctttataggaaatgcccaaaatagaaagattcacagagacacaaaatggccaggggctgaggaggggcagagggagtaattgttgatgggcacatggttggttgtctttggggcaatgaaaatgttctgggctgaggcaagtggatcacgtgaggtcaggagttcaagaccagcctggccaaacatggcaacaccccgtctctaccagaaatataaaacttagccgggtgtggtagtgggcgcctgtagtcccagctactcaggagacttaggcacaagaatcacttgagccaggaggcggttacagtgagctgggatcgcaccactgcactccaccctgggtgacagagcgagaccctgtctcaaaaaaaaaaaaaaaaaaaagctaggccaggcgcggtggctcatgcctgtaatcccaacactttgagaggctgatgcgggcagatcacaaggtcaggagatcaa

SEQ ID NO: 49119 - DNA, 1021 bp, Homo sapiens
gcgtgatccccttagggcaacgcgactttatgctgctctgtgaaccctttcccatgccattaagtatttttataaaacatggtttttaaatgctgtttatcattcatcagattctaccttgtgtgatcagaactggggtccttgggaaagcccacccttgatgggggactgttggccccagccccgtctgtgatggtgaccccaacatgtgctgttggcacctcccagaaagggttccccagagcccatgggccacctgacccgtccttgcagctgtcccatggtacatccatgtgttgtgggcagtgagctgcagggaggtggggtgcacagagaagcttgccgcagagctaaaaccaacacggtgaacagggaaggtgtccttcaaaaccgcagcctgggcaggagcagtggctcctgcctgtaatcccagcactttaggagaccgaggcaggctgatcacctgaggtcaggaattcgagaccagcctggcgaacatggagagaccctgtctctactaaaattacaaaaattagctgtgcatgcctgtaatcccagccactcaggaggctgaggcaggaaaacggtttgaacccgggaggcggaggttgcagtcagctgagatcgccccactgcactccagcctgggcaacagagcaagactccatctcaaaaaacagaaaaaaaaaaaacaaacctgtgacaggcccagcgcagtggctcacgcctgtaatcccagcattttgagaggccgaggtgggcggattgcttgtggtcaggagttcaagaccatcctggccaacatgatgaaaccgcgtctctactaaaaatacaaaaattagctgggcgtggtggcaggcacctgtaatcccagctactcgggaggctgaggcaggagaatcacttgaaccctggaggcaaagcttgcagtgagccgagatcgcccccctgcactccagcttgggcgacaaagtgagattccgtctcagcctggacaacagagcgagactccatctcaaaa

SEQ ID NO: 49120 - DNA, 1930 bp, Homo sapiens
cccacatgtgttcaggaccctccctgcccaccccctccctgccgtatcgatcaccagcaccagggtggcccgtgtgcgtggggccagcgtcgccgggctgcccagcctggctctgtctacactggccgagtctctgggtctgtctacactggccgagtctccgactgtctgtgctttcacttacactcctcttgccaccccccatccctgcttacttagacctcagccggcgccggacccggtaggggcagtctgggcagcaggaaggaagggcgcagcgtcccctccttcagaggaggctctgggtggggcctgctccccatccccccaagcccacccagcactctcattgctgctgttgagttcagcttttaccagcctcagtgtggaggctccatcccagcacacaggcctggggcttggcaggggcccagctggggctgggccctgggttttgagaaactcgctggcaccacagtgggcccctggacccggccgcgcagctggtggactgtaggggctcctgactgggcacaggagctcccagcttttgtccacggccagcaggatgggctgtcgtgtatatagctggggcgagggggcaggccccccttgtgcagagccaggggtctgagggcacctggctgtgttcccagctgagggagggctggggcgggggccgggcttggaacgatgtacgataccctcatagtgaccattaaacctgatcctccaccgcggccgccgcgtgggtctgtcctctcagtgctttccaggggccttcctgtgcccagcttctgggcccactcctgtgaggtcactgctgcagggccttcctgcctggacagagttggagctaggccactagaccaccccacagggcatagccagggggaccagcacaggaggggacggagaggagctgcaggagggctggggggaggctgcagtctcggaggggggcctcgccgggtctggaggggacagcagagacagcccgttccccctgccgcctgagggcaccagggagagggctgtatgtccctcacgccacactgtgtgtgcagtcagcagtgtggccacagatgggggccactctctcaacctcaggtgtcctcagggcccagaccgctgctgggcacagccaggctggctgccagctggttccctgccccgtggctgggggacagagcagcacgtatcagctgggctagggtcagggggccactggtgcgcagcctggcacagcctggcaggcttgaggcccagtgtgctgggggtggtcacacagccgtcagccacctccagctcttccagggcattctagatggggtcccgggagggggcaggttttggtgccaatttgagtgtataaagttttaggtaaataccaaatgcctgtagactctgtgttattcagttactatttgaaagtgacatatcgtgaaatcatgggggatccgagtctcctttctgcaaagttgatgagacaagtcgccaccgcctggaatctgctgacgctgccgtgcaggcctcaagggtggcactcttcaaagtaggacagcatgcgaggtcgccacgtgcccacacactgcactgctccaaaggcacatctgtccgtcacctgagctctgagacccagaacagccacagggaccctgcagtcctaacccgtcaggtggctcctggggctgctgccagccgcatgcctgtcccacacagtccggtccgtagggtctgctggagtgagtaaggcctggggggccttatgtatggtccatgaggttccattcctcatgccatgaccaccgggggaagtgaaaggaggaagacacgtcaaagccagcaggcccaggagcagacatagaaggaggtggccccacaggagcagacgcagaagtgccaacggggaaggaggtggccccaagtg

SEQ ID NO: 49121 - DNA, 1049 bp, Homo sapiens
aacaaggtggccacctttgccaaagtggagaaggaagaggacatgattcagtgagaagccgggtgccctgggcgcggggagggctggaggcagagtccaggccctggcatgtccctcccccacagcccctcctccacggtccgctctgtggagtggggtgcctgtcccctgccactgggtgacccacccctctccaccagcttctggaagcggctgagccgcctgatgagcaaagtgaacccagagccgaacgtcatccacatcatgggctgctacattctggggaaccccaatggagagaaggtacagtgacccccaagccccaccccagacctctggaaacccccgacgtggacagacagggcagagccttccatgtttcctggcattttttttccttcccccgggcattcccctagaaatcctttatgcctgagcccagccaggtttggggggtctgaaaaaagagggtgggccctgctccccatctcctccccgctcctccttccccatctctctgcctcggactcatggcaccccgcttcctccagctgttccagaacctcaggaccctcatgactccttatagggtcaccttcgagtcacccctggagctctcagcccaaggtgagttacccaggctgggccgaagctctgcagccactgcggggccacggtggggtgggatccccagggccggccaggcctgagcctcctgcccccgctccgcccagggaagcagatgatcgagacgtactttgacttccggttgtatcgcctgtggaagagccgccagcactcgaagctgctggactttgacgacgtcctgtgaggggcagaggcctccgcccagtcaccatcaggccactccctctgcaccgggacctggggctgggccgcctcgtgctccccgggactgtgtggctccggtctcgcctggagccacttcagggcacctcagacgttgctcaggttccccctgtgggttccggtcctcgctgcacccgtggccgcagaggctgcagtccctgggggccgggaggatcccg

SEQ ID NO: 49122 - DNA, 1052 bp, Homo sapiens
gcccgggctgcaggaaagcatctcaccctcagtcctgcactccgagggcacgtgtctctgtctgggctggggccagcagcaaggcccccctcccccactccaatcacacagatgtgtctgggaagcttttttgcccgttttggatgttgggccttggcagggtccaaagtttggtggaggagaggacctgcccctgaggtggctcaaggacacagagcaggagagggggctcctgcaggcccccagcccgccatggggtggtgcagacaggagccccgctctgctgcagcgcaggcaggctggatcctctgccacatgggcgtggaggctcagggcgtaagtcccgggcgaggacggaaggtcagagcctgggaatgcagctcgggaggagacttgatccagagcgccaggcactgcacctttgttctggagttgaaggggagccctggaaggctgtcgcgggaagagcactgggtgggatttgcctttgggtgggaggtggtgccaggagccagggagagcactggcttcccacaccgaaggggtgagagtagagccatgacccgacgggggctaggtgggcaggggctgccgtcaccctctcacggccctcttcagcccctggcttcctcccccaggaacttccgcaaacacctgcgcatggtcggcagccggagggtgaaggcccagagtaagaccccgtgcggcgggggtgggggggcggcgttgcgcttggctggttggggctttgcttgctgctagctgcgataagaacgacccccgccccaaccccaatcgggccctgcctcaggctcctccccttccagccacttccccagcccggcccaggctcctcccctcccagccacgcccccagcccggcccaggctcctcccctcccagccacgcccccagcccggcccaggctcctcccctcccagccacgcccccagcccggcccaggctcctcccctcccagccacgcccccagcccggcccaggctcctcccctcccagccacgcccccagcccggcccaggctcctcccttcc

SEQ ID NO: 49123 - DNA, 1055 bp, Homo sapiens
gaaggcctcagagcctcttctgcccaagggaaacagacgcattgttttcctgggcctcctggagacagactgtgctttcaaaggaatgtttctcaaactttgggtggccaaagggaaagttaagccaaaaaaatcaaagcgtcaagttaccaagagcgtggtcttggtgagtgagcagcagacattcgagcactgccctctgtgcccgtgtggggatgccaccctccccccacccgccctggctgccagcttctgctgacccctggacccagaagcatctgcttcccaacagggagggagaggcttcaggaacccctacttcacccagccaccgctcctttttgtctctcttagacgacatccctattcgtacctggttccccaaggaaaatcttttcagcttccagacagcaaccacaactatgcaagcgtgagtcttgtgcccacgacttggggtcagggttgggtggtctctttctgctgctcaggaaacagcactttttcccagtctctgggcctaccaggggggctgcttctgaacagacccacgtgcctatgctgtgccaggcctgccagggaggccagggctgactgctcttcccctcccatggctggtgcccagcccccccccccacacacacacagtcaggggacctggcccagggctgcagctgatgagctctcagtggggtgtggggtgtggcaggttctcctgctcctatccactctcctcagcctgtgtctgccctccctcaaaccccaaatagaagcctacttctgtttcatacgtgccataggtcatcacagtttcagggtccccgcagggacctgctcctctctgtcttgacatacatttggcttttctgttctgggattccttccagggaagttccctttgctgcattggtccccacaccaaagaagtgtcctgcccgggggagtccaccccacacccagcctcaggctgcctggtctcagcaaccagtccttgtggcatgggctgcagtgacatcagcttccgttgcccattcagggctggccagcagtgtagccag

SEQ ID NO: 49124 - DNA, 1029 bp, Homo sapiens
gtagacagttgggatgtctgctggttagggggtacacagttgggaggcatgtctgctggtcagagggtgcacagttggggggatgtctgctggtcagtgagtagacagttgggatgtctgctggttagggggtacacagttgggagggatgtctgctggtcagggggtgcacagttggagggatgtctgctggtgtgggcggtggacagttggtgaagaggtttcctgctgtgggtggtggacagttgggaggatgctggctggtcggggggtgcacagttggggggggatgtctgctggtgcttgcttggtgccagtcagtgtccctagaggcagctcccatggggagggagggacagacccctccgtctgtggcagccatgtggctgggaagcagactctgcttctttcttggcctgagtcaagtggttcctccatgagtccgaggtccccggccagcctgccttcctctccatcctttggagtcttgcgagagctgcctcgagctctgtccctctctgatcatgactggtgacaggtggcctgtgtctgctccacctcccttctggcccagagccagaacctcaccagtgctttttcccaaggctaaggccatatggaactagcaatggcctcccccattccgcctcaaatgaggactctgacacctcagtccctggagaggcgagaggaaagggattcccaaggaaaagctgcaggaaaaataaaaataaatccacatcagagagccacgttcgggccgaagctcgggacgagacatcagaccgcgagagccgcgttcgggccgaagctcgggacgagacatcagactgcaagtgaagctcgggacgagacatcagaccacgagagcagcgttcaggccgaagctcaggatgaggaggcggttctccgtctttctgtgctcagcagcactttggtgtgtgtgtgcattgtttgtttgctatctgggagttatttcctcctgattatagaagccacctgccttccactcagcgcctagaggcggag

SEQ ID NO: 49125 - DNA, 1081 bp, Homo sapiens
ttatttctttgttctttctgatcttgatcttgttgtgatattcaggttgggcctcacttatcacagtgcagccatgcctgttccaggagaggggagctgtgcgctgagacgggccgggttcctctcagctgctgcgatccgtctcatccgcgttggtgtcacagcccctctcccttaggggtgggaatggatcttccctgagtgtagtgggagtaaaaaatgggaggtgattggctgagcacggtggctcacgcctgtaatcccagcactttgggaggccgaggtgggcggatcacgaggtcaggagatcgagaccatcctggccaacatggtgaaacccatccctactaaaaatacaaaaattagctgggtgtggtggcgggtgcctgttatcccagctactcgggaggctgaggcaggagaatcccttgaaccagggatttggaggttgcagtgagctgagattgtgccactgcactccagcctggtgacagagtgacactccaactctgtctcaaaaaaaaaaatgggggtgatatctgagagaggtaattctgtattgtgatcagttgatcatctgccgtgacatcgtttttcctcatcaaacttttgtgtttgtcattttaacaaaacttaaattcttgcaaaataacatggacagattctaaaaacatacttaaagttttatcaacagtggccgtctgtcccctcacactgaaaacgcttcggttccttctgagcagcttttcttgctgtttcctaacccatccattctagacacactgacttcctgttgtgggagataaagtgtggctcggtggatggcccccatgcttcctgttgtgggagatgaagtgtggctcggtggatggcccccatgcttcctgtcgtgggagatgaagtgtggctcggaggatggcccccatgcttcctgtcgtgggagatgaagtatggctcagaggatggcccccatgcttcctgtcgtgggagatgaagtgtggctcggaggatggcccccatgcttcctgtcgtgggagatgaagtgtggctcggtggatggcccccatgcttcctgtcatgg

SEQ ID NO: 49126 - DNA, 1030 bp, Homo sapiens
gagtcacccaggggagcttcctcacagacagagtcatccaggggagcttcctcacagacagagtcacccaggggagcttcctcacagacagagtcacccaggggagcttcctcacagacagagtcacccaggggagcttcctcacagacagagtcacccaggggagcttcctcacagacagagtcacccaggggagcttcctcacagacagagtcaccccggggagcttcctcacagacagtcacccaggggagcttcctcacagacagtcacccaggggagcttcctcacagacagagtcatccaggggagcttcctcacagacagagtcacccaggggagcttcctcacagacagagtcacccaggggagcttcctcacagacagtcaccccggggagcttcctcacagacagtcacccaggggagcttcctcacagacagagtcaccccggggagcttcctcacagacagtcaccccggggagcttcctcacagacatcaacggcctaactgagaacactcatttcctgtcattagtggtgttgatgcttctctttctccacacagggggcgacgatggccttctgaggggctgggacaccagggtacccggcaaatttctcttcaccagcaaaaggtaactgcccaagggccagcactcggtgcccacaccagcccccgcgttccctgggtcaccagccctcccgttccctgggtgggtctgtgtgctggacactggttcagaagccgcctctgcttgcagacacaccatgggtgtgtgcagcatccagagcagccctcatcgggagcacatcctggccacgggaaggtgagtccccaggaggctctcgggcccttctcgtctctttcgctgtccccggggggctcctgggcccttcttccctctttcgctgcctttcctcctggcaccattgcagcatttcgtctgccagtgcttcgccggagtgtaggtatatgggtttggtaaaggggactttgtcctcgagggatgcatgggacaggtctct

SEQ ID NO: 49127 - DNA, 1049 bp, Homo sapiens
tctccttgggttggttcttctaccttgagctaattcagagcaaaggtaccgtagggcaatgattgaataattctggactgattcattctttcaacaaatgctatgtgctgagccctattctaggtgattagaatactttagcaaactaaacagacaaaagtcctgctttcttttttaagttttattatttttatttatttatttattttgagatggagtttcgctcttattgcccaggctggagggcagtggtacaatcttggctcattgcaacctccacctcctgggttcaagtgattctcctgcctcagcctcctgagtaattgggattataggcacctgccgccatgcccggctaatttttgtatttttagtagagatgcggttttaccatgttgcccaggctggtctcgaatgcctaggctcaagcgatctacctgcctcagcctcccagtgttgggattataggcgtcagccactgcactcagccttcttaaaaaaattatttatataggccaggcgcggtggctcacacctgtaatcccagcactttaggaggccaagatgggcggatcatgaggtcagcagatcaagaccatcctggccaacatggtgaaaccccatctctattaaaatacaaaaaattagccgggcatggtggcaggcgcctgtagtcccaactactcgggaggctgagacagtggaattgcttgaacccgggaggcagaggttgcagtgagccgagatcgcaccactgcactccagcctggcgagagagcaaggctctgtctcaaaaaaaaaaaatttatttatataaatacattttgaggatggggtgggtggttcacgtcttgctgtgtcacccaagctggagtgcaatggcgtgaccacaggtcacggcagccttaacctcccagggtcaagcgatcctcctgcctcagccttctgagtagctgggactacaggtgtgagttaccacacctggctgattttcacataaaagtccctgctttcacccagcttacattctgtggcggggagacagacag

SEQ ID NO: 49128 - DNA, 1090 bp, Homo sapiens
ggtgccaaaaaagccagctgcgggcccaggacagctgccgtgagactcccgatgtcacaggcagtctgtgtggttacagcgcccctcagtgttcatctccagcagagacaacggaggaggctcccaccaggacggttctcattatttatatgttaatatgtttgtaaactcatgtacagttttttttgggggggaggcaatgggaagggtagaaattacaaatagaatcatttgctgtaatccttaaatggcaaacggtcaggccacgtgactaaaaactgtcctgttgtcgaagcttctcccctgggccgccgggagccccgtggagcgcggcctgcacgggagttgtgtccacaaaggcaaagtaaaggggtggaatcatctggcctctcggacattctctgctccgcctccctcttgtgctgcttagggtgaggtcattttgagtggagccgagtccttgtgggtgaggcaggaggacccttgttcctggtgggcccttctgaggagcgggtgagctcagaccttcctgagtccagcagggagtatgagtgagactctgtccttgtcttgcggcaggagtggtggggttgctaagtcagctgcccgctgttttatggggagtaggatgctctcgcccctgacattggttagttcttgcctgatttatgcatgaagtggctgggagctcagcagtgagcttctgcccagaagaatccacagggcatgttcagcaggcctgctgcagatggtggagggggctggccagccagggtgaggtgagggtctcacttctccgtccgtctgcagggctgtggtttccaggatagccctccctctccttggggagccccaggtgtctggggctggtcagcatcttgtacccatagagctgccccagggaaacatgccaggctgtgtggctgggatcctgcctgtctccaggtgcgcccagccagaggccttgcttcttgggagctggaagcctggccagtccgactctgacctgtctggtctggtccggtccgaccctgtgttggtcccacaggttgctgctacactttcccttcttgaagctccactgccatgt

SEQ ID NO: 49129 - DNA, 2613 bp, Homo sapiens
aggcggcgtcaggtaaaacaggttcagatcccagaagaaaaactgccaagagggagactggcccgttctgggacctgttcctgtttcctgcccctgctgcaagagcataggcagggcctgctggggaggaggcttttttccaccagggaagggtgggctctccagtcaggtcggagaccagagaccccttctaactccacccatgatggcattgtcatcccttacagcttttctttggaacatttcagatggacaaaaagctaaaaagggtaatcagtgagtagctcagcttaataaacacaccctaatcaaaaccttctggctcttctgcctcagccccggcccctccctcagctcagtgaaacagtctttgcctaggtttattggtgcgttgaatgttcagtgccactgttggggttagccctgcgaggatgaagcctgataccagctcctctggcgcagactaaagtgggcagctggcttttaacctgtctgcctgtgttttgtcgtagactgcaccaccccaaacggtggaatgaggcccccatgtgctgagctgtcttggtctgaagaggcctgtagttactttccacttcacaggaaaatgcaacaggctcctgcctgttctggttataaggttactgcacctcacgcagatcccaaatgtaatgatttgaaacatgtggttaacttccagaccaaatacacgctgatcgatgagcaggacatcccgctggtggagagctactcctttgaggtaagtaaggatggctgttccctcccctgatgctcgtggtcagtgcccaggagggtcacgaggaacgagctctctcccctgtgctgcaagagcaggcggccccacaagtggacaactggtgctggcctgtgagccctgagccgtcagccccacttcgagccgtggccctgcagaacctggctgttgctgccactggagcccactgtggcccacatggcctggcgacagtggtcttcctcactttcaccccagctgccagctcctcttgaaagcaaatggaatgttctcatgtttgtgattgtgtcacgtggaccatgtctgttagctcgaagaccctgctctttagagctagccacctctgctgggcctgccttagcagtccctcctggctgcccagctgcctcccgttctctgctctcatggggtcttcctgcctcttcccagcttccattcctgccgctgagcttggcctccctcaccatcctttatctctgtgccccacacattcacagtagtgacctctccagggggttctctatctcactgcaccgtgggctttttttaagggtaggaaaatgtatttgtctatgtcccattgtattttgcagagttgtttgtgagtgtttcttgctcgaatagacagagtggtggtgggccacgctggcccctgggagccatgtgcctgtgggaagctctgcactccccagggtctcagggacagggctggcatttgtccctctggcttgcttgtttcacttggtttttctaagagggaattgaagtgttgctgagaattggaggttttttaacagctctttcccttgttccttctcaggcccgaatggaagtggatgcagatggaaatggtgctaagatatttgcctatgcctttgacaagaaccgaggaaggggctctgggagactccttcatgagctgctgtggtgggtgtttccaagctgtctctgccccccgccactgggctcctgggtgagctccgatggcacagggcgcctggagccccctgccccgctgaagccctgccttgccttccctgaatctcgcagttatttttgtgtccttcaccactaacccaaaggaacgaatgatttgtatgttgcacttcaaacaccaagtggactttctgctgggagcttgcccaggaccggcagcctctggagggacggtggttgctccccttgctgggttttgccgagcccccccggtgtgcatggtagggaccactcagatggggagctgtctcgaggccatctgcttaggtggttttgcgttccagctttggctgtctgtgctctgaagtccaggggccgggtcctccctgtgtccctgtcctgtttgggccacagatcaggtgcttgggtttctctcagcagcttccgcctgaggtaccctcatccaaaggaccaggggcccgatcagatcacatggctgacatttcttcctggaaggactttggtacctgaccagaaatgtctgtgagggtgggaggcagcgatgcagggttagatgcagggtttgctgtctgtttctagggagcggcaccgggggggcgtggccccgggcttccaggtggtgcacctcaacgctgtgaccgtggacaatcgcctggacaacctgcaactggtgccgtggggctggcggcccaaggctgaagagacctccagcaagcagaggtgggtcttctcagggcctggcgatgccagcagaggcgccttttgaggagggccaccgccaaagctcttgtttccaagagggtctcctgttcctcctctgagccctgatgcttctgtgtattttgggaatttcattgtttttccccaaagcgtggaatcctcct

SEQ ID NO: 49130 - DNA, 1067 bp, Homo sapiens
ctcctccctagttaaaatgatactgcccccccatacctgtcttcgttgacttacttggctccatcacagtgtgtgtcatgtgactctcccacatcctgatttggaatattgtctccctactagaatgtaagtccatggtgcctagaacaatacctggtgtacaggagacaaaatatttgttgactgggccgggtgcggtggctcacgcctgtaatcccagcactttgggaggccgaggtgggcagatcatgaggtcaggagatggagaccagcctggctaacatggtgaaaccccatctctactaaaaatacaaaaaatagccgggagtggtgctgggcgcctgtagtcccagctactcgggaggctgaggcaggagaatggcatgaacccgggaggcagagcttgcaatgagctgagattgtgccactgcactccagcctgggcaacagagcaagactctgtctcaacaacaacaacaaaaaaattgttgactgaataaagggagttagaatgtgaagaaaaatccttcaccaagcaaacatccaccctaagtgaaggtgtgggaagcagctgcaggcagctttttcactccatttttccatcagctgctacccttgtgtgcccctcagcacttatgtcaagatgctgctctcagcacgtgacatgctaacactgcagacttcaggtcagtcctgagaggcaggcactgttcttacccacattttataagtgactgaactgaagcaagggagtggtgagaggcagtgatgggattcagcccaggaggccttcctttcaaccatatactgcactgcttccaggaggcgcttcacagatgaccccacctgtggtacactttctgctgttctccaatattcatgctgcctgtcccacaattagtaaaattttagccaagtacaggactgcctggctaaagaccacatttccaacaggaaggggacaggtcagagacaaaaagtgacaatccatttcccagtctgtccctcaaaagtcccaccattaggctgggcagtggtgaaagctgtcaacagccatctgggagcca

SEQ ID NO: 49131 - DNA, 1017 bp, Homo sapiens
ctatggtgtaaaaactcaaatttatctttctatatatctatctctatacatatcatgtatctatctatctacctcttatctattttctttttttttttttttttgatggagtctcactctgtcacccagtctggagtgcagtggcgtgatctcggctcactgcaacctccgcctcccgggttcaagtgattctcctgactcagcctcccgggtagctgggactacagtcacccacgaccaagcccggctaatttttgtatttttagtagagatggggtttcaccatgttggccgggctggtctcgaactcccgacctcaagtgatccacctgcctcggcctcccaaagtgggattacaggcataaaccaccacacccggctatctatctattttctatcatctatctcatctatatatccattcatcctcacatctagataatagatacatagatatagaagagataaaacataggtagtagatagagatgatagataaatgaatgatagagtgatagatgatagataggtagataggtagagagatattttagataaatagataaatgatagagtatagaacggatggatggatggatggataaatggatagatagattgatagaaagtagataggtaggtagagatcatagatagataaataggtagatagatgatggagtgatagatgacagatgatttattgataaatagaatggatggacagatggatggatggatggatggatgagtggatagatagaacataggtagatagatgagatagatgatagataatagatggttggtagatgagatagatgataaatagatgatagatagatagatagaaagatgtgtgtgtgtctattattgttaccatctttaaatttttaagagtctttttctagttcttggtaagaagtgtttaaagcaaatgtatttgttctttttgttgactcatctgaatgccaaacaaaatgtgtgtgtgtgtgtgtgtgtgtgtgttgttacaca

SEQ ID NO: 49132 - DNA, 1049 bp, Homo sapiens
aaagtggtaactggctttctctagtccttctcatgaaagtggtaactggccttctctagtcctcatgaaagtggtaactggctttctctagtccttctcgtgaaaatgataactagctttctctatcccttctcctgaaagtgataactcgctttctctagtccttctcatgaagtggtaaccatctttctctagtccttctcatgaaagtggtaaccatctttctctagtccttctcatgaaagtgataatgagctctctctgtccttctcatgaaagtggtaactggctttctctagtcctcataaaagtggtaactggctttctctagtcctcctcatgaaagtggtaactagctttctctagtacttctcctctgatttctttcatattcataggatctcctgcatggtacatgtattcacacccaaggctctgatttcaaaaccaaccggcagtgaacagcaggaaacatcaatgttcccacttgttaaaaagtcatttcttgacaactgttaggcatctgagattagtcacccatctgctgtcaatgaatgagtgtatctaaaaggttcaaaatactgactctaagaactcatagaaacaacagtacaatggcagttaccaggggcagagggtgcgggtggaagaatggggagatgttggtgaaagggtacaaagttccagttagacagcagaaataaattcaggacatccattgtacaacatggtgactgtggttaatggtaatgtattgtatacttgaaatttggtaagggagcagagctttaatgttcttaatcacaaaaactgagaagtatataaggtgctggatatgttaattgacttgataataatcattctacattgtatgcatatgaagcatagtcttcagattataattcctagagagtgttcctcatactctacggcagtggtccccaacctttgggaccagttttgtcaaagacaatttctccctggacctggggtgaggggggatggttttggaatgattcaagtgcattacatttattgtgcactttatt

SEQ ID NO: 49133 - DNA, 1050 bp, Homo sapiens
atttgggccagtcagaatcattcagcaatgcataagagaagaaatataatatgcgctgatatccaggtgtatgcaagtgataatatggctaatggaagatgtgaattgagaaggggatgtggttattaatgattacttatgaaagaattctgggccaagcacagtggctgatgcctgtaatcccagcactttgggaggctgaggtgggaggatggcttgagctcagaagtttgagaccagccatgggtaacatggtgaaaccccatctctactaaaaaatacaaaaattagccgggcatcgtggcacgcacctgtaatccccagctactctggagactgaggcacaagaattgcttgaatccgggaggcagaggttgcagttagctgagattttgccactgcactccagcctgggagacacagtgagactccatctcaaaaaagaaaaaagagaaaaaagaaaaaagaattctgtctcaagatactagggacgctaaaagtttgctgtttataaaggggattttatacaatgcgtacctttgactttgtgccttcttgccccaggagttactccttttaaatagatagctcatctacagatcctgcagataatccttctggtataaccagaatacgtagttatttatacatatatgtcccataattttttcctttcaaggtaattgatgaattatactaaacaaacaattttctggctgacaagtactgtactttagtgaatttgcttgattaaattgtaataatgaaattaaattttatgcttgctgtgtgtctacaaatgcagttcctgttgaaaatgagacaatctgaagtgccttctaatggacatcccacttccttaatgtttcttttgtatgtgtaagggagaaagtctaatgtctgttctttccctcatagattcttagttgagacactctcctgaaaataaaagtcagattcacaaaagaaaaactgttgagcccagactggtctcaaactagcctcaagcgatcctccttccctgacctcccaaagtaccatgattacagg

SEQ ID NO: 49134 - DNA, 1052 bp, Homo sapiens
agaccagcctgggcaatacagcaagaccctgtgtctacaaaaaataaagaaatattagccgggcatggtggtgtgtgcctgtagtcccagctacttgggggactgagatgagaagattacttgatgccaggagttcaagaccagcctgggcaatatagtgagaccctgtctctacaaaaaatcaggaagtattagctcggcatggtcgtgcacacctgtagtcccagctactcaggaagctgaggtgggagaatctcttaagccccggagttgtaggctgcagtgagctatgattgcaccactgcactccagcctgcacaacagagcaagaccctgtctctgaaaaaaaaaaaggaggggagggcttctcttttgaatgaacctctggtttcgggctgagcatattgtaacaatacaggtactgagggatgttcgtcttttgccatactagatctagtgggtccatggcattcccaactcactggggcatagataaagaatacttacacctgaccctggaaatgcctctccagccatacatttctgtatctctgaatatcatgcctgtgaatagctcgaaagcctacatgtttatggaaatcattcacaaacactgtcatgctatgtgaaccattgaaagctacctctttctgggagcaaattctgacccctgccaggttgagataagttctcctctgaattcattctctgcagcactgagtggggcatttaagacagcttagactagctgtcaatgctcttgtctgaactgtgggttgctgatggcagggtccggtccagtctctctttatatttctggtgcctggtattgtgtgtcagcagaacatttgcttaataactgcaaaacttatagatggaagacatgaacagctgggtgtataaatccacctgctgcacgcagaggtggtcacatgaactttgtgggggttgggggtggcggttgttgataccgctatctgatttatgccatactctaattaccagcagcagaaggtagccagaaggaattcacagacatccctatttgcatt

SEQ ID NO: 49135 - DNA, 1034 bp, Homo sapiens
gtagagaggaagagaaacccagatctccttcctgagcctgggtttgaagcaaatggtctttcctggtctctcaaaggatatcacaaagcaagaattccttcacctgggcacaggctgtcagttacaccccaggtgtgtgcaggaaagccagtgatttatgtctgtctagccaacattcccatgcaccgttgatttcacttctgttcctgaatggtaaatcttggaacagtgtttttgcaagccaagtatgcttttctctgttttctgggtttgtttttgtatgtcaaacctaatcaactctactcgatgcacagagtatacataaagatgctggtatctctgatgtcacccctatagaataaaaaaccactgctttatagagagatgatagaaaacaagttccataaatatgtgaattttgataataaacacattaattcccttctccccttctaaggaggattcccctgcattccaagacaaaggtcatgttccgtagccttgattgaaccctgaagctcaggtctttgactcaactgttctttcagtcctcatgaaccagcttttatttcaggctttattatttgccggttgtgtcatctttatcatttatttctttatttccacctcacattttaatatgccacaattttatgatcctgccaatcatgttgatggatgtctctttcttcttcttcttcttctttttttttttttaacttttgagcaagaggactgctatccaaaattggagaatccaagtcgaaactggactggagcccagtgctgggcatttcaatccatgcaatagctcctcgttctcagcaaattctgtcactcacatcctgtatgaccatgtactatgcttgggagattgactttttaagctttcttatctattttccttaactttaaatctaaaaataaatgggagaacagatgagagtgaaattgcagtgagattgttctcatacataatgtaactctctatttaggaacacaaagactgtaatttcatgttcgttttgaggaat

SEQ ID NO: 49136 - DNA, 1063 bp, Homo sapiens
tagtcatgcgtctaaacatggattacttaatgtaatccctacaactatgctacaagatacttttatcatcacctctggtttaaaggcaacaaagcaaaatttggttaggttgagcaacttgtgtcaggattgcccaacagccactacactatagagcttcttggctgcatgagaagagttctggattgtgaattgaattcagacagtagacctacctggttgctggggagagtctcctgctctggagctgcaggttgtgtataagacaagtctgtttggaccaatggcctctgacagttttcttctcactcctgtattctagtattccatcaagtcctgagttcttgagtttgcctcagatactataaagatatctgggttcaaagttaaacaagggatgtggaggacagtagaagctatgggtactacaagggtgttttgggtaatgctttttctgccatctaaccattccaagcacatttaattttgctaattaagtctttcaaggcatagaaaggaacgacattagaatccatgagtttgagttaaagctgtgttctaaataatactccactgaataccaatgtgtatatttgaaaagtgaggtcaaaattaggggtcagaactagagttgaatacctgttgctttaaagtcatggcccaattatagctcagtcaaaaaaatctagtggaacattcctcctccatgaatttattcagcctgcttgaaataattgaattaattaattggattaaatgaagtaatatatttagagtagtgagcatagtgcctggcttgcaagacaggctcaataaatggtaactgctatcattattattatcattattgttatgattactcttctttccacagatgtgtaaagcatctttgcttaaaatgtgcctatacctccattacattgagtagaaaaatcatagatgagaaaacgtctataatggaaaactaagcagatatttgcatcatcttatcttttttattactagctcaccttatatttaaggtatctctggtaggacccacggtccctagaagggcccacca

SEQ ID NO: 49137 - DNA, 1058 bp, Homo sapiens
gcaatttcaatattttggagtttattgaaatacagaacttacattttaaaaactaaccatcctattctggtgttgatgaattcccctaatttggaattcctagcagcttttaaaggtatacgttgcatgccattatattctaatttaaagatttttagaaaatgtatagagttgagcagtctactttcagaacatctccttcatcgccaaaagatcatttccattccccatttgtaatccctcctcaccatcacttctagcctcatttaattcttttttatttttgtttatttttgtgggtttgttttttgttttgttttgtttttttgagacggggtcttgctctgccacccaggctggagtgcagtggcatgatcatagctcactgcggtttcaactgcctaggttcacacaatcctcctgccttagcctctggagtagctgggactacagacacgtgccaccacacccagcttttttttttttttttttttaatttcttatagagatgggctttaactgtgttgcccaggctggtctcaaacccctacctaggctcaaggctcaagtgattcttccacctcggcctcccaaagtgctgatattacaagcatgagccgctgcactcggccctcatttaattcctttttttttttttttttttttttttttttttttttttgagacagagtctcattctgtcgcccaggctggagtgcagtggcacaatctcagctcactgcaaccaccacctcccaggttcaagtgattcttttgcctcagcttcctgagtagctgggattacagggacctgccacaacacctggctaatttttgtattttttagcagagacggggtttcgccatgttggccaggctggtctcgaactcctgacctcaagtggtctatctgtctcggcctcccaaagttcatttaattcttgattcgacattttttggactttctggaaactgagaaaataaactgttaactatggtcctaccaagtttgacgctgttcctgctggctgtgtgtgtgggcgtctatgtgtggcttc

SEQ ID NO: 49138 - DNA, 1040 bp, Homo sapiens
acagagctgccctcagccccactccttggcctccctcctgtggtcatcagtgcctaaagcccagagggggctgaggcagcaggaggctggtgtgtcagtgctgcctcaagcacacacacacccaggtgaatcgtgacagcatctgggcttgacctcaactttgctgcaaaatcagactggatactgggagtggggagaggccaggcagttggagaaggcacttctgagcctgtggagggaggggagcttcccagctgatatggtttgcctgtgtcgccacccaaatcttatcttgaatggtaactcccacaattcccacatgtcatgggaggaacactgtgggaagtaattgaattatggggacaggtcttccctgcactgttctcttgatagtgaatgagtctcacaagatctgatggttttaaaaatggaagtttccctgaacaagctctctttgcctgctaccattcatgtaagatgtgacttgctcctccttgccttctgctataattgtgaggcctcctcaaccacgtggaaccataagtccattaaaccctttttcctgtataaattacccagtctcaggtatgtctttatcagcagcatgaaaacggactagtacaccagtccccaagagcacagggatgcccaggtctgcagccatggctgggtggctgcatctgtgcctgtgagggtggggctccacccctctaactcagaagggggtggggctcccgcctgttcccagctcccactggctccatggagtgaacagctctggccacgtctcccccaccacagccggcatcatggcagtggccactccagacaggtctctgttgccatcacaagcatccttagcccatcctcagatggtcttttcatccataatgcatgtcgtattctattccacatggcagctgttcataccgtgttcactgtttttgagtttctagtgctttacaccatccctctctctggactcttacttgattaagaacatggaattcccttggctaacccattttcaggttttctac

SEQ ID NO: 49139 - DNA, 1067 bp, Homo sapiens
gagacagtcgtgtcctatatattttcacatgcacctcattgttttttcatggcacttcataaaccatgattcatgtcacactgagcagaatcactacatgaattttctaaatctgttacttgcatcacaaatgtgtgtatccacttgggaattctgtggaatgtctgatattgataaggttggttgacacttcaacaacactgcttttcaatttttttccctaaatgtttacaaaaactcataaaaaacaatcatgcatagcataatatatttttatttttctccttaaaaagattgtctcgtctattggatgtgacatgtaccctcgtgagtcagttccctacgtttaggtcttctacagcatttgttttgaaaacaaaatctacagattttcaaagatatttagttgggaaataaagcagagatattgtgaaaatatgaggattttagctattgcagatactcagctacaaagagtagtggttctaaattttaccactttgctgatgccctgtttttctctgacttcaaactttgtccgtgcacctcattcttccctaagggcagtcaataaagtgggcaactttgaaaaagtatttgcttttcagctaggagatgggaaatacacacacatgcacatgcatgcacatatacatatacatgcacatatgcacacacatatccacagatgaatgtgtctgtgtatatacaaacatatatgtaggatggtaatgcatggtttggctgcaacttgactaatttagttgacagtaggatctgtgcagaagcgaagaggaacagaagagcagaaaagtgaagaagcctctatcatcccagtttttggctaatttgagggcaggaccgagcatgaacctagggtgtggggcagtgggtaaaagggctttttggtagccacagtggatagaagttgccattgaagtttagagatttctatcaaggtttaggcagtagaatagaaatcaagtccctctgggaggtgggaagaatgctagcaggatgagtccccatggtttcgttgccagagccatctagcctgaaatttgggc

SEQ ID NO: 49140 - DNA, 1047 bp, Homo sapiens
ctcacttgcagtacccatgttctccttaggaggctgcattgaggagaggaaaagtggaaaagggttagttcacagcccattgaaggaacaataaacccatccacagacaactagattgagccctgcacataatatgatacctgctctaatttggtacacagtgagtacagtcccttatcccaaactagaaagagcagaatcagaaagggcgcagggccaagtcataaggtgaaaagaatgtaatacacaggttaaaatgaataagtctaactagattgccaaaaacaatctggaccacttaagcttctgcgtttgataatgatatatggttaatctggcagttttgtccacatattgtggcaaaatgtgcaattcctatagtgaagctaagtgagatggttaacttaatgactgtcactattcagaggtgtcatttattagcttctgaactcttagatgttggagaacacaatttgcaaaacaagatattgagttgatggatgaaagtgaacctgaagaaaatagtctagaaaggctatattcatttagtttctttttacttttgattttcataagttctcatagttgaggatggaaaattaaaaacacatgacattggtaacaatacacagttgttgtacagcaccaaaatattgtagcataccagctgtaacagcagtatgaagccagagctgcttcaaggagtagggctttgatagattatttttcttagattatttttcttctcacataacaagaactcgggatgtaggtagcctgaggctgctttgctgatcatgacttagggccttagaactttcctactctgccactgggaattcttgcatgatgactcctgtacctccgagcttaggtataagatgtaggcaggtagaaactgggtctcaagaaaaaagacacacatctgcaggtctgccttcatcttcctatggctacccccagctgcaaggaaatctgggaagctgcatattttaattggatacattgtcatcctcaacgtcatggttgtgaaataaggaggaaggg

SEQ ID NO: 49141 - DNA, 1050 bp, Homo sapiens
acaaagacactcttatcacttgagaaattccaagtgtttagagtttatgtcccaggagccagaactgtctgaggatgaggttgatttcttccttcacagccccttctagctgtccacacactttctgccaggggtttttattgctcttcttgaacattgattactccatatgaacttcagtcagctaaactaactccctaaaatattctgttagccggctgcagcggctcacacctgcaatcctggcactttgggaggccaaggtgggcagagtcaggagttcgagaccagcctggccaatatggtaaaaccccgtctctactaaaaatacaaaaattagccaggcatggtggcatgtgcctatagttccagctactcaggaggctgaagccaaagaattgcttgaacccaggaggcagaggttgcagtgagccgagagatcatgccactgcactccagtctgggcgacagagcaagactccgtctcaaaaaaaaaaaaaaaaaaaaaggttttgttgagccatcctactcaagaaaggggatactttttcatttcttaaatctgtgtttgtgtctttcaggaggatttttaagtagacccattctaggttttgcacatttcttgttacatttattcttaagtatgttatcttctttggtgttattgtatgtggcactttttctaacattatatacactaaattatttctttaaggatatattaaggctcttgatttctgtatgttctgtatgttattttattttattttattttattttattttatttttgtatttttaatagagacggggtttcgtcatgttggccaggctggtctcgaactcctgacctcaagtgatctgcctgcctcggcctcccaaagtgctgggattacaggcgtgagccactgtgcctggccaattgtatgttaatttcttccagctcctttattgaattattttattgttttaagtaattgtgttatttgctaaggattattgtttctctaaggtttttcagatttcttctacaaaataatggaaatgttat

SEQ ID NO: 49142 - DNA, 1078 bp, Homo sapiens
agtgttatgagacatgcatttgcaggacccctaggggcacgtgtctgtctcctagtgcagcccaggaggtattgtcttggaaggcatccctcttaaatcatctcccagaggatggcatctgatgagggtaggatgcatattccaggcaaaggaggcaaaggcactgggttattaaagtattgcaaataactcctgcacacttctggtacaagtacaaattggtacaatccccgaggagaaatatttggtaacatctaccagtaataaaatgtattaatgatcagatatgggacccagctctcccagctgttccatttttgagaatgtttcctgcagagacacttgcccatggatgacgtggcggatgcacagttttgttcacggcagccctagccttcgcacagagttacaaacaccctagatgttcctcaggagaggaaggattcaataaaacactgtgtgtccaaatggtgggaatgccactacaatcaaatgataaggaaggctttctgagatatgatgttaggtgaaaaaagtggtttgtaaatggatgtgtatgatatactatatattatgtgaacaagggaaaatacatatatgcctttacttgtttcttgtaaatgtataaagtcatctcaacgtgtaggtaagaagctgacaaaaatatttgtctcagtgtgtggtgttgttatatgggactagatacaggactcgttggggtgaagaatgagagggagagaatggtccaagaaacagctacagaccttctccaagcttccgcagtcatcaactcatggccaattccatttcatcccaactcctagacatttctgcctgccccagagtagaatatcttgtatatatacagatgtgcgcgcacacacacacacacacacacacacacacacacacacacacacacattcatgtgcttggcttatggcccaaataagatccatgcataaaaattaaaggtaaaatttttattttaaatatgtactttgtcaaacttctgcaataattataaaagccttaaattatgaatagagtaaagggagtttgttattagtatcaaact

SEQ ID NO: 49143 - DNA, 1035 bp, Homo sapiens
aaaaaacagaagtacttttcaaggaaaattggatcagatcaagaaattcttaatagctaagtgaagtctttcaaaattatgctcatagcagtgaactgaactattattaatagtctttgagatgagagtgaaagtgatggctaatggatccagagatggatttgactccttttgtctccaaattccactctttattggctttgaggcaccttaatgaagcccaaggtctagagaaaacagagttgaaaaaaaaagtgtgccttaaattagattaaatggcctcaatgctatggtggaataatacaacaattcctattctcatcacagttacccaaaatagagaaggaactgacaaaggccacttgaagatggtaaaacaaacaaacatgcaacaacaaaaacccggcaacgtggtttgtggatgaaaacccaaaagtatccaattgcagtttgagacgtgtttgggttaggttggcatttgatttccaggtgaaaaaaataaaaggaattaagctcttatagatcaaatgagaatgagaattttttgccaaaactactttgctatatcaacaaaaatttaaatatctcccaaacagagaacactacaaacaaagaacaacccatccatttctaattctaatttaattctatcacaaatgggaactgaactctgatatatggggtttatatttgggatatgtgtttaagctaatggaagagctttgacaggaacaaattgtgaattcagttctatattaatcttagagcttcagttagttatataacagctccttctcccagaagcatattaagaaaaaggaacactcggaatgtttcagtgtactttaaatgaaaatataattttgctatttccactcatttagtcttggtgctttgtggtactcagaaaaaaagattattattttttcctttggaaacttttttaaaatgttgacttttgttgatgaaattctgagaatatagtcgtcggttgcattgcctgctagagagataacaggaacatttcaagactta

SEQ ID NO: 49144 - DNA, 1062 bp, Homo sapiens
caggaccagatggattcacagctgaattctatcagacattcaaagaagaattggtaccaatcctattaacactattccaaaagatagagaaacagggaatcctctctaagtcgatcattctctaaagccattgtcaccctaataccaaaaccaggagaggatataacaaaaaaagaaaattacagatcaatatccctgataaacatagatgcaaaaatcctcaacaaagtactagcaaactgaatccaacagcatatcagaaagataatccaccatgatcaaatgggtttcataagagggatgcaggaatgatttaacatacataagtcaataaatgtgatacaccacagaaacacaattaaaagtcacacaattatctcaatagacacagaaaaagcattttacaaaatccagcatccctttatgattaaaaccctcagaaaaatcggcatcgaagggacatacttaaaaaaaaagtcatctacaacaaacccacagccaacattatactgaacagggaaatgttgaaagcattccccctgagaactagaacaagacaaggacgcccactctcactacttctattcaacatagtactggaagtcctagccagagcaacagacaagagaaagaaataaagggcatccaaattggtaaagaggaaaaataaaaacgaaaatatttaggaatatacctagccaaggatgtgaaagatctctacaaggaaaacttgtaagatctctacaaggaaaactacaaaacactgctgaaagaaatcatagacaacacaaacaaatgcaaacacatcccatgctcatggatgggtagaatcaacactgtgaaaattaccataccgccagatgcaatctacaaactcaatgttttgagtgtcagagaaatgagacacgataccgactcatttaattatgtagcacagtaggtattgaaatggaaatacggcaaaaatgccatagggtccagaaaatagagtacccttaatttgaataatagggaaagactaaacagagggaggggctgtttatttgaggcattgtttccagg

SEQ ID NO: 49145 - DNA, 1026 bp, Homo sapiens
gtgacttttttttttttttttttaaagaatctgggatttactctctcctctgagattttcttaaaagcccatactagattcatccatctgtccaaacatgaagactgtcatctcctgttatagaggagataacttctgatttcagagcatcattctcttgattttttttttttttttttttgagacagggtgtcactcagttgcccaggctggagcaaagtggtgcaatcacagctcactgcaccctgcctcctgggctcaggtgattctcctgcctcagcctcccaagtagctgggattacaggtgcatgtcaccacgcctggctaatttttgtattttttgtaaagacagggtttctccatgttgcccaggctggcctcgaactcctggactcaagcaatccatccacctcggtctccaaaagtccattatcttgatttagcaagtcctgaaaggtggcaagccctaataattgttattgcttatgcttcagagacagacaggtaacctccgccactcttcattgtttttttaatgatttttttaatttaattcacctacttactctttctgtacaatcctctacaagctggtaaaattcccaggacctttaccaatgcaaaactattagggcttaacactttccctttttgcagctgtctgaagttttggaatgtgtgttcatatttttgtttatcagcactcattctgctggttttcacttctgtttgctttctgtttatggtgctcaatattggcttccttctcctaaatatctcccatatttaacctaaataatgcatgattaaaataacaagatgttccttactctaataaaataaataatgaaatagataacataaaagaaggccatgcaagcaataattatatacttacactagtcacacacttatattttataactctatacaagcatatatacgtatatcattataagtctgttaactatatacttacatcattaatggtagttacataatgatagtcctttgggaacaaagagt

SEQ ID NO: 49146 - DNA, 1028 bp, Homo sapiens
ctacttaagattttatctttatacatgtttcatatttataataaatccaagttctgtgggtctgatcattatttgcataagcattaaagtgcactcaaatacttatgcaaatagaccaccagaagggctttgaaaaggggaaacaaacaagcaaacaagcttcccaagtcgttattcacttttgaaattgcaaacaattctcccaaggctgacctagtcctattttcttaaaatgtaaagaaatctccaggtaaacaaccctttaggaaataaagactttatatttcttttgacattaacaaattttggagaaagtttttttcttataattaataataaagggggggttggatttctagaaagaagaatattacattgttttcaaagatactcataatggctcttgaatattaattaactcaacatgcttttcttcaataaacatgtaatagatgttgatgttttaggtactactgtgttagatttgggttacaaaaatcaacaaaacactgactctggactcaaaactgtgaaaagtgacttgaaaatagtcatttagtttgggctaatgagtgggacactgaaaaggtagggtggaaacaaagttggtggtgttgtaggataatagttgaaatatttaggaagaatccagacatttagagcttaagaaatctcaaaaatcatttagaacactttttctatggatgacaggattagatgaaaatggttttattaaattcatacataatagttatattcaaatggttgacaaactgtcctgtttgtcatgtgcgtctgtatgaagagaccaccaaacagactttgtgtgagcaacaaggctgtttatttcacctgggtgcaggcgggctgagtccgaaaagaaagtcagcgaagggagatggggtggggccgttttataggatttgggtgggtagtggaaaattacagtcaaagggggtttttctcttgcaggcaggggcgggggtcacaaggtgctcagtgggggagcttctgagccaggagaagga

SEQ ID NO: 49147 - DNA, 1050 bp, Homo sapiens
cttctccactgttgcagttcagggagctaaggccaaaggctactgcagtggtggactctggggtccccctggtgacaaggaagggactttgagctttggaatgccctgggctgagtcttgccacctgcaggtttgtgaacctcatcatgccttgtttttagcacaacaaaatgggataatagtgactttattattgatatactattatgctgttttcaggtatgtgacactgctgctattttactgtttcttccagatttccgtgagggtggaagaaaatcataccatatcagatgcctcgcagagcaccaggcccaccgtgaaaggtacagcaaattttacttccctcttcttgcctcgttggaaattctttcctgtgagatttcctcccctccgccctccgcgccttctgccatagcctatagcctcctctgggagttcttggataattttgttgccttatacctttgcaatttccagtatggtagccatgcgccacatgtggctgtggagtgcttgaaatgtggccagtctagattgagatgccttgtagaagtataaaatacacactggatttcaaagacttagttcaaaaagaaagaaagcaaggtatcttattgataatgtaatacagtttacatgttgaaatgatcacttggatacgtggagtaaaatagaatgtattattaaatgtaacttcacctgttttcttttgacatttttttgtggacccagaaaattgatagacaggtggatttccttcacacttacacacttgtcttgctcaagaccagccctgcttcctcactggctgctcagtcaaatgcctcctccagtttaagctgtccatcacggggccacccattatgtgtccatctcatcttctctgctcagtgcctgtgcaggcagctggtgttcctgctcctcccgcccagctttgcttatgatgctagtcttgagtgcaggctgctgagcttctcacctttcttcccatacatgtagaacctctcctccagaaacatggggtacttaccagctggcaaggagcag

SEQ ID NO: 49148 - DNA, 1027 bp, Homo sapiens
gcctggctaattttttgtagttttggtagagatggggtttcaccacgttggccaggctggtcttgaactcctgacctcaggtgatcctcccgcctcagcctcccaaagtgctgggattacaggcatgagccaccgcacccggccagtgtaagtcttttgaaacacagacacctagtgcctttcccgtgagtctttcagggaaagattgagttccgtgtcaggttggagttgctgatcaagcgactgactatacggcttcctagccccctttatttgaaaaaccagcgtggtcttcacttttcccttgagcctacaaccacagggtgcctgttcatgtatttccaggaccttatgcggctcctttgctctgcttattccgagaaccaagccttgggactgtgcattttgaatacaaatgaaggcacccggaggaagcccccagagtctcggcacagttgaggaaacaaacaaagcatgctacacgtgcaggaagatccctctttaattcctatgatgacctctctgcttttttattttttaagttaaaaggagtcaatgctttgggttttgttagactggacaaggtagcaagtcatattaaactaacccaggttgttgcttgagttttcactgaacttagactctactgacgagtatagtcaagcagaaattcccctcacgaggtggcctgatggtgtactccagtgggggggtgcagaagatttggagggatctgcttcccgactggggcaggttaacctctttctgccttagttacctctttgcatgtcctaagagcacctgcttatcagatccttaggaggattcactgaattcgtccacttggaatccacatggaaggctgcctggcatgtaggaggtacccagtaaattttagactcctgttatttttgccagttggattcaacagatgtttgttccctggactagtgtttctcacctgggggtgatctgcacctaggggacatttgacaaagtctggagacattttgggttgtcacagctt

SEQ ID NO: 49149 - DNA, 1036 bp, Homo sapiens
agggggtggggagaaagaggaagacagatgaaagcagggaaatccttcttggagtcatagttaaaaggataaaataagagctttagtgtagcctccgtttccagcaatccattttattctttgtccacaaactgaatgaaaataagcagtcattcaaaaatgatatttacgtaacctacaaaaatctcaatcaaccaaggaaaaggtggaatggggcttaatacaatacagggctgtctccggagttccctcccttgatttcaggcttttggtgtaaagctcccgaaagaaagcaactttgatttttattagactcttcaaaatcatctcggtagaatattgaccttttttgtgtgtggaaaaatgacttctacgaattctcttgtaggagtgtacattttggtcattttttggaatgtaggaaaaaaaatgtggggtaccctttattgcattttcaagaccttccaaagaagataattctgattgtaactcattataatctgggaaagtagattgttctggtttcaaggactgcgtgtgctttaaataatcacaggctgctctcagacttgggaacttttggtagaatacagcagtgattctcaaccagggcagttgtgttccttgggggacatttggcagcgtctggagacatttttggttgtcacgttttggggaaatgggtggtgctcctggcatctaatgggtagaggcccaggatgctgccaaacatcctacagtgtgcaggacagcccccccccaaccaagaatgatttagccccagatgttcatagcgccagaggtggaggaactgcctcgggggatgtgtaggagctttactttatgggttttttaatggaaaatatatgtatagacacgtacatatatatacgtgtacatacacatgtagatgactctgctcagcgcacccatgaagtatgcagtgcacctgtcccctgggatctggttatacgatgggtgtccagcctgtgcccaggggatcagtttcctttgtgctgctgcagtaccttgtcag

SEQ ID NO: 49150 - DNA, 1072 bp, Homo sapiens
agtctatttctctgtgacttggggataacagtacatgtgagcgtgaaataagagtataaattgcatcaatgtctgtgtgtcaaggttgcctgaggaggagttggctgggcttgcactgacgcttgattctttgtatcactccgacttaaaccacgacacttccaaggcagagtctaaagcctgtcctctcacaatcttctacaggtgagtaggaggccatagaccttgtgagtacagagtcctaaaagaaggcagaaatgtgtgaatctgccaaaagtaaagaaagggtgttactactggtcaaagtcgttgcaagaatgctggcttttacaactcctgtttctgctgctatcacctgctgcctgtgtcttgtttcctgggctccagatcattttcacatttctcaaaatggtccttggtagctgtggtagatggaataatggccctcaaggtgtatctccatcctaatcctggaacctgtgaataggtcattctacatagcaaagtggactttgtggacgtggtttaaggatctcaaggcctggtgccaggggctcatgcctgtaatcccagcacttgaggaggctgaggtggaagggttatttgagcccaggagttcaaggccagcctgggcaacagagagagaccctgtctctagaaaaaaactaaaaattagctgggcatggtggcacgtgcctgtagtcccagctactcaggatgctgaggtgggaggattactgaagtccaggaggtttaggctgtagtgagccatgttggcgccactgcactccagcctgggcaacagagcaagacactgtcccagaaaaaaaaacaaaaacaaaaggatatcgagatgaggttggggaggttgtctgggtgggcccagagcaatcacagaggtgcttctgagtggaatagggaagctgggggaacagaatcccagaggagataggaggatgggcgcagaggccccagtgatgtgggcccatgagccaagggatgctggcggcctctagaagctggacaaggcaaggaatcgaattctcccctgaagcctttaaaaaaggacaca

SEQ ID NO: 49151 - DNA, 1021 bp, Homo sapiens
cccggtttttctgttaatcatagctggtaataatgccctccggtttatagttttgatgagccgggagctaggctgcgtgttttacatataatatctctgttccatcagctgcataacctagatatccttcaccccatttttatgagactcatgggttcttgtctgggaccatgcacctagtaactgacaagattgcaaactagttatgtcacctgtggagttccacgacaaaggcaattctaggcgatgtttatgtagtgttccttgcatgccagggggattctgtgctctttccatgtgtgaatgatagcatccacctgctaactttgttgggagggttcagttatcctctctgtacaggtgagaacaggaggtactgaggacatctggcccaaggatactaccgctggcacggggtggatggtgattcgccctcagtccctctggcgcagcatctgtgctgtttgctgccaggccagctgcatcccagatagagtgacaggatctgttcgcgtcacatccagaaaaggctctgaggccaagctccctgcgttgcttctcactttcactctggaatcagaggtgcgtgcctggaggacttagctctgcatggacagctggtaaggtgtcacagagggtgaggtgggccattgtagcagagagttgttaagagttggttacgtgggttttctcacagggtacaaggctgaggaatgggaaaccagttaggagaccttgctaatagcgtggaccaaagatggggagtaggtccagacagattccgcagtgttcatgcagtgttcatgaagcaggtgtagacagattgcggggccattcatgaaggtgatttgccggggctttttacggatggaaaaccccttttctgtgttcatcccacctcctgttgtcgacagatgacacctgcacaatcaggtcctcccaactccttccaccacccaaagtgaaatacgcaagtcccagagaactgtgtcattcttaccgaagtggctgatgtaggatg

SEQ ID NO: 49152 - DNA, 1026 bp, Homo sapiens
tatgttgtgtctatctgtgcagtgtgctgtgtgtgtgtgtgtgtggtgtgctgtatgtctgtctgtgcaaggtgctatgtgtatgtcgtgtctgtgcagtgtgctgtgtgtgtgtctgatgtgctgtgtgtgttgtgtctatctgcagtgtgctgtgtgtgtgtctgtgttgtgtgctgtttgtgttgtctctatctgtgcagtgtgctgtgtgtatgtctgtctggtgtgctctctgtatgttgtgtctatctgtgcagtgtgctgtgcgtggctgtgtggtgtgctatgtgtgttgtgtccgtctgtgcaccttgctgtgcatgttgtctatctgtgcaccttgctgtttgtgttgtgtctctctgcacggtgcactgtgtgtgttgtgtctatctgtgcagtgtgctctgtgcggtgtgctgtgtgtgtgtctgtgcagtgtgctctttgtgtgtgtgtggtgtgctgtatgtgtgtgtctatctgtgctgtgtgtgtctggtgtgctgtgtgtgtgtctctgcagtgtactgtgtgtgtgtggagtgctgtgtgcgttgtgtctatctgcagtgtgctgtgtgtgtggtatgctatgtgtgttgtgtctatctgtgcagtgtactgtgtgtgtgtgatgtgctgtctttgtggtgtctgcagtgtgctgtgtgtgtgtggtgtgctgtgtgtgtgtctatctgtgcagtatctgtgcaatgtgttgtgtgtgtgtggtgtgctgtgtgtgttgtgtctatctgtgcagtgtgctgtgtgtgtgtgtgtggtgtgctgtgtgtgcacgtgtgtggtgtgctgtgtgtctgtgtggtgtactgtgtgtgtgtctatttgtgtaccgtgctgtgtgtgtgttacatgtcctgagctcacgccttctgttttcacatttgactgtgattactgtcctttttgagatctgagtaacagggacagggctgggcccgatgacttaggcctgtagtcccagcacttgaggatcatttgagcccaggagtt

SEQ ID NO: 49153 - DNA, 1026 bp, Homo sapiens
gtgctatttctgcagcttattgtaagtctaaaaattatttcaagattaaaagtttttttttttaaaaaagtcagatgaaaacacgaataagtaaaaaaaacataaaaagagagaaaaaaggagccatttatatgattaactttttggttggtgtcgccataagttttttcagttcggattcttagtaaaggatgtggatcaaaacaaatcttcatactaaaacatcagcagagaccttatttcatttgaacaaaatatcatgaagtcaggattcgttttgcatttgaatcttgaacatttaagttttttaggaaatttgtggtgctcctgtccttgaaaggaagcccacatatgttcaaaatgcagtatcttttaaatgcatttgaattttttaaagttttggtgtttgttgtttttggttgtttattgctttgatttttcatgagcagtgctgttcaggggtactattattgtcagttttaaatcactgctgcagcatacttcatttgatcttgagacttgccatgagtcttactgtgggggtggggaggatggggaaagaaaccattgagtatgagttggcatgtcccacagaacagcgggcggacacttcagggggctgtgcctttctcagagactcgagggctatgcccaaatcgttatgcagtgtgtatgtgtgggggggatagttggggggacgggtatggggaaaggagtaatctaccagggacgacccaggacagatcccagagccaggaatgagggttggatcttgggcaaggccatctctgccatgactgcttgtgggaactcctgcttactccccgtgaccctgagcaaaacttccaagtttgaagcctcaattttatgctctgtcaaagaaactagtttttcaccctccaccagaggatgaagtatcattctccacgtgaagcactcagcacagtgcctgtcccctctgcagacatgatgccaatctgtgatgatgttctcttctgtcagcattttacaaagcagatgagagcg

SEQ ID NO: 49154 - DNA, 1050 bp, Homo sapiens
tgcagagcatcagctggtcatcagccatcttgcgggagtgcccagaggggggaagagcaaagcctaccccttctacggagtgtgagggaggcaggcttgggtggaggcaggactgcaccagccttccagagctcagagaggtgacacctgagccaagtgacacacacatgataaagaggaggtttctggagtccagaggaggaaggcatccttggctaagaggacagcatgaactcatagggtacctccaggaatttttcccctgggcagtaggggcagagaaaggtacccaggggggcaggggataaggactggcatggagcatgggctcgatatcagcctgctgattttaatgaaagccgtttggtcacctgaagaacagctttgattttacttctgtaatctaaactcttttgagttggaatataaaactcagtgttccatgtgacaaaggggtttttaaattggtcattcccttaaacatctttacattttcgtatctgttgatgtcatttttttccccattgctgactcctgttcctgtcttctatttctgctcttgacttaataattcttggcttcttgacgtttatcattgccgactgctctgaatcctcatcttcccttcatttatttccatttgtccgctctgtttactgcctgagatgttgaccttttttccaagcatgcactaagcggcattttaaagaagcagcatcatgtcatagctcctggtagtggggctgggcctattcatcttggggcttctttatctaccttggttgtaggtagttaagaaaatcttaacccttgggtcattatttctatagtgggtcaaagagatgaccacgttactaaaactttcatgtctagttgcatattctgttttttttattgtggtaagatatacattacgtaatacatttgtaagtgtacaattcagtggtatgaaaacattcacaatgttgtgtagccatcaccctcttacacctaaacatttttccattatccttctccaaaactctctgctcattatacaataactggccc

SEQ ID NO: 49155 - DNA, 1079 bp, Homo sapiens
tgtgacatctgttgtatttttcacatgaattaattgagtatctattatgtggcaagctctgtgctgtctttgaagcactgaactgtcttatgatacacacaggatgaggacaggatcattttctatatttctgtgaagtcctttttcaaattcccattcttttgctgcttctgcatctcctttgactgctttagggcatcccaggtagaaagcttacctaatgtcaactccagttctttcttttgtagtcttcattttaagcatgatttctgtttttctttttccctttaaagaaagcttctcaaactttgaaatgaaaacaaatgaaaggagagggaaaagattcagaaattattgatagattgctaaaaacaaatgctatgataattttgggtcggagcatctgtcgttttacagcacaacagatttagcttcttaatgatgtttgtatgtttttcctcaaaagtgtattgactaggtaggagttgagccaagccttgaatgaatcatttcctgccaaattcaatagactgagcaaatcctcggagaaatggccatatttctctaacactgggttcctttcagggctcaagattccattttctctcaatactttgctcctacagactaggagtcctcttcatgctacagtatgcagtgtgtatggaaactgtgaatggagaagcagccgttcatgctgccaagtttctttcagaaggtggctccaggtggatgactttcagtctgaactcagtgtcaccaggcatgtgtgtgcccacacactgccactttaagctgtggacaaacagaacggatattctcccaccaaaataaacatacaagcaaaacactctgtcttcattcagcatcatttgcatcctataaaataatggtttctccttgatgcccacctttcttatgggtggttcttaattagttccaaacagaacttaacgtggccatgatattccacttgctaaaacaagggcagtcgagtgttcgatttgccatcattgattagacgcatgcagtcacccagtgctgtttgcccaagcatctgtaggcggggattccccagt

SEQ ID NO: 49156 - DNA, 1028 bp, Homo sapiens
aaaagtgaatttaaaaagaaaaaaagatgagatggtaagatatgaggaaataatgaatgcattgtgactttccacctccccatacccattttcatagtttggtgagtagaaagagaaatgaggatgctggcccaattttgattcccagtggatgaggctcacacagaactgccctgcttcttgacactattatgatattaaaagtaacttgtatttttataagttattaccatcttggcacacttgcattcattttagtcaagtactgtcacctttagatttcaagcttgcagagtcttaaaaaaatacacattggagaacacatagtcttttaacagtaaaatctcagcttattagaatgtttagtgactgaggtattcagagtcagtcagaaaagtatctttaggatttcagcatgtggagatgtctttcatagagaaaccggggagagtcaggcaaaccctagcacgttgagcatggcgtatcctcatctgcacgggcacttagacacctggacaagtccattagcagtaaggcaggatagaggggttcacaggatacgtgctgcccaggatacgtacgtgcagcccagagctgggaggaaatcatgaggaccgactagacatttattgtacagatgcatgactggctggtatggcctgggatatgtcagtgaagatacaccgtgaggttgtgggaggtaggattcacagtaaatcctaaattcttcatctttgcactcacgacgcacaatagctgatcaaagcttttagcaaactgcagcaaatgaaaaggcggcagaacctcatggtgacaaatgcaaaccctggagtcggactgcaagcattcacaccccagctccaccagtccccagccctaggacctagacatggagctgcatgtcagtgtgtccgttccctctgtgtgagaacgggatagtaacagcgctccctcacacgctcctgtacacatggaaaccaccactgccgtcggacacagtgtatgctgtagaagcacttatggtacta

SEQ ID NO: 49157 - DNA, 1649 bp, Homo sapiens
gaataggaatttgattgcaagctttcttctgaacagcttgtaataagagctgtttgtatattaattacttattgaattattgtggattttaatgttttaatttacaagcaatttggaacttattgtggtgacagctgctcatattttgatactttatggtatttagcaatttcatcataaggctattttttcccctggtaatttataacccaatcctgaaaacagtaatttggtctctccagctcactataaggagtattgtcctgtttcatccccactgcagatttttttcatagttaaaagtatattttataagcaaaatcaagattcctttgtgcctgcttccctggtgccctttcatttctattcagagttacagatgaatttagtttcactctcattattttacttcagtggtagattttttacaaattgccctggttattactttcatcttgaatatccttatggtttttgttttcaatgtactgtaatgcactttaggggcctgtgaacctgcttgtaggtttttttttaatctccttcctttaaacaacataactataaacatgactcagtgggaataatttgcttgaatttccttaaaacacttgagtttctatataaactccctaataagaaacaccttcactcatagcttcacttgtggacttcaattatattaaacctggtacctttttattatcactgaagactattaaataagaatttagagaaaatggtggacatttaatttccttagttcttgaattcgtagatgatagaggataattgatactctctaggaggcaggaatcattcacaaccaaagaaattttataaggtaaatatcattaggtaaatggtttactgattagtgtttatagtgactgagaaataaaaacaatttttgatataaaggattatcattttatgagccataaacctggcttcctcataaatcagtgcaaatggaacacttgtgaaacagaaatgtctgaagagtaaatgaaaagttgagacgttagtgggtgcctttggttttcttgattttagaggagccggaggagaaaggattctgacccgtttgtgtgtttttatgagcacagtacatgaggatgcatatatgcacacaaatgtgcctggtagagttattggaaagctagcccaagcgatggggaatgtttagctaaagcgtgttgtcttctcccgagggtgtgcacaggttcatgtatcagctgaataaggccctgttccaaaaactgatatttcaagggaaccttaatttatctttaaatttaatgtaatttaaaattaatttaaatctttaaattatctttaaataatagcagtagcaatagctgagctaacattaattttatctattttgagactcttttatttcagaacttctacatgcataatgcctgaccggccacttttaatttctcctttctttcactttgcaaacaaaaccttacaatctgtgctatggactaagacagaaattaagaaccaataaaatgtgttaagttttaattaggaagaagaaaaaacctaaaggaacgggatggttgagaggtaaacacaccccaatgatttttaagtcttttgtttcaaacctttccctttctccctaggctggtccc

SEQ ID NO: 49158 - DNA, 1034 bp, Homo sapiens
ttcccacagaatacatagctgtcgatggcactttgctttgaaccttggtgtagagggcagtcctcatgccctgggctgaggggtgcatgtgacacatcattaaaagtcaaaaatcattttcatagagcaggtcctccccacatgtacacccagagctcctgtgcttctctcctctttctctgacttcttccaaaatcgtgggtcttgtctccatcagtcaagaatttaacttttcttccaaaacatccccctcctcttctgtgaaggaaggtgcttgtggactggccttaggaaatgtcgcccagacaggaacggcacaccagtgtgccatcactcaagccagaaatgaggtttgcagtgaccttctctgtgcttgagagttctgctacactacgaataccactataataacagcacatttatttgtgggaaattaaacagcaaagccctgggtgggagatccataatttaccatcttcctgtgaaatttagttctggtcttagaaaaaagaggaggaggaggaatttttattcccagccttgtgtgtggtgaggtttgtctggaacagtggttcttgcagaggaatactggccaggagactcacttgagtcaaaaaactgaagaagatccatgaaaacaaccaccaccttcaagtgagccacttagagataagcgcagctaaacgccgggacacccagctgatggatggtttctcttgattttggtgtgatgaagcccacagagctgaagggcattaaatacagctgttagggttaggagtccattcagagaatattctcatgcttgtatctaataatctaagaatatatatgtagattctacaatttttggaattaggttttaaaagaaaaataatcatttaaaagctagcaaagtaagtgtttgttgggggagaaaagtttgatccaaatattaaatcagtcttaaaaaattaaaatatgtacttgagatggagcagtcagtcttaccaaacattacatcctggctcgattgcaggccatggatagttttt

SEQ ID NO: 49159 - DNA, 1020 bp, Homo sapiens
accattgctctagaggccatgtagagatccattcagagaaatgcagctagtgaaaatttcagcaaataggaggacttctgttaaccatggcatggaatgcacatctcccaggtctttatgaaggtgcctaatttccagtcatgacctaccctctccaaaagaggacccaagctgatgaaagaccttcgaggtacccctgtagaactttatcctgcacatttgtcattgtgcatctgcacaggatattcctttcggcagacgactttcagctctttgcagaagtctcagacgccacatccttagtccatctttactggttcatctctttgttccaagaagacttaattgaatgtggatactgttgtccacacgatctagaaatgaaatctgtgttggagagcataatcatgtagagagataaagttatacagccaaaacatgtactcaacattaaaaacccagatgagagagaaatcaagggcacactccctccgtgggttagactgagctttgcacaccgttctttgtgagttgcctgagctgcacccacgctggctgctgtccagagctgccagtggtctagctgagcagccaggtggaaatggagtctgtgtccatgcagggaattcaagaattttggttcctgtgcttgtgggtgggtcttggagtgtaaagtaaaaagcggaatctcggagtcacatagtctacggttcacagtttagttcagcgtcatatcacatgatccttgggcgggttacctgatgtctccaatgtttgtccttatgtgtgaaacaaaaacagtaccaactccaaacagctgctacaaagactgaggtagtggacagagtgcccaggtttggttgaagatggtaatgtggtcagaatcggctctgtttcacagagcatgtgactgcaagtaccagttctgtggcccagtgctgcttgcgggaatgaatgagtcagagtggatgaatgaaatgtcccaggagcacgagactttccttccacaattgctccatc

SEQ ID NO: 49160 - DNA, 1051 bp, Homo sapiens
aatgatgctgagaagcttgaagccatttagtaggagccacgtgagtggcccccatcagccgtgagagtcatgatgtctatgagagaggaatcactgtggcccagagtagataaggaagattccatgtagtggatcgtcaagccaagaatgcagtgaggtcccgctttatccattgactggggtttttctcttccacactttgccaaagacctcaatgataaaagcttgcaggtaaaactctgtatagcattggcagagaatagagtcgttggtgaacccaagggtgggttgcttcattttggtaggagtgggtaggagaaaaggaaggtggatagagagaaagcaagttagaaggaaaaggtaaggttgttgtaaacagccttggcttatatcctccaaaaacacaggggcggaggaacccttggggataggggaacctggaagggcgtcctttggaacctaatgtaggcagttatagttctgtaaagaaatatgcaaggctctgtgcaattgattgtaaaattaatagcagctaccctattactctgttagataaatctcaactacacatttgatatgttctttacaacctggcggtggggacagaacagagggtggattgaggaggagggagagtagacagagaaaagtgaagtgtaagaaagcagcaaggagagcacagcgcagagctcgtctcctggaggaacattcccatctggtgagcgttttgtttattgcaaggtcagtttgcatttggataaggcgaggcagaagggcactgatacggaagcagagggaagccggctgccactgcccctcattggctgaatgaaaggcggcggaagaggagcacctgtccagcaaggctgacagtcctgcctcctgggataagcagattctcagcctgcagagtggtctaaccagggaggtagagtggctgctttccgaactccctgcttcctgctcatttgcctcatgcatggaagttgtaaacagtgtgagagttgaaagccacaccatgggaatgccttggtgtccaccccacctgttg

SEQ ID NO: 49161 - DNA, 1049 bp, Homo sapiens
tagcccataaggctcactctctatctctattggacagtgccggtttataaggagaagggctgtcttttcttgtatgataaatgtttccagagaaaactttgccagaatagttactaactttttcctttgtttgcggaacacagacaacaataatttgggatgcccacacaggagaagccaaacagcagtttccttttcattcaggtgagttttttgttgttgttgttgttgtttgtttttttgtaattcaaaaataataattcaggtcgagcccagtggcttacgcctgtaatcccagcactttgggaagccgaagcaggtggattgcatgaggtcaggagttcaagaccagcctgggcaacatggcaaaacccatcactacaaaaaatacgataactagccaggcgtggtggtccacacctgtagtcccagccacttgggaggttgaggtaggaggatggcttgagcccaggagatggagtttgcggtgagccaagattgcgctactgcactccatcctgggcgacagagccagaccgtgtctcaaaaactactaataataataatccaaaattaggctgggcactgtggctgatgcctgtaattccagcacttcggaaggctgagacaggagggtcacttgagcccaggggttctagaccagcctggacaacaaagcaagaccccgtttctacaaaaaatataaaacattagtcgggtgttgtggtacacacctctagttttagctacccaggaagctgaggcaggaggattgcttgagccaggaaatcaaggttgcagtgagctgtgattgcaccactgtattccagcctaggtgacagaatgagatcctgagatgccccttaaagtaactgaatgcgccgagtatggagcccaggaggcctcattggtcagaaggagacccattttgtggcaagcattgattgctcttaaggtttgcaagatagagatgacctcggcacccacctgctcagagctctgaaacacagcagtgagccagccacagaagcagtgcgggctcctttctc

SEQ ID NO: 49162 - DNA, 1021 bp, Homo sapiens
cacgtttggcttaagtgccaaaacctacctttgtaggcaggaaggatgctatgacaggttcacagccctagacacgcagaccccggggggtgaggcagggatgtctaatgcagaaagctctggcttctgtttttcagagaaaaatatgcccgaggtaaacatcaataaggttcctctaacacttgtgtcttaagaattcatctgtaaagtatttcagcagaaaataatctttcccaaagtgtccccaggccctatggaagggtttcctacccagctgacccaggaagaccacaaaccacattgttctgaattgcgtgagcttctcacctgtgatctggctggccatgaggtagacccaattcccgtcggcaggtcagacatatctaggcgttacttgctctctttttggtgtcaatcagtgtgttaaagaacgttcaaaatgaagagaaagaagctcgctcttccaggtgaaacgcagctgggaagagctgtgaggagcgcctttctgtggctgtggcaggtttggtgtttaatggggcgataggagacattgccttgccccactagcttttccccagtaacacctcgtgggggcgcccttggtcaccgtcggcaggaagccttagctcagagcctcgtggtggagtgaaactcggccgcagaaaggaatgaactattgatgcacgacagccaggagagatctcaagggcattttgccgagtgacaaaagccagtctcagaaggttgcatgctctgtgctttcattgatgtaacgttctcataatgctaaaatgctagaaacctgggacccgtcagtgctgtgggagttgagggagcatgtgaggaggttgtgtgccgatacagtagctgagggagatcttagtggcgacggaacacttctgggtctcagttgcagcgatacacatctacccatgtgataaaatgacagcactctacaggcaaattgcaccagtgtcagcttgccagcgtcgatacaacgctacggctacgcgaaatgtaa

SEQ ID NO: 49163 - DNA, 1025 bp, Homo sapiens
cgggtgtggtggcgcatgcctgtaatcccagctacttgggaggctgaggcaggagaatcgcttgaacctgggaggcggaggttacggtgagctgagatcgtgccattgcactccagcctgggcaatgagagcaaaactccatctcaaaaacaaacaaacaaacaaaagcaacagacatttgttgctcacagttctgggggctggaaatccaagatcgaggcgtggcagattcagtgtctggtgagggcttcctggttcacacagtgccttcttgctgtatccatgcatggtggaaggggcaacagagctctctggggtccctttaataagggcactaatcccattcatgaggctccaccctcatgacataatcacctcccaaaggccccacctcctaacaccatcaccatgaggatcaggatttcaacatatggattttgtgggtgggggaacacacacattcagtctgtagcacacgccagttaggagccactgctatccactgtcagattctccctaatgtgtcatccttcccttggccttagggctgggacccctagggaaccttagttaaggtcttcgcaccttcttctttcgtgtgttctctttgtgctgaagtttgcttcaggtgtttaagagagtctggtccttgaagaggcaggatgaccttggcaagacctggaggagccaggggtgcctgtccagaggcagggagctccttaggcctgcacagtggggcttggccagggatccatcctcaggacttggttctgctatgggaggtaacgcccaccctgtgtctctctagcccgccgagcccctccctctgcagcacacccctccttgctggtcttgcactttgtgtttgtcagggagcatgactaggttggtggggagtggaaaggaaatctccagtcctgagggatgctgtcccgtggccatctcttggtcgagtcttttggaattgtgtgctggctccctcgaagtagaatgcatgtgaccatgtggcacatgcaggcttagta

SEQ ID NO: 49164 - DNA, 1030 bp, Homo sapiens
ccaggcccaggcccaaggcagccgtctttgcacggtgcagtggggagtggaaaggcccatgtcccctctcccagctcctctttttagtggacagctgcccttgggtaaaagtggaccatgctcagcctcagttttctctctaaaaagaggggaacccctggcagcatagtgtctggagtctgcagggcctcagagattgctggacacatagacagcgctcaacagataggaactggaggtttctaagaacatttctgggcccggtttagcatctttgcaatgtctgtgtgccctcgcttctctccctctctagctgtccttcagcctcagcctcagtctaccccccagcttctctctctctctcttttctccctctctaccccctccttctcccttctctctctccctttccctcccactgtttttcttttacagctttatcgagatatgtgattttctttctttttttttgttaagagacagggtctcactatattgaccacaccggtcttgaactcctggcctgaagcaatcctcccatctcaacctcccaaactgctgggattacaggcgtgagccactgttgccggccaatttctacactataaaattcacccattttaagtatacaattcagtgatttatagtgagttcaaaggtgtgcatccttcatcatgattcaattttagatcctttccatcacccccaaaagattctttttattcctttaagccatcccttctggttcccaccacagccccaggcaaccatgaatctcctttctgtctctggacttgcctcatttggacactccctgtacatggaatcctgcagtatgtggtgttctgtgactggctttttgactccgcatcatattttcgggattgatccacattgcaggtggtatcggtactccattcccttccggtgccaagtgctggtccttggtgcagactgaccgcatggtgctgaccagtgtgtcagctgatgcacggtctcattgctttcccgtgccaccctgacaagagtg

SEQ ID NO: 49165 - DNA, 1066 bp, Homo sapiens
catttgctcatctgacaagtcctaaggtcagagagctcccgcctccatgaaactatcactgtggggcagatgatgagcaaaccacacacccgaaacatcacacatgcgcccccttgccatcttctttctcctgcctgtgtccccagcccaagcacggagctgctttctgtccctttaggtcactgtacattttctggacttgtatgtagatggagtcctgcagcaggtgctcccttccacctggctcctatctcttggaataaccattctgagatgtgcccgtgttgtcagatggatcaagagctcattgctttgcattgctgagtattagtgcagtgttgggtagcaagttacatgctggtggcattttgtgttaatattagaggctagtttttagaaaaccgttgcaaggagagcccacagggagaacaaagagagtgtcctgtgaaagctatctcttgaccctgatggagagaagggcgctccagcctgtgcagatgtctgtttccggtgccatcgagctctaacttcaaccttgactctgctttccgagtttgggtaagacttgtttcctactctatttgaggtcatcggagaccatcactttatcatggatgggaaaagttttcaggtgatgaagggctgtgctgttgatttggaaagaggacacaagactggacacttcctttcagggtaccatttctaggccctcttgatattttaatatgttttaaaaattaagagaatgtctgcatatgtactagaggaagtcctgttacacaggaaatactctaaattcaactcacatgcagttggttcccattttcaattcttgggaatatgttagaaaacaaaaattttaaccttggagttaaaatctgttgctattttcttttctttttctttttggagacagggtctatgtcactaggctggagtgcagtggcatgatcatggctcacctcctgggatcaagcaattctcccacctcagctccccaagtagctgggactacaggtgtgcgccaccacactggctaattttttgtattttgttgtcgagacgg

SEQ ID NO: 49166 - DNA, 1108 bp, Homo sapiens
gtagcttgttcacagcccaagaatgcaggagcacgcaggatgctggagcaccagcttttctgacttgttagtgatagcctgggttagggaaggttgtccttggaccacatgggctgggcatgcccctcaattcatggaaagtgactcagaaaagttcaaggtttcaccaagactaagaggtgaggaggaagttctttcagaacataagggtactagggtggtgatttcattctgttctttttttatgtgtggactttttcaagggcacaaatgttttgtgtcaattaaaagcagatttgtatgcattttgttacaatgattatgattttaaagtcttaatagtattatactatacaatctacaaaaagatttgagcatcttataagccctgataattatgcctcgctctaagaaacatgggtatctggaaagccacattataaactttaatattataaatgtgctttctgtttagaaggaattcttggagggtctcctttaagagtggattcctaggccaggcacaggggctcatgcctataatcccagcactttgggaggctgagaggattgcttgagcccaggagttcaataccagcctgggcaacatagtgagaccccatctctacaaaaaaaatttagctgggcatggtggtgcacctgtagtcccagttatttgggaggctggattgggaggatcgcttgagcctgggaggtcaaggctgcagtgagctatgatggtgccactgcacttcagcctgggtgacagtgagaccctctctcaaaaataaataaataaataaataaataaataaaaacaaaaataaaaaaacaggattcctagagcacagccagcatgcagaacttgttttctaaggcttttctccaataaaaggaaccagggctcctcagaggaatgactgagtctagggttggggcagggactgtacaagatgagcctggagtatcttatagtgccagaaaataagcgctcaaatacacccatatgtaaacccagcggtgacaacagtgtgggtatgtcatagggacacaggaaccaacaatgaccaaaggcagaacaagttaagcagcaaaattaagtagtagt

SEQ ID NO: 49167 - DNA, 1035 bp, Homo sapiens
ttgtgaagggcacgatctgcatctggcagctctctgggtggtggctgagggcagagaaagtgagtgactctggggttgatgctgttgcgggggtgggatgaagagacagtggcagctggcccaggaagtcccccaccttccaaaagcgctgtcaaacctccgctgtctccctaccagcttgttccctgaaggtcagcccgcttaggccatgtggattcatctggagcctggggctgaatgcattaaacttatccccagaaggtggtgaaaaagaccacttctttctttgcaggtgagcatgtgaggcgatgggagagcgctttggcaacatctctcaaatatttactgtcagctcctctctcttacttacagtaaagagcagaaagctgggacgtacctaagtggatgacccagggtgcctggtaaataagtgacgccgacagagctaaaagacgtgaggcaatacccaactgaaatgcaataagtttatgacattatatctagtatgatatgagctatggaaaaaatgtaggacaaagaagagagaaaaagaagctaaaatgtgaatccaaggcttctggatcttgagtggttatattccatgtagacattatgatctgaatttttgcatcaaatttaagatataggggtaaaacttcatatcctttgaccttgaaatttaattctgagaattttttcaaagaataattataagtacggcttatgagctttatagacacagatattccttctatcattaatataaaattgagatatatttcacatgtgccataatagtcaccatttcaaagtgtacagcagtggtttttagtatattcccaaggttgtacagccatcaccctatctaattccagaacattttcttcccactaaaaggaaaccctgtgctcgttaacagtcactcccattccctctttcccccagcccctggtcaccactgatccactttctgtctctctgggtttgcctattctggatatttcctttagatggaacctcacaatgtgtggcctc

SEQ ID NO: 49168 - DNA, 1035 bp, Homo sapiens
gttctgcttgctattccagaaagcagcaggattttaggaccatgagaaatgatattgtagactgcagatttttggtataaattcaaataattagggattattcttgatatgcctcagaactttttattattgaaagtgcattgttttcctataaaaatgcaaatcgtatttaagattttcatgtgaattgtgagagtctaaatagtttctgcggcataaatgcatggtttaatggtgcctgggttgtaacagaaaagtgtttgagcaaaaatcataagggaaaaatgattcatattttatgtctgtctacattagacctgctcagggaatagaatttgggaaacacataataaataagaaacctgcatgcttgattgaacatttgctttcttcactatcaggacacgggggcatatattttaaggcttttaaaggcatttgggagagattttatataggccataaaatgcattacccctcaaaaataaaaatcactgaagaatatagttggctcacagaaaaaaaaaaaaatcctctctaattttaagctgctattagttctctttacaaaaaactcgggaaagttattttgttttgcaaactttaaccatgaccttgctttacttccatgtatttaatttcactgaaatgatatttcaaagaaaagcctttctggaaattgtttttcctttaatacccaaaattggaacaacagcactcacaggagcgaggctccaaccagtggatcagctgtttggcgtggatgtagaagaaggtgcattgaaactcagtacatctgtgtttagccttaggcaggaagtctgtttcttcaagtaaacctaacgtactaaagatactccctgcagatggctcgtttccggcccacggcaaggtagacaagtcatacggttttaaaggcaaagccgtcttgtctgtctcatggggacataagaacaatcgattgttgaaggaatcctagtgcttttggcttccagtacagacagacagacagatgtgcctctctcgaccttgctg

SEQ ID NO: 49169 - DNA, 1049 bp, Homo sapiens
ggctcagaaaactcaaaaggagtgttctgtaaaatacttctgtttatattatatgtatggtaattagtatgagtataaaatggtcgggcaaaatttagctgggctcagactttcctgtggatcagataaatggaaatgaaaaaaagtatgaggacacagatttgctgattgttcttcatcttttatatttatttcttaacttgtcttggtctactgtagaatgttccagaaatgtcattgggtataatgtctgatttagcactgacttatttgtgggtttgcttggagtgtattttccttgggctttggatatatgactgccataaattttaattacactaattagacgtaggtggatgcttaagcccagttggagtcctagccctgttcagctgcctctgtcattagtttttctggtgacatggtttggcaccatcttccaacacgttttccagacattagttttaagttagaaaataacttgtctaataaagctactgacattcaactagtgtctttaccttgttgaagtggacttgagtaaaatgcatacatttaaactgtaacttgtgtacccgtttctttccttaactgtgggctttcagattcgtttggtggctagagagggagtcatgcccgatcctcatgagtccatgtgctcgtgtctagtttaggtggagcctgacttggcacaaggctgggtggcaggttttaacatgtgtggcaatgctagtcaattggggatatccacatggctcatagtgtagagaaggcttctgaggtctagacccagcaggtgggaagccagccttggttagtgccgtggaccgcgggcacaggaggaggcagtctcaggagcacctctgccctgcatctccctcggaggatatagggccacgtgtgcctgccacttccctgttctcacagctctttgtgatctcagagaagcctctggattttgtttttgggcgagtatgccaactatgtcctccacagcatggggttcaggttgagtttgccattcctagtttctccctagaaacatatcc

SEQ ID NO: 49170 - DNA, 1072 bp, Homo sapiens
tgcagtgcctgcttccgtatcagtccaaggagccctcgtgtttgccacctttacctttgaacctccccctgcctccctgcctgtgtccgcttttgcagctcaatgcagccatgacaaggaaagaaaagacaaaggaaggccagagagccgcgcagttctctgcaggtgcagatgcaggcagtggaggtggcctgagcaggcagaaggacaccaagcgccctatgttgcttgtcattcatgacgtggtcttggagcttctgactagttcagactgccacgccaaccccagaaaataccccacatgccagaaaagtgaagtcctaggtgtttccatctatgtttcaatctgtccatctaccaggcctcgcgataaaaacaaaacaaaaaaacgctgccaggttttagaagcagttctggtctcaaaaccatcaggatcctgccaccagggttcttttgaaatagtaccacatgtaaaagggaatttggctttcacttcatctaatcactgaattgtcaggctttgattgataattgtagaaataagtagccttctgttgtgggaataagttataatcagtattcatctctttgttttttgtcactcttttctctctaattgtgtcatttgtactgtttgaaaaatatttcttctataaaattaaactaacctgccttaagaacagagtggaaatgtgtggctttatggaaaaagaatgtttaattatggaagcttaaatatataaaaatgtgtgtttttcaagcataaaaacagaggtataaaatcagagaaaatagctgaacgcagcgctcacccagcttcaacacgatcattcacggctgccctctcctttaccctccagcccacctcctcctcttagaatttgaagcaaagcccatatagcttatcatttcatctttaaatatttcaatatgtattgctaaaagagaaaaacataataaccttatcacatcttagcatttaataattccttactgttaccaaatagccaaggttttctctcccatttatcttgtgtcattctttaactctttgaacagaatctaaacatga

SEQ ID NO: 49171 - DNA, 1047 bp, Homo sapiens
gagagggatgagtcgtcgtttcaaggctgacctcttttctctattttgtttcttctccaggagacttcttggcatcatcacaaaaaaggatgttctgagacatatggcccagatggcaaaccaggaccccgaatccatcatgtttaattagcaacaaggtggcaattattttcagaaaaacactgactgtgtcatttaaaaagaaataaatgatatgttattatcccaatgaaagatcatgcattggggacagcagaaacaaaagcttttttggaaaggcggggaagaaggatgaaacctttaaaaacaaaaacaaaaacatcaatgagtaggcattttatagctttaaccccgtatgagtttcaagctgtgtttcctaatgagtttgctactgctgtgggggcatgtgggtgggtaaatgatgtaaatgatgtgatctgtacaagtatgtggagcatgaatgctgactcaagaaacttttactccttctgctcaaggctgatgtttgtaacttatgaacacacgtgaagtgttgagtccaaaagacaaaggggcatcggcatgtcagcgtccttatttattggttcttgaagttttgctgctatgttactgaatcatactaaagacatttgcgcttactttgttgaaaaagaaaaagaaattaaatttgaacacagtgaaagctgcaagtatgccagtgggtccgctcacgaccgtcctgtttcttgctcctgttctcagcctgttatctggcttatccatcagtttctgaaccaacatcaggggcacctgccatgatgagtgtgaagaaatcatttctctatgcaagactggcatcctgggactgcacgatgaactattggagcatacagtactgcggtgtgtctcctcccatacaaagggacacatccttattttgagggtatactcacccgatcattgatttgcatccccatggcatttgcttcatttatttattgcttttgcccatgcattcaatattgatcagctcagcacttccatgggccatagccggtatgcccccag

SEQ ID NO: 49172 - DNA, 1080 bp, Homo sapiens
attacacctttgttttgctttaataatgaaaagctttcctctgaaagttcatttcttcatatgacttctgtaggtgatgatagtgggggcaggaagataatggggtgaagacaacagcctcccagactgggtaacagaaggtccctcttagtgtacgctgcttctatgagaattgttgtctcaaaaggaaaacgctttcttggtagcactcactggagaaggaaaggtgctctgggtgattcctgctacttgacctttgctcaacacattagtttgctgtggctgccataacaaagggccataaatgtagtggcataagcaacagaaatttattctctcacagttcttgaggacagaagtccaagatcaaggtgtcagcagggacatgctccctctgaaggctctagggaaggatctgttccaggcctttctcccagcttctgggatttctttcacatcgggcagcataactccagtcttcatatggtgttttctgcatgcacgtgtgtgtgtgtgtgtgtctgtgtctgtgtgtgtctgtgtctgtgccccaacatccccttgatttttaggacaccagccatattggattagggcccaccctaatgacctcatcttaacttgatcatctgcaaagactcaatttccaaataagatcacattcacaagtactgggggctaggacttccacatttttgaggggaacacaattcaacacttaacactcacattttcagaatgactgtgaagaaattcatccagggtcaggccagctcatttatctggtacctgtcactgctgaattgctccacttgtgctcacttgcacactttgctgggccatgacattgcaaaccagtgtggtttggcccctgtattggcaaaagggtgaacccagaaggcttcacccttttgcgaagctcaatgtgctcctggcccttccacagactgcatgagcagctcatgcatgcctctgatggaagtctcttggtgagagaagagggggagggcaagataattgtctgatcccctgcaaagcatcaggaatgaaaaagagccaagtggctcatctgtcccaatg

SEQ ID NO: 49173 - DNA, 1047 bp, Homo sapiens
gtttttagcagaataccacgatgacttcttcccagagtcggcttatgtcgctgcctgtgaggcacattacagcaccaagaacccccgggcaatttattaaaatgttgttggttctgtaagagcaactgctctgtctagtttggcgctctgggttccaggtgaataactaacaaggtggtgggtctttacccacagcgcaaacacaatgcccaccttggggctctgttgtttgagttgcccacatactgcagttattctgttaggaatgattccctgggtgcctgaaagtgctctgacacgacacttgttactttgcaggccatctgtgatggcaaggaaaaagcaactatgttcacagtgaaatattcgtggaataggttaggccatttcagtagacattgcagttagttagcaagaaccacattgtctctttatttgttagcattaaacaaatttttttttgcaaattggttttatttttttgatgaagccgagcaactctgtccaaaaaggtttagtttgtactcggaaaccacaaagtagtctcaaagtattttagagggaatcgatattgatggcaaaagaaaatttgcagctatgcatttgcttctaacggttccctctctgtgaaacattatttttggtgatctaaagaaagcattgcctttcttatttgagattttacagctatactttgttgtgtaatgttatggttccctttctgtaaaatgttatttttggtgatctaaataaagcctgtcttgtttgaaagaaccaggagagagagttttcactctggccttgtcctctttaatgcagggtaacagtggggtaaccttttgactcataactttaggtttcattttgtttttcctttgtgcctttttttgttaaatccctctttggttttgcctcacttggcagcaggaccagacagtggttcctagaagttcctgcagttctgtgctgtcttgttgctgcattgtggtctcatctggggctaacaccagcttatcctcctcctccctcattaccaactgacagtct

SEQ ID NO: 49174 - DNA, 1112 bp, Homo sapiens
gtagtttgttatatagcaatagaaaacctagtacaccttccttggttgaaccccaatctaggcatctccacatcctcacttactcctaaataactcctcctcacaccaattcactcaggacacctaagagcatatcttggttttcctattatttttgaacatttcatatttaaggtaatgtttgtacgacaaattttttaatgtagtgccctggattgattattatatcattaatgttaaatttctttctgacattaaagctttaaacaatgaagcatgttattggaaacacctttcatttcagagagaaattcctgtaattttgggataattttaatgtattgtatacattctgcattctccttcttgacattaagagcttactgacatgatttccttctgataaagctccttggctatgaaggagacacatccgcttactttgtggtctttggttaagaaaaatgagcagataggttattggttaagaaaaatgagcagataggttatagaactactgatcttctaaattttagaagaccttctgaaattaattttcttttaagacagagtctcactatgtcacccaggctggagtgctgtggcatgatcttggttcactgcaacctttgcctcccaggttccagtgattctgctgcttcagcctcccaagtagctgggattacaggcatgcaccactatgcccggctaacttttgtatttttagtagagacagggtttcaccatgttggccaggctggtctagaactcctggcctcaagcagtctgcccacctcagcctcccaaagtgctgggattacaggcatgagccactgcacatggcccatgatcttctaaaatttagatcagtagttctcaaccctggctatacattaaaatcacccaaggagcttcgccaaacaaagtaaacagaatctctgttggggtatggggtaggaatctacatactgtgtttttaaaggcttccatgtaccttcattagacaccaaggttgggaccactgttttggatcaacctagaatagaattcattccttcagtaccagctccaaagtaagcacagcgctggtggttctgcaactatttagctat

SEQ ID NO: 49175 - DNA, 1020 bp, Homo sapiens
ggccagttacgtatacatgtgcttgaccatccccctattgggaggcccatatagggtagaatataggcatgcaataagtgagatttctgaggtggttgacctctttggatttctaacccaaacctgtagtgtgcccctgacaagttccattggggtgttggcaacacaaatttcagatgctttcatgtttcatccagagatgcccctgtcctatccagtgaccttccccacaaacaggagaagacagtagattaaaaaatgatagactagggctatatgtcaccaggcagatgcagctggaacctatgccccaagaatctagccaggacttcttaaaaactagttaggtctatgagccaataatcaagacttatgttaaccatcctcttgagaggcttaaccacccgttgaatttggtcaagtgtgagtgagtgactgtaagccttggagcctcattgcagggcattcttaattaaccttgaagttgggataatctcaaaagactatgaccaggaaacagtaatagtcaggcctgttcataaagtgctcttgatttacagttggaacatctctatttgtgtgtacctcggtgcttcccagccttttcaagtcatggcaaatgcaaaatccagtaaatgggtgaggttatttgtggaagaaggtaaaaatccagaggacccaactgttcaaggtcaccccctctgattaaatatctggctgagagtctttagttaaatatctctggataaatatctctacacacttgtaactcattcatggcacaccagtgtacttaggcattgtacattattccacaattcttcctaatcccttaaatgtttgttctactactgttgataaaaatcaacttattatctcagtgttctaatttatttaatgaccaaggtgtggttactctgtaaaaatattttccagaaaagatgttcactgccaaacattagaaataccatccagcttctcatttaaattttaattatcatactagttgaaatgacactt

SEQ ID NO: 49176 - DNA, 1034 bp, Homo sapiens
caaagcattcccctttaccttcaaggcatgcaataatatttcagaatagtgtcattttaggaaatatatcaaaaaaattaatcagaaagcaatgatgcataggaagacagcttaatgaaatattgtcctaccttgaaccattttttttttcttcatgggtaagttactgattctattagaactcaaattgtgattgctttctaattcatgggcacttttgcatcttgattactgactctaaaggaaagatgaaatttgttttcccaaactattgttattgttgccattgttattgttattaacatacaccatttactgagtgtttgttatttttcaggcactctgctgttttatgagacaggcattagtgtccccacttacagttaaggaaactgaggcacagagcagttcagtggcatgaggtcacacagctggtaagtgacagatccaagatttgaactctgactctaaaccttgagctcttaatattctattacatttgatttttgctggttgactattgttatgactcttccacaaatttctatattattttatgtctcccaacaaaatgtatgaacaacctgtgattcaaggaactttaaaaaaaaagtcccttttcagatattttaatggctcttgaaattaaaattcaaaaagctctggatcaccatagttaatcagaactagaagctcttatagaattgctttctgcttaattctgtaggggaaaaaggctaaatggaaagaaagtaatttattgccaaaatactgatttctgcctctgaattttggcaaatctcctatatcttttagaattgatattcagtagaagagatcggatttgtgaacctgagccatatatttgctatgctctaactactaaagcagatgggttgactgatgtttattcgttcaacaaacatttagtttttggtgatgcttacttggagctagctacaatacaagacactgtaaaaggaataaaataacagttgtctctagggttccataatctaaaagaggaaggcata

SEQ ID NO: 49177 - DNA, 1012 bp, Homo sapiens
ctgtcgcccaggctggagtgcagtagtgccatctcggctcactgcaacctctgtctccagggttcaagcaattctcctgcctcagcctcctaagtagttgggactacaggcgcccgccaccacgcctggctaattttttgtgtttttagtagagacagcgtttcaccatgttagccaggatggtctggatcttctgatctcgtgatccgcccacctcggcctcccaaagtgctgagattacaggcgtgagccaccgcgccccatatatacctatttttgataaaatatatatttctttttaaaaagtggtatattagggaaaacacaaataatctgttaacattttcaatgtaattccttcctgcatgtgtttttacatgaatatactgtgtgtgtgtgtgtgtgtgtgtgtgtaacaaggatcatttgttactattttgaatgaaatctttttttaagcttttattttcttttttgtggctgatatatagaaatactgttgtttacaacaaaatgctgaacgccacctaggtctaatcatgtgtctatataatttcttggatttctttgatgtgggcagttgtattgtccataatttatgatgtggaaaccaaagctatagaaaagttaggtaattttacaaagaacataatatcagtaaatgacactaagtatgaaattaaatagtaactattatcaatccccttacagtattcattctttgaccttgtttttttccatttgtaatagtgttagcgtccaactgtcagctcatgtccaaatgtcggctcatgaattcctctttaatagctggacttcttttagcctctggctgtgtgagggtctcttgacctcagtgatctcacatgtgccactctgtccttctagaacactattctcctcgcctttgctaaacttgccttaaaagtgatttcctcagagggaccgctaataatgatcttgtttaaactttatgcccttcctactactatcatctctctctctcggtacc

SEQ ID NO: 49178 - DNA, 1038 bp, Homo sapiens
gttttccaatctgataatttaacagtactggggtattgttttatttgcatttctgtaagaactttattttattgactacaaatattttactttccaggatctataaagcaatatagcaatataaataatattatataagcatactcaaaccttgttaacctatcaccgattattgcaatactatttttagattttttcttcaattgcaaaaatactttattactgattaaaaatagtatatatgcactgataaaattttgataaatgcaaagacaagtaatgaaaatcatcagcaataacaatggctaaaagtggagtatacatacaaacaaatacttgttttgaaactttttttggtttactcttagcatagtatctttttccatgtcatgtagtattctaatgtgtgacttttggaggctgcatagtattctaaagtaatatgttttgaatccaatattcttcaaaaaaatatggaacaacagatcttggcttaaatatgaatttttttacatttctgttgtatatactacaagtggtggattgctactttggtggttcccgatgaaccataactcctggtattcacacttctgtggtgtatccttccatattaacctcgggctcggccaataaataggacattagcaagaatgatgtaagcaaatgcttgataagtgctggcacactggagcttatgtctcttgaaatgctcactctcaggatcaaaccaccatgaaaagaaacccaagctagccacatggggaagaaaagaggaaaagatcactccctctcaaccttccccactggggaactagacatgtgaacaaagccatctgattacaacctcacaggagaccccaactgaaaccaaccaaagaacagcccagcagagccccagccaaccaaagaatcatgaacaaataaagtggttactgttttaagcagatatgttttgggttggtttgttacacagcaagagataagcaaaatgtgacagcatctaatatgaatacctgctttagatatgaaaaagaa

SEQ ID NO: 49179 - DNA, 1048 bp, Homo sapiens
aatatttacaagaatcaaattgagaagccattcttgttgagcataaaattcatccttaaatttcacctcaccagacaaatagttatgcctgcattttatcactggaatcgagaaagaaatgatgaattttttaatggcttttccataactttctggtgttttctggtctctttttcatgcctgtctaagatcaggcctttcaaaatatgtactgcttcattctggtggcagtattaactgttaggtgaactttgggagggagtggttgactggagcagtcaaaaaggatcgcatctctttttaggcatcactgagtgttattcacgcaatcaacatggcatctttttgtcggtagctttggtttttgactcatgccaatgcacagcacgttctttgctgatgaatagatttctctgcctcttatcaggagttgtctgctgtggggtagggaggatgttgagttacacacctcaaaatgattgctagtgcatacacatggaatctaacaaaagtgacgtgttttattctgggaaaggtcgagataaattggtgctagagttgtcttgtttgatcattaattggcttgctcctccagccaacttaggtcaccacatttccttctgggtaaaatgagatggctgtgcttcataatctctaggagattatatgtcacaaagtagaggcagcaaattattagcttccaagtagttctgcccaggcaatgtgttaagcagcaggaggaggaagtaagccaaatggaagtgtgtgtgtgtttgggcaacgcatctaacttgaaaggtgtatagataatagactcttcagtcagaaccaagcataagagaataggatttgtgactaagtaggccatcaacagagaacatttattaaggacttttttgtagaggagtgagggtgaactcaaaaaatgtttcagggagtttggtggaaagctatgatgcaattggaaggcgaggatgcctgagggaggagacgtggagccacctaggtgtgtaggcagaggggagggaggtcggaggcggtcccaggc

SEQ ID NO: 49180 - DNA, 1021 bp, Homo sapiens
agaagtgcccgtgtgctgttcagttcttttccagttctctggtgggaatcagctttctcattgttggctgctgctttccgcattaggtttcattgtctcttcactctgtcactcccggaccatttgctttccactttctaaattttgttgctgtcttgcatctacagttgttctttcttggtgtcctttttggatttgtaccttacgtagaccttttctgtcactgggtgggagtgaagataacacatacttgacctgccctatttagttagacctggggaagtttgtggacttctgtttattgatctataaaacatggatgatagtgtccaacttgcaggtaattttaaggtgctatatgccaggtacctagtagatattcagttaatagtggctgctaatataattacagccatagcatttattatttgagcaagcaaggcaatagcaataggtagtgcgaaaagtggacatatttcatgtgtggctgaatgaagtgcgtaagagaaaagaaagagattttcgaaatggagaaaataattagctcagttttagatatgttgaatttgaactaccatcagggtaccagatgaacatactatacaaggggttgcaaattcttgtctggctcagacatgcggatgtagactttaggaatcactggtttttatagcccagggagataccatctggaaacaggtaagggtttcagtctcgtgaaatagcttcatgaagagcttgtcaggaaagggagctgtctatgttgaagaaagctaaggggccaaggaggagagaaagcagaacctattatcagagtggttttatggacaattaggaaacattttcaagaggattactgccaggctgtttggacctgatagaagcagtaatgggtggtaagtcctggctcagacttgaaggtctcccctgtgcctctagctagatgtgtgatcctgtgtaagacactttcccagttagacctgtttccttatttgtttttaaaaaacacttgaggccaggc

SEQ ID NO: 49181 - DNA, 1027 bp, Homo sapiens
ttggattttttcctgggaaaatggagaactactttttatatgtgtatgtttttatgcaattagcattgtattcttggttcagggaaatactttcctaaagcaataatgttagatattaaagattaaaatctaatgtatttgcaatgcattgttaatttacttcttcattctcttcaaaatgatttaaccattcctgttttcattctacatactagaattactctcactagtaattactcatcatttgtgtgccattcatgcacccccacccccataaatcatgttccacagtctcaggcggagggtgggcccccagtggtacaagagttgcttcatacagtctgtaatacatccagctaaattcaagttgtctatgaatggaaagcctttccatagatagagttcagttttaagaaaaaggctaactactgaacttggagaacagacaaatgtgcatttgataactgatgtaataattacaatgtactgtgtggaagatacaaaattacaattcgattaatggactaaatatttttgttactttcttgacccttggggaaagtttcttaattgaagttaaaacattcctttataacacaagacacaagctgactttatcactctcagaagaaatactaagaaggattgtactttgtgagagggtaaacgaagacatctttattcggcaatgtatttacttagtgtcttctctattactgaacatttagtgatttgctctcaaggagattttttgttagaaaaagacttgttgcagtgatcagacttgataaagcaaattgtggtcttttgtggatgaagttcatatgctgtgtggttggtgactatctgattctatggaggctaaccaaagcctagactgagtgtggatgagaccctcaactggggagtgatggggatatcaaaggacatgctgggtgagaggagctgactgtcatgtagggagtgaaccactgcccccagcagagatacagttcggttttaagaaaaaaggcaaggccaggcgcgg

SEQ ID NO: 49182 - DNA, 1030 bp, Homo sapiens
atgacaaagctaagtgaatccttagagaaatggatgtttttgtgtctggctcacagcagtgttttcttttacaatgatgatcaatcctgaagaattaggagcaaactgaaaacgctttaagaaagtgagtggtagcaggagaaagaactaaaatcaagttatgcaacaaagtatttttatgtgtgctttgtccaacacaagggcagtggagtgcacagaaattacatacaagtagctgcatcccacaaagcagtactggtacagagatacctcaaaaacaagttttaatgagtagtgttctcataatatgagaaaataatgtcacaactccacctcatagagaatcccgtaaacaaatgcctatcttattttggtggcaaggcctgaatagttgaaaaataccatatattatgcattacaattaacttaaaacatcaattccttaaaggacattaaagccaatttttggaggttgggagaaacatagcaaacttgtcagcaatttattagaaacagaaattggaaagaactgggctcttctcgtgtcaaaactctacaggtctgggccaggtgtagtggctcatgtctgcaatcccagcactttgggaggccgagggcaggcagaccacctgaggtcaggagttcgagaccagcctgggcaacatggcgaaaccctgtctctactaaaaatacaaaaattagcctggcacagtggtgcgcacctataatcccagctacctgggaggctaatacaggagaattgcttgaacccaggaggcagaagttgcagtgagctgagatcgtgtcactgcactccagtctgggcgacagagcaagactctgtctcaaaaagaataaataaataagatccaaatggttttattttaagcatttgggatggtaatctttcttaaaatatatggtccatttccttgtctcaaaaaaaaaaaatactctatgggtctgaatggcaatatgtcctcgagctaagcttggtttttggaaccattcttgacaagcaagttgggtg

SEQ ID NO: 49183 - DNA, 1047 bp, Homo sapiens
ttgggccttctgctgattcacacagaacacacaatgaaatcagaagaaatctgatatgtacttgctaatgaatgacacattttataaaggaaatcaaggcacagctggcacttttaactctagaattggaaggccatgactatggaagaaaaggcagatcagaactcctggcatgatgacgtaagatttaaaatgctatttggggcaggggtggaggggtgggggactatagactgcaggccaaatctagccttgcccatcattttgcgaccatctaaggctgctctcacgcttcaatggcagagttaagcacctgtgacacagaccagctgtcccacaaagccaacaatatttactatctggccctttaaagaaaatgtttgcccctgttttaggggaaagataagaaaaaggtccaaacagaaaaagtggataacaaagacgagctggaatgataaaaaagctatgcaaaactagaagaactggcaataattctccaaagtgaagggaaggacagggagttgaaatttgaaccaagtaaacaatgatatcatgaattcttgctggactagatttcagagctggagtttgccaagggaagggcttcttactttcttcagtacatttaagcagcagcaaaaaaaaaaaaaaaaaaaaaaaaaagcaaaagcagcagcagaaggaaatatatgtacacatatgtataagcaagataacatgcatccccacactcacccctatatggaaagccacgaatgggcaagcagcatggcgctaagtcagcaggaagacagaaagggaactcaaagaccgactgcatgaggatgctgttaccaactacccagctgcgcaaaagatgagacagagctttctttatatacattccatgcttgacttcagctgccaattatttgattttgtaaacagctgaagaagcaagaagggctgtagcttttcattcagttctgccaaggaaaaactgacaggtgaagtggaagaactgaaaaccctgggagaaaatgacctcattgtctcgggaggggaaca

SEQ ID NO: 49184 - DNA, 1054 bp, Homo sapiens
gttaaggcaggagctgtttcacttctgtggttttttagctggctcctgcaggccatctggacgtatatatgcaggttacgggggttacaatggctgagcttcggctcagaggcctgacaatatccagaaaatgatgtgcacaaaatttggatgagggaagaaaatttggacatcggccctttgctttttggaagtaaaaattcttatctgcaattggcaaaagaataagacatatacatcaatggggacagaattaggaagtccagaaatacatccacacaaatatagtcaattgattttttttttaacaaaggtgcaaaggcaattcaatagaggaaagatagtcttttcaacaagtggtgctgtaacagttggatattcatatgcgcaaaaatgaacctagacacagatcttatttattataccttacacaaaaactaactcaaaatgaaccatagacctaaatgtaaaatgcaaaactataaaacttccagatgagaacagtagaaagtctgtgatcttgggtttcgtgatgagatgtaacaccaagagcaagatacatgaaagaaaaaagtagatcagttagactttattaaaattaaaaacatctctgtgaaagacactgttctttttgttttgtttttgagacggagtttcactctgccacccaggctggagtgcagtggcgtgacctcggctcactgcagcctctgcctcctgggttcaagtgattctcctgtctcagcctcctgagtagctggaactacaggcgcctgccaccacgcctggctaatttttttgtgttttcaatagagatggggttcaccatgttgatcaggctggtctcgatcccctgacctcaggtgatcgcctgcctcagcctcccagagtgctgggatgacaagcgtgagccactgtaccctgccaaaagacgctgttaagagaatgaaagacccagtgtcgaaacccatagagctttacgtcatcaagagtgaaccttaatgtttgcaaatttaggtcaggtgatcccaggatggtatgcagactgtgacaa

SEQ ID NO: 49185 - DNA, 1050 bp, Homo sapiens
gtcctggctatggccctgccttagactgtcttactttgtagccactttgtaagtgtaaaataagcatgtagagcctatcatctctaaggttctttccagcttgagaaatctttatatttgcatataagctattggttagccttgtaaacttcatcttcaaatctgaaagtgttaatattttgaacagttaaatgagagggcttggtaaattttgtaaatatttgttaaagtctttgtgttaaatcattgatattttaatagaattcaaatgatgatcagcaagccaattgaattcttcactgtcactgggttgattttcctgttgggtaacgaatctcattttgtaaacaaagttaattctttcaactacgagaacactctgacaagcaaatacgttgccaagtggttatgttgggaacttcatagaatcctgttaggaaagggcgcacccagttactttggcttcagttcccgtgctccagtcagttgcccccacactgcactgcccttctttgtcttggtgttattattaaggactcatgggacaattgtgcctcatgcagctgcagggaacatgccaaggcagttggaaatgggcgggctttctcctgccggggatatgtctcatgtggacgctgctgcagctgctgtgcccctctcatatcagcacccaagtaagttctttttttgaactaacagtcagcagggtcgcatactaaataccagtccgtgtgctctgtgaattatttcatgtatcactgaagtcatcttgtaggtgtaaattagtcaaaatcttgggttgggggttataggtgtcattatattgttaatgacatttctgaagtaattcccatgtgaacatgtaaagacagtgctgagaaaggacacgttggaaggaaaggcttctcatttaggcttcccaggccagttgcttaaaaagtgttttcatttactcttcagtgcctggcatagtagttggacttttccccaagactcttctgcaaaaactgttccttgggaaccttaaagtttgggaaatcacagtgaaaa

SEQ ID NO: 49186 - DNA, 1023 bp, Homo sapiens
tccagagtaaatctttcaatagacttttgtacctttggtttgaaaaataactacacacatgcccttattttgtttctgctttgcccacgtttaagctttgttgatcctataggtagatggcatttatttgttgaaaaactagtcagaaaaattcttactttatagagaactacagacgtgctagtggcacttttatgcccaatacagcccagtggattatttaatattttctttaattgctgaagagatttttgccagaaataaaacaattagcactcacagatttgatttccataccaatgtgaaatcttgactctgcacattattcaaaagtgaaaccatactgagaacaaagaaagataggatttatgtatggtaaaaaggcaagtgaatgaagctataattttatttcattactcttagtacatccacaactatttccacctaaatagatctttaaaataagcatacacaagtattgactattatctacaaatatttattgtaacacttgaatagaactacaggaagcccttggcactgatagaaaatattgattcactgttaggttacaaaaatttatacatagcaaaatttaatgctctttacataaaaaatattagactacttaaacaaaactttcaaaaattcctggtaatagctaccagaattagaaaagtaaaattaggctttagacactgcctcttctagaacactggactctgacagcacctccactgctggaaagaatagttaaatctgtcatgcaacaggaaaacaaaacactaagctattttggaacaactgttctacacagaagagagcttctcttaatttaaaaaaaaaaaaaaatcccaaataggcatttttaggcattaaccaaaaaagagaatccaaatgaaatattatacttgatgttcaattttaatagcatcttgataaaggtatgcttcctttcatttgaatacatttctgcacatgtatgttataaaatccaggaaacagccaaaccacaagttaact

SEQ ID NO: 49187 - DNA, 1045 bp, Homo sapiens
atcctggtaagcctgcattttgctcgcatcctttaagtaagcccagttagaagacagtatcatgaggaagtggatctggaagagaagggtgagcatgatggctagtgagcattgtgagaaggcaaagcgaggcgctagttagattagacagacttgactttaaaggggcgaaggttaattctgtattaataaatactcgctctactagcagagctgtcagatcctgaaagcatgctctactagttggcttcgcattaaaaggctgaagaaaagttagtatacaaacatagtgaactggaaaaaaatggccaaaggtattgttaagaaaaagcaaaaatgaaatacgagagggtgcttttttttttttttttaataccattttgagagtaattttaaagactaatgcgaaagttcgggagcacattgtatatttgaaataagtgtagtgtgtgcaaagaccattttctacctgtggataaaaatcaattcccccaaaggcctaaaagcatgaacaatgtttattttgagtaaataattaaactacatatttaacatggaaaaaattaaatgaatgtcaaaaccaaaattaagaactataagcaaagcatgcagtctctgttaacaaaacttagttgtgaaactacatttttcattttgtaaatgccattatttcatttcataaaatgtaaaaatcctcagtatcattctttacacttgatgcggcaaacacttctttcctattttcctcgtatttcctgcaaaataaatctacatctcaagttccttatagttcatactttcttctcaacatatttgagaccttcaggtccaggcctattttctcttcccgttaaaatcttacatgcagcttgagaactagctatgaggaaacagttagttattacttaccaaaacacacaatttaaggttaccaattttgtgggctctaacagaatgattgtgttgtaccaaaaaaaaaactacccacatataaatccttttttttttttttttttttttttttccagagaactgggtgaccttt

SEQ ID NO: 49188 - DNA, 1026 bp, Homo sapiens
cagcctcctgagtgcacgccattctcctgcctcaacctcccaagtagctgggactacaggcgcccaccaccaagcctggctaattttttatatttttagcagagacagggtttcactgtgttagccaggatggtctcgatctcctgacctcgtgatctgccctcctcagcctcccaaagttctggggttacaggcgtgagccaccacacccagcctaatttttatatttttatctttgtagagaggttgtctcactgtgttgcccaggctggtctcgaactcctggcctcaaatgatactcccgtgttggcctcccaaagtgctgggattacatgagtcaccatgcctggccatttttcttgaagtattttccactttcctaaaggtttttaaatgcattaaagtctactagataacaaacttaatattagattggtgcaaaagtaattgcagcatttgccattatgtttaactgcaaataccacagttacttttgcatgaacctaatagaaaaataccattttactaaagaaaccaaagtgatttttttctactaattctgaggctgcaatgtggatatttactagaatgttctcttgaaactctgacagtgatatttgtttgcaagtcattatgtgaaacaatcaaaatgtggaaatgtatccacataaataatgacctgtcaagggaaatggagtttgtccattttggtcccctgtgtcattatttagtttgtttgcttggtaggaagcaccactttatattgccagagatttttttttgaatgtttgggtacattatatcatttttaaagctcagaactactacataacattatctttacattatgagttttatttttaaacccctaaattacaactactgatcaaagcttaccactttttagaccttaatgaatcctccattcccagatggttattggaaattggtgttatttatctccatggttatgacaaagaaggtaacaaattgtgtaagtatatttaatttatgttctggcttttc

SEQ ID NO: 49189 - DNA, 1044 bp, Homo sapiens
acaagcaacaaaataaacagataacattggactgcattaaaattgaaaacttgtgccttcaaggacactaccaagtaggtgaaaagacaattctcagaatggaagaaatcatttacaaaccatacattttataagggacttattctagaatatataaagaactcttacaatgcaatgttaaaaagacaagtggctgggcatggtgactcacgcctgtaatcctagcactttgggaggccgaggtgggcagatcacctgaggtcagaagttggagaccaacctggctaacatggtaaaaccccatcttgactaaaaatagaaaattagccaagcatggtggcacacgcctgtaatcccagctacttgggaagctgaggcaggagaatcgcttgaacccaggaggcagaggttgcagtgagccaagattgcgccattgctctccaacctgggcaacaagagtgaaactctgtctcaaaaaaaaacaagtaacccaattaaacgagtgaaatatttgaatagatgtttttctaaagaagataaacaaatgggcaataagcacataaagagatgctgagcatcagtagtcattagagaaatgcaagtcaaaaccaagtgaggtgtgatttcacacctactagggtggctagaataaaaaagacataataacaggtattggcaaggatatggagacattggaagcctcatacactgctggtgagaatgttaagatggtctggccacatcagaaaacagttcggtagctaaacatagaattaccatatgacccaaaattccactccttagtatatgcccaagagaagtgacaacgtatgtctacagaaaaacttgtacacaaatgttcatggcagcattattcataataacaaaaagtggaaacagcctaaatattcatcagttgctgaatggaaaagcaaatattgcatatctataaaatggacaattattcagtcataaaagggaattaagtactgatacatgctacattatgaatgaaacttgaaaatgtgccaagtgaacaaagcc

SEQ ID NO: 49190 - DNA, 1022 bp, Homo sapiens
ttaaacaaaggttgatccacaaaccacaaattatttctgggaaccttaagtttctggaagttgcatgtaaatgtttgtaaacagtttactagcttcaacgttctggaatattctgtcctgagttaggaattactgaattaattctagctgatcagtttgcaagtgtgtgctctgctgtaaggatggaagattgagtgaggcaggaaatggtcttcctcacacctctctcatctcgttcccctcctggaaatacaaggcattgcccatgtccggatgtggcagggattctccactgcggcatgatggacattgaggatggatcattgtgtgttgtagggggttgtcctgtgccctggagggtctttagcagcattcctggcctctgcctactagttgctagtagcaccctcatgaagctataacaaccaaaactgtctgcagacattgccaaacatgctctgcgtgactgccctagagagggcagttgagagaatgggaaaggataatgtgtgtatttgtgaacagataactttgagttaatgaagagatgaaatggctaagtattatcattaaggaggaatttttcatgttttccattatttaaaaaacattggcacagagttttcaaatgttggactgcactgaggtctaggtttctcccctttagtgtttattttctttgaccccatatgcacataataaaaagactgagtaagaatggaatgcttgtaaattagtaatgctaatctagctacatccaagggcttgaaactgctctacaaatatattttcactgtaagtttattttgtttccttcaacattgactgtgttctttttcaaataaacggaccagaggcataataaatttctggttgctaggtgtggtttcctacaaacatgccacatcctactgagactggcttattctgaacactggcactttgtggtctatggtttatattggaaagtattaatagttttgctttttttttttttgacagttgaaattaaacatccaaat

SEQ ID NO: 49191 - DNA, 1064 bp, Homo sapiens
cctcagatgagccacccgcttcagcctcccaaagtgttgggattacaggtgtgagccaccaggcccggccagtgtgttttttcaattgacatatttgtatacatttaccaggtacaatgtaatcttttgatatatgtatgcattgtggaatgattatatcaagcaatgaaaatatccatcacctcacatgcttaccatttttttttttgtagcgagaaaatctactgttactcttttagtaattttgaaatgtgcaatagattattatcaactatggtcaccatgctgtgcaataaatcttgaaaacatattcttcctaactgaaactttgtaccttttgaccaacatctcccaggtgatcatttttgacttgcaaatgtcctattccatttcaatgaaagggaaagcaacactagtatcttcaaaacttgaaaagcaaagtgtctgtgcataaaaaaagaaagatccttttatccccatatttcagtattataaagtcatgttggataaatgtgctgagagaaatttgcattttattgcacacaaaagaaaactggacacaataatataggatataaaattaagtcaagagttggcctttaacaattgtttgtagcttgttatgtagttaaatcttgatgttatttggtcttgtccttatacgtgcattgacttcatgaaaatcaaatttataatcacttgtatataattcagtgtaatccatttaagacagttcacatggagggtccattggagatttggcctttcacccacattcctccactgcacaaataactcttccctgaattgttggatgtgccattttagtgatcaagggaggacccctggaacacaactaccgattgaagcagttccattttcactggggggccatcgatgcctggggttctgagcacaccgtggacagcaaatgcttcccagcagaggtatgttgagaaggtcaggaacagtgacaactgtagagaagtggggataattctgaacttttagttgtaagacattattagaatcaggtgattcctataaatgctaaatagctttct

SEQ ID NO: 49192 - DNA, 1045 bp, Homo sapiens
gagaaaccctatctctaccaaaaatacaaaattagccgggcatggtggcgcatgcctgtaatcccagctacttgggaggttgaggcaggagaattgcttgaacctgggaggcagaggttgcagtgtgcactccagcctgggcaacaagagcaagactccatctcaaataaataaataaataaataaataaaaataaagtagtgacttagtagtttgaaaagttcccccatcacatatatgcatacttttttaaatgtctgtaattcaattttacttcctgtcccccctgcaaaaaaaaaaaaaagcgtaaaatccaatcagtcctactttgtttaaattccacttccccttctacttttagttattctatatggaaataatgtactgaattgctttaaaattgcataaatatgtgtatatatgtgtgtgtgtgtgtatatatatatgtatatatataaacttctcctctacagaatacctttagccttaagtttataatctacggcacacagatggaacagaatgtacctgaatatattaaattttcttccctcagagatgaaaggaggaaggaagtttaaactatgaggaatttttttcttaactgagcatagtacaatcttattaacgattctcttccttgtcattcagcacatcttgtaatactaaacagtcttttctggtgtttttcttctcatgaatttctaatattactaagttctttaatgtaaagtgtattaattgtgtaaacgcttagaaaagtctacctctttacaatgtttcctatcatgaaaaaacgtttagtggttcaaataagtaatacgttgaaaaatggcagtgttggtggtaaagtttatataaaaaatcttcaagattccttctcatttgaaggaactatgaatctcatctctatgacatttgagttaccttctagactagatggagtattactcggcactaaaatttaaatgtcataccctttcataagcccctatgtctttaattgtttaattgtgtcctttatggagatgccctcccccaccca

SEQ ID NO: 49193 - DNA, 1021 bp, Homo sapiens
ggctgaggcaggagaattgcttgaacccagggggcagaggttgcagtgagctgagattgcaccactgcattatagcctgggcgacagagcaagactccatctcaaaacaaaaataaaattaaaaaaaaagagtgggcgcattggctcacccctgtaatcccagcactttgggaagccgaggcaggtggatcacgaggtcaggagtttgagaccagcctggccaagatagtgaaaccccatctctactaaaaatacaaaaattagccaggcgcagtggcgggtgcctataatcccagctactcgggagactgaggcaggagaattgcttgaatccaggaggtggaggttgcagtgagccgagattgcaccactgcactctagcctgggtgacaacccgtctcaaaaaaaaaaaaaaattgttatctattaatcgcattttgtggaataccctgtgtttttttctttttttatcaaaggacaagaggaatttccttcgtgaccctccggctggcgtgcaatttaatttcgactttgatcagatgtaccccgtggccctggtcatgctccaggaggatgagctgctaagcaagatgagatttgccctcgttcctaaactgtaagcagagtgttctccagcgtttcctcatggcctccattatgtgctcagtatcagcacataatgatggaaggggccaaaagggtctctatctgttcataaaagcaggccccgcagccctttggcagctcccctggtcagggcactctggaatcaaaaccaaggtctgacttggcaggaaatacagggtagaggtgaaatgtgcttttctatcccagttacaaggtagaacacatttccctacagaaaccacaaacatgctgcatcaccctgaatcacattctggtctctgaggctcatcgggatcttttttccaagctgactgcattttccattcaggctctgccctccagtggcagtgttcctgctctctttgctaaggcttttcctccaacagctcttctg

SEQ ID NO: 49194 - DNA, 1040 bp, Homo sapiens
tgtcgtttatgtggcagactctccttacctgtcccttcgcattagcagtgccatactgaaagggtacatggccgctgaatgtggggacaagccttttggcctggagaggctcagtagctgtgggaaggtagcttatccccagaggactcctcggcctcctgcctggctgcaggcaggacaatgggaagagccagttgataggcagactatcccttgacccctgtggcttgaccttgatgtcacacccccagtctcaactgtgccaccggtccctgagtgtagagcagcttggctcccctccccacatgggcagagcagggcagggcaagatgggaggcccaggggctctctgggcttccacccttgctgcagacaactcagtacagttttctctggtcaacgaagtagactactgtttgcctaggccgggtgcagttgctcatgcctgtaattccaggactttgggaggccaaggcaggcagattgtctgagaccagcctgggcaaatagtgaaaccctgtttctacttaaaaaaaaaaaatacaaaaaattagagcctggtgtggtggcacatgcctgtaatctcagctactcgggaggctgaggcaggagaattgcttgaacccggcagacagaggttgcagtgcaccaagatcgtaccatttgcactccaacctgggcgacagagtgagactctgtctccaaaaaaaaaaaaaaaagattactgtctgcccttgacatttccacttgacagctttccacttgactgcccttgacagcgtccactgtcctctcctctctcattctctttgtccttgtgtttttatgtatgtaattccttttctgttactttcctggcatcttcagagggagcacagatgaacacatgtttgttttgctatgcttacccagccacatagcggttttaacaaatatttgctagccttttggttcacacagcagcacaggttttctgtctgtgaaaacaccactctggaagtgttcttccagactcagaataacagttatatggaatcttt

SEQ ID NO: 49195 - DNA, 1033 bp, Homo sapiens
cttgatctcggctcatcgtaaccacctccccacctcccaggttcaagcgattctcctgtctcagcctcccgagtagctgggattacagacgcatgccaccacgcctggctattttttgtatttttagtagagacagggtttcgccatgttggccaggctggtcttgaactcctgacctcaggtgatctgtccgccttggcctcccagagtgctgagattacaggccaccgcacccagcctagttaaggatattttttaaatgtaccatctaatctatttttttactacatatgctcacaaaatcataggaattgacttttttattttaaaaagtattattttttagagacaggatctctggaatgcagtggcacagtagcttactgtagccttgacctcctggactcaagtgattttcctgtctcggcctcccaagtagctcagaggcctgtgctgctacgcctgcctaatactgtttttaacttttttagagatagggtcttgctgtgttgcgcaggctggttttgaactcctggcctgaagcagtcttcctgcctcagcctctcaagttgctgaggttatagacgagagccacccacgctcctggtagaattgaattttgaagagtttgtatatataatgtgtatgtgtatgtgcttgtgtgtgtgtgtttcaagctcttccctcagaatttgaggctgtgcctgttctgagtaactgactctgagggaagggtacccaagctccggggtgcagatgccctttacacttgcagcctgcatcaacttgaagaccttttgaatcaccctgagccatatgcttggctcctgctgtggctctcaagaccagcaagaggccctgagtggctggagcctgaggcctgtggcctggggtgctcatagcaggcatgtagctgtccacagttttggttctttacaattgtggaccgccccctctcactgttgacagtaattttagattttttgaaactgtctgagaattggtatttggcaattagtgtttctaatttgtc

SEQ ID NO: 49196 - DNA, 1033 bp, Homo sapiens
tcccaagtagctgggactacaggcgcacgccaccacacctagctaatttttgtatatttagtagagacagggtttcaccatgttggccaggatggtctcaatctcttgaccttgcaatctgcctgcctcagcctcccaaagtgctgggattacaggcgtgaacctccgtgcctggccgtgaattttttttctttttaagacaaggtatctctctgttgcccaggctggaatacagtggtgtgatcatggctcactgcagcctcaacctcccaggctcaagcaattctacctcagcctccctatgaatagctgggattacaggcacatgccaccatacccagctaattttttatttcttgtagagtcagggtctcactctgttgcccaagctggtgtcaaagtcctgagctcaagtgatcctcctgcctcagcctcccaaaatgctgggattacaggtgtgagccactaccgtgcccagcctggatttctttaccaaaggacttgacttctcagaacctttagtcgtcatctgtattgtgactcttccccagagggtgacacagactatttctgcagtgtgcctctatgaccgcacctctcatatcaagagggagagactatggaaaacaaagcagtccacatgtttgtttttattaatcaagacagcaaacagtgcccatgatctaccataggtacctagaatacctaagtctcattttgggcatttcacatagctcagacttaaaagtgaattcaggccaggcgcggtggctcacacctgtaatcccagcactttgggaagctgaggcaggtggatcacttgaggtcaggagttcgagaccatcctggctaacacagtgaaactccgtctctactaaaaatacaaaaattagccgggtggtggcgtgtgcctgtaatcccagctactcgggaggctgaggcagaatcacttgaacacaggaggcggaggttacagtgagccgagattgtgccactgcactccagcctgggtgacagagggagactccatctc

SEQ ID NO: 49197 - DNA, 1074 bp, Homo sapiens
attatgtatttgaacactcttaactcctgtatgaaattacgaaataatatttttctaatgcaattcataaacttcaaatgggagaacaaaggtccagtttacgtctgagcagagtgttaagaattagctttttggggcctgtttctaaggtcaggtattttcatgtttctgcatgacagtgttactacttctcaattacctctctttctttctctccctctctttgtattctaaaagaaagatccagtgcttgcaggactgaaaaagaagctgtggaccaatgtcctgtaagggattcaacaccatcactttggacacttcacttattccctaagggtggagtgccaatctcagtgtttgatttcgtaggttccccaggggaggaggactctgataaaaagccactgcaattgaggatataagttcccttttatgacactgggataaggacaaaaagtcgttgaattaggaactgaggtttaatcaactagcatttaaaataaccaagataggaggtaatgaccctttgaggtgcagagctctggttaacagctggataggaatagtcatgtgtgtgtctactcatttttgtttatgtacctcatactccattcttctttgcttatgctcttctgagcatctttttctttttgatttctaactgacagtgacggcattcaaatacatggtaaaatattaatctttgaattttcatttaacaaattgggtgaattatcttgtgtttgcaagaatcatttttaagccagctatggtggcatgcacctgtagtaccacctagtcaggagactgaagcaggaggctagcctgggccgcagagtgagaccctgtctcttaaaaaaacaaacaaacttgttgtgttttttttttttttttttgagtcagagtcttgctctgttacccaggctgcagtgcagtgatgcaatcttggctcactgcatcttccacctcgtgggttccagcgattctcgtgcctcagcctcctgagtagctgggattacagatgtgtgctaccacgcccagctaatttttatatttttagtagaaacagggttt

SEQ ID NO: 49198 - DNA, 1116 bp, Homo sapiens
ggcctcccaaagtgctggaattacaggcatgagccaccgcgccctgcctggaaggtgttttatgttattttgtgtgttatttatattggtcttgcctagagaagttttgtttaggaaggtatatatcaaatccaaatgacataaaactgcttttgtgggattcttcacaagattcactataatgggcttctattaaatagatatgctgtcacagttttacacttctcagagttatgtttcaaaggaaagaaatttggagacctcaaatttcatttgtgtttcatgcactgtgttagtcacttaaggtgtgaatgcattctaatatctccttaactctgcaaggtaggtggtatccccaggtatatagataaggcatctgagtcttagtcagaaacaaacttgcttgaataatagagcccacagttggtgacgtttgctagggttagtgtatagttgtgtaattgatagtatgacagatgtcttctaatgcccaggaagtttctgcttacctcgttaagttttaacttaatacctcaagaaatctgtttgcctgttcctcctcttcctgctgccctccccctaattcctcttgtttggttctaatgtgattatgaataacttttagttaatataacgggtgtgtcagtatttataaagtatgggccaggcatggtggctcatgcttgtaatcccagtgctttgggaggccgagacgggaggactgcttgaggccaggattttgagacccgcttgggcaacacagggagaccccgtctctatgaagaataaaaaacttagctaggcacattggtatgtgcctgtagttccagctacttgggaggctgaggtggaaggatcacttgagtccaggaggtcaaggttgcagtgagccacgattgggccactgctctagcctgggcaagagagtgagatcctgtctctaaaaaataataataataataaaaataaaaagtataggccaggcacagtggctcatgcctgtaatcccagcactttggaaggccgaggcaggtggatcacctgaggtcaggagttcaagaccagcctggtcaacatggtaaaaccccatctctactaaaaatacaaaaattagct

SEQ ID NO: 49199 - DNA, 1035 bp, Homo sapiens
ggctcaggtgatcgtcctgcctctgcctcccgattagttgggactatacgtgttcaccaccacacctggcaaatttttgtttagaggcggagtgttgctgtattgcccaggctggtttggaactgctggactcaaacaatctgcccacctcagcctcccaaagtgctggaattacaggcgtaagccaccgagccaggcctggagaggaggaaacttttttttttttttttttttgagatggagtctcactctgtcgcccaggctggagtgcaattgcgttatctcagctccctgcaacctctgcctcccgggtttaagcgattctcctgtctcagcctcctgggtagctgggattacaggcgtgtgctaacacatctggccaagaggagatacttctgaaaaatgcttatttcttagtgtatttcctgtggagcagttcttggcttcagcaacctcagacctgatacggtttggatcttgttccctccaaatctcatgttatattgtaatcccagtgatggaggtggggcctggtgggaggtggggcctggtgggaggtgattggatcataggggccctcatggcttggtgccaaccatccccctgatagttctagcgagatctggtttttaaaaatgtgtgatgcccctgaccccttagctctcttgcttctgctctcgctgtgtggcacgcctgctcctgttttgccttccgtcatgaataagagctccctgggcctcgccagaagcgatgccagcgccatgcttcctgtacagccaacagaaccgtgagccagttaagcctcttttcttataaattacccagtctcgggcattctttttttgtttgttttttgagacagagtctcactctgtctcccaggctggagtgcagtggtgtgatctcagctcactgcaacctccacctcccgggttcatgcaattctcctgcctcagcctcctgagtagctgagattacagggacatgccaccacacctggctaatttttgtatttttagtagagatggggtttta

SEQ ID NO: 49200 - DNA, 1028 bp, Homo sapiens
cagcctgggtgacagagtgagactccatctcaaaagaaaaaataggcagactcaaaaggccacatattgtatagctccatttatatgaagtgtgtctagaatagccaaatccatagaggcagcaactagattagtggcctggtgctgaaggttatagaagcattaagggttgatagctaaggagaactgggtttcattttcaggttatgaaagtgttgcaaagttgactgtggtaatgtttgcacaactttgtgaatgcagtaaaattagtgaactgtacactttaagttagggaattgtatggtatgtgaattatatcacaataaaggtgttacaaaataaatcgctaatggaactgaaaaactacaaatgaaccaatctcattcctcaagtagcctcagggttaggacaggcctcagggttttcttggtgaaaattatttatgcttccccttttttctacgaatttcatgctcactgtatttttgatacggcttgacaccatattttctgggattgtgtgggttttattatcattaagtgtctgagaaattctgtgttagagataagcagtcttctattctcgtttgtttgtttttgttgttgttgttgagatggagtcttgctctgtcgcccaggctggagtgcaatggcgtgatctaggctcacggcaacctccgcctcccaggttcaagcaattctcctgcctcagcctcccgagtagctgggattacaggaatgcaccaccacgcccagttaaatttgtatttttagtagagacgggacttcaccatgttgatcaggctggtctcaaactcctgacctcaggtgatccgcctgcctcagcctcccaaagtgctgggattacaggcgtgagccaccgcgaccggcctgtagtgccattcttatacctaatggttttcagggaatagatttgaaactattattattttttttgagacggagtctcgctctgtcacccaggctggagtacagtggtgcgatctcagctcactgcaacctccgctt

SEQ ID NO: 49201 - DNA, 1566 bp, Homo sapiens
cgaggtcaggagatcgagaccatcctggctaacacggtgaaaccctgtctctactaaaaatacaaaaaaaaaattagcctggcatggtggcaggcgcctgtagtcccagctactcgggaggctgaggcaggagaatggcatgaacccgggaggcagagcttgcagtgagccgagatcgtgccactgcactccagcctgggcaacggagcgagactccatctcaaaaaaataaaaaataaaaaaactgaattctgttagtttattgcctcaagaatgacagttacaggccaggcatagtggctcacgcctgtaatcccagcactttgggaggccgaggtgggtggatcacgaggtcaggagatcaagaccatcctggctaacacggtgaaaccccgtctttactaaaaatacaaaaaaaaattagccgggtgtggtggcgggtgcatgtagtcccagctactcgggaggctgaggcaggagaatggcgtgaacccgggaggcggagcttgcagtgaactgagattgcgccactgcactccagcctggacgacagagtgagactctgactcaaaaaaaaaaaaaatgacagttactttcccttagtttatgaagtggtccaggtatacctcagttagctggcattcagcagcttggcacctttcactatttgtagcaacaggacgccctgtgcatcagtgaaaatgtcccagagcagtcacaaatgcaaagatggccgaaaacacagcgtggttggattgatggcttcaggaaaggaatgcttccattggctgtggaagccagtcccccttggtgcctttcacatggggagaatcatgcaagaaatggcggaaaaagaagaaagacaagaacagaaaagggaaaagaaaaaatggagaaaagagtaaaaaccagaaaaagcagtgtcgaaggttagctacccaacccagtgatgtgacaatgacagacagccatgaattggttagaagagagaacaaacagtgatctggggtggttgttctcagactcacaccgatcattgaacttgtggttaaaatgcacattctgattcactaggccttggttggggcctgaggatctgcattttaacaaatgcccgggcaacagtgatgatgctgccagaccttggatcacacttgaagtagcaggggtctagggtgtttttgtttgtgacttttggttttattgttttgattgtggataaggttattgctaagcaccagcagtaatgactgtgttcatttcaggatgtgacacattgaagacttgcctagtgagtaatctctcttttatacagatttgtgccaaaaatttgaaagacaaaatgtgtattgtttccagaaaatgttctaaagcttgatttcttgaagcaacacatatttcacttaaaaggtagatataggccgggcgtataatcccagcactttgggaggctgaggcaggcggatcacctgaggtcgggagttcgagaccagccttaccaacatggagaaaccccgtctctactaaaaatacaaaatttgctgggcgtggtggcgcatacctgta

SEQ ID NO: 49202 - DNA, 1058 bp, Homo sapiens
ccctgtagcatctgcacttcaggaggctgaagcaggattgcttacaatcaggagttcaagaccagcctgggcaacgtcgcaagaccctgtacacacacacacacgcacacacgcctgtagtctcagctacttgggaggctgaagtggtaggattgcttgagcccaggaattggaggctgcagtgagttcgtgccacatggcaacccagcctgggcgacagtgcaagatgctatctccaaaaaaaaaaaaaagttatccttttgaggaaaaagtaaaattagatccttacacaccagaggcaacaatcaattccaaatagattaaaggcttaaatgtcaaaaattaagctttgaaatttgtagatattattttgatttatcaatagataaatatttttcaaaccttgagtttaggaaatatttcttatagcacaaaaagcactgtcagaggaaagattgtacaaatttgctttattgaaattaagaactttgttttcgtcaaaagatgccctgaaaaaaagtgagaagatggccaagcgcggtggctcacacctgtaatcccagcactttgggagcctgaggcaggcggatcacgaggtcaggaattcaagaccagcctgtccaatatggtgaaagcccgtctctactaaaaaaataaaaaaaaaaaaattagccgggcatggtgtttgcgcgcctgtagttccagctactcaggaggttgaggcaggagaatcgcttgaactggggaggcggaagttgcagtgagccaagatcgcaccactgcattccagcctgggcagcagagtgagacttcatctcagaaaaaaaaaaaaagtgagacgacattacaaactggggagaacatatttccaacaaatataaccagcaggcgatttagtatcaagaatatctaaagaacactaatgtgaaaaggacaaatagccctatggaaagctggatgagagacatgaaagggacatttcatagaagtggaaaaacaaagatacgaagataccttaacataaaggtccataaacattcaaagagatgttccacctg

SEQ ID NO: 49203 - DNA, 1039 bp, Homo sapiens
tctcttgagagcagtctgtggtgctctcaatacatagttagaccaccttacttcaccaaccagcattttcccctctcatgtagggtattgtaactggaagagttccgtttctccagctgggaagggattgttctgttgactttattatacatcagtaaccacttaacagttttgtttggaaatactaatgaacttttaccaaatgtctaaagtgtgccaggcaccaagcaccttacctagtgccaccatcgcatttactgttacagctctgcaaggtaggtggaggtatccccctgtacagaggagggcactgcgctccagcgtggagaggaattagcccagggccacacactggccaggatttgacctgggccattcctaccatcataccatgctgcctccagctaaggaatttgggaaaatatggggagggaaaaaaggaactgtgtgcatgatgtatggtttagtactttgctcttcttatccttctttgtcttggtgcactctgagccttattttcagtgtggggcagaaataggaaataccaagctggtgagggggacagcccatgtctgacagggtgggggaacaggcaacagtcaaagggccacgcttctgcccatgtgggatggtttgcaaggtggtgtcaaattgccgcttctctcagcggagtatacagggacagagagagagctggtgttcttagctgcagtggtagtagcagaacagcagggtgagcagggtgctgtaactgctgtgatgtttcctccccactgtgttcctttctttggtgagtgatggaagaaactctccttttcccatagcacattgataaggtgttcaaacataaggaactgcaacagcagctcgtggatgccaaactgcagcaaacgacacaactgataaaagaagctgatgaaaaacatcagagagagagagagtttgtaagttctacttcttaaaaacaaagacattattgccaacattgtaactgaggccatttgaaacatcaaattgtaaccaaggccgtttgaaacat

SEQ ID NO: 49204 - DNA, 1667 bp, Homo sapiens
aagtttcggcagaatatgtatataaagatgtcacttgtggacaaaatagtacatagaggcaaatcactagacaaataagcttagtgtttacgtgactgaacagtcatcctgctttggtttcaggtgtgggatttggaccatgaggggctcccgtagaggatggcggtttgtgtttgattctgatttgggatttcagtacatattctccacttcccatagaaggccacttattctttgaaaactggtgttcatgtttgccgttcaatgaagtcccttgtcaaagacaaggacggtcaattcacgtgtcactttcactaggcagaagtttctccaataccttctggctacttgaaagttactacaaaaattccaccagcaaagtactccaggtttttcaaaagggaattttcattatggatcagtaccaaccgaaattgattttcatttccaaaacaaacactggcaccaacatttttactttgggaagacttggcagagtgttagtcatgatctgttacttacgtgttcagtctgttttctcacccccttcttagttaccatctcttttttaagaagaaaaaagaaaagccacagtattatcaaggtctctacacttggactgggggaaaatttgaaattaagcacataacttttgaattagttctttgtttcaatgttgaatgtggcgcagttatgcagatgattaatcaggctgcactgatggaagttttgactttgtccctggtataatttgcattgaaatgctttatgaaataaaaggttctactagaactgatgttagcacattccactgagcaaaactatcagactgacacttgttaaattgcttactggactgaataaactctgttttgtccagttaaaagggttttctctttgttacaagtgttatttgtaaagtcctgtcacattcatggtcgaaactgggttgaaagaattgaaaattgtccaacagatagatagataggaaaccgcctggagtggaggagggttgtatctaagcctccactatcagtcatgttaattcaaggggccacagtggaggaaaataaatccacaaagtagattatctaattaccatcaaaatgagtcagaagcaaaaaacaccaccctccaacagcctcttaggagtacaccctgttctgctactaaaatactagactcatttccctggtggtgggggggaatgcaggtatagatcagaaatataatccaccttaaaattagtactaatgatcacattatttcacaagaactctgctggatgtacagctcttaacattttattaagccatttgtgtagcccaccacgtttctttgtggtgcttgtcctgtgtggaagattgtaaatcttgggcctgttgcatacttccaagggctttaaagcaatgtgattaacagtacttggcctgctgcttttggcttactttgtatttttagctagatgctattatagtgttgaaaggatatggattctgtctgggatgcatttgttgtcctttcagaacccttcctcccattaccctgtgaataaaaacaaatgggaccccctgagaaggacatcttcctacagtgatcacctcaccagcccagtgttgtggctttgtagcgcaccccgtatctaccatattctagaacactgtaat

SEQ ID NO: 49205 - DNA, 1060 bp, Homo sapiens
cctccagccccgccccccatatcccctccttctgccaactttatcacttaagacagactgcctgggtcaccctgtttatgacaatagaagaataaggaaaggtaaagaaaagaggggaaaataatgtgagatgaagcaagatgtggacttgagttgaaagggaaagataaaatgaagcccttgtttaataaaatgagactcaggattgtgaaaagcagtgattgaagctaaggtgctgatacagagtggcttaaagtggagtgatagtgtggaaaggaaataggatggagagaagatgcaaagaaaaatgaaaggaaaatgaagggaaagatgggatggttgttacataggagtgatgatgtttatccaaaggaataagcaggaaatagaataaaaaattgtagaaccaatggaaggagagtccacagactcttggtgtaggattcaagcagcatttaaaggaatagcttagaagtaggtggcattaatgcctttacatttatgaaaataggtaacatgatatggggaaaaagaacaaagggctgatttagaatgtaaatctataaaaatgaataaggccaactttggaaatatagaacagttggcttcaactttggtgtctgtaaagagagtgtgaatgtgtgatttatagtagcctagatgattccagggctctctaggtactggcatcagacccgaggcatgtgttttcataaggagaagcggatacactatgatcgctgtgtgtaacagggagatcaccatttgtaatagctgacccagttcttggagccattgcctcacagtcccacacagctgctgtgtttgagagatagcaaaaatgtgcaagaaagtctaagtcagtgacaatgcaagtatgcaaaacctagaggcagtcagacctggaatttgctcagtgatgtttggattttatgtctctatatttatagctatgaaacatcttttattactgagattcctgtaagaaaaatcacactaagctggtacctaacctccttttcctcaatgaaacagttattttcatgaggtaatttttttt

SEQ ID NO: 49206 - DNA, 1624 bp, Homo sapiens
gtagccactttggtggatgtgtaatgaaatctcatactggttttgatttgcatttctctaatggcttgtgagactgaacaccattttatataatttttaactacctagatattctcctttgtggattacttgttcaagatgtttgctcatttttatttctcttttctctctcttttttaacttttattttaggttcaggggtacatgtgcgggcttgatatataggtaaatcatgtgtcgtggtggtttggtatacaaattatttcatcgcccaggtaattgctcatttttcagtaaggttctttgcaccttttcttactgtcttacagatgtcttttatgtattttgaatatgagtcatttgtcagctgtatgtatttccaataccttctcttactctgtggcttgccttttcaatctcttagtgttatattttgagggcagaagttcttatttttgtatagtccagtttatcaatccttttctttatggttagtgtgtttttgtgttctcttctgtttgttcttaaacaaattcttcaccaacctcgaggtcatgaagatatctcaaaagttctagaaatttttcattttgcctttgtcatttagatccatgtttcatatggaattgatatttgcaaatggtgtgaggtagggctcaagattacttttttcccaaatatggatgcacaattggcctactgccacttattgaaaagaccatcatttccccattgtactgcagtgacacttttgttacctcccccacctatgacttttctagaactctgtgctaacctttatcttagcttttctcattctgtacagtagacattgttggtgccctgtctatattccatctctcatgctgaaggctacttactgcaaactcctgtaactctgcctggaacttttgttttgtactggcttatggaccatgcttggccttgcttgttgggaaggccagaggtgccagcaggttaatgcctcagaagcagcactcaaccaaatatggacagggagttggtggatgaatgcaccagtgccattactccttggataggagaactctgcagcattttctccaccatttctcagaattctcaagtaggactgagctccagttacccacagtgatgacttatttgatgacacatcctatctttgctgtcttcctttctccatctcacttcttcactcacctatgggtgtttctggagtcacctcccacataaactacttgcactcaaacctgtacttgcagtcatagggtctacttatgggggaactgcaaccaagacaatctatttaatctttaaactgtgaaggcaaagacctagggctgggggtatggtagagatgaagtttctcactctttttccttaaactatttagcccaggattattatattagccacacgcccagcccctcccagaacactctatagtgtgtgtattagtctgttctctcactgctataaaaaaactacctgagactgggtaatttataaagaaaagaggtttaattgactcacagttttgcaggctgtacaggagccatggccaggaaggcctaaggaaacttacaatcatggcaaaaggaaaagggaaagcaagcacatcttc

SEQ ID NO: 49207 - DNA, 1031 bp, Homo sapiens
cgtgtccctcctcttacattggggattataattcaacatgagatatgggtggggatacagagccaaaccatatcagtgggtctggaaatagctgttactaccattagtggatgcacagtttgaatccctgtcttggcatgggagagcttcagtgcttcagcagtgagaagggtaacaaaaggaactcaaatctatgataatgaagacataccccctaaatttctccatgttctattgacaagcctttgagagtgttgtttattgccctttggaatgcataagtgacagccccaggagatccaaactacctatttgagaaggataattttcagccagagcagacacagaaactgctaacctctgaaaggaaccaggaggtaatacattgggtgaattgatcattttgggttggtgtggcaacactgatcatgggctcattctggttttggaaggatggtcctgcttttccttccctttctgttcagtctaccacttgtaaaaaaccttcacagtttggttagtgtgttctcttggatgtttctgtaattgtggttaagtttcttttcctcctggccctgctcagtgagcttctgtgaggcattatgagatcctaacagcttcattgaaagctgctttgaaacccatcacagaagagctgagaagaacacaatctttcaagggtttaataattcatggttgtaatttcctcataaccagtaacagcatcacatttctttctagacttttcttgttatactggattgggcttttaaatcaaaactcctgaattactttatctaagaaatccttgagattctgttggactgatattactaagatgataatgataaagatttctttcttcctgtgtgtggaggccttttctacacaatgccatcaggacagtgtaaagtccacataaactctcagaaacgtcttcagtctcagcacttctagtctagttttaatgggcattacttttaaaaggcaatgacatgtaaaaatctctcctattgtcccatgttagtccc

SEQ ID NO: 49208 - DNA, 1033 bp, Homo sapiens
tgtcccaggccaggcgtagtggctcatgcctctaatcccagcactttgggaggctgaagcaggtggatcacttgaggtcaggagttcaagaccagcctgaccaacatggtgaaaacccgtctctactaaaaaatacaaaaattagctgggcgtggtggcatgcgcctgtaatcccggctacttgggaggctgagacaggagaatcactttgaacccaggaggcggaggttgcagtgagccgagattgcaccattgcacgccagcctgggcagcaagagcaaaactctgtctcaaaaaaaaaaaaaaaaaaaaagaaaaagaaaaaaaagaatgtccctaatgtggtccttgttttaaccattgcatgacactgttggtgtaaaaatgctcttatggcccagcaaactcccttcctttatagtggcagtttttaacatgaggttttctttattccatgtgtgcagttggtgttttgaacttaaatttcacaagagtctcccattgtctctgttaaactgaatcttgcttgctttgctctttcatttccaatcagtggtgatggtttaaaatcttgattcaatgtgtcagctactgctcacagtattttgctctctgcatacaccatgaacaagattctatgctgtcacccacatcttcgataaaattattgttcagacggattcaaggccagagcccactggcaggcagtactagcaatgtttctccaagttgagatctattaatcaacattctttgggtatcattgttgcagcagccacaggtgcactcccctaccttcctgttcaaatcacatttctccaccttactcacaatatctatcatcacgagcaactgttaagtggtttgctgaaatcaagataccatatgtctgtagcattcttttgatctcccggtgtaattaccctactcaaaagggaaatgaggttaatctggctcaaactggactcaattccagcaatcagaggggccattttaattttcttatatataatgggtaaggagtttatttggg

SEQ ID NO: 49209 - DNA, 1035 bp, Homo sapiens
ctgtaggtgacagctaagaccatggcctacactttgttttccttcaaccccctaacttcttcctatggccaaccccacccccagtttttggaagatcgctgattttttgtcttagatgactgagtgttatcaacaggattctaaatgtgttgaggcagatacgaaacaaattcacacataccaccccgacatttcgtgtgtgactgccttctgctagtacaatgtcacgttatttcacaagcccctcaaaattctgtgatggaaatattataatattcttttgatagatgaggaaatgaaggctccactagtggctttaagaccacagtgttaaaaaattgtctggtcttggattcaaatgtggttcttgcatcttcagtttgggcacctcctctgctctaccctgcttctctctgtcagcctactactcttcctcccatcaccaccaccttatggccactgaggtgacattctccctcccagtttatgatggagaaacagaggcaaagaaaaaaaaaaaagacatgaggacaatatccaggtgcaactttgaatactcaaaagggctgggattagaacatctaagcaaaaaggctcatgaatcaagaggtacttctggtgcagccagagcaggcatacaactgggttataagttaacacgtgtatttgggtgaggctgtggctgtatgtctggttctaattagttgcttagttttcccccaaaataaataggaacatgctgattgtctaaaataagtcattcactatagcaggagtcattttatatatcaaggcctttactatctaaagccaaaacattcacctcatggacacacaagtttcttttctagctcagtggtcacccttttgtattctctaaggttgcttgaaggctggtgtaaatgaactgtgggggaccccaattcaggaacgaatcaacccaaattataatagattgccatttttttcatttattcagataggccaagatgaaaaaatgataatggtcaagtttggggtgggcataagggtaat

SEQ ID NO: 49210 - DNA, 1102 bp, Homo sapiens
ccatgctctctctgaaggttttatgaaagaatccttccttgcctgtctcttgtcttctggtggttgccagaaattcttggtgttccttggctttcagacatatgattacattctgtctccatctttgcatggtgctgtcttctcagtgtgtctttacatggccttattataaggataacagtcattggagctagggctcaccctaatccagtgtgtccttatcttaaattgattacatctgcaaagaccctattaccaagtgaggtcatattcacaagtactggggattggactttaacatatcatttcaaggtgcacaattcaacccataacaggcttgtatccagaatacataaagaaagtatataactcaacaataaaaagacaacctaattttttaagtgggcaaaagatttgaatagatattactccaaagaagacataaaaatggccataagcacatgaaaagatgctcaacatcactagtcaccaaggcaatgcaaatcaaaaccacaacgagataccacatcatcatacccattgggaaggataaaataaaaaaggcagacaatagtaagtgttggtgagaatctgaagaaattggaaccgttatacattgctggggaacagtttggcagttcctcaagatgttaaatgtagagttaccatatgactcaacaaattcactcctaaatatatatacaagagatctgaaaacatattctcacacaaaaacatgtacattgctgatcatagcagcactattcatagtaggcaaaatgttgaaatagtacagatgtccatcaaccaatgaatggataaagaaaatgtgggatatccatgcaataaaacattgtcaataaaaaggtgactaaaggcaataaagattattgatacatgctacaacatggatgacctttgaaaacatgctaagtgaaagaacacatttgcatgatcttaatgatatgaaatatccagaacagataaatttatagacagagagtagattagtggttgtctagggctgggaagaagggaatgggaagtgactgctaatgagtatggagtttcttttaggggtgatgaaaatattctaaaatta

SEQ ID NO: 49211 - DNA, 1086 bp, Homo sapiens
gttttcctttttcaccctcccttctcatccctataaaccatattttgaagcccttctccaattgcttgattttcctaatagtaataaaaagcctagacagtttggatggcatctgtaccacctcttttagggattataacccaatttttctccaacagtgaacttatgggtcttttatgatctggctttaggtctcttgaatgaggctgacatgaggatgtaaggcttgaatcataagattttaggaaaggctctgaaaagcaagctctttctgaggagtgttgattttttttgggggaagattattttgccagtgttcaggtaagaattcacatttgcttctgttactagtcatgatagctgaatggtgtgcttcattcagatactgtgtagtgatcacttactttgaattgcatattaagacatgtgaccatataaccttttatttgaaccaagcaatttacatggtggagctgaagattggttgttactggttcatttttagtgagcactgactgtttctaagactctatcttggtcagactctctcttgaggtctcccagggtaagtcagccagactgagagtgacccaagaagatggggcaacattctgaagaaaatagaaaatagtgctgtcatgtggtgaagaggccagggagcatttgtttccccatgcccctacccaccccgttatttattgattctgctcataacgtaacagtatatgtatttttgttgttgttgttgttgttggagacagggtctcactgtcacccaggctggagtacagtgatgtgatctcctctcactgcaacctccacctcctggactcagtcctcctacctcagcctctctagtagctgggaatacaggcatgtgccaccatacctggctaatttttgtattttttgtagagatggggttttgccatgttgcccaggctggacttgaactcctgggctcaagcgactctcccacctcggcctcccaaagttctggggttacaggcatgagccactgtacctgcctgaacagtatatgcacctctataaagaatgatcagatgatcaatattaatgtattgc

SEQ ID NO: 49212 - DNA, 1050 bp, Homo sapiens
ttttaaattactattccatggggattctcctaagcttgtcaattacagacaggtgctcttgttttggagccagagcagcagttgtaaaaaggtgaaactggaaggtcaggataagctgggttatgccatgacaataaacatctcccaaatctcaatggctcatataacaaatgtttctttctcccctacgctacatgtctaaggggtgtcaccaggggtgctctgttagttgtaattgttcttggatctggactgatggaggcttcattctgacacgtgtcacaaaggagaatatagtaaattgtatactggctccaaagttttcacctagaagtgccacataccacttttgctcatccttcattggctaaagcaagtcacatggccacatccaacctcaaagaagtaggtgaaacaatcttactaagaaggaggagagctaaagctttcctttggcaaatggcactgattaatactataatggggtaataatgaggcctaggtaaacagggtaggacttgagcaaaacttgtggcacaaatgagaaattttatgtacttaatgcttttttagaaaaatgctgcttccaaaacagctctaacatccaggatttcttgcctagccagtatttctgtgcctagagtgagattcagagaatgaaacccttttttactgagatcctgagagttgcctttcaagtgtccatagagtataaataacaatagcctcaaagaaacaattaaaggctctccgggtggcttatctcagatccactgagaaatgaaaacccccaaacatgccagaacactaaaaaaatggctgtgtctgagggtggtctccttgtcatgataaagctttctcctcatccttctgaaaatgataccaccctcatgttagcaacagtatcgctgtctggaaaggggctggctgaatctggtgggattactttgagttgcataaacacagattgaattaagcatggcgagttgatgatggggagtgtagaaagagtcaggaccttgcgttgggataataactagttcattatct

SEQ ID NO: 49213 - DNA, 1035 bp, Homo sapiens
tctccccttccctccctcatttccttatcccttttcccctctgccctcctctctccacagctttggtaagaaatagccagccttgaattcaagcataattgctcggcaggggggacttccttgaaaaaacctcaaatttttgggctgtaacagtggaaatctgtttgaacccttgaacttcctttattgttgaaatgaccacctacagaaacatgctgggggaaagtagcagaagcacagtggtcccttttatgggaaaaacagtagctggaattatttcacttttgcaagaattctgtaatgaggaggcatttctgaagggagagtatggcacaaacattccacaagttggagatgtctggactgagattgggatattgtaataatcgatgtttctgggcttagaaacagagtcttcattctttttttgaccacaagcataaaagctggtaactgtagcatttctgtctacttttgttgccatttgcatgggctcgctctgggtactggagattttcaggcacacaagctgcaatagaaaggcggctggtatttgcctcttagaaagtaaagttggcatgctatgatttgtattttccaaccaacaggctgtgtggactttttcctcggttcactcaggcaccaggatatcttccatttatggatgccctgttcactcagtgtgccagagagggcttgtgcatgggtggacatacactgataaatctgggaagtcgttgctttcagtctctctctcaccctcatcctctctccaccctaccccccaacgttttcatcttaaaccaaaaatcagagtatgccatttatctgcttaacaaatgcctataaccctcacctatacaagataaagttcaaactccttagcaaggtgtaggtctgaacccagctcacttttcccaactcatctctttacacttccctgcttcccctggactccagcacatgtgatgtgcaggtctccagatctaccatgtttatttcacttcattgcatgtgctgttgctcctgctgctt

SEQ ID NO: 49214 - DNA, 1662 bp, Homo sapiens
tttgtggatagaaccaaaaaggaatgggattattctgctgtagatattcttgtcgcagttttatcttagtgtctttatagtttaacatatatcctttccttttattaaatgcatcgtaaaatcagcaagctttgctatagactttcataaacagaattttccctttttggtatggagcctggaaatctgaaggacatggtactgcttacgggcagatcatttgtttaaactcttcaacggcctgccgtcagcaccaggaacatttttaaatcgggttctgagctgttaatctttggtttgcactaaaattctcaattgaaacatttttctttttcaagtggaccttctgaatctggacataaacttctaccgtctagtgtgtttctcagaataggaacatttaaagaaagcttttgggtgactgctatttctggattgaagtgagaacaaaaatgtagacaaaatgcacatgtagacaacatgaaaaaaataactgttgtctttaatgctgtgggaagcctgggtggtatttgccctgaattgtgtcaatttatgtaatattgcttaaacttggtctgctgcttgaagaaccatatatgtgcccatgtgtgcatatatatgatagaaagagagaatatttctagatttagtgtataaagaataatggcctagaagttctagaaagtgcgaatccattagtcatggccgtgaatcgcccacctcaaggatctgttgccaaccaactgtaaggtatgtaccatgaaaagctaaaattgtttcctgatatcactttaaaaggtaaggtatatgatagcttcttttctagaaagtcataattttgaattatcaaagtgccttgcttataaatacttttggaataagtaattctgtctttcctaatatttctagatattgggagcaaattcgtgtttaccttatgtgtatccctcatggatttttccatttccattgtattaactgtgactttcttcagcaaatctggtggttgtagatttattttaattctccgtgccatagtattctacctcagcatgcaatctgctgattccttcccctttctaaaatgagcttgcattttaatttttaaaattagtattaaccaggtaataaatattaactgagtaccgactatgaacctgactctgagaaatgtcataatgagatatttaatgacaacagtttgagaagctaaaaaataatttgccaaagcatataatttatttgctagtgctttgttcattcatccattcacccattaacctgacttccatcttcttattccctatctgctcatccgtccacccctgcacccatgcacttatccaagaatccattcattaatttattcactcatccatttattcacacactcatccacccatccacccatctatgaatccacccgtcaattcattcttccatccactcacttactgaactatccatgtacccatccacccatctattcatccactcatccattcttgcacccatctacccatctactcattcacccatccaccagtccacccatccattcagccacccatccacacttccacccattcacttgtccattcatccatccatctgtcgttcaccagacagatgctgaaggcctttgatggtcttgcacttatc

SEQ ID NO: 49215 - DNA, 1058 bp, Homo sapiens
atggattaaatacattccattctatggatatactacattttatttgtccatttattcattgatggacatttgagctgttcccacctttttgctattatgaatagtgatgctatgaatatttgtgtgcaagtctttgtgtggacatatgttctcatttcttctcttatatacctaaggagtggaatttctgggtcatatgataactccatgtttaacccttggaggaatagattatgcatttttgacttgttattgtcccatgaggtctgaagttaggaaaggtagggagaataacttcttatggggtagacatcaatggatctcagcagtgcccaggctggcagtgccatttttatgagtgtaacaagtttatcttcttcagccctttgaggcctcattttccagagactactggccctcctgggtctgtgaccctggccagaactaggattttttatttttaacctctcataagggattcctacgaaatatgacccactagagtgcttggtggactgtcaactctgtatctgtggggaacaaaatccagctgttcagcttggttagctgctgtctcatctggaactgcctttcctaggtttatttccccaaacaatggcccaagttgtaggcttgtggttgccagccccctttaatttggtccttagttgcatagtctgttatttgtgctgtgactggctgtgattgaaggggtatgctttttcctaaactcaacagtgtagtaagatgcttggtggactccaataattcatctatcccatggagaatgtgaggagtgtgtgtagtgatggtgaggggcatggcacactgaggggaaagtacctttaaaacagaatactgaatttaatatcagatcaggctgatgttaaacctctgctttccatatgagaacactttcccaggggatttaattgtaaaatgacaaaagggtcttagtgcaatttcactgacaaatggccttctggtgtggatttccatgacgcaagcagagccaactaagagcttcgtcacttatgttcctggagcacatagaacaa

SEQ ID NO: 49216 - DNA, 1030 bp, Homo sapiens
gaagggttctggaagtcttatgcatttttttttttccatccagaactgtcttgttggctttgtgtttttgcaatgttgtagcaagagcatcatttacttatgatggcttttatttcacccccagtttatactattttttttggtactaccagccagtgagcactgaaatgtgggggaaaatgagtttggaaatgcttccttcctggtgcgtgtgctgggatgcagacttgtatctgaaattttggatatgtgctatcggctggttgtggtgtagatcagagccccaaagggcacatcgagcatttcatttggccaccagattgtcttttacaacagaggaggtaaggtattttaaacaggatctgtgttaggctgggaagcccacacaagatgggaaagactcatttctcctaggtccttccccctaagtacaactagaaaccctggaaataaagcaaaaaaataaataatgctaatagtatctacttgccccaagggtaaatgctgccctaacttctgacatcatagtgttatcttgcctctttttgtgttttaggtaaatggaatcatttagtttgtgctaaatgattttttgtgtgtctggctttttccattcagtgttatgtttttgagattcacccatgttgttgtgtgtagctgcagattgttctagggaagaattttgaccaaacattgatcttggactcttggcagagttaagacttgagtaaaactgaatcttgtggcagtttttactttttctcttagtatagaagcataaaacctattaaatgaacagaattttaaaaataaagatcattgttctttaacaaacaattgctgtctttgcattttctctttcctccaaaatcgctgaggtctcgacttactcactgctaaaaaaaaaaaaggggggggggactctgtatatttttaaatgaagagtgctgtttttacctaaatcaatctggcctggtatatgacaacatttaaaaaaaaaaaaaaaacaacaactcaaagatagagccta

SEQ ID NO: 49217 - DNA, 1253 bp, Homo sapiens
gtgaaccacctcgcctggccttaatacattttttaaattgaagcataacatacacatagaaaactgtaccaaaattaacagtatagcttggtgagttttaccaacgaatattataagcaccccagaagcccttcctgtctctgtccacctgccctgcccccaggatagccactcttatgacttctaaccccatagattaattttcttgttttgaactttatataaatggaatcatacagtatgtgcccttttatacctggtctcttttgttccacattatgtttgtgagagtcaaccatgtcatggtgtatagtagtggttcattcatccatattccattccatggtgtgaatagaccacaatgtattgatccagtctgctctctatgggcatttggatattttccagtttggggctattactagcagtgcttctgtgaacattcttgggtgtgacttttggaaaacatgcgtttgtatttctgttgggtatatatccaagggaggaaattctggatcattcaagagggactattcataaatctcgttttgcttttttcctccatcttctctaagagagggtagttataggatttcaggactggaggaggccccacagaacatgtatctggctggtgtttttctgattctgcctcaatatcctctaaggagttcaggcatcttcagtgaggggagaggcgagcttgtgtggggctctggggctctgcttcaaccagagcaatgcccccttcatctgattcatagacagtggtgaaattacaaagaacatattgtttcaagaatgagttctataagtttgtttgagtctcactgtgtcacccaggctgcagtgcagtagtgccatggcgtgatctcgactctctgcagcctccgcctcttgggttcaagtgattctcgtgcctcagcctgccaagtagctgggattacaggcatgcaccaccacgcctggccaatttttgtatttttagtagagagacagggttttgccatgttggctaggctggtctcaaactccttacctcaggtgattggcccgccttggcttcccaaagtgctgggattataggccaccatgcccagccatttttgcttgtttgtttgttttttgttttttgtttttaagagtttgaaaagagatgatttgggtttattgttttcacttgagaaaggggcaagcaggcctacacagcagactggggtggattgatgtacgtggggggtgctggcatttta

SEQ ID NO: 49218 - DNA, 1074 bp, Homo sapiens
aaccgtaggaaggtgcatagctaaggaatgcttctaagacagtagaaaataaagccttatgtgaacaaggagaatctctgtgcatggaccttcagggatggggatatgtgcttgcagggccagggagggaattgatgggagctccatatctagttaaagcacttaacctctggggtgaaatcttagtccagagaacactgaatggtttcacagcaaaatgtcatctgatgaaccctgctgtataaagtagcagagaagtggtcgtaaatttgttcggggattcttgtgtctcattctgactttggtttgcaatatgataggtttgattttcctaggaagtctcctgatgccatgcccacttgtgttaagatcaaggcacttagttgtatgtgaaatgtgatcagggaatgcaccaaggattcggcatcttgggggcattatctctgatcctaaggtagatcagagaaagtcaaagggaaggagaaatgatgagggagggcaagataggtagatagatactgaaagagagagagagagagacagagagagacagagacagagagagacagagacaagagacatagctgggctgtttaggattatgaaaaagcatatctgtagtgccctgttaaagatgaaaattttaccccaaccccattcttcaggctcccaccattagatccacagtgagagaatgtgagagagacagagagatctgattcccaatattccttttggcttgaagcttctttgattctaaatgcagggaaggacattctctgcaaggcagagcaactttcaacgtaccttgagagttcaaaggtcagtgtttatctctaagtgctgttcaactgtgagcacaggaaatgttccctgcaaatcctgtgtccaggggaatttgggtccagcatccagaccaccatagactcaggttagggtgctttttagagttggatgggaatcagtctggattttttggacccaaaggacactgacctggtggagtgatgtagccaccatgtgcagaacagttttcatgggtgagtctctcaatgtgtgatatcaaaggcgtgt

SEQ ID NO: 49219 - DNA, 1085 bp, Homo sapiens
acactgtgaatatagcacattttatcagaagcctaaagaagaagcagtgcagcttttgtttatttgattttggagatgggctgaggacatgtaattggggcttgggcagagctattgagggatgctgtaatgggctttttaatccctccctccccttttcctcctggaaagtagtaaatggtgaggacagtcatgtaacttataatttaacattcttcataaatccatctttgccccattcattagcctaagagcaggaattagatgtcttgtgttgagcttaacacgtgggcacatagtgggattcagaaaatgtttgctccatatgtaatgcaggaattagccaggtctccctactgtcttggatttggttcccccagacacagatcctggcataatgattcaagtgaaggtaatttattttgtgtgtgggtgtgtgtgtgggggtaacactacctgtaggtagtgagaatatgatacagggaaggagggcaacaagtaaaggacattatcaagctgaatcctacagaaggattatcccacccaaggggcaagggagctggagtatttatacaccaacctcccaataatcattgcttggaggctgctcctggaggcattcattagttcttggcatttctagcccacctcgtgcatgggcagagtgaccttctacagtcctggttcaggaaaattagcccgtaggctcagagatgcaggcactagcagttggaaatctcctggtgcttacctgaaaggtctgagggatatgtgcaggggcactgacagtgtctgctatggtagccaagtttcatgcatccatttatccactcaacaaatatttattcaaccactcctatgttcctggcactgttgtaagtgttgaggatacaacaataaacaaaacacatacagatctctgttttcagagaacttgcagtctagtggaggtgaccaacataagataaatatgttatactctccttaggtggtgacactgtaatgaaaagaaaaataaaggtggggaataaggattgctgagggtgccatattaaatcaagcaatcaaggaaagcctcacggaga

SEQ ID NO: 49220 - DNA, 1073 bp, Homo sapiens
atttttttgaaagggttttcatgtctctatctccttcagttctgctctgatcttaattatttcttgtcgtctgctagcttttgaatttgattgctcttgcttctgtagttcctttaattgtgatgttagggtgttgattttagatctttcctcctttctcctgtgcacatttagtgctataagtttccctctaaacactgctttagctgtgtgccacagattctggtacattgtgtctttgttctcattagtttcaaagaacatctttatttctgccttaatttcgttatttacctgttagtcattcaggagcaggttgttcagtttctatgtagttgtgcagttttgagtgactttcttcatcctgagttctaatttgattgcactgtggtctgagtgactctttgttatgatttccattcttttgcatttgctgaggagtgttttacttccaattatgtggtcaattttagaataagtgaaatgtgttgctgagaagaatttatattctgttgatttagggtggagagttctgtagatatctatgaggtctacttggtccagagctgagctcaagtcctgaatatccttgttaattttctgtctcgttgatctgtctaatattgacagtggggtgttaaagtctcccactattattgtgtgggagtctaagtctctttgtaggtctttctattggtgatggagtaacaggttctgctcataccattgtggtttgttgcctatgatcataactaaaaggaatgctacatttcagttagagatgacaaaaaataaaattttaaatttctctccaagtttctggacctcctaaattctagcttaagttcccctgatataggatcaagctacatggtgacttgtaagttcttggagggcagatattatgttccaaccacttacatagttgaattctgttttttgttgtggaaaatgtcaaatatataataaatggaacaatatgatgaacctttcctaggcacctatgaaccagcttcaactattaccaactcacagccaatattgtttcacctatacctttacccacttccctt

SEQ ID NO: 49221 - DNA, 1032 bp, Homo sapiens
gatggtagaataaaattgttttccttgatgtaggtatcagagggctagtgggggaattttttaaaaacccaaaacattttgcatgtgcatgccattgaggaagggacttcccagccattgaaatattataacatcccatggataagtgcttgctttggccttgggtgttaagagttctgatggtcacaatcacttctttgtgttggagccatggaccaacaaggttgggtcagttcagctcgagaacagttggacagattgaggcacttcttacttctaaactcacatttggctgttctaatctggacgtattcaaaacaactggctgaggcagggaagcggaactgaagctttttaatgcttacagggaatattgatagcccaggtgaatgctcctcaccccttgcctccaaatactccccagccttgcctcacacatccattacatgatactctgtgtttacccggggcttgtcccaacagaacttagtaatcctacttctatcttggtctggctgtgtatttacatggtaaacatttctacaaaagacagggaaatattcacttcaaaataccctataaaaattgccctttagagatgagtggataggaaaaagcaaacatttcatatttataaaatgaatcatttttataaaaatgttactcatagaccaaaaacttaataatattgttggtagcacagtaatacttgtataggtttgtttcgcattgtagagatatatagatgtattctttcatatacataatttcatctaagcttctcagaatccagtaaggtagacaccattatctctagttttaaaaatgagaaaacaggggcttaggaaggttgtataaatgtccagtattatgctcctaggcagcctgaagataaggatatgaggctaggtcttctcagtcaaaactaaatgcctattggcatatttcagccaagggtaccttagaagccagttgtaaacccattggcacacagctgtctcaaagtatctgtaccattgagtgtctaaccag

SEQ ID NO: 49222 - DNA, 1028 bp, Homo sapiens
gcttaggtcatcctagagatgaggggcccttgcagatttggagcaaataacacaaatttggagaagcagaatgggcttttctttcagtgtgtgtggattctttgtcaaacatactcagttgttattacctgacatgtacatgatacagtgaaagctggccctattcatcacctagggcagtgcctgtatgacccttccatgcttcatgtgttactgacctgtgcttactaaaaactctgcaaatatcttctaaatcatcaaagaggggttagtgtgtttaataccatttcaacattgggagtattccattgtgccatgaatctttgaaaactggtaattcatgtataggataaatggtgattcaactgccagctctgaaattctgagtctatattatataccaaggaatatttatctgttttataagtctattattcagtgataagacttgtccacattatgtacaaagaaggatgttttgactgctaactagtgagattttacaagttcatgtatattattgaaatgtttttgtatatgctgtagcttgaatgtagaacctctttcatctatagcctgttgaagtctggaaaaccttttaggatcctttaaaatgactaaaatgttaacatggtttggataattataatgcttaacatctattgagcactcacacctgccagatgctcttctaagcactggacatttattttgctcattcaattctcacaacaaccctatgggatagaggtatgattattaccattttacagatgaggttaaatatgaaggacacgcagctagtaggtggccaaactacaattggaactcaggcagtctgggttcttaacaagagtattattctgcctcaattacttcaaatgtagtcaataatttgtcacatctgacttgaatcaagtgaaataatcattaagatgattttcctggtccagcgtagaaatgggatgcaagccacatgtataatttcaagttttctaggagacaaactgttaaaagatgtaaaaaaa

SEQ ID NO: 49223 - DNA, 1027 bp, Homo sapiens
aggaaccaaatctctctgggagtgctggctaactcaccccttcttcaaacacgctgtgtggcttcaggatatggctgctggctttaaaaaagaaggaaaaataaattaagacacccacactgcaagacaacccctgtgagtatatgttatactgggaatgccccatttctcaaatatttataaatatatggtctcttggagtgttctaggtctgtcatttgggaaggttagacagccctgggccactatcctttttcgtaagcacagggcactttcacaaataccagattgacagctgggtgatgccaagggaatggtgatgtgttgccctgtgtatatctgggatgtgttagacatccctcccttccttctttttctttgttttccctccctccttcccttcttcccttccttctttcttttttcttcctccctccttcccttcttcccctcctttctttccaagcacatcagtgagaatgtagcacagcttggttttctgaagtccgtcaactactgtgtactgcttgtcaagaagggtgctatataagctgaaatgctgctctaaatttcacattatcccttcctgctgctcattgagttatttaattagaagctgccatattttctagggaaaacactttgaacagaaggcctgatttcactgagaatggatgcctttattatgtgtcaaggagctaaaaattgctagtaagatgtcagtgtgtatatgtatatgaaatacagaaaagtgcatgtacatatatgaagagcaatcaaaagagaaatgcgaaggggttggaaaatgaagaggtgtcagatccagtcgatgatttggttcctgctcaggagtgtgtaagcttcagttggctccagtttggctaacactgcaatgcctttagtgtcactgaagccgacaaagaaagctgacgcgttgtttttctagggggaaaaaaaatgctctccttccacattcccagtgcagacaacagcagaaaacagaaatgagaccgtactgcccagagtc

SEQ ID NO: 49224 - DNA, 1046 bp, Homo sapiens
caatttcccctaacatcttcctgtgtcagtgcttctcttcagagttcgggattttgctcccttttccatgccccctcctctttttccttttgataccaggagctacttcacttaaaagtgcctggattctaggagtaccttggtttggggcccttcaaggccaaaatgaagataaagagatggagctgcggggcatatataaatcatggtttctttcttataatttctttccagattgttctaattgcccacaattaggaaatgtcacttttatagtcagaaaacctagataatattttctttcaatcaagattgattaagtctgtccatagcctataacaatagctaatatctcttaagtgctttgtctcagccaggcagacgctatgctaagtattatcatgtataacgtcatttaattcttgctacaaattgaatgagattagaattgttgtccccattttatagataaacaaatggagacacgaagaagtgaagtgacttgttcaatgttgtagggctggaaagcgacagagataggatttgaatccgacaatttggactcaatttttaaccatgatgctttgtgtataatccccaccatgtaaaaaatataagccaggcaaaaattcaagaaggaaatgtatcaacatttgacattgatttgtctggatggtgcaatggtacgactatggacttttttccttctgctgattttctgattattttctcaatgaccatatactatttttccaataaaaatactttatttatttatttatttatttttatttgagatagagtctctgtctgttgcccaggctggagtgcagtggcgcgatcttggctccctgcaacctctgcctcccgggttcaagcgaatctccctgcctcagcctcctgagtagctgggattacaggcacccaccaccatgcctagctaattcttgtatttttagtacagacggagttttgccatgttggcccggctggtcttgaacttctgacctcaggtgatccacctgcctcagcctcccaaagtgctg

SEQ ID NO: 49225 - DNA, 1023 bp, Homo sapiens
tgggaagcatggatgctccttctctgtggccaaaatggcagagcagccctgaaaaaactttcttggctgtgctgtaggctttacacaggcttgttattattttttgaaccctctgagattgacagggcaggaaatggtatcacgattttctcttaacttctaaagtgacttgctatagtcacctaggtttttcatgaattatagaagagaagaggcctaaaaactgaatttcccaatacctgggacaatgctgatttagtaagttggggtttctaggagaagatagaaatacattgacatatattaatccattgattaattaatttatgaggcaactgccatctacattaaagaatacacatttttttcacttaataaaaatgagatctctctcatgcacttcttaagcttcttccaaaaacaaactaccaaactggtaactgtccaattagttggaataaattgaacaggcgccctcagttaattgtcaaactgagtagtctaaaaaccacgtaacaccaccaagcacagagtgttccttcccttcctcaccaggtctgctgctctgggaacagggttgagaaccccttccagtttcagtccagcgaagatgcgttctttggccatgaactagaagccagtcctccatgcagtgcctttcgggctgaagccagttgtccactaaatctgcttgggaactgatttgttaattattcttttccttttgtgacatttttcaagataaacttacttgggccagcctcctagaaaaccttttaaaatgctaattacgcaattgtgcgaataatgtaaaaatgagtcctgtggtgcactcagcacttgactaattaacaagcagtaaatgaatcctagcctaggaaattctgtacagggctgtgtgaacggcagagagcttcctggagccacagttggaagagtggttttaagcaaataggttcttagagaaattgaccagtgaaaatcaagaattatttggtcatagcataatcttttaccaaaatt

SEQ ID NO: 49226 - DNA, 1050 bp, Homo sapiens
gtcgggtggtctagtggttggttaattggtttactcaatactacagatctattttcacaaactgatccattctgtattttttcacactgttaggtgtccttatggcatagaaaatgctagatatttacccaactctatattctttttgttctggacacacagagagactacatttcccagcattcattgtagttagttggatagaaccctgtgattgagttatgacgaatgagatgtgagcagaagtaatggagtccactttcagccctggccttaaatttttcctttctagtcctccaaatagtctctccttattggcctgttggctagattcagagaatctggtgacatacactaggcctgttggagaaggtggggccacaagatagaaggagcctgattccctgaatgacttcatggagcagagcatctcagctgaactgtgtgtgtgctcagctccagtgtgacagaagcaggaaactgacctctgttgcctaaagccagtgaaatatgagaattgtttgttacactagttagcccaccctaactaatcttgtatatgtggccaaaaatcagtactgtcctcatacacattctacaagtttcagaggggcatgtagaacacacttctctgtaatttgcactgaacagtaggtcgtgaaaatgcataaccaatgagccatgtggctctttgatcaccatgtccaattaagccacatggttatgtgattttctggtttgagtcagctttttatctggggcagatgcaactgtggacagtttcttgtagtaaaaactgatcatttcagtaagtggcttctccagaggatggagaggaaggtacagaaattcatgttaattaccaaacacttcaggctttagcttcagattttttttctctgagaaaccttttctaaccccactcatgtctgggttgcttgcctcccatgcctcccaccctgtgttcttgccactgcccatgcacctacagcgacttcttacctcactggctggtaatgtctagctcttgatcttgactctctttctttg

SEQ ID NO: 49227 - DNA, 1009 bp, Homo sapiens
ttttttttttttacagccttttgctaacactcccaaggggaaaagagaaattgaaaatgccaagtgtatttcagtattactgctttttctccttctcagaacaccggagccggagcgatcgccgagagcaaagagcagctgcccccctttccattgcagctcctccactgccagcctaccctccagctcacagccagaggaggcgtgagtttaaggaccgtcactttttaacggtaagtttggtggccacctgcagccctatgcttgctgctgaggaaacatcagtttgtctgggagtcagtttcctgcctcccagtgagagaggctgggctggctaagagctcaaatcatgggcatttgggaacaaattaatttcccttcctttcattcctgaaagaaacgcctcttttttggaatacagacatattttttagttaactggtagcacaatgcagtaaagcaagaataattacagactaaaatcaggaaaaaaaatacatacttcaaacctcggttcttctgcttgcaagctgaaggattcaggataggttacttatgttctttgccctcagttccctcatctgtaatatagggatattaatagtacctggtttatagggctagaggattaaatgagataaggcatgtaaagtgcttagcccaatgactgactgatacagagtaagacctcaagaaatgttaaccacagctgccactactgttattactggtaaagtgacagcatggctgacttggtggggtgaactggtaaagaacttaagtgatacgaaaaattaccatttgaagagtaatcatgtcatcatttcatgctttcccattctccaaaggaggctagttctccagggtaacttaataccatggtgacgtcatcgcctctggggctttcagccctgaccagatggatgtggctgtaactcagcccaagccctcaagcatgggtcacagatgatgaagctgagcccatctcaaaacacctgcaaatactatc

SEQ ID NO: 49228 - DNA, 1050 bp, Homo sapiens
gtccccatctcccattatttcctccaaaaatgatatagaacaagaagggaaaaataaaactacacagaaaaacacaccatcagcataacttgaggacagagaattcccaaacatcaaattgactgttaagtaaaagagagaaaacaccaagtctcagcatatttcctcctgttacaaggtgagggagggcagattcagaaagccacatggaagaaatgaactagcagtgggtcctaagattgatctaaaaccaccaccagaaaaattgtctgccctaagtctgaaaaatactacagattttttcagatagacacaaactacaaaaaagggcctaaaagtatgcatattttacaggagcagttttctctatataaagcttctgggggagacaaaagacaaacaggaagggaaatctgcccttcagcaattgggagtgaagaagaaaagaggcaaaaaggaaatttctaggaccctgcaagacaaaataaaaccaaaaaattcaaggacacgcaggagttgtatgtgtccttcaactcctgcctcaccaccaaaacaaacaaatacactaaaatatttgaacttcaacaaactgacagaagatggtgccattaaactagggatcttgtgaaacacaccaaagccacacaaatgagtaagagatagattagcagatccacatagagtgattgcaaaaggtcaatgaaagaatatatgaagcaagggttttatgtccaaccatgctgttcatcaagtatagaaaagcaattttcaacatacaggaacttagagaattttgcacccatgagtcctttatgaggcatctaccacaggacaagcttcatccaaccaagggataattggggaaatgtcagcaaaaggatgggtagcatacattttaatacatgtaaatgtagatctaaaactaaaagtacagtggagatgaagatagaaaactaaggtgcaattttaaatgttgtgacaacagagaatgatacaactaaaaatgagagaagggagaggtaaagaagaaaatagaataagctaattgat

SEQ ID NO: 49229 - DNA, 2897 bp, Homo sapiens
gtgtggaggggggtgctttgggtggtccccacagcctttccggagtgcccgcgcgtgtaagcttttgagatttgacaatttgtgaagtgcttggtgctgactttcggggacgacaggatccttttacagtcattctcctgtcaggggaggcaggtggggagcgaggaaggatccagatttcgttaacagagctttgagtttaaagaattgacaaactcccgagttgatttcctgtcagaccttttgcggttgagacatagagtctgaggctttgatggtaaccgcgtttgatttagagacagactgtgcagcttcgctgttttattgtaaatacgtaaatgaggaggaagagaaaaacgtagggtgttgggagcagaggcgggaggcgggagatcctgcgaaatcggagtccctttggagtgggggaggccgtcgaggcgtgcgagggcccggcccccttgccgcgtggtcgttaacaggaaaggccctgatttggttggtggcggatcgcgtccctccctcctctccccggctctccccgagtgcggcaaactggcttcaggttgactaaaagatagcgattttccaagcagctttgccgcgcggtgttttctaaagcggggcgtgggctgggtgcccttttgggcctcacttgtccggcctgcggcaagtgctgggcgatgggatgcggttctggcggcaaaggaagggctgcctttgagagtcccgcaggaaggtttagaaagtgattgttcttaaaacaaacagagcgttttgctgtgtgttcctcaaagtggtcccggtgggagtggcgcctcattgtgagctgtgccttatctgatgaattaatggcaggtgaaagccttgcgcctccggagcgaatatttacgacttttgaaaatgtctttaatgtctaaaaaaagtcttttagaaaatcagacggcctcttgttcttatgttatcaagagtttagatttctgtggtaaatataagtgagtttcattttaagtaaactcattttacgagatttgagatttgaaagtgaaattaattaattttgcacaatctagccttgggctctgagaaaatgttgtaaagctgtaattaatcttgtgggacgaagtgaaaaggaactaaagtgtatggtgtaatgaatagtttaaatttctgtggtaaatacaagtgagtttcattttaagtaaactcatttttatgggatttgagatttaaaagtgaaattaattaatttcgcacaatctagtcatggttgggctcagaaaatgttgtaaagttgtgatttatcttatggaaagaagtgaaaaggaattaaggtatatggtgtaattaagagtttaaatttctgtggtaaatgcaagtgagtttcattttaagtaaactcatttttacgggatttgagatttaaaagtgaaattaattcattttgcacagtgtagtcatggttgggctctgagaaaatgttgtaaagctgaaattatttatcttgtgggaagaagtgagaagaaactaaaatgtgtggtattatcaagagtttagatttccggggtaaatataaatgagtttcctttaaactcatttttgtggaatttgaggtttaaaagtgaaattaattttgtagaatctagtcatggttgggctctgagaaaatgttgtaaagctgtaatttatcttgtgggaaaaagtgaaaaggaacttaaatttatggtgttatcaagaattggccaggcgcggtggctcacacctgtaatcccagcactttgggaggccgaggtgggcagatcacttgaggtcagaagttcgggaccagcctggccaacatggtgaaacccagtctttactaaaagtacaaaaattaactgggcatggtggtgcaagcctgttacgctaactactcgggaggctgagggaggagaattgctttaacccgggaggcagaggttgcagtaagccgagatcatgccactgcactccagcctgggtgacagagtaagactctgtctcaaaaaaaaaaaaaaaaaaaaaagaaatttagatttctgtggtaaatataaatgagtttcattttaagtaaactcattttgtgggatttgagatttaaaaatgaaattaattttgcacattctagtcatggttgggctctaaggcaatgttgtaaagctgtaattgtttgccttatgggaagaagtgaaaaggaattaaaatttatggtgtgtctactatgaaccaggcatgatgctgagagtttaactgtgtaatttttggcctaaatagccctgtgaagtagatattattccaactttacaggttagaaaatttgaggcacagagaggtgaaatatttgcctaaagtgaaacggcaaatttggcaatttggacttggattcaagtgtttataactaaagcccagctccttgcatcataccctggtacctaaaagacataaaaactcacttcaggtgcaatgtgaatgaaaatgacgttatgacccaggcttgttgtctatgtgctccttgagaaatagttctgttggatagatgcggtcaatactcaaaagcccttgctatctttgccatgcattactctaagcacttgacatgtattaatttaatcctcacgattccgtgaggtatgtgctattatcattcccattttacagacaaaaaaaaaaaaggatttaagtaagttgttcaacttacttacacagctagtatgtgggggaggtgggacccaaacccaggtattctgaccacaagcctaaggtcttaatgctgtttgatgctgcctctcatgtaaccagatatgtgtgacagttgccgtagaagtattaaagtgtgagtgttattgtagttcagggaaagccgtgtcacatccacatgggat

SEQ ID NO: 49230 - DNA, 3329 bp, Homo sapiens
ttgttctgttttgttttgttttaggctttcggcagcctgaagctatgctttttagtttctgtctctagggataagtggaaaagagggatgaggaaggggctttcctggcccaaccagaaacaaactaagaacccatgactatattccctcccttggacacccctagtaaacgttctttgcttcagtttcctcataaggaaaatgaggacagtaatagaacctatcccacagggttgtcagtaatttagcaagatagaatacctaatcaaagaatcaaaagaaagtacaaattaaattagaaataataattttaaactgtggttttgctaaaaattctgtaattatgatgaaatgattatccttctggataaaaataatttgtcaaaacaactcaagaaaaagtaggataatttgactagatcatcaaccatggaggaacttagaaaatgttataaaaactggacccagagagttttttttataaattcaaccctttgagcacaaaaattgtcgtgcgatgtaaactttttagagtatagaaagagatgaaaggcttcccagctaattttgcagagcaattttgataccaagtgttaataatgtagcaatacaacactgattcattaattgtgagaaatataccatctcaccaatgtaagatcttagaaatagagatgcaaacaatttctaaataaaacaccaacaaattgaatgttgttgtttataatcagctggacccctcaccccaagaacattaagaaatgtattaatatgttgcatcagtagatcaaaagagaaaagtcacttagtcatctgatgccaagaagctatttggtactatgtattatctgtcctggttttaaaactacatgcaggaccagcaggatactaccttagtttattttggaacatctggctgaccccaacagccctccttagtgggaagaagtagaggagaattttcaaacgtggagacctatccattgtttctacctctaggaatttatcccatagaactacttgcacaggtgcaagactgttctgcagtgttctttataagagcaaaactttagaagtaacttgaatatctatgaattgggggctgtgtttaataaatcatggcatatttacaagatagaacactaagaagtcgttacagtaactacagtagacctaaaagtactggtttggaaagactctttccaccacaggttagttttgcctgtttttgagtttaatatcaattgagtcatatactgtactcttttgtttctggctgtttttaaacccaaggttatggttgtgagattcggccttgctgtatacagcagtagttggtttattcttattgctgcgaagttcctttatataaatataccacaatttaattactgatagcctgtataagttttatggtcagaaaactcaaatagtttaaaaagtgaaatttgattgaagttacagccccaattagagaggtattttataacttgatacttctatgcaacattagtctgcgtttatctaactcgagttagttctcccatcttctttatcccttttgatttctgtcttttgggttcatggtcattagtatctccactatagaatgaaagggaaacaggaaagagatgaaacctgaatctcttaattgtgcctctcattactgctctggttcagaaaggatagggtagctctttcattaacgtacccttcccagtaactgtgatgcagacattcaaagcaaatttctagtacaagatataatccgatactcttgcagccagttttctagttccatagtaaagtgactcagagccataaccaaaccttcctaattttagattgtttggcttacctttcacatccacttatttaggtttaatataaaatttaataaggcaatcctaacttgaaagttgaaatggaccttagagatcatctcaactggtgttcgaaacctggtggatgaggaggtggtgtctcttgtggtccgcccagcccacatagtcgggggggacccaatccagaatagactcctggcttacattttggaggcaatgctttctccttagtcaagagccttttggagctcctttacaaaagcagttagcccttgcgttctcttgttcatttgtttccagcatttactctgtaggctttaagttactaagcagtcacttcacagtttgtaattgtgtttgatttgattcttatttctagtcatgagcaatatggcccttcagttttgaaagatttattctaaattggccatggaagaattctggttttgtcactctctaaaattcaacccaaagtccaattctatttgagttagcattctgagagtatatccatattattaaggtagtaagtgtatgaagtaacttttttatgcgttgcttttcaggagtagaggtttaccactcttaggtgactaagcagtatcacaaataaaccctccagcaagtttaaaaataattaggtccaactcagaggaagtggagtttctcctgttgcacaaaaatgatgtctaacagctccagtgaaatcgatgtggtttgtattcaaattgaaaatctgtctttgttctttttactgtgctatacttctactctaaatttagtttaattttatacagtgaaatgcatagatcataagtaaatttttgttatatattttaacagtaatatataaagctcttgtgacaatttgtgtacaagtttctttgtgaacacacacttaaatttcttttgggtgaacagacagaagttgaattactaggtcatggagttcatgtgaatttaactctgtgagaatctgccatacagtttttcaaagtggttgtgctgtttttacatttctgttatattcttctatatttcttcatccttcaagttgaatcagtatgtagattattaaactataaataatttggcttaacagaaaacaccttttttttagtcacataaggacatagatattaatgctacctaagtagtctaggcaattctcttaactactgtcagtcctaatgtttttcaaaaatctttggagataatgttaactgcctatcaagagtcatttttctctgacataactatgtaaaagcactttgaaaagcataaggcactatacaagggtaagatagtatatttttaaaagtactgaactgtaacccaattccatatgtttttgtgatttctgtcatgtattttgaaacaaaaacatacatagctaccaagtatgtttattataaaattattcccatagttcataattcattcttagaatgaagagttattatactgaagtgtaatggctattta

SEQ ID NO: 49231 - DNA, 1050 bp, Homo sapiens
atcacaaataggcctttgtaacagcctcttgaaagtgaaattaaaccctcaacttttcttttagttctgtctttcatcttcccttttaatttgttggtaaattttcctcagataaaaacaagaatacctacttacgatgaagatgacaacactattctttatgcgtatgaaacaaaacctgaatttgtcaataaagtatgttaattgctaattgccaaatatattaacatttgctgttttaaaggaaaagatgtaaattcctcgtatactatggagttcccgtaaactcacactcaagaaaatatctctcccctgaatttgtatgcttgctttcatcagagaatgagcacttaaccaatttactttcccctttttcttatatagtagaaaattaagagcagttttgtactcactttcagtataaaactctaaacctggattcttctgatataataaattcttttcttgcccccttcctcaattgtcagtttttcattctcatattaatgtgaattttaaaaatctctgcttaatttaagacttctgaaaccccttgaaaagttggtgataaataaaaacaatttaaataaataaatatagctcccccctgcccccagtgttcagtttggctgttacagaaataaatcattaactacttttaaaatattagcaggaaccgaatattgtatctgacgcatcctgtaatactgaagagcaactgaagacagttgatgatgtccttattcattgccaggtatggaagttctgtctcttcaatgtagttttctaaaatgttaagcaaaaattctctttatctcacataaagggaaagtgtacaattaattgaaattttgcctatcaatttatttatgattatcatcccattgtgatgattttttaaaacaatttatagttagaaccacatttcctgaatagcaacatgtagatttaatagctttttaaaaagcccattaccaaccaaatgtagttatgtctctttcatctacattgctcagtattaaattagtttcccctacaaaatccttaaag

SEQ ID NO: 49232 - DNA, 1470 bp, Homo sapiens
ttatatttttaatagttttcataaagtagacgcatattcagagaatatacatctgcaatgagctgctctctagtttgctttacatgttctcataaagaactaaccattctgatgaaaatatggaagcattattaattatcgttaagtttcttctctccataggaaattgacgggaaggctctgctcctactcacgagtgacgtgttgctgaagcacttgggggtgaagctgggaacggctgtgaagctatgctactacattgaccgacttaaacaaggaaaatgctttgaaaattgaaaaaatccttgtgcaaatttagattgggccaacttctagaggcaccaatgccttcttagtgtggaatcatttttctgccctttagtcgtttttgttttgtagaaagtatctctcaaaatatattatagctagaattgtagaactatgttatagtccagtctacttctttaaaaaccatttaaactgctagatagtattagaatagtccaatagaaaattcattctttataggtctttaaaaattacttttattatattgtttacaaatatatttcatgcaagaaacagaaaaaaaaaaaaaccctttgattctggttcatctcgatacagagaaccaaaacagctaagagaggtattatcagggttgacaactcctatgattgaatctatgggaattattcctcagaagagaatttaaaggtgtacccatatatatctctttctggagtattttatctgtctgatgttgcagtattctacaagtttccagaaagagaatagccatataaattattttcctttctgctattatttctctatatgttttatttattcagatttagagtaaaaaataagcatataaacttttattatgtgctcttaacagttttaagataaactataggatagatagaatggttattttatgcaagaaatattgtaccgcaagggtggtttggatgaagtctgactactttttttcaaacaaactattatattaaaactgtcatattttggctaagtttggacctataactacactttcattgtttgcatctctctatgaagatacgtctgtccaaacttttaaaaggcataactgtattttatgtgtttattctttatatagatagtattttatattttattctcacccgaagtattcacacaatctttttaaaaaaaatttgaaatggcattttgtattgccacagaggtaggatgagccatatattagtgaaatgttttattttgtaaaatataaatggattatttgccatcattagtacctctcaacttactttttagaggacaagaaacaatctgtagattggtttccatacagggaagttctccgtcctatgcaatgtttctaattaatttgcttaattctgagccattaatcctgctacactttgaatgatacattaattcagactaatctttgggggc

SEQ ID NO: 49233 - DNA, 1029 bp, Homo sapiens
ggagaatcccttgaatccgggaaggggaggttgcagtcagccgagattgtgccactgctctccagcctgggcgatagagtgagactctgtctcaaataaataaataaataaataaaatcagcctgtaaatttcgattaaaaatttgttaggattggttgggattgttttgggtctctagatcaatttggatagaattgacatctttacagtgttaaatttcaagaacatgggatatcccttcactttattaggtccctttaatttgtaaaagtattttttgtttgtttaatagctttctacatagaagattttccactttttatttctaggaatttgataatttttgatggtttcaggaatggtattaaaaattcatttcctagctttattgctggtgtatagaaatactgttggtttttgaacattaacttttgtatccctcagctttgataagctaattttttctgctagcttacttgtagattgttttggattttctattgtgtacaatctgtggaaaatgataggttttttggtcattcctagcactcatttttgtctagatttctacctgttctcagtgaagagatttgtctgaattatatataatcattattactggaagcagaaagtcttcctaaatgaaagataaaaactacaccccattctcatttctgaattatctttgaatttaaacccaaatctcaaaggtgcctcaatcccagtgaaagctaatagtattttttgagacagtgttataaatgttcctaatggatttataagcaaatcttatgaaatctttaaaatttaattttttttgagacagcttttaatgtgtatctcaaggacttaaaatatgaaaacttatcagtagtttaaaaaattcttccaagtagtgaagtcactagtgaagccataaggtgtctctgatgtgctcatttttcttttcctttttttgagacagggtcttgctttgtcatccaggttggagtgtggttgctcattgcaacctcagccttgagctcctg

SEQ ID NO: 49234 - DNA, 1021 bp, Homo sapiens
ttacagattaattgctgaattttgagtacattactgagaatttggtcagagaaatagaaccactgtgagtattatgggtaaggaacttatatggtaatcagactgtacacaattataagaggtgctggggatgggaatatctatctgaaaaaggaaagacctgaaaaaatcactaatagatcctcctgaggtactggtacaggttgataaatgagagcttactgggaaaattttaagaagccaaatgtgtacagtcaccaaagtaggcatgcagaaaggcttttttctggagagttctgtggaaggctgtttcctccgtgtagctgctgcctctgtgggtccacagccaagcatttgttgttgggtcttgctctactgttggtcagatcagaagaagagctggacacagaggggacaagaggagagcagggacaagctggaagctgccacacacctctgcatttgtcgtcaccctgtgtgaccttcatgaagatcttgtaagaatttggccatcttgaacttggtgtactgtgcaggaaagggaattctgggaaacacagttcccggcttgatcaagttcacaagagactgatccactacattgagcttctcattttgagcatctcaagtctttttttttatgtgtggttaaaaatttttattttttatttttattttttgtgggtacatagtaggtatatatatttatggggtacatgagatcttttgatacaggtatacaatgcataataatcatatcagggtaaatggagtattcattacctcaagcatttatcctttctttgtgttacaaacaatccagttatactcttttagttatttttaattttaatttagttttattaattttttttgagacagggtcttgttctgttgcccaggcgggagtgcagtggtgcaatcacagctcactgcagccttgacttccagggctcaagccatactcccacttcagcctcctgagtggctgggactacaggcttgcattgccacacccagc

SEQ ID NO: 49235 - DNA, 1033 bp, Homo sapiens
agaaagttgtagatagaaagcaaaacaattaaaaaaaaaagctctgtattggatgaattattctagatgctttgtaaaattgttaatacataatttacgggcctacctaatttgggaaataatgactctatttaatttttagaatatgctcgaattgctggaagaaatgccaaatggagttccacctgagaaagtaaaaagctacatctatcagctaatcaaggctattcactggtgccataagaatgatattgtccatcgaggtgagtatgagatttttaaaatggaaaatattaaaacatcaaataaagttaagagtatttcacatgttactgtctttaagaatattttcataagcattggcattgccatttaaattaaatatattttgaaagtgcaagacatgagaaatatttgctctccatatctccttttctatcaccaaaaggatggattacaaatttatttggatattgtggtgagatctttacatttgtataactattatagatccactcccaattgtagaaatgcctagtgatataagagaactcaacaaatgtgaactttgaaacttacttggggataggagaagagcaaaatgttgatctctatagccttggtcctgcaggtagaccaggtaatgtgaaacaactctgaatcaggctttatataggtggttcctaagtcactggcccctattggcactcatgtctcattccttcttacaccaacaatctccagtatgtatcttcacctcctaattttctctaccccttagtgaaaagtgcccgttgtctgcagttgcaggcatgatcaaccttgcataaaggtcataattatactcccataaactgttttgtcctttactgccatgaagtgggtggtttatagcaatgaaagggaaattacttgctcagcatcaactttgtctcttctcctgataatctttcttgcactggagagttttacagtagtgggacacaaattgatacaacaatgaccctaaatatttatttaaaaaattgcagta

SEQ ID NO: 49236 - DNA, 1074 bp, Homo sapiens
tgcatatttctttgtgctttgcattttcaatgcccaaatgttaccctccccctttcaaaaaaaaagcaaaaaaaaaaaaaaaaaagtgcagcaagggaacatttgaattttgcaatatcgagagagggaaattggggagataagaacgaaaagggctatacgacttgtagttgagtacattgctaactaaaacattccatattttcagcttctcttgctgctagatatggctgtgtacctaagttctagctggtaaaatataagtggaagcattttgtggagcctttgggaagtcttctcaaaacagagaaacatacaccttttgctttctccttcctgctggttgaagcatgagatcccctgattagagataggatgcaaccaggtagatgagcctgggcctttgattggctgccgtaccagctctatatgtcttatctagatttctaggcttttccattaaataataatacagtcttgtttgaaaaaacccgaagaacagatatggctggaccggctcctccttgcacatgcttgcccttcctggccacacccagtcacctcacctctaagcccccttccctccccagccttatggtcgctctaacttgaatcctgtgtgcattctcatcctttctttcagagccagccattaaaatcactgcgcaagttgttacatctctcttcggcctcaaatcacccggcttcctcagatccccgcttccagcccttaacagctcaacaaaccaaaaattccttctcagaaattcggattcaccccctgagccaggcctctggcgggagcagcaacatccggcaggaacccgcaccgaagggcaggccagccctccagctgccaggtcagatggatcctggttggcatgtgtcctctgtgaccaggagtgccacagagggcccttcctactctgaacagctgggtgccaaaagtgggccaaatgggcacccctataacagaacaaatcgctcacgaatgccaaatctgaatgatttaaaagagacagccttgtaatttgtgctggtaggggggaggggtggacagacaagccagtgggg

SEQ ID NO: 49237 - DNA, 1125 bp, Homo sapiens
aaaaaaaaaaaaaaagaaataatccttggctcaaagagaatcacaatggaaattagattgctgaaactgaatgacaatgaaaatacaatgtattagaatttatgggatgcaaattagagaggcattgatgataaccttaaatgtaaaagatatgattaacaaagtaaaaaaaaaaatttgtttttgttttgttttgttttgagatggagtctccctcagtcacccaggctggagtgcagtggcacgatcttggctcattgcaacctccgcctaccaggttaaagcaattcttctgcttcagcctccccaagtagctgggactacaggcatatgccaccacgcccagctaattatttttgtatttttagtggagacaaggtttcatcatgttagccaggctggtctgcaactcttggccttaggtgatccacctgccttggccccccaaagtgctgtgattacaggcatgagccactgtgcccggccaaaaaatggttctttgagggaactgttgaagttgacgaaaccatggcgagagagagagagagagagagagagagagagagagagagagagagaaaacaaataaccagtgcaagtgtagggaggagctgctgtctaaggctgagagagaggacccaaggaaggaaaaacttggaagggaccccctactcccaatcaagagatgagatcaagccctcattggtgaggatgtggctatggtccactggatagggcagaagttcactgaggtgcctcaagttacagttgggtctccggctggtgggccaggactggagaggatggagccacccactgaggtgccagcaagactctctttgggctgtgcaccaccgcgtctcccacacactaatggtgaggaagccatgggctgtggtgtcagtgaaatttactagaaggtgggtgccactacattttccacacatgctaaccgtgcggtgctgtagaaacaagaagcaaggcacaccagaaccagaaagaaaagctttttcttttgctgttctttgcagtgttcttcctgcactgtctactaacagagactaacgttatacgagctgccaaagaggaaatgattacagggtccagctctagtatcacaaaatg

SEQ ID NO: 49238 - DNA, 1049 bp, Homo sapiens
ttctggccaggagtgaaaatgcagggcattaattagtatctcccctcatggatttctgtggttcctttctcggttgtccttaatgttaggtgcccctgggcgctgggattgctctagcctgtaagtataatggaaaagatgaggtctgcctgactttatatggcgatggtgctgctaaccaggtaattatgtctcttaacttcccaaaaacagtcttattttcaaagtctttaatatttacagttgaatttctaaagaagtagcatattgcttattaggtgaaatagcaagtcctatggctagctcaaatttggttgacttatggccagattagagattgacctcttagcgttgtttcacaagagacttacgggggcacattcctgtgaaggagctcacctttgctctacatcagtgcttggcaaaggccctgtggtaaaggacctccccacaacctattgcaaaacaatacagacccattctcttggatgtccgggctggcagtgtcaaattcggataatagcgtctgagtcctaactcagtttctatgcttctcttgttaccgagtaatccccagtctgtggccagcactctgtgaagccctgttctagaggctgattcttaggtgctggttcactctggctatccagtgggcctgatagatttcatattgatcttttttccagtgtgttccttactgctagcatggccccaaagaaacaagtagtagttggtttgtcaccttccttagttgcaagagtatgatgcctgctacttctcctccaccacccaccccgctttccctcaccacccaaagctcggttttagaagaggaggctttctgtgctttatgaaagctttctgtgccaggcagagcagcagctgttagagatgatgaagcctggagaaagaagccaaatgaaaccccttttcgtaactacttccagggccagatattcgaagcttacaacatggcagctttgtggaaattaccttgtattttcatctgtgagaataatcgctatggaatgggaacgtctgttgagaga

SEQ ID NO: 49239 - DNA, 1035 bp, Homo sapiens
tattataaagatacatgcacatatatgttcattgcagcactattcacaatagcaaagacatggaatcatcctaaatgtccattgatgatagactaaagaaaatgtggtacatatacaccatggaatattatgcagccataaaaaaagaacgagatcatgtcctttgcagggacatgaatggagccggaggccattatccttagcaaacaaatgcaggaacaaaaaaccaaataccacgtgccgtgggagctaaatgatgagaacatatggacacatagaggggaacaacacacactggggcctaccagagggtggaggctgggaggaggatcaggaaaagcaactaatggatactaggcttaatgcctgggtgatgaaacaatctgtacaataaacccccatgacacaagtttacctgtgtaaaaaacctgcacttgtactcttgaacttaaaaaaaaaaaaaaactttcaaaatgttgccaccactaccatttaactaaagctctgggtcttttaaaaaaagaaatgattagatgatctaagattgaacttgagagatccctgacagcatacacaacctttcatccaaaatacgtaactggccccttgtctcccggttaaatagtcattagcattcctcagcaatgatcccacagcaacaaagtgtcatttggaatgagtaccaactcatttgctataactatggatttttttttttttttttttttttttttttttttttttttttttgagacagagtctcatgctgtcgcccaggctggagtgcagtggcacgatctcggctcactgcaacctccgcctcccgggttcaagcaattcttctgcctcagcctcctgagtagctgggattacaggcaagttccaccacgcccagctaatttttgtatttttagtagagacggggtttcaccatattggccaggctggtctcgaacccctaaccttatgatccacccatcttggcctcccaaagtgctgggattacaggtgtgagccactgtgcccggtcaacta

SEQ ID NO: 49240 - DNA, 1045 bp, Homo sapiens
ttagaaaatttaaagttatatatgtggcttacatttgtggctcacattatatttctattggacaacactgttctaagcaggggtcagcgaactttttgtaaagtgcttggtagtaagtattttaggctttttgggccacagagggtctctgtcgcatatttttggtttttattgtctttttataatcccttaaaaatgtgaaaactattcttagctcacaagttgtgtgaaaacagtctgtagttcggatttggcctgtggcccatagtttaccagaccctaatctcagtagaccggttaggtctgtgacctttaatattctgaagaataaacataaagctttaagattataaacatttgggaagtcagcatcttaatttcctctagaaaatactttgtgttattttcttacacattataaattgttcttcaaaattgagtgatgtagaacttttctttctctcttagtcatctgtctattttaaacattcttatgaagactggctggaaaacaacggactgagcatctcccctttccacataagatggcaaactgctgttttcaatcgtgccttttacagttggggacggcggaaagcaaggatgctttaccaatggtattcttcatcttcttttgtttggtttaggttaatcattaagtgatcacgacagacagcttgttaaattaactatttccattactttgcagttttctgagttttaaaatattgacaatattaaaactttctggttttatataaccttatgggattgtatcattgtggcttgcatacattaaaaatcaaggcatttatggcaatttatagttaggggctttacaatgatctctgggacacccaagatacaggcaggttctgtagatgagagaatgtgagggtcaggggtggcatggtctagatttctttttgttaaaaatttagccccaaatggattagagctaaatgtaaacaatcagatcatcagagttagcagaaaatgcaatagcagatcaaagcatacaaagtggaaagaaggatataataaa

SEQ ID NO: 49241 - DNA, 1046 bp, Homo sapiens
tgtggctgcttagtgaatttgctagtccatgaattgagagaaattgtaaattaacatgatttttttcccttttgacaggttcaattttggaatggtgtttggcgtaattgccatgtttagctcattttttctccttggaaaaacgctgatgcagactttggcacaaatgatggctgactctccctcttcttattcttcctcctcttcttcctcttcctcctcttcttcctcttcctcttcttcatcttcttcctcttcctcgcttcacaatgaacaggtgttacaagttgtggtaagtatcgtcttttcgctttaaataactatcgaaatagagatgcaagataccacttatgatctagtgtaactcctatccataatataaatatgaaaataaattaaaagtctcataattttcaaattacctgcttacacaaaaaaattaataagaatacagcaaggaattgttgaaatatttggtagtagttgtaatattaatggtaaaagagaacaaatgaaccatcattaagactgtcagcaattaaacagatacgtgactgtctttttaagatattaaatgattgttattttcaaagaataggcatgctgatttaagatctctataatgtataagtaaattgcattctaattatatgcaaagtgtttccctttccttttcatggccttcagagcctaaccaataatatccttttaattaaagatataagacctttctgaatggtcactgtgatttcttaatgtgaagaataatgtgctgagttgtactcctttaaaactcatgtgtagacctataccttatcattttatgtctccaaagtttggaagggggctttacattggctcacttttatttcacatttttacatttatagttcccatttccatgagtcatggatgttgtttttaatcatgttcttattaatggagtagactaaggattagtaacagattgggtttttttttcttgtctctttgtgtcctctactaggctgggtcactgggaagatttagaagtcatttgtagagaa

SEQ ID NO: 49242 - DNA, 1051 bp, Homo sapiens
cttgcagtgagccgagatcgcgcgactgcactccagcctgggcgacacagcgagactcgtctcaaaaaaatatataaataaaataaaataaaacaacaacaacaacaaaaatgattataactagtttcttaactagagaaaggacacttggaattaatggaatttagaaaatgattcaagcagcattgtttgaatcttcagttactaaaggaagctttttagatgagatttctgtgtccataaaaataaattccagttgaattaaaattaaaacttgaaaccataaaaggccttgaaagaaaagacccatgttatcatttttatgagcacagaatgaggaagacatagagcgaatagtagaaaccatgaatattttttatgtaacagtaacacctttattttttattttttaaatactttattagagcagttttagattcacagcaaaattaagaaggtacggagatttccccccttacaatgatgaaccgacgtgaatatgtcattaccacccatagtttacattagggttcactcttggtgttgtaggaaaccatgaatactaatagatttgactacctaaattttatatatcaaaaactaaaaacaaagtaaaattaaaaggcaaacaaactgtggaatacatttatgtcatgtattacaaaggaccaatgctgatatttgaagtgatcttacggatcagtaagaaaaagttgaatactttaggagaaaacaagtcaggttatcagtaggcaactcgcagaaggaccaaaaaatggtcaaaagtacggggaaagttcagctttacaaatggtcaaagaaatgtaaatcacattgcagatttgaataaaacgagcttgcccaaggttatgaaagggtctgcttttagagtataatttgatgacatgtatcaaaatcttttaaattttgtgtaataatagcatttactaccctctctgtgaggcataacattaaacattggacaaagattagctcatttaatcctcaaaattacccttttgtgcaaatgtggttatttccattttaatga

SEQ ID NO: 49243 - DNA, 1011 bp, Homo sapiens
cagtgagccgagatcgcgccattgcactccagcctgggcgacagagcgagactccgtctcaaaaaaaaaaaaaaaaaaaaaaagagacaggacctcaaacccataacatgtctcaagagcccaatcccttagcaagtatgctcatctaagaatttcttcctccaaaatatttaggtgtgtgtgtccaaatatctttatcacattataagagcagaaacttaattaaatgcccaacagtttattccatagaacacagtgtagctattaaaaatcatattgaaatagaaaatactcatgggaagacgtctgtgatactgttaagtgaaggggcaaatttcaaaaccagatttataataaaagtatagtttttaaaattatgtgtacaggaaaagactagaaggacatacatcagaatggttcacaatggttttatatgtgtatgtatgtttggggagcagaattttaggcttctgttttgctttgaattttccagttttcttgctttaaacatattttttataattaatataattataaaagaaagcagaaatttcctccaaaaggataccttttagtcccaactcctggactgtaagaaatagattctcagtatgtaaatggtattcctgagcctggtgtgtcccacttagcctaatttattgtctctctttaacagatgacataacttgggagtgattacttatcttacgagaatatatctttgctatctaaaaaaatttgctgtgcagctcttatcttcccttgtgtatgcaataatatatacctgcacattttaggagcacatgattgtaagacaactcctgcttcatatgtttgtaacatgtctgtaggttccaaatgccttaatttcgacattaaatttcaattttaatgtatttgtgtatctcttccacactatttttctgaccaacatagtagaccaactaatggaatagaagggtatggtgctcccacactgatcgggatccctattagaccagctttcattac

SEQ ID NO: 49244 - DNA, 1094 bp, Homo sapiens
cttaagaaaatgggctttaatttttcacccagaagactggcaaagagtaaaattatgatagcatccagtgtcattcagagagtggaaaaatgtcaattatgagagtataaattaattcaataatgcaaactcattggaggtcagctttaatgttcatattttttgacccaacatttccatttctaggtaatttttcatacccttgcagatgcatacttaactggacgcctaacattataagcaaagctgtgtattgcagtattatatgaaaaggttaaaacaccctaagtgattaatagtaggataccttataaataagttgatatgttaataaaaatggattactctgtagcagatataatgagattgatatttatgaacagatatggaaaaatgtcaaaaatatataaatttaaaagcaaatagggtgtgatggctcacacctgtaatcccaaattttaggaggctgaggtgggaggatcacttcaggagttcaaggctgccatgagctgtgatcacagcactgcactccaacctgggcaatagagcgagactgtctctttaaaaaaaacaaacaaaaaaaaacacgaaaaagcaaaatatagtataataatttgataccattggtatttttaagtgatgtatctgtatataatagaaaagatcatttacctgataagtcctagaccatactttgtctggctatttctggaatttaataatttacaacactttaaaaattttaaaaggaacattttacaatgtgaattcattacttggaacatgtgttagctaggtatttggctgctctaataactaaaaataagtggcataaactttcaaaacattccaaatataagtagttcagtgttgatcggataactctgtaatttgggtacacaggttctgtcttgttagctctgctattcccaacatgcagcttctgtgtcgtggacctaaatccagctccatcatagctacattacagcccacagtacagggttgtctccatcacatcctggtgctagtagtgcccataccccgccccataaggaaaactgcaataggaaaagggaagactaggtatgggggaa

SEQ ID NO: 49245 - DNA, 1027 bp, Homo sapiens
gaaataagaaggaacttggcaaacaaaaaaccccatctgggatttagaaaaaattcccttacttcttaaaaattcccttaatacttaaacagttctagtggaatcagtgttggcatgtctgattctatctggggtagagttattttatgtattttatgtggcagccatcctaaagaagttgtcttggcttccaaaaataccatgtgaagtcagatatgttgctctgtgcagcagatgacagagctgaggcaagtttcttctcggatcctgccaaacttatttagagttatttcagctctgaaaaatcagcttcccaattctttatacaaaatcagcttcccaattctttatacaaaattggaggtgttagaaaatagaaattatgctcacagactatatctttaagtaaaaaaatatcctgatacttgtccacatctattggtgtagggaaatatgattaataatcaagaatagttttagtaaagtactgtgtgcaacacaggcaaagtagtaagaactgatttttttaaaaaaactttttaaaatttactcatttgtaagaatttttttattatcaaaaatgtttagacacgatggagaatatatttcctcaatataatataatgcttcaagcaccagtacctgccattcactaatccttagaccatgtctatagatttattctgttctaatctgtttaaagtaaatcagtaaagtaaatagattcaaaccaatagacatttttcttggtaagttggatgctaatatgtgtgtttcctttattatatattgttgaacttctaactattttcataatatcatatttaacttttaggactctaatattttctagtataaacgagcccacatgtatctttctgccagcttcggcagttattaacattttgccaattttttcatctaagcagtccacttttaggggaagtattttaaagtacatcccaggcatcctatcatttcatccataacctttcagcctgcctttaacggatgatgactcattaaa

SEQ ID NO: 49246 - DNA, 1066 bp, Homo sapiens
atctgtcgattctgggccccaaattgagtggcctggctgctaaccccctagaacaggccatgtattttctagttcctcacagttcccaccactttgttttttctgcatatgatccacttcatttatttggtaccagcttggcccatttaagcatttatattagcaaacatgccgtatcattagcgataataaattcctgacttccaattctgtattgtacccagtcctcttaagaaaagttagtaattaagcatcagctgtaaacattttaagatcattactgatgcaaaggcaaatcgggtataacatcatttatgtattcagtgtatattgagtaatccaccttatataagacactgagaaacctttccctcagggagctcaaagttgagtcagaaaaacagaccatacccacattattacagtacaagtttaaatttaagtaatgacaggcaatactgggaaatgataacagtcttgactgagaagatgaaggcaggtttcacagcatcagcccttgaactggccgtcaacagtgagtttacttttaggacgtcaagatggacatggacctcagcaccatagaatagaaggtggtcaaggaactgccagtaattcagtttaggaagagaatcatatgagataaggtagtttaaaagtgagaaggaattagtctgcactcaagagggaataggtaaggagaaaaatgaggaggaggtaaaaatccatgggacttggcaatctgatcaaagagaatactgagggttttagcttggattgatttttctaaagaattcctaaacaactttttaccttatactttaccattagggctgacagatgattataggctagcatttgtctgtgtcattagatgctcacagtctcctttaatattttaaatactgctcctcactcaaaattaaatacccattcagttatgataagaagacagaacaggccagctcagtggctcatgcctgtaatcccagcactttgggaggcccaggtgggtggatcacttgaggccaggagttcaagaccagcctggccaacatggtgaaac

SEQ ID NO: 49247 - DNA, 1023 bp, Homo sapiens
tagtttgacactaaattactgtagactgtaactatgaaataaaacctcaacaaatgaataaatgtccctagtgggggtaattcaggaatgtgtactgtgagttctgactaattacaggatagttttaaaatgttttgaacaaaaacaggattatggaatccacagagtagatgagactttaaatcccctcatcttaatccttggtttagccatgaagaaaaaaaaaagacctgaaagaggttaagtagtataatagtaggagtaaatgtaattttaaggttatacctctttgaaagggtaaggactcttaatgtaaatttcttactctcgcctcaaaatgtaagtacacactgggacgtattttttcattctgctgtttttattagatgttctagaagtattgattgcttttatatatgaggtatatggcctgcatatgtttaggaagggctttctcaatcagtttaatctgctagcccaatttttaaccatatggtagaattcataatgctgttgattctctggtatgaataatatttattattccttatttttctttttcagtgagcatcaccagttttatcccacgttttaactttctaagcatagatctgccagtggttgtggagacatttgtcaagtatcctttctggtgtgaaacatgttttaaaagtgtgttacttggatcttgatcaattttaccttgaatacagcattacaaatatagacctcacaagtatcacttaattgctaacaactaaaaaagagtcttgaaagatgaaaaagatcagattgtacccaggagggaagaagtcagaggagaaagattaatcagagtgagaaaggtttagatgtagaagggaaagaacccagaatacaaattgagaattgaatttacaagtctaaaacattttagtaagtttataaaggatggaagcttcagttactactgaggtaatgaattctgccccatccgagattgttagttctgaccaaatagagaatgtaatcgcataaccagga

SEQ ID NO: 49248 - DNA, 1034 bp, Homo sapiens
gaaaaagcatgtttctatttaagtaagctgtaaaaagtattattgaatatttactgtaaatatatgttcacataaaaaaataacttggagggtctttgtgtccctggcatattatcatcttcatggaaagaatccactgtggtttctgtagagtgattggaaaaatggattattttgaggattgaagaaagtgttctttctgcgttgtcactttgttcaacagtaaaactttattctcagtgttcctactctgcattgtttacatttttgacagttttttttaatcacctacaatctgtaaagaatgtatatattcttttcagcatctcagtttgaaaagacatgcagttaaacttgaccttttgataatcgctcttacaggtcattgtctgttctaacagcaaattgtaaacatgtgcttcatagatattgtggctctcagtcatcactttgtcctatggtatttattgaatgttcacatactaatggtgcacaggtgtttttttctataaatcttctgactgtcctgtaattcattcttaagctttaacttgaaggtatcgtaattgccggcatttgatgtttagcaataaaagaataaatgtgtaccagcattttatgtttatcatcgtctatgtgttgtcttttttgaaactcttttctatcaaaattgttcctattacataaagcaagatcttaatcatttttaaattcttgattctagaaccagccttcagttttcattcgtataatctatacctgaaagtcgttgcaggccttgaaaataagtcttttaaatgaggctcctgtgcactcgctactgtcttggaaatggctggtttatggataaagaaagaggactatcatgtttcctttcattactgtgtctgacagaaaagtctgctgtcagttaggaattcttgaaagagaatgttttaactatggcatttggttcttcttgaccttttgccctagtgcttcctcccatactctctctctctctttctctctctggtagtaagggccagataaaa

SEQ ID NO: 49249 - DNA, 1056 bp, Homo sapiens
caagatcgcgccattgcactccagcctgggcgacagagcaagaccctgtctcaaaaaaaaaaaaaaaaaaaaaaaaaaaaaaaaaaaaaaacccgaccagaagagagaggcctgctaaagtcggaactgtgtgcaggaaatttgaaggggaaggataatttgcaggcttcttttctcggggtgcctctgtcgtggggggtgggagtcgcgggaaggatagaactgccctttctttttctggtggcttttaaacctgtgactgccgcagacttgaatctgcacttcccataggttccacttggagtgtctcgctcataccttgcttttcccactgttttcctcgaattggatagagcaggcttttctcttaccatttttaacactgttcctttctttctgaatttctgagtactcactttgcattttctcccgcaaatttaaaggatctccgaaggcacaagatctagtgaagactgaggatttggagcaacacctgggtttgagtctggcttcttcctgatgggctctgcgtgtggccttgggtttatgttaacctttctgagccttccctgtccattaaaaagaaaaaaaaaagtgtacacctcttcgggcttttactcttaagggggtagctgtggagcacactgtagggtttttaagcaatgtcagtgtatttaggtggtctgaagtgacttagagaaaacaaagcatgttaattttagttcccacatttcttaggtgaggatggtagggcatggagactgctagagatgaaatggtgcttgagtggtggagctgaagagccaaggtttcattaataaccctgccagccttagggctgaatggttaatgaaagctctagcatactgaatttagcggtgaggagaaatagtgtattagggtcacccagctagtaaggggtgagtctgggaagtgtccctgttgtgagcaccttgtgaacactcacctgtatttatcgtccatggattttcttaacttttttttttttttttttttttaattctgagatggagtctcactctgtcgcccaggttg

SEQ ID NO: 49250 - DNA, 1048 bp, Homo sapiens
ttttgtcaaggatttttgtgtctatactcatgagggatattggtccatagatttcttttttggactgtcttggtctggttttggtattagcataatactggcttcataaaatagggaggccttcccttctggaagagattgtgtagaattggtgttaattctttaaatgtttggtagaactctccagtgaaaccatctttgtctcaagatctcttttctggagtgttttttttcttgagagacggtcttgctgtgtcacccaggctgaaatgcagtggtgtaatctcaactcactgcagccttgacctccagggctcaggcaattttcctgcctcacccccctcccctcccgccccgcaaggtagttgggactacaacaggtacgcaccatcatcactggctaattttcgtatttttttttagagacagggcttcctcatgttgcccaggctggtctcaagctcctgacctcaagcagttgacgcaccttggcctcccaaagtactgggattacagacatgagccaccatgcctggcctctttctggaatttttaagctataaattcagtttccttaacagttataggactcttcatgttatttcatattcggtgagttgtggtagtgtagccggattggtaaggcatcagagagaccaatggggttcaggaggatatttattatttaggtgcaccggcccagtcggattaacattcaaaggactgagccgtgaacaaagagttaagttaccttttaagcatttcgtgggggcagggggagatctgtgcaggggggagcatattacagaagcaagaaacaaagacagttattcagttaattgagacatgcattacatcatttcttactttttaaggaaaaacatgttttacgacttgagtttgtctagtgaccttgcagctgcacagctagagaaacagggtcttcacaatgcctgggaaaggaggagagataaggctcactagccacagaaaaacaagcagttaatttttaaaggactccagctctttctctttctcagcgggaact

SEQ ID NO: 49251 - DNA, 1065 bp, Homo sapiens
tgttgagcattttttcatgtttgttggctgtttatcttttgagaattgtctgttgcccatgtcctttgcccactttttgatgggaatatttgttttttttttttttcttgctgatttatttgagttccttgtagattctggatattagccctttgtcagatgcatagtttgtaaatattttctcccactctatgggttatctgtttgatgattatttctttggctgtgcagaagctttttagtttaattaggtcctatttatttatttttgtttttgttgcatttgcttttgggttcttggtcatgaattctttgcctaagccaatgcctagaagagtttttctgatgttatcgttatcttctagaatttttatggtttcaggttttagatttaagtctttgatccaccttaagttggttttttgtataaggtgagagatgaggatccagtttctttcttctacgtgtggcttgccagtggagaaaccaacttctgagtcttctccgttgccttggcaaccttgccgtaagtgggattctgaaggctcagcgtgttagtttgggatttttggggaacagctttattgagatatgattcatatgctatataactcctttatcgaacatgtacaattcagtggctttcaggatatttgcggttgcgtgaccatcatgacaatcaactttagaacattttcatcacctcaaaaacaaaccctgtgccccttagccatcacccttattcctccccgcattcttcccagcctctggcaaccactaatctgctttacatctctatgagtttgccttttctgttttgttttttgaggtaaagttttgctcttgttgcccaggctggagtgcaattgcgccatctcggctcaccgcaacctccgcctctcgggttcaagcgattttcctgcctcagcctcccaagtagctgggattacaagcatgtgccatcacacacggctaaggatttgccttttctggacataacaaatagaatcacttatttcacttagcatagtgtttttaaggtcctaccgtgttgtatggagcgtg

SEQ ID NO: 49252 - DNA, 1027 bp, Homo sapiens
aagggacattgtgcacaacctgagcctggctgtcaggttatctgacgttaggatctggggtttaggggaaaggatgcctgcgtttgtgcttccccttgcgggggagttgcagactggctctattgccagccagctcgcacaccatcttcccgtggagagagtgcagatccctgaaaggagcaggcaagaaggggccgggtataagcctgaccaaaggtgggcccttggacttaggtggcaagtggtaagcatgggcggggaaggcgtgagtgactgtctgtgtgtacatccgtgtgtgtgtgtgtaggggcactgagaataaagtgtgagtgagggcttggagctctggaaatctcggcagttctttggtggctggggctgcagttgctggagcagtaggtgggctggaggttcggctttgggtcttatcacttggcatgatgcgatgatggggatgactaaacaccccttggagccagttctgggagagacctaggagggaaaggggcttttgatagtgaggtatgaaattttcagccttcataactaaaaatatgcttggcgagaatagaaattcatctcccaatttcacaagccaggtgctccttgaccatgagagagctgaaaggaatgtgaatgtaaatcttctgttcctttttttttttaatgtatagatcatgtatacaataaggtagattatcaaacatgtacagcagaaggctcatttcagatcagaagttctacattcagtgagggtggtagaaatgaaaacattttattcattttgcatgttgcctatattttctaattttaaaaatacacatattgcttctttctgtattaataaaagcttattttaaatgaccgtactaatacagtttgtactgtggttaaaatatacatgaccttgaccatgagagagctaaatcttctgttccaaccgcctcattttgcagaggacaacgtcaaggctctggcctgtggaatctgatggctctgcctgaggggaggggtgttgacaacacac

SEQ ID NO: 49253 - DNA, 1027 bp, Homo sapiens
gaggattactgttggatatttttttccagttataaaagcagcacatcctttttgtaaaacatggggaaaaaaaagcttgtcatttatattactcatcagcagtggacaggtatcccctttctagtaccatgtgtcctcattaatttatttaacctgaagtggaatctcatttgttgtacttgaatttatttgcatttctttaatttctgcttagggtgaatattttgttatgctgtctctaggctgaatatgtctacatccttggcgcagctatttgtggtcggcttttgtgttcttaccgtcgtgtaatctggtggtctgcgttgcctttccttgcagggtggagaatgtttatcgctcatgtcatgacaagggataagtgacactgacaactttgttcaggttttttaatttttatttatttatttatttatttatttatttatttacttatttatttatttttaagctcagtcctcaaactgtgcctcattggccttccttctgaacgtttctttctgaccatcttgccttcttccccttgttctccagctgatggtgagaccattctaaaaggcctccagtccattttccaggagcaggggatggcggagtcggtgcacacctggcaggaccatggctatttagcaacctacacaaacaagaacggcaggtgagcagtctccagtgctgttcttcatacctggtcacttatgagcagagagggtgacagagtggaggatgggggtggcatccggcatttttttttctcctttgacatcttttaggatgggaatggaacttggtgcttctcaaccgtagctgcacatcagaatctcctggtagcgttactgaccacaggttcttaagctctcatgtatatagagattgacaggaggccaaacatgtttcccagacaagttttttgttaagactgatgcccagagtgggcataagggaggcagcccaggaaaagttttgtggcttactcccccaagggcagctgcaggtgatgttttgaagggag

SEQ ID NO: 49254 - DNA, 1047 bp, Homo sapiens
agaggaaagaatgaaagaattgagtcaggacagtactgggcgggtgaaacggtaagtccactcttgaatgtccttttatatttaatcgattgaaacaatcatagttggctgggcgcggtagctcacacctgtaatcccagcaatttaggaggccgaggcaggcggatcacttgaagtcaggagtttgagaccagcctggccaatgtggcaaaacaccgtctctactaaaaatacaaaaattagctggacgtggtagtgcatgcctgtaattccagctacttgaaaggctgacgcatgcgaatggcctgaaccgaggaggcaggaagcagaggttgcagtgagctgagatcatcgcaccgctgcactcctgcctgggtgacacaatgagactgtctcaaaaaaaaaaaaaaaaaaaaaaaattcagaatggcagtgtggtccccagtagtgtctgcttaagatgtggaaaagatcaaactcagcacctccttctggcaacatggtgaactgaactactgggcccctcacaccaaaacaagacagtgtatgaacattcatgtgcatggatgcacacacacaaatgctaggtaaaatgaaactaaggcagaaaggggatatggaccaactccaaggagttggaactgcctaaagtggagacccaggtagagctgccacctcatcaaagggagctagaaaactcctgacttcagttcgagaccagcctgaccaacatgggtgaaaccccgtctctactaaaaatagaaaaagtagccaggcgtggtggtacgtgcttgtaatcccagcttctcaggaggctgaggcaggagaatagcttgaacccgggaagcggaggttgcagtgagctgagatcgcaccactgcgctccatcctgggcaacagagtgaaactcgcctcaaaacaaaacaaaacaaatacctgacttcaacctttccaggaaagagaaaaggtcactttttctccttcaggctctaggccccagagtgaagttaagcaattttaagagacttccgacagggtggggtgata

SEQ ID NO: 49255 - DNA, 1028 bp, Homo sapiens
tgctatccttttttttttttttttttttaaatctggagaataaagatcagaggttaaatgttagagattaaatcattaacaaataacccagtaacattatctgaaattattcccctttgataagttaagtctgaattttcgactaagaagctatgggatgtacttgaatttatttttgttttctactttcaagtgaaaaaacaagaaaacaaggtcacataaattaactttgattttaaaaggttcttgcaatttacacagtatacctaaggcctgggctataatctacctgaattggtgtagtccagtttcatttttcagcagtgaaggttgaaacgagtttggtagggtgctctacagtacctcctggtagcccgttatagggctaccagcgagatgccctttaatgctaggttgagcacttcatcagggtaatggcatttacatcctgttaagatccttctttctttgctagtctttaaaaaaaccatagagttacaatgtaggaaagagctcttcaccttagccaaggcactattgacacaattgagaacaggcactgtttagtttcagtgggtttgcctgtagtgcagtaattgccgataggtggctggctgtcaaggagagggtagtcttcctcccctggaagtgagtgactttgtcgttcatccaatgccatgggtggctcactctcacctcactccccaccatcagccaggggtggaagaggcttcctccaagtcctgttcgcctgctctctagcagttgtcctgattggtgcttcacattttacaatttacaagaaaaaccctctagaatgcctcacattctgaaagctgaatttgttcacatggaaggtgaagaagtggttaaatgaagagttgtcaggatgacatgaatttatgggagtttgccttttcaatctcggtgttctttatagatgttagtattccctcatagaaagccttgttaacttgtaacaggtttagactgtactcttggaagctggtgagcagggaagggaaaga

SEQ ID NO: 49256 - DNA, 1127 bp, Homo sapiens
tgctgggattacaggcatgagcccttgcacccggcctatccattcactttgaatgtagtcatttcatatagtgaggtagattcagagagtttatttaaggggaaatataaatgccaaggcttggaaactggttgatatggaattgttgtttaatttggaaaagaacagtatacaacattcagtgcttgtcattaatcctatgattttctttctaaatagctgctgccatcttaagtaaagtaaatctgtctgtggatccttgtgataatttcttccggttcgcttgtgatggctggataagcaataatccaattcccgaagatatgccaagctatggggtttatccttggctgagacataatgttgacctcaagttgaagggtaagtttctactggggtttggtgatacactttatagagagcaatatttgacaggaaaaacatagtttgggatttgaagcatgacttctcactttttaactaccatgctaaattcatttccaagaatttttaaaatgaaagattgaaaggaaagtttgcagaattctggactcccagatctcaacataagactaatgtaggttgttatgttcatgtttggtaatagtaaattctactgccaaaggataaagagcatttgattgagattggaagcaaaggaatagttaatgaaaattatatcaatatactcatttgttgtattcagagtaaacttcatttcttgctcattgtgtcctggattttcatggcttacaaaatgtacttaacacctcatcatcttttgacatcacttttgagaactctggatgaccttgtggttgtcatattgttcttgttaacttctaagttggctctagggagattcacttttctcccatggccactctagcaatgacaagctcacacacacatactcacacgtggatgcatagaaacatacatatgttctcaaatacattcccctgccccccgccaaagttggaaatgtctgttattggaggatattctgttagcattggatctaatttttatgctaagctattggagaaggccacctcaggagggaagtaggaagatttcaaagccagataaggtaattattttgagaaggcaaaaatagtatggtt

SEQ ID NO: 49257 - DNA, 1027 bp, Homo sapiens
gcaaatatctacagtatttttcccttttagagatgtagcttccttagacatctgtagtggtaagcatttcccaaaagcatcttacctttctgaaccttagcagacatactgtgcagcttacctatcttctgcagaggaggaaactgagacctaggagaataaagtgactcactcaggtcacaccactaaagggttttcatcatttcagcatacctaagacagggcagtccaattttcagtattctcataagatggctattactcctctcaaaatgcatttccaaagtaggaacataggacttcgttggccacagggcagacatttttttagtgtctggaattaaaatgtttgaggtttaggtttgccattgtctttccaaaaggccaaataattcagatgtaaccacaccaagtgcaaacctgtgctttctatttcacgtactgttgtccatacagttctaaatacatgtgcaggggattgtagctaatgcattacacagtcgttcagtcttctctgcagacacactaagtgatcataccaacgtgttatacactcaactagaagataataagctttaatctgagggcaagtacagtcctgacaaaagggcaagtttgcataatagatcttcgatcaattctctctccaaggggcccgcaactaggctattattcataaaacacaactgaagaggggattggttttactgttaaatcatgtgttgctaaatcattttctgaacagtgtgttctaaatcagtcattgatttagtgtcagccacgtggagcacctcggcttaaagcagctccacaaaacctgacacaacacacacaccaattaaatggattttgttgagaatttaatcattcaatttggtcaaccagaatgacttcctgtggaactctgttttatgacagataatagttttccaacttgattgagtctctgtataccctgggatattgtattttttaatgaagggcattttcaaacttgtcaacttctcttttcagcacttgaaatgaa

SEQ ID NO: 49258 - DNA, 1038 bp, Homo sapiens
aatccccatctgaaatttagtgtttccttctattatgaatgtcagcaacaaactacactatcttcagcagcacttgcttgtacctttcaccaatagaatcacttattttcttgctacatatggttatcgcaggtatcctgaaacaccattttcactcatcattatcttacgtagttgtcagattacaactagatcttgcagttttgaagtgttatagagcacatgtattatgatatcaccaattttttttaatatttttataattgcatttaaatacaattggtttcttttgtaattctatgtattttcctttttgcattcaataacactcttttaagaagtctgtaagcttcaccagactgccaaagagatctaaaggtagccctgatttttagtgattttctaaagatgtccttctaccattccaccaactttctcagtgttacagaacatcatgtattttattttcttagtttccaagccagcgccctactgggaaggaacagctgtgatcgatggagaatttaaggagctgaagttaactgattatcgtgggaaatacttggttttcttcttctacccacttgatttgtaagtaatacatgtaaatagctagtaaaatctcagtctttatcaattatttttcaggagtatcaaacaaattattttgttcagctcttggtttttaaaaaggcaagctgaagtaaagaaatgtatttaaaaaggtaacatctaccatatatttcagagtcataacacaccgacctcaatacttatgtctacatgattatgttataatggaataattagaggaaagctacaatatattcattaagctatacctactaaggcaagaaaatggactgataatatattagaaagcatttaatagcaagacctatgccataattctttttactgtatctctcttgattagaaaattaattctgtaatcccagcactttgggaggccaaggcaggtggattacaaggtcaagagatcgagaccatcctggccaacatggtaaaaccccatct

SEQ ID NO: 49259 - DNA, 1028 bp, Homo sapiens
ggccctagaaatcgctctctgggaacaagctggggactttgattttgctagccctgcccctctgagcccttcaccaaacttccgcgcgggggcgcccgccccacctcccgccggggctcagcacgcggccttctcccagccaagagccccgtcataggtgggcgccgaccccgagccgatctcgctttattaaattacagaaatcggtattcaaaaaaaaaaaaaaaaaagggcggggaggacactccctcttctctgttcccacaccctagctgattcccaggtttcgggaaactccacaggaaacggaaatggtctctcccaggccagcgcgcgcgccgggttgcatcacccgcctcgcacgggccggcggggcgggggtttggtggctgccctcagtattgcctgcacaaatatctaccaggtctgcgacgaatagctccagcaacttcgcaccgtgttttccactcagcctaccgacaggcactgtgcagattcaagcggagagatgtccaagcagtgaggccgctgctgcaccggccatcctgagcccctactcggccttcccgtctccgcttccccgccccgcactaggacccctgcagatgatcaggcggcagccggggtgatttccttcctcttttggcaacatggcgggcggagaagctggagtgactctagggcagccgcatctttcgcgtcaggatctcaccaccttggtgaggttttgcttggggaggatgcagagtgagctcaggagtggaggtgaccgagcctcccggtggtattgggactagtcagtgtcgggagcatgggtcaggagcctgggtcaggagggagacctggaactgggcgccctaagccatgctcgcgccgcctgtacccaggccagtccacgatctgggcgcaggcgtgtacggtcgtgggacttctagcttctggagggttcggctggaaagtcttgatgttgattgtcatggtttcagcctctgaacgtctgggaagggggtgtcctgtctgcattactt

SEQ ID NO: 49260 - DNA, 1625 bp, Homo sapiens
aagagttgaaaaacactggcggtaagtttgttagtctttgccactgtctaattaaaaaaagacacagtcttgtacagaaaaaaaagcacacaatcttccttgaggacaacagttactgtggctttcagtctcaactatttatttggatgactttgaaaactatacttcggccgggtgcggtggctcacgcctgtaatcccagcactttgggaggcctaggcgggtggatcatgaggtcaggagatcaagaccatcctggctaacatggtgaaaccccgtctctactaaaaaatacaaaaaattagccgggcgtggtggcgggcgcctgtagtcccagctactcgggaggctgaggcaggagaatggcgtgaacctgggagtcggagcttgcagtgagccgagatggcgccactgcactccagcctgggcgacagagcgagactccgtctcagaaaaaactacaaccttgactatagtcccatattttagtccaaatactgtgattggcttctcttcctgttagacacaacctatgcaaaaccaaatgaatttgggttcggtatttctatcgtcattggctttggaaatcatttcacacttaatagaaaaattgtaagagttttacagaaaactcctctatagctttttcctagattgacaaacacacatacagatttatttacatatataagtttttttctgaaccatttgagtgtaggctatatatgttatgcttcttgatctcttaatacttcagtgtatatttcccatcaaaaaaggatattcttatgtaaccacttagaaatttaacattggcaaaatactgaaatctacagtgcatgtttcagttttattacttgtcccaataatgtactttatgttcctcctgtttagaatcttgaattgcatttaatttcatgtctctttgatctttaatctggagctttttcagcctttgtcttaattgacattaacagttctgaagaatacaaactagttactttatagaatattcctcaatttgggtttttcttatcattcggaagcctaacattagattcagttatatattcttaacttaaatacaccgtgaagtctccttttcaggaatcacagctagaggcacatgatatctgactgctcctctttgttaaggttagttttgactatgtagtcaagatgttgtccagcttctctgctgtgtagttactctctacccttgcaactaataagcaatctgtagggagatctttctagccagtacaaatagcctgctgatcattgaatcccacacccctggatgtagcatccactgatgattcttgcctgaatcgaacttgactataatgattacaaaatcatagcacctctacgggttgcagtatcctccctcaactctaccaccccacatttatcatttggcattctttctttgccattatttatttccctatctagttataatatggactcatggagtcctattttattcaacatgttatgatccatcactgtcttcctttattttgatgtgcattgttcgacgtttggccagtggaggtccttcaggctggctcttgtgtccttttgacatgtactcatcatttttttttcttcttcttttt

SEQ ID NO: 49261 - DNA, 3387 bp, Homo sapiens
ttttttgtagacacttggtctcactgtgttgcccagcatgatctcaaactcctggcctcaagccatcctcccacctcagcctctcaaagtgttgggattacagacatgagccaccccgcccagccctgtttcctttattaaggcttccatgctactgtgcccacgatggtctcatcacttgtccaggagatttatctgaattattgccctgtaatttagaaagttaaatttttgttgtctcttaagtaaataattatttgtggtgacttatgcccttttgattttactgtcttttgtgattatatttttttgctattacagacacacgacttccagtgtattttgaaatagatttaagcaataaactttcagtccaggcacggtggctcatgcctgtaagcccagcactttgtgaggccgaggtgggcggatcacttgaggccaggagttcgcaaccagcctggccgacatagtgaaaccccatctctactaaaaataccaaaaaatcagccgggcatggtggcgcatgcctgtagtcccagctactcgggaggctgaggcatgagaattgtttgaacccaggagccagaggttgcagtgagccgagatcgtaccaccgcactccagactgggtgacagagtgagactgtctcagaaaaaacacacaaaagcaagaataaaaaagaatctaagaatatagtgtgggctttctttatggaggagcaggctttgggaacaaatttgaattcagaagataagcaggtaaaatttatcacaagattgtgtggtaatgagagtgaagtggatgtaagatttatgatttcttttattttcattttgcagtttaattggttggggtcagataagaagaggagtgacaatcaagccaacagtagatgatgactgaagaataccagttaaataatacattcggatggatttggaagttggaattcctcttaacaaccaaggggtttattttcaaagcaatattggggaattgatttcacagttcgttaccttagtaggtaacggtaaggttattctctttttttttttttttttttttggttatgaaaacttagggactaaaattaatataaaaattggcataatgttggattgaatctacattttggcagaagttaaacattcccacataatgtcaaaattatacatcatgcagttctgtttttttgtttgttttattttgttttgtttttgagtctggctctgtcacccaggctggagtgcagtggcgtgatctgcaacctctgccccccgggttcaagcgattctcctgcctcagcctcccgagtagctgagattacaggtgcgcgccaccacacttggctaatttttgtattattagtagagacggggtttcagcatgttggctaggccggtctctcctgacctcagggtgatcagcccacctcggcctcacaaagtgctgggattacaggcgtgagccaccttgcccagcccacatcatacagtttgaaatgaaactttgccacaaccagcctttgctgtagcacacacatatatcactgaacctgtttgaaataaagttttttttctttttcatgattcgtctttgagtacctccaggctgaaagactgttgtaccagtaaaaacttaaaggcacaaattctccttgaagaccttctcccttttatgtggccccatattttatgttgctttatctttgaaattttgcatgaaaaggaaatgaatggattcgaatgaaattgtcctttagagcatgattacttgttcccatggacaaatatttttctccccttgctcttcctggcctgaaacacgggaaaccagagtcaaaagttatctccctctccctgtgatgccttgagatttttttctgcgttgtttaatgcctgaaatccaagtcttcctccatgggaaaatactgttataccaaataattctagatgagtaacaaagatctttttaggccttcattttatgttttttcttaactgttatattatgattgtgacatagattatactactactaatttttggatgtttcaaaaggtcaagaagtaaaagatgttagaaagcaatgagtgagtccttttgatttttaacttattccccatgtccctatacttcgtgtgcttttcctttttttttttgagacggaggctcactccgtcacctaggctagagtacagtggcacgatcttggctcgctgcaacctctgcctccctgattcaagtgattctcgtgcttcagcctcccatgtagctgatattacaggcacttgccaccatacccggctaatttttgtatttttagtagagatggggtttcaccatgttgcccaggctggtcttgaactcctaacctcaggtgatccgcccgcctctgccttccaaagtgctgggattacaggcgtgagccactctgcccggcttatttttctttatgtttttgcttcgtaagaggttctgttgagcagtgatttgcaactcttgctgacgttgctggggaagctttaaaaaaaaaaaagatgccccacagagattctgattttaattgttctgatttaattggcttggagtagaattcaggcattgatatctttaaaaactccccagtgttgagaaacaaatttagagagttgagaagtaggtatattaaattacagaatcttactgagttttggtagactgataatacaatttgctttgcttttcttaaatttgcattgagatgggatttgaagcatattgtgctcttgtgaatgttgaagttgcattgtagaagtttagaagctctggctatgggttgcctaaattgatgttttgaggaagcatattaatgttataaacttcgctgactttgaaggttgtgttgtagcatgaggaacacaaataaaacaattctaaatcaaactaattttatatctaacatgtccccatgtgttttgtaggtaccttctaccagaaattttggaataagacttaaaatatagacattgtaattaatctcatgtaagatttgaaaccagaattctattataattaatttcagacatccacatgaattagcaaatttgtaaagcactgtactgagtgtaatgggcatatacagataggaagtaaatggaccttattttaatagaacttgaagccagagcagtgattcttagcaagagatgtacctagttgagaatgtgcctgtaatgtttctcatgaaagtacattacagccaggtgtggtggctcacgcctgtaatcccagcactttgggaggctgaggtgggcggatcatgaggtcaggagttcgagaccagcctggccaacatggcgaaaccctgtctctactaaaaatacaaaagttagccgggtgtgg

SEQ ID NO: 49262 - DNA, 1023 bp, Homo sapiens
gtctactagagggtgaagggagggaggagagagaggatcagaagagataactattgggtactgggcttaaatacctgggtgatgaaataatctgtacaataaacccccgtgacagaagtttacccatgtgacaaacctgcacatgtactcccgaacctaaaataagagttttaaaaaaatctcaacaaaagggaaaaaaggaataaagaaaaaaagtatttttatgggttaataagtgcttttaaatatctcagttttaatttctagtatgataaacatctatagatacgacccacgtaaaaactctttgtggttcttaatttttgttttttgttttgttttttaaattttattgtgatccttaatttttaagagtgcaaaggagtcctgagaccacgaagtttgaaaactactgattccattcattttatttgtatttcagtgtataaataaatatactgtggtttatttatcttttcttcttggagggaccgatagaaactgtttgcagtttctgaatttcaaacactactgctatgaacatccttatacatggtttgtctttcttgggattatatacatatagtagaagtagaattgcttcatttaagaagtctgtgcattatcaactttactgggaattgccaaaatggcaaattgtcttctatttgacactcccgctgtgtttgatcccgtttctccaaatcactgccaaaggattagattttgcaattttttcccaatctgttgggtataaatggcatctccttgctattttcattttgcatttctaagattactagtgaggttgaccttttttccccatgtatttatcggccatcagagttttctattaattgcttgtgcatacctttggttcatttttctgttggattgttgcctcctccttattggtatatgggttttatttatttatttatttatttgagatggagtcttgctctgttgcccaggctggagtgcagtggcacgtggtctgggctcactgtagcctctgcctcc

SEQ ID NO: 49263 - DNA, 1096 bp, Homo sapiens
tcaccaggctggagtgcagtggcatgatctcggctcactgcaacctctgtctcccgagttcaagtgattctcctacctcagcctcccgagtagctgggactacaggtgtgcaccaccacgcccagctaatttttttgtatttttagtagaacggggtttcaccatgttggctaggatggtctcgatctcttgacctcgtgattcgcctgcctcggcctcccaaagtgctgggattacaggggtgagccaccgcacctggccctaaaattttctttttattattattttatttttcttttagcggcagggtctcaccctgttgcctgggctagagtacggtggcatgattatagctcattgtaacttcagactcctgtgctcaagggatcctcctacctcagccttctgagtaccttggactacagatgggcgccatcaagcccagctaattttattttttgtggagacggggtctcgctatgttgcccaggctggtctcgaacaagtgctcctcccaccttggcctctcatggtgctgggattacaggtgtgagccactgtgctcggtcaaattttaaaattttcttgaatctctaaatccagtggggatgtgtgtgtgtttcttaacaacttgggatactcttttaactcgtttggtaatttcaatttgataatgataaatgtaaggtttataattctttcttccttggaacatgaaatataagtaatatacttgaaagagactaaactctttggagaaaaatgtgcagtgtttgttcacttaatcttgccacaggcaaacctaggtaatggactaagtggtagattgaagggctattgcgttttagtcttgattgataacacttaatggtatttgtttatctttgagcaagtcacttaatctgccagggcctccgttttcatatgtcataataataatgaaacctctcattacagtttttcagaacacttcccatacattcccatttgatcatcaccacagtcctgtgaggtatgcatggcagatactactgtcctcattttactgatgaggaaactgaaactcagaggttgaatgacttgcccaaggtcacaa

SEQ ID NO: 49264 - DNA, 1030 bp, Homo sapiens
tgaatcagtgtcatacattcataaaacaaactcggttaattagaacttggttatgttaagacgaatctgggagaacagaaaacagtttttggggtcccttcagttggctattggtccgtatgcatctagcacattgtaggagatttagaaattgtcttcccacccgatagctgccttgtcacctcattatggtgctccatcccctgtgtgcttaggtttttacctttcatctttctctttgccattgatgtttgtattcaagagttatatttttagggttagaaatcaaaatatttggtgtttggcaaacctctgaagtgctagactgatttagtctagttttaaaccaagtgctttaggcaggtgtgaactccagcccaaatgccagtcaaagtcaaggcatgggttttcctagcctatcttataggaaattcctgtaccttcttggcccccataatgtgttttttttttttttttttttttaaactaacttacaattttgtgatccgtgattcattgccctgcgattcttgaaagctctgtctgtttttttgtgagaacctttaaaatctcccttaatttttattttcccagaaataatgtaaaaacacttaaatgaaagtggaaatgtattaattttaaatcctataaaattaatacagaaaatataaatgattgggtcatttaactatatttttttaaataaactgaaagataaagaacacaacacttcacacattttatatttctcttacatactccggaatcatacacagttctttttaaagcacaacattaaaacctttaaaaggtatttaagggtttggtcaagtgaatatgataaaacatacttgtctgtataaagagaaaatgaaattgtagtcactgttatgtactgacattagttacaacctagttttaattcttaaaacaattttgattagcaaagctaaaaaaaaatggatgtttcagttaaatgttttaaagaggtacagatttttacaaggacataatataagttattgttctg

SEQ ID NO: 49265 - DNA, 1108 bp, Homo sapiens
agccactgtgcccggccagcattcttgtatattaggacagacatgaatgtgattttagtagtagtgtataggagtctatagaagctggaaagaaagaaataacttttagtcttcaagagaaaaatcatctatgccagcctccgaagtcacactgtctgaggactttctgcagtgatggacatgttctgtgtctctgctgtcccctatggtaatcagtgaatattgagcacttgaaatgtggctagtgggactgaggaactgaatttttaatttaatttaattttgataaatataaacttaaatagccacatgtggttagtggctaccaaattggacaacacagaaaagtatgcaaaatatatcttaatttgggaagaggactagagggtttacataggtttacattttactaatatgcatgatattgggcctgtgtacacacaagttgatcgtatagtatctgagatttagacaacctgctggtcattgtctgtgatggtggtgaacgaggaggaagaagaggaagtctgggcctgtagtcaaaggaggtgattaaaggaccaaggacagggcaggaggaaattggtgaagaatatgatcaatcaatatacaggtacatacagagcacattctgtcctagggagaagctacaagtggtatgaaaagttggatccactcccaaagggcttactatgtctggggtgagacaagatacggtcacatgaagtgcgtggtaaacaagatacgccataatgtcacagttatgccaaatgccataatttcaaagttatgccaaacatcataatgtcaaagttatgtcaaatgccataatatcaaagttatgccaaacagataaatacaatgcatctccaagaagggagaaatccaccttggccccagacatcagaaccagactgcctggattgattgctggctctgccacttactggttgtgtgaccttgggcaagtcacttgctatctatatgctcagtttcctcatgataaaatgaaatgataaatgtgccaatattatagggttgccatgagcattaaatgacatatgtgagagtgcttagaacagtgcctggaatacataagtgctaatta

SEQ ID NO: 49266 - DNA, 1028 bp, Homo sapiens
gatcttgctctgtcactcaggctggagtgcagtggcacaatcatcgctcactgcagcctcaaactcctgagctcaagcaatcctcccacctcagcctcctcagtagctggaactacaggtgcacacccccatgactggctactttttcaaactttttttagagatggggtctcactatgttggccaggctggtctgcaactcctgacttcaagtgatcctcctacctcgattcctaagtagttgggattacaggcatgagccaccgcacctggcttgggttaatcttaaacatatgctcttctgaatccagctgagttcttagttgccaacattagaatccactttcactagtttaaggagtttattaaaaatactaggtagctttcagagcctcagggagggccagagagccaggcttggaagctacacagccagacacagcacagttagagaaataggcaaagctcctaactacttcatgttcaggtccagaggaacttccatgcttcagtacttatggctctagatacactacccagctctgagtccctggcactctgtgccatttatcaactttatttatttatttatttatttttttgagatggagtctcactctgtcgcccaggctggagtgtagtggagcaatctgggctcactgcaatctccgtgttccgtccgggttcaagcaattctcctgcctcagcctcccgagtagatgggactacaggcatacgccgttgcgcccagctgatttttgtatttttagtagagatgggttttcaccatgttggccaggctggtcttaacctcctgacctcaagtgatccacccacctgggcctcccaaagtcctgggattacaggcgtgagccactgcacccagcttaccatttatcaacattaaaaaaataaatttgtacttgaaactttacaatagtttttgatacataatgagctaagaaatgtccttactaattgagtccatttgaatcagggctttctgttacttgcagccaaaattatcc

SEQ ID NO: 49267 - DNA, 1050 bp, Homo sapiens
agttccaaacatgttcccagtggcacttcttatcaacactgcactttatggcatcaggaaagcctttagcatgactgggaagtttgtaaagtttgtcttcccaagaccataggtataggatgtcatggcaaaaaaaagtgggattttcagtcagacaggtctcagctcaaatcctagtcccattatttattatttatttactggccatgtggttttaggctatcgcagtggccatgaaagtgggccactcagaccccctgctttggaagcatagttgatggcccagctcttgcctctccagaccctgaccatccagatcattgcatttgaacccaggccatgctccccggccaatgactaagcacagtcacttgcacaggctatttctgggagatgtgggattcttccaacaggccactttggctcaagacctggctgagactttcctagggctggctgcgaccccagacacttccttcagttctgcttccttccttctctcctccacaggggtcagactggcatctgacatcagatggcatcaccatctgaaaatcccccttcttcattcccctgctctttctccttgagcttcacagacatttctcccaccaacatctctcacatatctaatcctgtcttggcctctgcttcccagaggacctgatgaattaacacagctactcacctagcctttctatgactcagtttcctaacctgttaaacagagagactataacctaccttgtcttgtgattatgtgacctaaatacagatggaggagggtggcagcatcattccatatactacctgctagttgagattattttgttattctttggatcaaaaagaaatacaacagaagctattatcttttcttaccctgctccagtgagacaccttgaccccctccttgagttatgcaccccctactttgaaggccactagtttgcttgcattcagtccccatttctccacttatccttcaagagcctctctgccctgcacccacctccctgtacctgcccaatctctccaaggcactctgct

SEQ ID NO: 49268 - DNA, 1036 bp, Homo sapiens
cacccgggcgtctaggcgggtctgtgcgccgcccgggcgaggatgcggctgttccggtggctgctgaagcagccggtgcccaagcagatcgagcgctactcgcgcttttcgccgtcgccgctctccatcaaacaattcctggacttcggtgagtacggggccaagggtccccatgggcccggggccgccgccattcgggctgccaccccggatctccgcagcttcggggtaaagtctgtgggaaccgcaggcggggctagggaatatccggggggctctcctggggctcggatttcggggcgcggaggggcagggcctggccccctcgcacccagcctgggacttacccggagacacagaaacggcgtctcattgcaggaccctcatcgcaggcgagactccccaaacctgcggtcgttagcttcaaatctgcttgacacaaacctcacagcccttaaaacttcagaacgagatgtgggtggctttttaatgtttttatttttagaattttttttttttggttgggtaagaactgtttagaaataccttgaggttgaataaattatgcaatggcattttgttccttttctgctctaaggtgttgctgtgtggctggagtggcaggactcgaactgttgtcttcatcaggttatgttaaatcagttagaggcctggcctgcagacgccttagatgcttgggaagagcggacgtctgggatcctagcatcagagcagggtctaatacaactctggctttagtgccagcacctttcgtttctcttctccattggtgtcccacccacattctccctgtccggtgggctggtgggcggctttcacggattgaggtgggaccaaagaagattcgggttcccagcctgcctcaggcctagctgagatgggaatagattccaccaccttctgttaactgaatcatgtttccccagaaaacgaaggagctggttgtgaaacacctaaaagtaaaacgcatgcattgaggtatcagaatggaactcagcatccctggaggaaaatc

SEQ ID NO: 49269 - DNA, 1042 bp, Homo sapiens
caggagtttgaggccagccctgggcaacatagtgagatcctgtctctaaaaaaaataataataataaataaataagattagccaggagtggtggtatcgcacacctggggtcttagctactcaggaggctgagacaggaggatggcttgagcccagattgaagctgcagtgagctgtgtttctgccactgcactccagcctgggggatgtacatgtataggtaaatacatatataaattttattgtgtataattaaggtatacaacatgatgttatgggatacatatagttaaaaggttactacagtgaaattaacatatctatcatctcacatagttacccttttttatttttgtggcaaggtcagctaaaatctactcatttagcatgaatcccatatacagtacaattttattatctattatatattcttcatgttgtgcattagatctctagaccttaaacatttacagaagtagagagaatagaatgatgaactcctgggtttgttttattgatatccatttgctatttgtctgtagatgttgtatgtgtggtctgttagattttctgatcaaagtcatgcttgtttcaaaaagataaatttttgttttcaaaaagataaatttttttcttttcctatgctaagactaatttatcttttgaattatctggttcttaaagatttggtagaacttcatatgaaagtgtttaagcctgtatgttttggggagttttgctctctgatagctttctctattctgtgttattgatctctgtagattttctgtctcttctagagtccattttgatatatttttcttgaaaattatcctacttggctaggcgcggtggctcatgcctgtaatcccagcactttgggaggccaaggcaggtggatcacatggggttgggagtttgagaccagcctggccaacatggtgaaacctcgtctctactaaaaatacaaacattagctgggcatagtggtgggtgcctgtaatcccagctactggggaggctgaggtaggagaattgcttg

SEQ ID NO: 49270 - DNA, 1031 bp, Homo sapiens
tttttggcctggattcgtccttatttgacattgagatctagttccctattttcttgtttacatttcctgggatagcattgccatccttttattttcagtttttctgaattacttcgctctaaatatgtctctaaatgtagtgtaaagttgggttttgctttgtgaatcagtctttttcatgtggtaagtttaacctatttatacttactggtatgatagatctgtcatctgtaatgataagcatttgtaattttctgttgctttctgtttttaatacctcagttttcctatgttatatatttgctttgttttgccatatttattttaataaataactaggcttgaatttttggttctagtggttatctttatagttattactttatttctatagacctttgtcccatatgggtcaccacttgtcagccaggagacctttgagcacttgaaatgtggctagtgtggccgaaaaactgaattgacttaatttaaatttaaaatggatacttgatgcagttaatttttacatctgtgtagaataacttggatatggaatccactttatcacctgtaaattttaggaaatctctttataggtcaattatttctgatagaaatttagcctctgaattgagatgtgctttcagtataaaatacacactggatttcaaagacttaatataaaaatagtaaaatatcagtacatcttatattgattgcatgttgaaatggtaatattttagatatgttgggttaaatggaatattatcaaaaactttatttcttttttatgttaatgtggctactaggaaattttaaattatatatatggcttacatatttctttctttcttttttttttttttttttttttttttgtgagacggagtttttgctcatgttgcccaggctggagtgcaatggtgcgatctgggctcaccgcaacctccgcctcccaggttcaagtgattctcctgcctcagcctcccaagtagctgggattacaggcatgcgcctacatgcccagctaa

SEQ ID NO: 49271 - DNA, 1055 bp, Homo sapiens
agttaacttgattattagtttgattgtttacctactgatttgcaatgtcactttctcaatatgctcgatttttatatatacatactcactcatgggcctggtcctaaactttttatttagttccattgactgacttgtcttataccattcttaatgtattttcccatatgcatatttacaataagatgccagatacttgaatagtttaatttcctgtgttctgtctgcatttcatcactgtattttactgctgcgagatatttatttccaaattttactcttaaactgtatgagacactttaggaggctgaggtgggcggatcacgaggtcaggagttcaagaccagcctggccaatatggtgaaatcctgtctctactaaaaatacaaaaattagccaggcgtggtggcgtacacctgtagtctcagctactcgggaggctgaggcagaagaattgcttgaacccgcgaggtggaggttgcagtgagccgagatcacaccactgcactccagcctgggtgacagagtgagactccgtcaaaagaacaaacaaacaaaacccaaaaaacagtgtgacattatttctttattcatggaagctattgctttgagattgctttaatcagtccttggagattttgtggggattgtcctcatgttctcagaagaagtactgatatgttctgcaattctttattcaacttttatagaacctgtgttatatgcaatcacttatccaaaaagtctggattcctaaaagggtatttgagcattttttttctgtactagaaccttttactttttgcacttctgaaagaagggtttctgtagaaaaaaagtttcaagcaaaaacttggctcatactttagtttcttgtgggtggttccttgttctatgtagtaagaataatgtctctacttataaaaataccagcagacaactagtctggggacagagctgggaagtctgtgcatcagcccatgagatattaagactgaccacgttttgtttccctctcacacagctttctacaagttctgattaaagtcagaaat

SEQ ID NO: 49272 - DNA, 1732 bp, Homo sapiens
gtagaacattttgtttttttctttctttttttttttttttttttttttttttgagacagagtctcgctctgtcgcccaggctggagtgcagtggtacgatctcagctcaccgcaagctctgtccttcgagttcaagtgattctcctgcctcagcctcctgagtagctgggactacaggcgcatgccaccacgcccagctaatttttgtatttttaatagagacggggtttcaccatgttggccaggatggtctcgaactcctgaccttgtgatccacctgccttggcctcccaaagtgctgggattacaggcgtgagctaccacacctggcctgtagaacattttcatcactccagaaagaaaccctggacctgttagcagtcactcccttctacccttctctttagccctagacaaccactaatctactttctgactctgtatagattttcctattatagacatttcatataaacaaaacaatacaatatgtggtctttggtaactggcttctttcactcagcataacattttcaagggtcattgatgtcatagcatctttcagtactttattcctttttatggctgaaaaatattccattgtatgaatataacacattttatttttctcttcatgttagttgggtgatctcagacttgattaagtaacctctttggggctcagattcttcatctgtaaaatgatgctcttggtaattcacctatattgtagagttaaatgagttcatatttgtagaacccctaaagcaatgctagtacacagtaaaggctgtagacaggtttactagcagcagacagtccttgggtgtcagacatgtcatttggcttcccatgtacgccattgattatataataggttggtgcctttattttgtttctggcataaattataaaatattttttaaagtcatttcaggcttttataagacaattggaaatttgaacactggatatttgacattaaaaatatgttaactttttaggtgtgatattggtatctggtcttgtttttataaaggagtgctagctttgagagaggtatttaaaaatatttacacatgatatgaaatgatgtgagatttgcttcaaaattatacacagggaggggagtgaaaaggactgggcatttgttgaaaattcttgaggctgttgatgggcacatgggctcattatactatgctctgtacttgggtatgtgtttggaattcttcacggtaaatgtatgagtctgttctcatgttgctataaagaactacctgaaactgggtaatttatgaagaaaagaggtttgattgactcacagttctgcaggctgtacaagaggcatggcttgggagtcctcaggaaacttacaatcatggcagaagggtgaaggggaagtaagcacgtcttcacttgatggcaggagagagacagcgaaggggaatgtgctacagacttttaaacaaccagatctcgtgggaactcactatcatgagaacagcaaggggaaaatctgcccccatgatccaatcacctcccacaaggccccaccgccaacactcaggatcactattcaacatgagatttgggtgagggtgcagagccaaaccgtatcaatgaagttttaaaaacacttgttttcatcatcttattgtttctgcacaaataaagtctttcactaatttttagggagcttttaaccaagaaccagtacaactagataagtagc

SEQ ID NO: 49273 - DNA, 1089 bp, Homo sapiens
cttggaagtttgtgttcagctttgtgctttcacgtcactaggtggagatgtagcattgtttggcggcataggctaagcaagaggagtgagtcttgatttctcttcttttgacaaaagtactttacagatatttgataaggtttattatagcctaggaaaacacttgtaaatttagtacaattcaaaatttttaacttttttttcaggattgaagttcaatcctacttaagtgtctattttcatactgatcaactcttttaaacattttttttctcctcttactgctgtttcctttttgctgtccctcattatttcaccttgtctgagttattttaatgtctctatctttggttctttatagagatttaattctaaaagtttagtaaaggaatcagaattcttactctgaggtcaaataatagataattaatttggtagcaatatgaagtcaatgaactaaaatttatagtctgaacataccctaatcttatctttgtattattttaggttaataatgtcaatttttaacattaacattctgtagggcttacttttccccctttgcttccttccttctttctctcacctcttgaatattaaacaagcacagtatttactttgcacggtattgatgtggggaatataaaggaaataagagcctgtcttcaaagagctgataatcctgttgagaacattccaaatgcgcccacgaagcagcagttttctactcctaggtatatacccaagataaatgaaggcatatgttcacacaaacatttggacataaaggttcatagcagcactattcataatagccaaaaagtggaaacaacccagatgtctaccagctgatgaacggataaagaaaatatggtatacttgtacaatggaatgtgatatagcaataaaaagaaatgagatcctgatacatgctgtgatgtagatgatgcttgaaaacatgctggtgaaagaagccagtcacagaagaccgcatattattccgtttatgtaaaaagtccagaatagcaaatctatagagataaagtagatccatggttgcctagggctgggtggaggggagtaactgct

SEQ ID NO: 49274 - DNA, 2256 bp, Homo sapiens
ccctttacaaatatataattctggccgggcacagtagctcacgcctgtaatcccagcactttgggaggccatggcgggtggatcacttgaggtcagaagttcaagaccagcctggacaacatggcaaaaccccgtctctattaaaaatacaaaaattagccgggcggtggtggcgggtgcctgtaatcccagctacttgggaggctgaggcacgagacaaacccaggaggcataggcagcagtgagccaagatcacgccactgcactccagcctgggcgacagagcgagactccatctcaataataaataaataaataaaagtatacaattccatattttttagtatattcacagagttgtgcagcccttcccactaactttagcatattttcatcaccccaaaaagaaacctcatagtttttagcagtcactctatatttctaaccagagttttcactgacagtaaagaaccgttttaaagtatatataagtaattaaatggtcattctatttctgtagtaattgtagaaaataattctgagatatggcaagggtttttgaattatcactataatgaaatactctaaaagtcctggtcaaaacagaggaggttgtactcacaaactcactatggatattctcattattttctttgtagagacaagatcaagactaatagaactttctagaggactgaatgctgtggtcctctctgtgaagaaagattgccttctgcaagtcaaacagagagaactgctttctcccacctgctctgagcgtggcatcacagttattcctagtgcttaaatgtgtattttctctctaccacctggactttcccaaagagtttttcctgtagctactccagatcttccactaaagtagtaactttttaatgacatcttgctgtggtgtgattgatgcctgtcaccgaagagcacagagcctccttacagctcttgtgccctcgtactctccatcttgttatcatagcatctgatgtcttcagtccttccaggattctgtgcgcctttcccattccagatacagcagatcgtactgttgctccttgtgaccaaataccatatttgtcccaaacctccacctagggccctgggaccctgaaagtggaagacatcaggtggccatgccctgatgatttagtcccagagccctccgtctctcccgtgcctccctccgccactctatgatttagacttttgccttcttccatctgatcggattctcattgtgagatgtggtgactttcatgttagatcttcttcattgatgccttggttttattttaaaattcatttgtatatgtctgttgattaaagcattcgaaatgttatcttagaatttttcacccaactgcttggtttcaaagatcttaagtgaaaaactgcctcctggtcaataccaaatttgtacagagtgtgaagtggagtttttatgcttctgtcaaacttccatccatctaatactgtacctgtgtcatattttattcctttgtagtcttctaaggaattggaagtttctgtatgatgcgctttactagttgtaaaatagactatcagagggaaaaggcctctctagtttatttttgaaaaatgctccaggtcttaataattttcattttcattcatcttagttttagaattgtcacctcagtctgattttcacaatcctttttgctaaaagttggaagtgggaattagcagacgatttgggataaggaaagaggaatgatgttatatttacccttaggaatagaagtgaccgaagaatccggattgaaaccagcatcctatatacagctccacaggatgtgcttctcttcatggtaattttccatatatatcatctactttgatttctgccccgttttaatgtccatataaatgtttcagtccaatttgtaagtgttgagtccactgatgtagaagttctgacttgtaaaccattcatcctgctttagtcatatgatagtaccgatgcaattagctcctctcccaccaccgtgggggatttctccctgagatgaggtgtgctttgaccagctgcatgtggcttgattgcattcctgtttctcttagttccactggatcttgttttcttttatttcgttatattacctgagctcagggtagttccgttcatctttagaaagagctcatctcttccatccttagaaggatctcatcagagaactcatatgtaatcaatcaggtaaaagaaatactgatgtactt

SEQ ID NO: 49275 - DNA, 1053 bp, Homo sapiens
taaatgagataaattgataaatgatgtaaagaaaattagttgggcgatggccaggggaggcctgtctgaggaaatgaccactgggctgagatttgaggtatttgcagagctggtgaaagggcatttcagcttaacgagccaagtactagcaaaggcctagagagaggaaggaggaggcctgtgtggttgtagcatagtaatcaagtgacaagattggtataaaatgaagctggagataaagacaaaggccagataatgtaggactttgaaagcctcgttaaggagtttgaatcttctaagagcaatggggtggcattggagggttttaagtacagggggtggtggtcacgtaattgggtttacattttaacaggaacagtggtttgtgtagagaataagcactgtggtgcatgtgtgcgtgtgcacacacacgtggagggatgggctggtgtagggtaatggggaagtgtggaagccctggagatcagtcaatccagggcagggctgctagttacttggaccctggtggctggagaggagagaagtaaaggcatttgacatgtcttttgacacaaacttgttaatggattggatgggggaggtgacagaaaggaggaatcaaggatgatttctaggtcatcttaatgagctaatactgtgaattcttgactcacaaaaagcccggaggctgttcggtattcttttgtgcctctttgagcccgtcttcattgtgggactgtgcattgcaagatctgtcagattaatgttaaatacagtatgcactcttaaacagagttgtctttatttagatcctttttggatctgtggtacatgcaaatagtgtatttttcaaagcggtttcctggaggctgtatctagtgaaaagagagggagtacctagatgtcagcaaagcaagcgtgtgagtaaattgaaggccacatttaccttaaagataaccaggcattgactttaattggaaaaatgttaatgatctctggcaggggtgggggcggtcagaagcattaatatgcttcagcttatcaaatatatat

SEQ ID NO: 49276 - DNA, 1033 bp, Homo sapiens
ctggtgctggagaaggcctcagagatcatctagtctagttatgcacttaagaaactgaggctctgaaagatataatagctctttagtggtagaagcttgggcttctcaccctcagtccactctgctgttctggttccgtggtacttctcaagttgtgttctctcctatggcacatcttctctgttattgatgccaacgggttaaataagatagcttaaaaaaactcctttaatctcagagtgttgaacactttcattgtgatagcaggtaatgatcactgagctttggtgaaatcaatgctgctaataaaaatgaagtactccaaaagaccctgttattgtttctcactttctaacagattctaagtaagtcagttgttgctgaatgctccataattatgaaaagaatcttactctttgcatatgggaagatatcctgtcttcattatgactttttcaaggttgaataatcctgactgcacctggtttcagctagtaactttggggggaatgtgatctttgtttaccatgatctttgttgtgtcaaatgaggcataaacagtgtcaaatgtgttgcatgaagtgtgatattagtttgacagtaaaatgagcttatttgaatctttgaatccaatattagggtctttatttttctttgcatagcattttgtttttccatctttaactgttgtgaggatgacttttaattttctgagttactgtgattttttttctttcttaatcttcccatagtccttccttccctctccctccccatccaccctccgttaccccctcaagctgaaagtctcacaactcttgtaagaattttaatcatctgcagaaatgaaaattcttagatcgtcttatttctaccaggatgtgtgaaaaaaggagtcactgatgagtagtctttcaaactggggtaattgaccttgtgaacagtagcctttgcatgtaccagaattttcttagtgtctcagataagtggctgtgttgagtggctttgttgattactgctgtctaattattca

SEQ ID NO: 49277 - DNA, 1051 bp, Homo sapiens
gttggagtgcagtggtgcgatcttggctcactgcaacctccacctcctgggtttaagcaattctcctgcctcagcctcctgagtagctgggattacaggcacccgccacaatgcccagctaattttttttgtatttttagtagagctggagtttcaccatgttggccaggctggtcttgaactccagacctcaagtgatccgcccgcctcggcctcccaaagtgctgggataacaggcgtgagccaccgtgcccagccgaatgacttctttatgcctgtttcttcatctgagaaatagggccctatttcaagagttgccggaagggttaaatccattaattcatattagatgatgagagcagtccttgccagatagccaacactcagtaaatataagctataattataatgctaattattaatctagcaagatggagttgcttaatatcaaatagtagcaaatcatttaatgcattaacattgtaaaaaattttaaatttttattgcccctcttgcatgcaaatatttctgagttctgtagtgtccaagatgagtccttttagcattttgacactggttgttttagttccaattgaaagaggaaagggtacctttttggcttcatttacctttgtgttccataaggattcttgatgattaaatacaagagcatgtattgtaatactggttagtttgtgaagtttttgtcttaaggattttttaaaatatctacttacccagccagtggaaaagaactatgcttttgagatacctgatgttccagaaaaatctgagtacttggaagttaaatactcggtaagtcaaacaaagaaaattactgggttttgcttgagaatgacatttttctgtttttgaactttcaactgactttcagttacgagtattggcagggcttctcaagcccacagttcattgaggtggatttatagtaatgaataattgaaatggataaaattaatttaagtatatagactacaggttacactgcctttctctgcttttgagtatgcatctttaaataaataagttg

SEQ ID NO: 49278 - DNA, 2430 bp, Homo sapiens
ttactaacagcttgatttgaatttccttattttttctccagctattggatcagtaacttgtttttcaaaaattgttttcaagaatagtgcatattgttaaagagggttttgtttttttttgttttttttttttttgccatggaaactaagttttattgggttggttgcctcctattcagctggttcatttttttttttctaggagaagtctggagtctatttgacatcttttttttgtttcaatggttgctctactgaggttgagtagttttttcctgggtcaaaattagactttattttctgatgtcattctaatagcctatcatagaagcttgatcaaagttttctgtgtgatgaggcaagatgccaaggaataaatatttacctatttgggaggagttatagtaataagaattggagttgggttgtgctatgcataaaattcaatggatgaaacaattccaccaagttctgcatatgtgttttatgagtcagtctccaaggaggattctgatatattccatgttgagagcttggccagttacctaagcattttgctgttttttaaaaaagggaataataccattgacctattatatttcctgggatctttttcagcccagaagcagagattaacttggcgagcctctcgtctggttttcttgggtgttaggaaagtaggactaaaacatgcagagaagggagtatgagatatgattgttgtgaagttttcccccttaagtgggtggaacacatggaacaaaatggtgatgagaatagcctggaaaatatgtagaagagagcaatcatgagttcatttcaacacgcatttattcacttcctctatgtacgtcactatgtgaacagctgttgtgtatggtaaggaacttacagtgtgtaataggggaagctttggtcaattttaccttttcagaaggctgaactgagtttctccgctgtatgttgcttgcggcattggtggtggtgggatttcctttgaggaagactgctaaaatcttccattctggcttcagtggatagatagcaaatgtttcatcaaagcagttttaacaactgcagggacttagggttctgtgcttgaccattcttttgaggtcatcaacatgaccagtggaagtatttgatgaccctcctaattctttagggttggggggaatatatttaagacagtttcgtttggaaacatgtactatatgattacctgaaattagactaagatgggtgttggaatctttattttttttcctttttacagttgtgtctaaaccaaaggactgtatttttccatatgctttcaaagaagtcattgagaaaaaggtaaagtgctcattatatgaagcatctgtttgtttggagcgagaaagaaaaggggggtggtatggactagtagaaaaaaggtgttttatattttattagattcattcctgccagattggactatgacatcgacccattaaaatgtattagacatacacctagaagcattatttaacaatgtttaaatgttttactacctgaaaataatgggattctgtactgtattggtggttggataggctcaaacccccctccaatagcttaattagaagcttctctaaaatgcatgatcatatgattcctgttttgggaaggtgttgggtagagtccctccccagcttgagggaagctaaatgaagttgggaatactgtggacgttaaagagccatgtattgacaaagttgacatggggttggccaaaatggatcagtgatctctaaattccagcgtgctccatgaagaagttttcatgggtccttaataaaatggggaggagtgggaagtagtataatgtagtgaatttttcacaaaggtaaatgtattcaattaaaagaattttcttttatggattgtatgttgtttcttttacgaagtgatgatattgatacgtttttaggtttgttttgttttttaatgtcttcatctgacaaaagtaagcaaccttgtcaggttctacttattttatttaattggcttgagaagtccagtagttgggaggtactgttagattaggctattatttgtgaagtgccgtgaattacctaaccaggtaaaatgacctaggaaaattccattagagtcaaaccgactttttttttgagacggagtcccgctttgttgcccaggctggagtgcattggcgtgatattggctcactgcagcctccactccctagttcaagggattctcgtgcctcagcctcctgagtatctgggattacaggctcgtggcaccacgcccagctaatttttgtatttttagtagagacagggtttcaccatattgaccaggatggtctcaagctcctgacctcaagtgattcacccgcctcagcctcccaaagtgctgggattacaggtgtgagccactgcg

SEQ ID NO: 49279 - DNA, 2050 bp, Homo sapiens
agtaaacatgtacaaatggagttatcgccaaaatattgacttagtagttgtatagtggtcacaggagtttattaattcccttggtttggtgcaaatcacaaaactaagtattttaattttatgagttcagtggatctctatgacatattcctttgaaaactcagggctcggaattgatttttctcttgacgatccagtatatccccactagatagcttgagctaataattcattgagctattttttgccccaattcctgagagtcataaggcaacattttgttttatatatcctctggcctttctagtttgtagaatatggaattccttcatttgtcttttttctaggttaatggatcaatcatattgtttttgttttttcagaggaatgtaggctataaatgcctatattttggatgtgatatgggtaatttgggtacattaaagtcttgcaaaagtgtttgccgtattcttccctacattcatttttactcttggataccttatctggcaactgtatagctagcatcctgagttcctgtggataggaagcgatatctctgcacccacttcccttatgatatttcaagacctatctttaaagttccaaaaagattctgtccacagtgttggactgtgacattctgtctcagcaccaggccctcagtcagcctccaataacaacagtttcttggaccccaaggagatgccatgaagcctgggaaacctggcctggcttcaggtgttagagccaagtctatgcgtgagaaatctagatgtaagatggaattctgacatgaatatgggtccctgattctaggtattataatttgtaagtgagacttcctcaaggcctttgggtcttctaatttaataagcaaaactgctataaatatctagtggtaaaatacatataaaattaactatgttgaccattttatagtatacagttcagtggtattaactacactcataatgttatacaaccatcaccacgatccatctctgtaactcttttcattttgtaaaactgaaacgctgtactcattaacttcccattccccggcccctggcaaccaccattctgctttttgtttctatgattttgactactctaagtagtggtatatatttttaattaagtttaataacaagtatatttattgatgtgaattattttaaacttcatctaatttttgataaacataggaaagtgaatcatgttcacgtgttggaaattacggaaatgaaaaatctagttgcatttttgagataatttctactctatatagttttgtttctttgtttttaacaagtttcttatttgaactatttagtggtattatatatttatcttgttgcatatcaattatgagtctaaatcagtagtgtttgaactcaatttttaaaaagaagctaaatgcagttcctgagttttcgaagaagtcttacataaactgtcatacaacaccaggcaggttctgtgtttttaaggaagcaaaatggaattatttgaatttagcttttaccgatcatatgaaaagtatgggacattaaatttgcattttcctccgagaccgtaaggcatgagctgcaaattaaaagatatcatatgagccttgcatcaattaggatgaaataaagtttattccagcaatctgcttagcagccttgttaatgtcaaggctaatgagtgctgctgatgaataaattcctgaagaagaaaggacccccaatcggaggtaagtgcatgatgtcttcaattagagactagaaaaagaaagggcaaagaaattctgtgcgtatgaagataaatcctctaatttgcatttgttataacattatcagctgccttctttttctgactagggtcataatatttatgggtttgaactggaagtactactgcagagaattaatgtgtgcaaagctcctcactggtccaagataggtcgactgaagcgatccaacatgccaaagcttggggtaataataattttcaaaatcttatttatctatttattttaatttgggatagctaccaaggaaca

SEQ ID NO: 49280 - DNA, 1005 bp, Homo sapiens
tgtaatcccagcactttgggaggccgaggcgggtggatcatgaggtcaggagatcgggaccatcctggctaacaaggtgaaaccccgtctctactaaaaatacaaaaaattagccgggcgcggtggcgggcgcctgtagtcccagctactggggaggctgaggcaggagaatggcgtgaacccgggaagcggagcttgcagtgagccgagattgcgccactgcagtccgcagtccggcctgggcgacagagcgagactccgtctcaaaaaaaaaaaaaaaaaaaaaaaaaaagcctctggtagtttttaaaatcattggttagaatctagggatagtgaacaaagacagcccatacatgttaccttcactttgtcattcctgaagtgatagcccttagggcaaggttgcatggttcagaaatcgttgagtgctatcatttaggaagaaaatgggaagaatgaatggaagggagttgatgttggttgtataagaacgcaatattgcttgctgatatcttgtaataaaaaaaaaaggaaaaaagaaggcaataaactaagtgctttctgtgttagttacctctcatgacaactccagttttattttatagacagtctcataggggtaacgtaacttgttctggatcatgtaagtagtaaggggaagaactgagatttgaacccaggcctgggtgactcttaaagccaatgtgtacttttcattctgcctgcttgcttcatgtatggaggttttggcagtttttgtatgaagcaccttcttcctaaacctgatactgctcagtgcttgaaatcttattttacttaaagcttataaataaaatggacatgttgcctcatcagataagttaggaatctgtacctttttcgtaatgttctctagaggattctgccactacagatcaaagttggggccactgctcttgcttcttttcttattcatatctttaaggtggtagagttgttattagcacttcatctgaacacttg

SEQ ID NO: 49281 - DNA, 1045 bp, Homo sapiens
acaataaccaccaaatttaactttaataggagaatatctttttccctattgtcatgaatggcaaagatgttttgtggtacacagagctagaaataatttttttttctttttttcttttttttttttggagacagagttttactctgttgcccgggctggagtgcagtggtgcgatctctactcactgcaaccttcacctcttgggttcaagcgattctcctgccttagcctcctgagtagctaggactacaggtgtgtgccagcatacccagctaatttttttgtatatataaaaaaacatttcaacccttcccaagtgtacagttcagcagtagtgttaagaatattcacattgctgtgaaggaattaatgtgaattttatctaataagttagttctgagtaggaaacatttttgacaaaagtgattttgttattagttataatgaaatggagcagtagtacttggtgttatgtaggtctgggtttgaattcagtgtgatcttgggctgcctgtttaacctctgtaagcctcagtttcttctgtaaaatagagttaagagtaatatctaccacacagggatttaaggataaattagtatagtgctggacacagaataaactatcctatatgtttgcaattattattgtcttaatagtggacatttatttttattcagtttcttctcaaggtgaagataactctttgtaaatgtcctacagaaatatagtagctttctgttcttcctttgcaagtaaaaagggtgggtcgttccactactgacatttatatatatgtgtctcttgtttgattttagctcagtttttgtacaggtaaatgtgccgtccattttattttttgaagctgttgtaaaagaataaattactctaccaggcgcggtggctcacgcctgtaatttcagcactttgggaggctgaggcaggcagatcacgaggtcaggagatcgagaccgtcctggccaacatggtgaagccccatctctactaaaatataaaaaattagccgagcacggtgttgcgcgcctg

SEQ ID NO: 49282 - DNA, 1884 bp, Homo sapiens
aggcatttaaataaggtttcattaattcgtgtgtgtgtgtatttattattgaacatctactgcatgccaggcattgttctaggttctcaggatagagtgtcaagcaagacctaaacgatccctgttatgaggcttacattctacccagaatgggaggggtttggggttggggacgacatgggttgggaatgtggggtggtgagagggtggtttgggaaaacagactttaaataagtaaataaacatgtataagaaataacagaaaatatgatagaagtaaatgctctgtagataattaaaacaggatggtgggctagagaatgtttggatggctggtttagattggtcagggaaggcttctttgaggaggtgacatgaatgagaatgacttaagagagtttttttttgctgatggattagcttggagtgtgagtgaaaggtagaaatcaggaggataactagtagagccttttactaagatggaggaaactgggaaagaaggattaagaattctgtcatggatgtgttgcctttggcatgagtaatagaattccagacataataaggaggccattggatgtatagatccagaattccaggaatacatcaagacaggagttatggattgagagttattggctttaataagatgggccagataccaaatagaatttaggtacatcactttatggacactgtaagcttcaactgttttagtactatgtgcatgggtttttcttaatttgtaaaagaatagttacgctgaatattaaattccatttaactccctgtctgtgggtttaagactatttagccttaaaggaggtaggtagtggtcatgggaaaaatgcttatattggggggtctgtactctgaatgctctagagcagtggttggcaaatgatggccatcggggcaaatgcagcctgccatctatttttgtaaataatgttctattggaacagagctaaactcatttatttatgtatcatctgtggctgcttttgtattacgagagcagagctgagtagaaaagatggaggctcacatggcccgcaaagcctgatatatttactctctggtcttttttagaaaaaaagtttgctgacctctgctttagagtttagatcaactctgtccagtagaactttatgatgatgaaaacgttctccatctgcactatccagtgctgtagtctctagccacaagtggccagtgagcacttggtatctggctggtgccaactagctgaggaactggatttttagattgctttaattataattaaaatgaatttaaacttaaatagacaaatgtagctagtggctactgtgttggacagtgcagatctagctggtatatgaaataaacgtcaggatgttcagaatcactcttctgttggcagccgtatctcaaagatttgtcttagggcacagtgaggaagggcaaaacatgtattgaacgccagtgatgtgatagaagctttcctatgcattatttcactgaaattacacaagaatcctttgaaatagataataacgttttcattttttagatgaggaagttaaaactcaaggagataaagtataacaagtggttattttgaatgtaaatccttttagtacagtagggttgtctcttccatctcaagatgtcatttatgactctggttctgctttatattcgacctcttattacaggaagatcatgatttttggtacccatctcaagacacaggtctctttttacatgagaaagatataggtgttttaggggctagttgaagtgagggaagggaaggatgctttcagtttcttaagctaagtttactttaaaattatttaaattttatttctttacaagtatccagtggcttctgatgga

SEQ ID NO: 49283 - DNA, 2426 bp, Homo sapiens
tctccctcagcctcccgagtagctgggactacactacaggcgcccaccaccatgcccagctaattttttgtatttttagtagagacggggtttcactgtgttagccaggatggtctcgatctcctgacctccggatccacctgcctcggcctcccaaagtgctgggattacaggcatgagccaccacgccaggcctattttattttattttattttattttattttattttattttattttattttaagaaacagggtctcactttcttgcccaggctggagagcagtggtgtgatcatagttcactgcagcattgaattcctggactcagacaatcttctcccctcagcctccctagtagctaggactacaggcatatgccaccatccttggcaaatttatttttattttttgtagagatggagtcttggtgtattgcccaggctggtctccaactcctagcctcgagggatcctctcaccttggcctcccaaagctgtaggattatagataggagccactgtgcctggctttattggggaatttaaaactgactatgtacttataagtatactcattgcataactttagtttaacgggaatatttgtcttgatggaataattagtacttactgacattggtattattttatttctctactctcttatttctgtgtccttgagaaagccatttttggtctggattttttattgcattttaaaatgtatgctctgatgtttaggtatagagtccatgcattttcattttcctacctgataggctgaaataagctttgccagcctgcttgccagttggtcgtagactgcctggcttttagttgtgttggagctggaatttgtgcacattaaaagtgtatccaaatcattaatgcaaacattacaatcttggcaagcctttctgggattttcttggtgatgtggtagcacctatcaggatcccttgggaaatggcactaggacagagggctctagcctttgttgatgttggtgatgaaagagaatgagtgactatgaagaattttacaattaaatattaagagaagtctttcatctttacctgtaaataaccaaaaatttcacttttgcaatctttttctttctttctttctttttttttttgtggggggcaggggggcagagtttcactcttgttgcctaggctggagtgcaatggcgtgatctcggctcaccacaacctccacctcccgggttcaagcgattctcctgcctcagcctcccaagtagctgggattacaggcacgtgccaccacactcggctaattttgtatttttaatagagacggggtttctccgtggtcaggctggtcttgaactcctgacctcaggtgatccgcccacttcggcctcccaaagtgctgggactacaggcatgagccaccgcaccccgctgtgatctcttaatagcctagtttttctttaaaaaagtaaaagcaataaaatattatagagacaactaaagaccatttcctccccatcctctctcatttctttttctttttcggaggtaacttgcccagagttggttttgtcattcttgcccatgggttgttcttttttgcttctgcaacgtgtatatacatgtggtgtgttaaaagtttttaccatgtatgtgtcatgctatacatattcttttgcagtttggaaaagcaggagaaaaactctactctgtatgccacattttaagtatattcatcttgatacatttttagatttgattcattcatgttaactattgtataatatttcgatgaatatagcacagtgtattttttaattctgccatcatccatatctttaggtttccaagttttcatttgtcttaattatttgctgttacaaacagtactgaagtagacaataccacctttgtgagagtttctctggtatatttctaggagtggaatttgtacaacatccacagcagtatatgaggctttattgataagagcagccatttaatttatcacagcaagctcatttttaaaaatcaagtagctaaattcatatgtctggctggagccacaatacgtaactccctcagtcacagtgtcagaggctaatcttaagagaattggaaaggattttgatatacaattttgcttctttgaatttttgtttagttctctgttgaggcattttaaacttactatatatatacttagacttgttgcataatccttgatattccacatccttgcagcacttattatctgagtttttattttttggtcagtctcatgggtatgaaagggtatctcattgtgattttaatttacattttaaaattattagttaagttgggcatcttttcatgtgtttattaactcttccattttcttgtctgaatagaacatagatgttctattttgttggattgtatgtct

SEQ ID NO: 49284 - DNA, 1031 bp, Homo sapiens
cattctttcaaaaattgatgaaagtaatgttggtactttcaaataaaggtgaaaaaaggaagctgtaatttggaaacaccccatggaagcccagtccagattataacttagactttcagtaatttgagagaaatgcgatgataaaaattcaagtatatagaataatttatgcttatatatgcttgcattataataaacaatatatacttatatgaaaaatatatggtaagcatataatatatatgttatatataatctattataacagtgttgcatttatagagattaaataagtgggttacacttaggcttgattttaattactctatatgcttgaaaatactgagtatttctttcaaaatggctaagatgttagacttgagacaaattcagaataaccttattcttctttcttaatagttggaaactagcatatctctaagatgcatggatattggcctctgtgtgccttttaggtttttggacattgaaaggtacaggtttaggaggacacaagccagttgatgtaagagacagctgggaagagaaagactaggtcaaatcttgcctggggtctgtgagtgtaagagaagaaagctacatcaaggaggccatttagccatcttttgtttatcccctttgcatttgctgaagttttttgttttttgtttttttgtttttttgtttttgagacggagtctcgcactgtctcgctggagtgcagcatcgtgatcttggctcactgcaagctccgcctcccgggttcacaccattcttctgcctcagcctcccgagtagctgggactacaggcacccgccaccgtgcccggctaatttttttgtatttttagtagagatgaagtttcactatgttagccaggatggtctcgatctccttggcctcccaaagtgctgggattacaggcatgagccactgtgcctggcctgcatttgctgaagtttttgagtggtcaccacatcttagttttacctgtgctttaaggaatccaggtgtgggcacccgcacccct

SEQ ID NO: 49285 - DNA, 1102 bp, Homo sapiens
tgaggcagagtctcgctctgtcgcccaggctggagtacagtggcatgatcttggctcactacaatctctgcctcccgggttcaagtgactttcctgcctcagcctcccaagtagctgggactacaggtgtgcgccaccactcttggctaatttttgtatttttagtagagttggggtttcaccatgttggccaggctggtctagaactcctaacctcaaatgatccacccacctcagcctcccgaagtgctgggattacaggcatgagccaccacgcccggccagatgttaataggttttatatgttgggggagattggctcacatttccattttgagaagatcactttgcctcagtgagttggaggggccagagtggatgaggggaaactgattagcaggctattattagaatagaattccaggcaagtgatggtggtagcttgactagtgtgatggcagtcagtggagggaggaggacccagatatgagagagatttaagagaaaaagtatcagtaaaactgggtggtatattggatgtggggcttaggatggggaaggtatcaaggtcaactcttggctgacttgtgtaggaagatggagtacctttcactgagatgaagagcactggaagatgaccaggtttggggcaggaggagggaaagatgaacagtttgatcgtagacatgttaattttgaggttgcagaatataaactggggagtcattggtttatagtcattgttaaatgaagccatggacatggatgagattactttgggagagaggagagagtggaaagagaagtgggtgtaggactcagtcttaaggaaccccagcatttaatgacttggtagaggaggacaggctttaaaaagtagaccgtgaaagagcagccagagaatgagaagaggtgggaaaacatggtgttgtgaaaccagtgaagagcatttcagggaagtagtaggcaactgtcaggaagagacactgatgatagttttgaaaaatttccattgaattttgggatatggaggtgatcttttactttagttggtgctgtttgagtgcagtaatggtggtcagactgatttgctataggaaga

SEQ ID NO: 49286 - DNA, 1734 bp, Homo sapiens
cttctaccgttctgtctgccctctcctcagagcctcttacctccaattacatttttctcttgtttaatgcttagcagtcttctctaaaaaggccagtttgtatgctatttgcccagttatttttcaagtttgtgtttttactttgccatttctcctgcttttagtgcctttgtccacctacaccactaatttctgtgtagtgtaatttctgtcagtcttcctcaaaactcactttttatgactgatttaaaactgattttcttcactctgcaacttaatgagctcagcttatgtttacatttgtttcttcttaggagcttgatattcatgagtttgcgaagtttgttcactcagttttactaaatagattcaggggccaggcatgttttttcatgtccttcagcaacatgtagtagaatgctttaaagtagtgggtacaaaatggcaaacagtatttttatgctatttaagaaatagctctttcctgtcactttcttctcattacagtcgtaaggtgcagttattactaagtcctgccagtgttacttccaaaatattcggattaatccatttctctccattgacactgccactgctctgattagtttagaccaccatcatctctggccaggatcactgcatcagcctccctgtggtgtctcccttctactcttgtcccccccaatctattctcaaccctatatttttaaggtgtaattgcatcatatcattctgctttgattcctcattgacttcctatttcagtttaccttggactccaaggtcctacgtggatcacttcacctctccttttacctcatttttgtgcctcctacctgctgctccctcacctgcacccctgctttagtccagccacatgggctaccctgttctttcagttcttcacacacatgaattctgtccctccatagggaccttgtgcatctggtttcctctgcctggaatgctccttcccaggcttggtgcagggttgtatttttctctcttcaggtctcagcttatatgtcaccttcttgtgtgtgcgtggtgttttttttgtttttttttttgtttttttttttgagacagagtcttgctctattgcccaggctgaagtgcagtggtgctcttggctcactgcaacctccacctcctgggttcaagcatttcttgtgcctcagcctcctgagtagctgggattacaggcacgcaccaccacacccagctaatttttgtattttttgtagagacagggtttcgccgtggttggccgtgctggtcttgaactcctgacctcaggttatctacctgccttggcctcccaaagtgctggaattacaggcgtgagccactgcgcctggccttatgccaccttcttgatgagacctttcctgactactctttctaaatagatccatccagcacaccgccatctctcatttttaaataaaaaattttttctcactaattttatagggtgaaatatacccatgtgccaattttccagaattaatacatgttaagattttgtcataattatttcagattttaagtaaaagagagcattacagatagttgaggttggtaatgtgtgcccttccccagtttcctcctttcctctccagaggcaactgttatgaagctgatatgtatctttcctttttccatgtttttgttacctatgaatgtgctcacttaatttatgtggatggtatcttatcatttttcagtttg

SEQ ID NO: 49287 - DNA, 1035 bp, Homo sapiens
gataaattgaatcactgtaattatatttgaagttagctattggaggaaaaaatgtagctatagttaaatactatggtaatgcctcctaatttattctttttcattttggagtatactgtttctcccctcctccactcagtttagtgtggcacatttgactgcccgccccccttaggttgggtatcagttatgaacttccagagagaattaggatctggtctcactgtctcctttgcatgtaaatagtaaataattagacatgcagttaaattggagacaataatagctgagatatattaagcatatgatcctgttagacactgttctaagcactttatatgaatagtaaacatataagcacagtccaaaaaatttttttctaactgtataaaatgtaggagtcatgttattttgaggtttatgagaaattgtaatcttcaatttctagttagtggaggtgggcgtggaggagaaaatgtttgcatttattacatgtgtagaaatgtactgaactgagaaaatctaaatggttacaggctagtcatttcttagtatcctgcctattactcatccactcccttggtaaaagctttaccctgttcctataagtgggagctgggtggaggatgggaagcaatcctcaattgagttagatctgactttgcttgattgtgtggcaagttagtatggggttttatgtcattattttatttcccttttatagttgagagaactgaagtacagaaagtataagtaacttgctcaagatcacagagctagtgaataaatggagccataattcaaatctaggcagtccaagcattcttaactgccacagtacattgcctgtgtttttgagtatttgcctgtgcaacaggcattaggagatgggagaaaatagtgttgtatcttcacagtacttggagccatttttgtttgaaaggatgtgtactgtattagtgtgtgtcatcctgggttggttagcatttgctgccactttatagattttctgagagcttcaattttccttttata

SEQ ID NO: 49288 - DNA, 2663 bp, Homo sapiens
ttaagtaaattgccaaggcctctttatttgtaagtggctaaaatgaatatggcttctcacatttgtgccactcttctgaaatacaggaaacacagacatcaacagtatttatctttgtatgcttactaaggaaaatactgtgtggtacaaccactgaaaaggctataatagcttttttgttattgcactttaacagagagctctttcttaaaattacagatttttaggaccaaattcagttcagtcgtctggcctactatgtgccaggtacagtattgaatcctggggatatgaaggtgagacagaccatggtccctggtccctgattatagtctgagttgggagtagaggtggagggaaaggaaagaaattgccctgtgaacaaattccatgccatatgactaaggtaaatttaaagaaaaaaggaaaggtaaacattgcctagagattacagaatgatgcccatgcccacagaatatctcttactgtgagatccattgattctttggtcattgccaggatttgtccagagaggtacgggatgtcgtctttacagggtgaagcccaagaggaaccatattatgttacaaacttgggggcttttcttttctagctagaggtctaaactcaggagggtaaccaagttttttgttttgttttgtttttggtacacaaagaatcttctgtttctacatccagtaaactttttgttttcttaattttaaattgtcctcaggctgtacctttccttacccccatctctgaccaagaagggtggcagggaaggggggttctaattccaactcagctactaatttaggaggtgaccgataacctctacagttccatctgtcatagtgcctttcacataactggtactcaataataagtgtttgccatgggacaacagaacttgaaatcttctgtgattaatttgtattgatttttggggggcaggaactggaagggggttagttttttttaggatgaaaagttgctgcctcacattccataacagtaacacaaattatggataaatcattaagtataaatcacaactcaagataagtgaaaaaaattttcaaatattgaagagttcttttataaattccatctcctagtgagatgcattacatctcagcccagaatgctgaaggttcttgtgattcctagcacagtgcctcatctttggtgtatgatcagtgaagaataatacaattatgaaatgactactagtaatctctgaggacttctgaggataacaggtgttctgaagtttgccaaacttggagaccaccttcccttcctagaacagatttctaggaaaagtcttcaggtctttttgatcacaatacgataggaattgtagggaggacatgaagaaacaaaagatcagtcagaatgtttcacacactctcaattctctaataaacacagtactaagcagtacctagacattgctctttgcctgaaggtgggattctttagtacctcatacagtaaaagatggtgaacctttcagtgctttttttcagggcaaaaacagcagggtcatcgagtcataactcttgtaatctgggatgcaagttatgtaaccatgtcaggattttcttgagggtttctgtccagaagatggaagacaaggagtgttggttgttttctaaacagtgaactctagaaatttgtagatgaatgaactatacaatacaattctagagaaaactgctaagcaatttttcagcactttatggcagtcaccaaggatcattattggctcacccagaacaggtactgttggtattttttttcttttagtcttaatattaggcttaaattagcacatgaaagtgctagttttaaaagttaaaagcagttgaatatcaacagtttcatgtgattcatcctaatggtttttattatttttttctggttataaaattaatacatgttcattgtagcacacttagaaaaatagaggaaaataaaattacagtctaacaatctattttatgcacttccatctttccatgcatatacatatgcacacgtataaatctgttcaccagaatattttcaaaaaacttactgtggattatagttcatttttagagactatctggctgtttaaattgaacctatcataaacatttctctgtaattagtaatttataaactaaatttttatgatttcaggagatagatgtcacgtaatttatttatcaatacccctattttaggacttttcgtattgttttcagtgttttacaattataaataaatagtgctgcaataaacatcttctacatgaatcctggtccacatctgattatttccttaaaatgagttatcaaaagaggtattttcaggttaaaagatgtgaattctgaaaacatatttctaaatttcttaccataaaggatatactaatttcttttttttaatcttttattgttacttttttatttaactttaattttaagttcatgagtacatgtgcaggtttgttatacaggtaaacttgtgtcatgggggtttgttgtatacattattttgtcatccagggattaagcctaatacttatcagttatttttcctgatcctctccgtcctccaagcctccaccctccgagaggccccagtgtgtgttgttcccctccgtctgt

SEQ ID NO: 49289 - DNA, 1022 bp, Homo sapiens
ccacgagtacatctttggaagggttgatgctgctaatccttgcccactctgccctctctgcttcagtttctttcacctgttgtgtgtcagcctgacagtggcccattcctcagcttgattcagttttacagcccagcttagtgtcccaggctgctccctcctcagcagcaatgcctagaggatgagtatatgaaccaagggcacatttttcataagcatacaagaaaatagaagattgttgcctgcaaagtgtatctcagaattgtattttaaaaaaacaagcaacagttttgaccatgccagatgtactcttgtcgctttattcggggccaagggtggactttaccttttttgctcagcagctctgggcactgggtttctctgcttgtctggtttcttgcctaagttcagcatcaatattctaatcccctgggaaggagcagttgagcccacactgttgtatatactatgtgggcttgtatacctttggctgagattatttttctgtcatgaactctgattccttgccttatgctatttaaaggtagcttcaaaataaagttagaaagctgaattgggagcccaaccaattgctttttcttttcagggttctttgctgaataatttctgacacatcaattgtgtaattgttttgtgctgctctccccatttataatatttggagcattggctttttgccacacttgtcaagggtttatgggagttagtgacacgtagtatacaaggttctttgagattctttcatgaaacttggtattatcttgaaagcaaaaggtttaactgttcatttgttagatgactagtgggattttaaacagatataatcacaccatgtcttttttttaaatgtgatgttacgtacatatgaacttttactgctcaaattttaaattatgtgtttttttttcttttttgtgtttataaaatccattattagcaaatacctcaggaaaactttagagtgaaagtcctgaaaaaattttccactccatgttttttaa

SEQ ID NO: 49290 - DNA, 1800 bp, Homo sapiens
agtagagtaagaagtagatatttgcctttggggatcttgggaagaagactgctatctatctctaatcctcatggaatccttaagtggtaggtgccaagggctaaggtgaggggggagaggtggagggagttgtttaatgggtacagagttgagctcctttctctataaagcatttaagcttttttgttgccattaattgcttctatgggctaaagaaactgaaagtgtgggcaggtaatcacttggctactaatataaagaggaagtgaaacaaaggactggcttaatggttcagggtggaaagtatacacagttaaaagtaatgttatatggtcttgtaaatagttgtgcatatatccgatgtcaataagaattagtaataccaagttaaaagaaaagcattattttaatatttgtataccttttggaaatgaaagatgggattatttaaagagcaaaaaactaaagatgttctagttggtaagtgactttatttgatgtgatttgttattcggatttacctgtgattagagtggtcatatattcttaatagtttcttcctttttgtgagacaaggtaagagcagcttggcatctaagttttggataatgtgttgctacttgattttttttttccccaagatggagtcttgctctggagtgcagtggcacgatctcggctcactgcaccctccacctcccaggttcaagcgattcttctgcctcagcctcctgagtagctgggactacaggcgcccgccaccacacctggctaatttttgtatttttagtagagacggggtttcaccatgttggccaggctggtcttgaactcctcacctcaagtgatctgcccgccttggtctcccaaagtgatgggattacaggcgtgagctgcttgcttttgagaggcatcctaaacatgttggatggcctacccttattttctgaactaaaatatgttaaaattaatttggttttgagaacttttgaaaaatcatctgactttaatctagctaatatgagtttttttccctatgctctgggcactatcctaagtattttacatacattacttaatcctcatagaaaccctgtgatattatttttccttttttacagaagaggaaagcagctatagagaggttaaattgctcacttaaggtcatagatgtaacgatggaattaggatttgaacccaggtggttggctgtgggttgacatttatcattttaactgctttgtgatgttactccatactgagcatgtaaatgttcttggcactcagcacattgtaggatttaaacaaataacatttatatctgttgagcttcttagaatgactggagatgaagtagtctgctataaaaataagataggaagccattgtactggacactactgatttagctaattgatttcaatccaggaactgattagacatttctttctttctttctttctttttttttttgagatggagtctcactcttatcacccaggctggagtgcagtggcgccatctcggctcactgcaacctctgcctcccgggttcaagcaattctcctgcctcagcttcctgagtatttaggattacaggtgcccaccatcacacccagctaatttttatatttttagtagagacggggtttcaccaccttggccaggctggtctcgagctcctgaccttgtgatccacctgcctcagcctcctaaagtgctgggattacaggcgtgggccaccgcgcccggcctagacattgatttctaaccttgaggtccatgtgtgagttccaagag

SEQ ID NO: 49291 - DNA, 1095 bp, Homo sapiens
gctaaaccccacttggtcatgtctatgaatactttatttttggatttttatttactaaaacgtttagaatttttacatgtatgtttatgaggaatattggtctgaaattttcttttcttgtaatatctttgtcagtcttggtcagactagggtaatgctgccctcacaatgtgttgagaaatattccttcctcttccattttctgggagagtttgtgtagaactggtattatttcatctttaaatgtttggagtaattcaccacagaaactatctgggcctggacttttatttgtttaaaaatttttaactacaaattcaatttgtttgacagacagtcaagttgtctgtttcttcttgagtgagctttagtataatagtttgtgtctttcaagaaatttgtcagatttattggcacgaagtttttaaataacattccctttttatccttttaatatctagaattggtaatggtgtcatctcttattgctgatgttggtaatttgtgtcttttctttttttccagcgatggtagtcaccctgaactctgtcttctggctcttcaagccagaagaaatgggcatcttgcctggtgcctttcctttttaccaattgtagacatccctccatttttggcaagtttttcgttgtgctccagtgccttcaggtagtggctttttacattgtccagaggttatcaacggtaagaggctatttttgcccagtgctgaagatggcatctctgggttttggttttgtaacattctagcaaagccagacatgctttgctgcagtgaaagtgtggaactggataattgagcagcactgtttattcattgttgcctttattggatctcatatggaataaccccactggatattagagtaaattacagagttaggaaaaggtgaaaaagagaaatgtcgggttagctcttttcaaaatattttcagtgggagaaattgttgtcactttaaaaagtgagctttttaaaaaacgaacattttgagtactgaatatgttaagcttctgaatgattttgagtgcttttgcttgtcatggggaagtttttcaagagaagatgaccttttaggc

SEQ ID NO: 49292 - DNA, 1034 bp, Homo sapiens
gattatatatgaaaggtgtacaatgtgatgatttgatatgcatatacattgtgcaatgattaccacaaccaaattaacacgtccatcactatgcatgctgtaccatacatacccagaacttgttcatcttataactgaaagttcatcccctttggccaacgtcttctcatttcttccactccccagaccctgataaccactcttctactctctgcttctttgagttcaatgtttttagattccacatataagttacatcatacagcatttgtttttctgtggctggtttatttcacttagcataatgtcctccaggttcatccatgttgttgcaaatggcaggatttccttttttatggccaaataatatattccattttgtatgtgtgtatacatcccacattttgttcaaccgtttatccctcagcggacacttaggttgtttccatatcttggccattgtgaataatgctgcagtgaacatgggcgtacagaaaaacctcttcaagataactgatttcatttcctttggatgtaattttttggggaacctccatactgttttccataatggctatcccagtttacattgccaccaatagtgtacaagggttctttttcttcacatccttgttaacatttgttgtatatagctagcctaacagatgtgaggtgatatgtcattgtggttgtgatttgcgtgtcgctgatgattagtgatgttgagtaccttttcatatacctattggccgtttctgtgtcttctttggaaaaatatctattcaggtcctttgcccatttatttttattttttatttttattttattttatttttagggacagggtctcattctgtttcctaggctggagtccagtggcacaatcatagctcactgcagcctcaaactcctggactcaagtgatcctcccacttcagcttcccaagtagctaggactgtgggtgtgcatcatcatcatcaggcttggctaatttttttttttttttttttttttttttgagacggcctcacct

SEQ ID NO: 49293 - DNA, 1047 bp, Homo sapiens
cagcctcccgagtagctgggattacaggtgtaggccaccacacccagctaatttttgtatttttagtagagatggagtttcatcatgttggccaggatggtcttgaactcctaacctcatgatccacctgcctcggcctcccaaagtgctgggattacaggcgtgagccaccacgcccggcctattgtattgttttttaaaatttatccctggaattggtttgtgtttttattttttaggaatgattatatacattgaccttgtgccacatgcttcagattttataagaagtaagctgggatgttccaagttccgtgttgcatagagttcttatccatgaaaaaatgtccaaaaagatgatttagcaaatttaggattatttcatcctaatttggtattctctatagtgggagttttagagtgtttcttgtgataatcattatagttaagatttattgaatgtttactcaaaaaagttgaatttttctactggttttgggactacttgggtgagatatgtgaaatagattcaaatattgaaatattgaggtactcttataacagaaaatatcaaagctactgccatagtttattagaaatcaggagaaagacttttttttattgttggcctgaatgagctgaagttcagagtaagactgtggtcattattcattacctcttttttttcaaacactaaaactcttgggtttctgtggacaaggctgctttttaatggcatgttctccaaacagctgttaagcacccccctccccaataccacagaccacatctgttcccactgttgattagctagagggtggagaaaagagaggctgtagcatgtgtaattaccagtaattaattcttgttgagcctcctcatttccttctattctaactacacctactcttcttcctgcctctgttgtaaattctgtttcatgttagctacttgtggaaaataatcttgatggttatacagctgttttcctaaaattttatattcacctaacagtgaggcttttatttttcttctggtggcagaatc

SEQ ID NO: 49294 - DNA, 1050 bp, Homo sapiens
gctggagtgcagtggcatgatcttggctcactgcaacctccacctcccgggttcaaatgattctcctgccccagcctcccgagtagctgggactataggtgtgtgccaccacacctggctaatttttgtatttttttagtagagatggtgtttcaccatgttggccaggttggtctcaaattcctgacctcaagtgattcgcccaccttggcgtcccaaagtgctgggattacaggcgtgaaccatcacacccggccttccctgtttaattcttcttagcatctccactaaacacaaaccaagaaaggtgatttttctctttgttagaacttcttaggaaaacttcactattctcttattccatctgttttggggttgaggagagctgttatataagaagttattgttagggtttcttgtattcctgttgtaatattctcaagctgacatatttgtgatagatcaacaaagcagtaggtattttgtaccgctacctaagcaataaaagcaagtatgtaatgctgtagtaccagagttgtggtttttcccctgcacaatatattaactaagcagaaaatttaaaagaacaaagacaataaaagtaatgtttgttagtggtagtttgagatatttcaggagagatgagatgtgaagaaaagcaatggccatatttagaaagctgcctcaaacccaagagtatctattgaagtaaacttgatgacagacttttttcctcttcatgaatcattgtattcctataaaagcgaaaattcctcttcatctaaacaaatggcttcaacatctgttttcttagtttctcaaaagggtgtcttcggcttgcatttttttttttaaaagtgtttatctgtttaaaatgaaatatcgtcaaaagcagtttgtacatcaaaatccaagttggtcttcagcttgtaagaattagttgagaattatctggtggtgttgatagtggtataggggaaaaaagaaattacattttgtattctgcataggtaagttcttcttcctaaccatattctttaaatttttttg

SEQ ID NO: 49295 - DNA, 1111 bp, Homo sapiens
agcatgtgaagtgggtttttaagaatccacaggatgaataaatagtcatgctggggacaagaaattataagacacgttataagacagggaagaaattcacttttcctttcacacattcaaaggcatagtttgtagtattttaagttttgggatcaaaataatagccctgtcaaactgtagggcaataatggagagatactcataaatcgtattaaatttgtctttttgggaggagaagcctttcagaaattgttgtttattcagtgttttatattcttcatacatgagctaccagaaggtctaggttgtaaattaaggatttaaaacaaaatcagtttatctggaaactatagttgtatgggagaggtacacttatagtcaagtttataattaatgggcctttgtcattggaatagaaattcttttctcttgagtgaatatttgtttatataacatgcattgtgtttgaaggtgggatcaaaactgattcactcttcatttcttgcatggaaaaagccagcatttaaatgtgtactgtgtgtgggcttaattgctgctttttgtaaccaactttagggtcctgttgttgtggagatgcacttactgatcgataatggtttgctcttcttaagctggaccactaggagttttcctccttttactagagcctaaaaaataaatatttattgaattattactttgtgccaggcatttcgttaggtttaatgcccatgatatgatctctgcctataatttgcttatggtctcttaatcttaccttttgtaagagagtggtgtgttgtggtatgcacagagtactttgggggatacataggactaggatattcattaatatcattcggttggggagtctcgagaaggcttttctgacagtattaagttccttgtgaaataagtagatgttaggtaataataacccctaacatttattgagctcttatgtcccagagaccatacaaaacaaagtacatacatcgttaaatttaatgctcacagtagccctattaggaagcttcagttgctatctccattttacagttgaggaattggaaggttagagaggttatattgtttgcctgaggtcatcgca

SEQ ID NO: 49296 - DNA, 1049 bp, Homo sapiens
aacctctgactccctgcttcaagcaattctactgcctcatcctcctgagtagctgggattacaggcatgcaccatcacgcccccctaatttttgtatttttggtagagacggggtttcaccatgttggccaggatggtcttgatcttctgaccttgtgatccacctgccttggactcccaagtgctgggattacaggcatgagccaccgcgcctggccccctcttgtttttaattcctattccagctgtttgtttcgagggtgaaattcaaaggttttttttttttttttctttaaatggtagatacatttttcctttgaaaacagtctaagtgttatatgtttaagatgtgttcacgttagtacttactacattgtgattcatatgtctggtaggattcaggtgcattttatacataaatacctacatacatacatatacactcacaactgtgatttttacaggagtacttaaaatatatttgaaaagtcaaggggacatttaaaaataatcatttgtagcctcttaatagcaatttgcaatcgcaattcacagtgttttagaaacacttgctatgttaagatgttgtccccatgaactaaaactaagatgtcatcttacaaactaacaacttcctatctttccctcctggaatatgtggaatttgaatggtagtcttcacttgacagcaagcctggcacattgtgctcatactgggccttgaaaagttgagtattttccctggaggtgatgttctgtgccttgaccctgtcagaaagagcagaggactctttatttgttcagcatgtagttgtttgcttatagtcaaggtgttaagggaggtcttaaacattattttaatagtcaaagtttgacttctttatttctggtcacatatttagttgttggactgtctattcactaactaactgaatagtttgaaggcaagtactgtatgtatgcattaagtctttacattcaacaaggactgtttcataattttcatatattacctggggctgatccagccagtcctgtcctttggttgc

SEQ ID NO: 49297 - DNA, 1934 bp, Homo sapiens
aacttgacaagatgaaaacaaactaatgtgataaaggctcttgtttttcttcaagtttgtaatgaataaatacaaatttaaagtttttaatcagtatctctgagaaagaggtttatttccagtaacatgacttcactggtatttacagagggaaaattattttatccatagagtccctcgtatagtgaatgtaaaatagtgatttcagggttttccctttgactttgcactccattatgatgatggcaaggaatggaaggtatgtatgactaaagcggtctttgggaggaaaataattgagaagatagggttaacaactcaccaataaaacgaattaagaatattcaacactaggacagcatgtaagtttttaagcacaaaaacccttttatagcctcacagtaattttttgtatacttctcctgacttatgtagggaacagatatggagcccagcttgtatcgttgcagtaacatcgattgtaaggcttcacctctgacctttacagtacaactgagcaacaaattgatcatggacattagacgtttcattaaaaagtactatgatgtaagtatccataatgatattcttacatacacaacttattgaggtttggtacttgtttattggttttcatgaaactaaaattttgaaaagacttttgggaaaaattcctagtgaaatactattaatacaaatatgataaagtatgtaattttggcatattagcatgacaaattatttgataatttctctcaggcattacatctctttcatttacgagcagtattttaaataatgaaatttttacttcttttagaaaaagccagaatataattaagaaatgttttagtttattgttacctaaataagactaattaaatgattgcttagatctttggataaaggaagaaaaaaatcactattggctattgtcagcaagtagagccataagatcgtgtgtagtgatcttagtggactgcccacacaaaactaatactttgtgtttatgtagcactctaaacgactccataccctagttttttgaggaaatcaaatatcttttaaatttaaatgcagtttttctggcattcaaaagagaatatctaatttttataaatttatagtaaaaatgccagaacagtgagtgatttgtcttcattggaaagaaggcttttattcagagtttttgtttttaacgcatttcacatgaattagtttttttctcttcaaaaattaaaaatttcacatttcccacgtgatttttcttagtgtttcagtatgtcatttgtcatctaaacaaattttctgttacttgaaagtttactgtaacttctttttaaaagctacattggcaacacatttcaaaaaaaaaaaaaagctcatgtcttagttaaggcctatgacttttctaaagattgttctgtactttttactcgtattagttaacatataatagcattttcttctttaaaatagaactcattatgtgaaaagtaactatcagatcattaagatgaagagtaaaaacatagagttccagtattatgattttggtgttgaatatatttatcagaaaagcaagtcagtttgcctaaagattattaaaaaataataattatgactacattttgggaaaatctgaaacattttagtgaataatcctgtgctgcccttactgaacagtggatgggaataaaagttggctgtggggtcacattcctcagtaggtgagatgtgcagcacatgaaaatttaggccaaatcaaaactattcagctcctcatttacaggcctcattgaacagagtatgatccttgcttgactcttgggaagaattctgagctttctctctgtgtttagtctatcaagatcttcaccatggaaatgttaatactagaagaaacttatctatttccttctttaagagggaat

SEQ ID NO: 49298 - DNA, 1117 bp, Homo sapiens
agtttccttttcagtgttggtgaatagagtctcaaagtcagcattgggaaatggatactaagctataactccttcaaggcaatagcacagaatactgcagaatactacagcacagaatattacaatagcacagaatactgcagcacccagtattgtgcctaacgtgataggtgctcggtaaattttattgaatgagttcacgatgtcctgagaggttggtgctatcaagtgactctcccaggtcacacatagtagcatcaagactgtgaccatacttggagaccctagtccggtatcctgcccataataacttggaagacagccagttatggataccaagttgcttagcatcttctttgcagtcactcttagagcaggattgatcaagagccttcgctattcgcattacaagctaggccaggtcacaaggctgactggggcatgagtccagaaggctgatgatagccatccagcaatggactagtacagccattgaaaggaagcacgtgttgaacctggggtttcagcgacttctgttatggtttgcctcctctgacgggaaaattgaaagctttctgaaatgctgaggaaatgccataggagttgtcagatatctgaaaacaagtgggtaaaaacagaaaactacttgtgccaaaacagtagaattcctttcttcagtttgatttctctaacctggtgtatttaggaaaaactcaacttcaggtctaactccagtcatctagagctactgtcttgtagtagagtaagaaattgaaccagaacagatttcatttaacctttcaaaagtgagattttcacacagttgaccttcttgacttcaaggaacaaaacgggactatcagttctctgctgcatgcgtcaacaagagatgggaggagagcgccccaggcgatggctgtttttcatatttggtttgcccagagaatgtacattttggttcacatatggaaatcagccctttgtagatagttacagataggaatttccagatgatcctgtctaccttagtcttgtcttaatggaataaccatatttctgtttaggagtgggttaattcagctgcctttccaaggtaccatggaaaaattctctaagc

SEQ ID NO: 49299 - DNA, 1228 bp, Homo sapiens
ttccacagactctatcatccagcaacactgtcaaattatcattcctctagacagacctccttgttttcacacaactgctgggattgtcgtcacccacttgccatttttatctttttcaattctccttcacctttaagacctaaacccatctcacttctaggaagcctttcgtggacatcacagctatggaatgtttttttttttttcctctgaatccctaaagaactttaaaagtataacttttctccccccattttctttaatatagtctcttatagtcgttcttttatttggcaaatcattttgttccctataaggttgtagacttctggagaacaggggaaagaagaaagactaatatttttttagctgccaaacacttgctaaatattttttacgtatgtacgtttttaaatggtatcatttaattcttgcagcaaccctgtgaggtgggtggtattttttccatttttacaggtaaggaagctgaatcttgtagtaaacacaaccaatgttagaatggtaataatacattgtagagctgagatttaagtttgggcctctctgatttaaagcctatatgctcttttcagaaagcctcctccataaaagagtggcaatttgcttcctaatctgccaatttactagaaagttcaaaaaacagaataggtgttcagtaaatgattaaatttatgactgtggaaatctgaattgctttgacttcatttcttttacctatcagctagtggtaatatgaatcagcaataaaatagccaaagccttagtaagggccctttgtattctcaccaaaggctagtagtacatgaaaggttgacagttgtactccaacattaaggctgtttacttgagacaagttttttttacttgtttgtctgtttttaagcttttctcttgttgattccaacattcactgatattgctaaatgtctcttttctcacttagtatttgtatttcattttaagagagtaaatttcattatataatagtagcatgaataatttatgcctctgtcaaggaactattaaaacacagagatttttaaatatgcatattctaaacttcatataaaaactacggaatggagtttttatttcctctctgagtgtttattcaggagtaaacctgggcacttactaaaaagctatggtcttactgacttcaatttaggatagaatgctgagttgtaattatgtctatagataagga

SEQ ID NO: 49300 - DNA, 1047 bp, Homo sapiens
ttattaagatttttatctttattcttcttatttcttaaattattttaaaataaactagtaaaatagactagataggcctaaaagtactactttaatgacaaagtaatttcttcatttgaggtaaaaaaaattagtatagatcgtaagctaattgtttatgaaggcaaaattaacgaaaatattttgatcacttttatatttttatatttgttttatatagtatcaatatcacaataaaacttgatttttttttaatttgcataagtgatttattgttttgacatttataatttttgttctagtctatcatgcatctttgaaaattcaatattttcttgaaatgtttagtaggtcagccaataaattgacttttttttatccttctcaatttagtgggttttttcaatatgtgtaggacatcttctgttttctatgaatgatagtgttatattctttgtttctatttattttgtgacgattttagcttggaaataatcttggaatgtgtatctttttgacctagagttactcggaaagttctagtctcatttgtactatgttttctggctccctaatacaattataaggacttagtcttttcatttttagtctccttagccttgaggatttaatttaatgtgtttgttcttcagaaagaatgtaagctagttttctacttgaaacgtctttttgtatttttaaatacatgaaacctttacagaggatttgttttatcaaaaaataacttacatgctcttttttaaagcattaatttacatcaatatttatagtgaacttgaaaaaatattttaatggtaatgaaaatataatttaatatcaagctaaatctttttcagccctcttagattccccatttttagctgttgagtcactggagttcctaataaagaaaaatgcgtttttaggaaattacttttctaaggcaaacaataaattgtacacacagagggaaaggaaaggagaacttttcacctgcctcgtgtagggaaaaatctaaacaattacatgaaacacttagcaagttat

SEQ ID NO: 49301 - DNA, 1051 bp, Homo sapiens
tcctaaaactgtacctggggcccttttgcctattcttcacaatatttaatgtaattctgggcatatattacaagtttcattaagggctcattgagaccctccctgtacttgaaaagctcatattaaattttaaaatagtttagccttgaatgaaggtaggaataatgcttactgtgggtgtattgactagatgaattttacattctttaaaggtagcataatttttttattcatacagatctataatacactttccctttttgtgatagtcttaaatggagctagaagaactgattcttggtgctttcccctgagttttgttatagctacttccagaaaagcctattccgaggaatgaggtcaaacggcacagcagcaagtgagggcatccctcagctttggattaacaccacatggaaacattactaagtggcagactaaagtacctgacataatgaaccaacactcatgtatatactgctcttatctaaggggaaaagaccaacaagttgttcagtctagaaataggatatgtggttatgcgtgttattgattcctttattaatgataactcagcatagctctttctggcctgcattctttgacatacattgttctttctgtgtaagttgtcttttctgccttctctacttaccaaacttccactcatttttcaagaccggttcagaagttgccatgtctcaaaatgctccaagatctacagatagtcaggtccctactgggggctccacaggtgagaacaccataagacaagggagcagcagcataccgtgttcacctttataccccagcacctcactctaacatttgccttatacttacgcctctgtggcaatgcatgtagcacgaaagcccacagaccttggtgccttagtatgaacaggtgaactttgaccccatttgtgatgtcttacctcctttgtttaacagataacgttttataacataagactgatttaaggtcttaggtatattcttatcacatcactatgagaaaattcaaacaagatcagcaagggagagtaactga

SEQ ID NO: 49302 - DNA, 1047 bp, Homo sapiens
aaatgtgttccatcattgcaacaacggtatacggtaagtactgtggtatccattttacagagaaggaaacagcacagcaattaagtaactagccaatagtcactcagctattgggaaggttatacatgtatgtggtgcattctttggtaatggtctttactaatgaactaaaacacattggtttacattctgcctgtagtagaagtttttgttgggaagttttgatgtattggagtgaggaagggtgtttcttttaagaaaaaaaaataacatctcatgtgattttcttttttttttttttaacttaatggttttcctaacttctaagtttggggcatagatctatctaattaacatgtcaggagagagagataactagagttatgtcagaatttctgagaaaagattaaataaaatgagtctatcttgataaccaaaaaaaggtttattacttgtatttgtcgatggtgataagtctgaagttttcccttctctccagggctggttgatatgtgaagagccaacctgtcgcaatcgaactcgtcaccttccccttcaattctcccgaactgggcctctttgcccagcctgcatgaaagctacacttcaaccagaggtaacagtctcataatgctaaagaaccatgtagaagagggtagagggctgcttgctttgagaagtagatactgagtatttgccctatgaagatgccctactaccatatgcatatactaatcttatttttaaaaaatacagatttcagaaagatacatgctttctttttttcacatgtcatgagcaatactatatttatatttaaaagggaaactgactaattctcatatgagttatagatttctttggttgccactacataattacaaaagaagacatggccattccattctagaaactgctatcgtctttgggcttgatcagaatcccatttgtaagagccagaaatcctcccaattctgtaccctgaatggtttattttgtggggtttttggtcccctctgctggattaattgtttataagtagctgca

SEQ ID NO: 49303 - DNA, 1044 bp, Homo sapiens
catctggtacccatgggatctcaggtaaatctctggagcctgtcccctttgaaaactgccctgaaggacaatactgagttcccagagggcaccaatatgccaacctttaatatttaaatgtaatcatatcaagccgatttcccactcctcacaataggaattgctcttattgttggactgtgacaaactctgtgggtttcctgctgcggaccttttcctactaagaaccttttctcccaattgttttattgccacattaatgctgctattaagatccgtgtgctataaattagataagctttatatatttttttattcatcgtgactttcttctgttttccaagggtaaaagtatattgagaactgactcttgcaagcacttacttttcgaaagtagtttagaagcaatctagccatgttttacagttatagcggcaattgtttcaacaaccccaaaaaaattgcattactgaaatatatttcatgggtgcaattggccagggacagggagggcagcaggccatttcttttattaaggtcttgcgcaaatgttatgaagagggcagtatctcaagaaacaatttcacagctggtttgctcctaagccactcaagcctaaaaatgcaccgaattcctggtggaaaaaaaagaaatagatgtcactcccaaacaaagacaggtgctaagctgcgggagatgagagaaggggtgaaaacagtatccagctttaatagcaaaagcaaatgctagctaatggcccattctcaggaactcgttaagtcatctctaagcaaccacaggataatacactcgttatttctgctggtatgtttcctaaaagtgaggcgtattgctttgagcccagaatcttagtggatagtgcgcctcacctctgtattaacctgttggcacgagacctttcctgccgtcttatgccttcttaatggaatttttattagtcatttgggtgttcttttttactttattttctttgctcttaatttttagctttttaactaaaaatgtttttaagttacctaatgt

SEQ ID NO: 49304 - DNA, 1062 bp, Homo sapiens
ttctgagtcccaaatctttcttatatccttgataatttttatattatttcttccttcagacataaccttgatatgggctgtgtgtccttggaatgccaagcagagatcattttatgctttgaggtcatagttataaataatgttacttatcatatactccaaattcattcagaatttagtgagcacctactctggaccaacactgatacagccagtaggtatacagcaggaatctaaaattaagtccctgtcctcatggaacttacattccagtgtggggagacagataataaacaataattatatgacatggcaggtagtgacaaagtactgtggagaagaattcagctgtgtgagtaggaaagggactggcacaagtagggtttgttaatttatgtagggtatctagggaagttctccttgaaacagtaatagtaagcaaaggccagagggatgtgaaacagtgggccttgcagatatgaagaggaagggcatgtataagggatctggaacagctagtataaagggcctaagataggagggtgcttggcatatttaaaaaataggaaaagggccagtgtagcaagagaaaagggaacgatggggaaagccgaaagaggtaaggtgagagaatttgggcagagggtggagacactgtgaagagccatgtaagccattgtaagggctttagtatatatgctaggggaaatggggagctattcaggaattccatgtggaagagtgcagtatctgactaagttgactgctttgactgctgtaatttaggcaaaatatgttgatggtagcttggcccaaggaatagaagggaatctgtgagaagtggttagattcttgatgcattttaaagctaaaactgataggagttgctactccaatccttcttcccctgtgacgttatatagaaggaaatggaggagagattccttcttacaggctactgattctcaattgaattctaatgtatttaattattcacctaaaactaagatcttgcctatggaccccatatagcatagcagtatccttactcttaatagactt

SEQ ID NO: 49305 - DNA, 1540 bp, Homo sapiens
aacagtagattgaagttggatctttagagcaaactattctatcatgtgactgttagactccagtttagtggtatcagactatgcccttctttttggatggttatagattaaaggaaaatcttctagggcaaatcttgaaattaagaaagtattaagggtgtgctccatactctgttccttgtttgtatccttatgccttgtccttccaccagtcttccctctcctcttcctttacactcagctgtcctgtaatgcaatgtgtgtgttcctaaaaatcactaagctatggaaaatcatataatgacaaccacacagtttatggaaaaacagaaaggttagggcaacacacaaaaacttcatcagtgacacataaaaaaggatataggaacctaaacaaaaacaatgacatagttttacacatcttcagtagctaagaaatatataaatattacaataaatatggtactttaccccgaaaaagacttgaagtttgcttgtggaagtggactcagaaggattgcagctgtgagtcatgatgacgtagagaatggaaggttatctgaaattggaaggaaagttgcaacaaacaccagatgtgggtgagtgtagcacagtgaactgaggtagctggttgatgtttgaggtatttgcgtatgtgtgttttatgtattcctgtattgcttgggtgcatttcttgcattcacctaatatttcttgcagacaaaatcatgcacgagcaaacacgaaattcatgttgtgttcaaactgttccgtgatatatcaatggcactggaataaattctcatattcaaaacaagcgctgtagcagaaccaactgtatctcgttttgtcttgatgattaaccagcaccttaactgtctccctgctttattgttttctcttcattctcataatgtacaaagacactcgtatttttagaaagactgattggaacatctgtcaaccagataattaaacttattgaatattgtctatctccagcatcctggtctgggacgtgggaaacaaaaaacgttttgaaacaatgggttctgcctttatactgcttgaatatggggaactaagcgcagacctttgaagcaaaacaacagttcttaaaatatgacaacatatagaattaatacatcagtgctgaagagatagggtaaagtagttagtaaagagataggataaagtagttagtaaggtaaagcttcttagaatatataaattttgatccagattgtaaacaaagttgtgaacatggattggggaagtagtcccagaagatgaaaaccctagcatcaaattctaccagcattttggttccaggtaagatggagtaagaatagttcttattgtctccaaccgaaagcaactgtaaaacctggacagcatgggtggagcagttacatggagaccgaaaagtaaacagtagcaggtaggttaaagatgaagaccagatttcttttttttttttcttttttctttctttctttcttttttttttttaagaccggttcttactctgtcaaccagg

SEQ ID NO: 49306 - DNA, 1040 bp, Homo sapiens
catttttgaaaatttcattgttatgtatatgaatctatgctgttctctgaaactattagtcactaaaactacattcatagatataatttgtttcatagtagcttataagggatataacctcattatagactgacaaacactctagaacaaagcagagacagtagagatacattaaaggtttgttgtagccaaatttaaccccccaaaaaagatttaaagcaaacatataccagctactatgtttcaggcactgttctaagcattttttctatttaaactcatttaatatgcatcataatcctatgaggtactgttgttattcctgctttacagatgaggaaacatggttagatgctgtctttatttacttcacattactattaatatgaaagaatacctgagtctgggtgatttattaaaaaaagaggtttatttgacttgtgattctgatgtctggagaacttcaagacaagattggacatttgtatcagatgagggcctcgggctgcttcctctcatgggggaagatgaaggagagctggctgtgtagagatcgcatggtgagagaagaagtgagagacagaggaggggaggtgtgaggctctttttaacaaccagctctaaagggaattaatagagtaagaactcacttagccactccttcccttagggagggcagtaatctgttcatgagagatctactgccgtgatcaaaacacctcccattaggtccttcctccaacattggggatcacatttcaacatgagatttggaggagacaaacatccaaattatagcagatatcttgcccaagaccacccatttaattaagaagtagagccaggatttgaacccagtctggttccacagtgtgtgctcttaaccaccacactatacttgtctcatttcgtatttttacatgtagtagtttaaaataccttggctttacttagctcctttcttctaaagaacgtattcttctagcctcctgattctctctatgccagattaagttcttgcaagtgtctctttatctcgg

SEQ ID NO: 49307 - DNA, 1048 bp, Homo sapiens
ttacaaaccttgatttttatgttattgtttcttctggtttgaaatttatatttaaattttcattgaggtattgatacatgcttacatgtaagagagggcaaattcaatctttttttgacattaggttaacctagaaataatgacattaaggaaaccttttgtagggaggacagtaaacagtcctcagtcccagtgaggaccccatggccaatatttggatatttcaacatctgcagtattgaagccagccgtgtctcctcagatggaaattgccatgtgcagaatgacttgatagaaaatggtgtacattctatataatcttctaacagcagaatgcgaccagtggcacttcccctaaaaaaaataaattacccgaaatttgcagcacattcatattcaatttcatcacagcagatgctcattagtatgttgttattaattggtattcactttaggttttgtttaaaatgaagataataattaggttttaattactgcatcattcgtgggggtgggggttgtctgtggggagagggaaagagtgaaatgcctcttaaagcactaaaatatttcctgatgcttattcagcaacgtgtgttgccaaagactttgaaaaataacttcatctttacaaaaaaaggattctgaaatgaagaaattactgtgtgttttttaagcccatcgttatcaagaacttgctgtaaattgtctacttgatggacatactgaatcagatgataatgtgcaccaccattctttctaatcaaattaccaaaaagacttcttggaaaagtaaccctcacaagcggctgattaatgaagtggtggcaatgttttgtattagaactaattgaagtaatccaaataagttatttctgtagcctatggaaataatttcctttgcaaagaagtacagtggagttggcaaaccagtatttttttttcaccctctgttgttccacatttgcaaaatagctaagttaacatagatattgcaaataaaatagatagaaaactaagtaattgagtggcagggaaaacaggaaag

SEQ ID NO: 49308 - DNA, 1095 bp, Homo sapiens
acccctgtgtgtatatggacctatgagtgcacccgtggcccacccttattactctggtaacactccaagtaactaacttgaatgcagagcgtgatacatacagtagctatttcagctcagtattgtccttaccaaatcacagtcggccactttggtacatgatgttctaactataaaggaagactgaaagaagcctaggcactgtgttgagtgcaattttcaaggaaagagcaagaaatcgaacattttaaaccaataagtgaaagctggagagagaaagaaatgttaaaatatcatcttattttcttgaagtattttccatccaatcttgtacagtcaaaatgagcatttaagtgtgaggaaaaaaacgctgaagatctcagataagactagagagtgtcaggtttcttgattagaagaatttatcatcaaaggcaaaagagaaaagatggtaaagattttttaaaaaacaaaaaatctccaagggatcacaaattagtggtgcaaaatcaagacaacaaaagtaggtgttattcttgttcatttaaactatagttttctctgtttcatgtgtgttttttaaaaccacttaattgtatttgacattgaaaatgtaatagggccttttgttttcaaccagtttactaattgcaaaatatgtcaggaatcaaaagggcaggaggtgttggtatatttttttaaaatatataactcctttttaattttttcccctattttccttatccatttaggcagtgactttcaattagcctgcctactaatatcaggtcactaaactccgtggctgacgctttattccttcatgtgggttgtcactcgtttgcttcagttggctggcaaaggttgttgtatatccattactagcaacacagcactttgcatttctgaattgacaagcagctatattgacccagcgcttattatgggtcaacagctgcgttaaccaacggaaggactgaggggcaattaaaatgaattggcaaaaatatatcttcctaatttactccaatttgttatttatgctaacattgtatggcttctatggtgacactaaacagaatggacccaataatg

SEQ ID NO: 49309 - DNA, 1094 bp, Homo sapiens
tcttgctagatactaataaccagtgctggagaaccttccacattagttccaggaagtgcactgtaaagacctgttggttttagttttctcttggtacatttgaaatatgtcactggcttttaaaattaaatatgctttttatgcttttaagtattgtctcttttgaacttttgagtgtgagggttgaatttttagtgagaaaagaattttgtttggatttgtttttaattagtattttttaaaaaatatgttaagggcttctggtggtggtggaaaatattaattcctttaaaaatctggctgtgttgctagatccacatttgcttttctgtgtttttgtgaacaactgatcaaattagattcgtcactcttggcttacggtgatttgaaattgaaatggaatatattaaagcagccaaccacactgattacattgcaagcctcatttaatttcatacattcacactttacagtgaaaggcagcttttttaatgcatgattgtgactgtaccttgagcaactccaaaggtcatctgtaatgggtgcataatttgttagtgttagatatctgatttatggtaggtgtttctcagcctgatttgtactagtagtaaatatggtgagcatcaaagtaaaatctgtaagaagtttagcctgtcacatttggtggtattgtcttattcttcactggtcagtggaccacagtaaatcatggactagctgtcatccttaaatcgagaaagtgccagtactgagcccctgtagcacaggggttaaatgagctattctttttaagagggcaggctggcccaggtgaaggttataacagtattaccagctcatctaacagtacttgttcacagctacttgagccctagtcccaagaaggctataaaaggactttcagtttcataggagcatggacatttgtgagcttgctcttttttccttggttttctgtagcagcgaagtctaccaacttcatttcctttgtgtcttctgtgtgacaggcactgtggggcagccctcagagatccagagcagaatttgctttttgtttgttttttgtttgtttgtttttggtttttttctct

SEQ ID NO: 49310 - DNA, 1125 bp, Homo sapiens
atcattcagcacttggggaggtttggaaggagaagaaaattggtttctttgcttttaatgctgctttgaaaagatactcagagtttttcatgcgtgacatgtcacatgtttaatgtggacttgctggaagtcagggggtctttagcgtgtgatatttatggggaatattaagtgcagaatgaggtccctccagctggggaaagttgaaagaataggaggcccaggactgggcttgtttgcagcatcagaatgacataggattaagagtttgtaaaacaaggcgaggggttctcattggccagtaataaatgtaatccttggaggtaatttcacgcaatttgcttctgttccatggaagggtcaaatgagaaaaaatgacttaaaaaagagttcattaacaggaagaatggtactgtttctcgtataccatccaactagcagcctagaggggggaaaagaagccctactaaacaaaaaggcaaaatcgacgcaaaattgatatcgaccacaacacacacacacacacacagacacacacacacacacacacacccaactcctttccctcagtcttctccagcagtcccgtctcctccccaaactctccagcggccctgaccaccccaggaaagcggctttcactcagggagagcctgtggatgtggagtctgagggttttagactctcagacctccagtaaggccctagaaagttcccaccgggcctactaaacccgggaacggagtgtgtggtaggaatggtagttggcggccgctccccataccccaggccggggcccttcttgcgagtgccgcccccgtgagtccagggctagcgttgggtggcggtgatccacccgacgacccaagtgccagaagcggccaccagccggcgagccggttccgtgagctctccaacgtttcgggcgggcggggtctccgggcgtctggacccggggttggagaggaggggattgaagttgggggtgaaggggggtgcaggataggaggcgagcccgggacgtgcgggctccagcgccgaagctgccgggcgggctgcccacacccaggtgggcacagcgcctggcaggccgctgacctctgcccaaccctgcaccctcccctc

SEQ ID NO: 49311 - DNA, 1024 bp, Homo sapiens
tcctgtttaatttcataatagtgattttagcctattcctatatagtctgaattcgttttcactctttactgttactctttcagttttgtctcatctagagatttaacaagtatatgctttatgattttgtttcaatttatgtaatgcttttagatgcttagaattgtaaaagctcagagagacgctagatcatatgacaatataccctcctatccccttgttttacacgtgaggaaaccgagattagaaaagtgaaattggagtcccttggccaagtaacttttgacaacagtaagtagcagatccagatgcttggacatcaaagccttgatgcctaggccaccctgctgtaccatttccttccttgtaagtctgaaagttctgggctccagtctcccaagtccagtgttgttgtcactgcatctagcttatgtcccttccttcatctgctaacctagcggtctcagcaacaacaacaacacacatacgcatactaatatgttaacggtgtagttagaatttttttctttgttttcttaatttttttttacaattaacaaacatttaaaaaaaattaaattaaaccaaaccaaaaaacaagggtggggaataatgctagactggtaaaactttttatcagtaaacacatgctaatttcacttggtcatactaattcctttttttgtaaatgcttacaaagtatatatttaataatattgtctttcatttgatcaattgttgttaggcttagaagttggagataggaaaattttagtctttatgctctttaaaacctaaaactatagctacccatcttcagtcttttagtctttttccattcttcctctgctgatttgggaacaataagatacatttctatgtttttattttggtgattttttttcttttgcgtataccctcagatttttaagatattgtttaaccatatatttttctaagagtgtatgtcattttttggtatttttaatctcccgaccatgataaggaactctaatattttatt

SEQ ID NO: 49312 - DNA, 1028 bp, Homo sapiens
tgaccatataagcatctgtaaaacatttctagtttggcataatatctggaaaaaatagaaggcaacatggagaataatctctaaagtatacatttttgtaaaaaaatatgcaatacttgattttgcattatattcttttctaatataggcatttaaggcatttttgccttctaagcactattttaactgtgtttgtagattttgatatgtatttttattatatttagttcaaaattttgtctactttctcttgtaatttattctttaattcaatgattaatttacaattgtgtttttactgtccaaatatgtagggttttcctggttttcatgtaggtaaatttgagaggaaaatgttaacatagcagatctgtgttaacattcagcagatctccttcatatctccaagggaacttggatcatgattgactcttgaccagccactgggaatgtgaccctttggatgtcttttacataaatggtggatttttttttttgtacacctggagcaatggactatgtaggtacctgcttgtcaaaattgctttgtacaaacatcaagattgataaggtatacctagtttctaagtcttggttattgtggctggtcctatagctggatatgcctatatggccagccctctataaaagctatgaatgctgagacttaaatgctcttgcgctcttcttcaaatagagatattctgtatatgttcctgtattgtgctactagagagaaagcacgtatagaaagcctatgtctgacctctctgggttctacccaatgcatatctttttcctgctgcttttactctgctccttttgctgtaatacattttagccttgattataacctaatattgagtcgttttgatgaacctcgaacttgagggtggtcctgggttccccaaaactgtattctaatttaattctattgtggtcagagaatacactccatatgattcctttttttaatgttgagacttgtttcatggcctagaatatgatctttcctggtaagtacatca

SEQ ID NO: 49313 - DNA, 1061 bp, Homo sapiens
tactggtatactaaattcgcttatgtatgactgttcgatatcatctattaagtttttgagcttctgttcaatttgtgtcatttttttctctgttcttcaacttgtgtaatttctattgatctgtcttcgagttcacttattcctgttatgtccattttgctgttaaatccatctagtgatttttttcataaattatattttgtattttaaaatttccttttttattgcctttatttctctgctgaggcttcctatttctctactgaggttttcatgaattgataaatccaaggtctctgtcataattgaggttggttctgatgttctgcctcatcaaactgtgcctttttagtatgctttgtgatttttttgtcaaaagctggaaatgatgtattgggtaaaaggaactgaggtgaatagacctttagtgtaaggttttatgtttatttggttagggattaagctgtgtttagtattttctgtagctgtaagtgtcaggaaataaaatatcctctgctgtctttgttttttacttccctgttacatttgagttcctctagcaactttttcttaagatctgagatatgtaattctttctgttgtatccccctgttattatacaggatccctattgatgtagtaaggtgtagggagagaagtgttctatggtcctatgattgggtctcaatcttttagtgagcctgtgccctagactgtgaccttcgcaagtgcttctcagttttgctttgtttttcccaccttaggtgaaataggaaggctaaatggggacaggaattgggcatttccttcttccaggtcagttaaggtctgctaaatccccagttggttatgttctagtaatatagttgggtcctctgtatccatgagtttaacacgcatggattcaaccaaccatggatggaaaatgtttgggaaaaaaagcaataaagaataacaatacaataatacaaaataacacaaataaaaattgcagtatagcaactatttacctagcgtttatattgtatgaggtattataagcaatatagagatgatttaaa

SEQ ID NO: 49314 - DNA, 1046 bp, Homo sapiens
tggagataatcagaaacctttggaggctatgagcaacctatataatcccacctccctcagttatactgaaatttgagtagcttttcacagaatctgtaaattttttattaacctagttaggacttttttgagccaaatgctcatttctactgttcttaatacaatgcctgtcacaaagttaggtattcagtaaatactagttgaatctattaattagggattcaccataaatttctcgccactaataaattacctaagtgtgaacgttttgtttatctcggaaataagatgattaaataaaaatatttgcatatttttcatcttgcattcatgttgatacacagccaatatatttcaagtcattttaaataaaagattaatctgtccatgatatactttgttagataaagctatttaaatgaattgtttttggataaatcctgtaatggtgttttctacttcttctttttaactcatttgttgaaagacggtagggaatagtggaccaggtaattaaataaagttcatgttgtagtttctgcctcatatgatagccaaagtaaatgagattattaacatgaacactttaaagatgtgtatcaaaattaggaggcttatagagagtctcaagtaattaagtgtgtagcgtagcaaataatgactttctctaatattggggttaagatgttcagcagagtatgaattataaaatcctcaaaatacaacttgaaagacttttgacttttagcccattatcctcttgttaatgcacatgtaagagattatgtggggtttttatgtcattatggcaaattataggctgtactataggtgctattcagtattggatacgaatgagttccaagtagctttgttgatctttcactaaaactagggatttggcattgacttatcagtgtgattattgtaaaagagatgtagtgtggaactgtttcctgagattaatccaagtattcagtatcataatttagaaactcccttcagttatctgccctacgtctccatttactcagtaatgtacgcag

SEQ ID NO: 49315 - DNA, 1046 bp, Homo sapiens
atatttttatacatttaatgtagcctaagtcgacagtgttgataaagtctacagtagtctacggtaatgtcctaggccttcacattcactcaccactcactcaggccaactttcaatcctgtaagctccatttatgataagtgccctgcaaactccttttatggtaggtgccctatacagtaccattttttatcttttatatcatattattcctgtatcttttcaatgtttagatatacaaatacttaccattgttataattgcctatagtattcagtatagtaacaaactgaacagatttatagcctaggaccaataggctatatcatatagcctaggtgactagtaggctatgccatctaggtttgtgaaaatacactccatcctgtttgcacaatgatgaaatagcctaacaatgtatttctcagaatggatccacattgttaagtgatgcatgactgtttatactaaatatatatgaagggccctaaaaagtcattcagtgaaagatctctttaaatttgttaaccctagcattccataaatacttcactcagaatgtttccaaggaactctcattagggtagtgattctcaaactgtggtaatgggagcagcagcagcagcatttcctggaaactggttagaaatgtaattttatagccctacctcagatctatggcatcagaaactctggggtggggcccagcagtctgtgtgataatcagtccttcagggattctgatgcggctaaaaggcaagaagtgttagaaaattttactgttattctccaacttaacagtaaccttttgctttccttcattacacttaaccacaatttgtattttttaaagttctaatgatattctatgaatctgtgaattcatattccataatcataatctattctctgaatttccttccttctgtacctcataaagggtcataaagggaaccctttatgaggtacagaaggaaatactcattgaaggcctatcatggttttcaccctggtataagtgtcatctagctggtgtcaatttggat

SEQ ID NO: 49316 - DNA, 1040 bp, Homo sapiens
agagatttaattggacttacagttccacatggctggcaaggccttagaatcaggcaggaggcgaaaggcacttcttacatggtggcagcaagacaaaatgaggaagaaacaaaagtggaaacccctgataaacccatcagatttcatgagatttattcactatcataagaatagcacaggaaagactggcccccatgattcaattacctcccccaggcccctcccacagcacgtgggaattctgggatatacaattcaagatttgggtggggaaacagccaaactatatcatgtgtatataccacattttctttatacagtgatctgtcagtggacatttggttacttttagttaggagtaatatttagaaactgagatctgggaactagaatatgctcattgctaccagaatgttgttacttctggatctttcagcaatagagctaggaaaaaaaaatcacacatatgtatacatgcatacaaattctatatatgtctatatgtagaaatgtaaacatataaacatatagacatgtatgcatgtagacatatatgtgaaataactaattcattatgctgatctccaattgcaatccaatccctcagggctcttccagccattctacttttgtagagatgtaaaaattccttatagatgttcttccaaaatgagaattccagcacccaaaaacatcaatatattaataactcatttgcttagttgtataatacacaatggtttcggaattgtaatatctatactgtaatgtggagagggaaaacttatattcattcatgcatgcatgcatgcatttttttaacatcttatttggaaataattatagattcacaaaaaattgcaaagataatacattgaggtcccatgcagcctttactcagtttcccccaatggttacatcttacataactgtaagatcaaaactaggaaactgacgttggtacaatctgtatgtatagttctgtgtcattttatcacttgtatagatttgtgtaaccatcactgcaatcaagtagcaga

SEQ ID NO: 49317 - DNA, 1081 bp, Homo sapiens
aactgttaagccagtgactggctgctttgaagaatgtagaggggttggggagagttgaaggtgcagaacaggtagagccattgtagctgatccagatgagagcctagtgtggcttgaactgtggtagtggctgaggaaatgaagatagattcactagttccagatggattttggacaaggtgacaagttttgctcatggacagaaggtgaggactgggagatggggacaataagttctggtgtttgatcttgagcacctgggttgatggtgctattcttaacctcaggacatttgcagtggggacacctagggtagagggctggggaatacatgtcatgtgaaatcttagatccttattaggtatccaaatggaaacgtgaatcaagtagatggaaaaatgaatgtcagctttggaaatatacgtaagggagacattatagatggtattgaagtcatgtgattggatgagctcaccagaaaaagtgtaagagagagtttgacaaatctatccccaagctcagggcagctaacatttagggtatagttgagatgtttgaacacccagagagtttctgttcccacctgaccattaccttattccagaccatggcccccagtgtccactcctagtgtattttcaaatcagcttgtcctgatgtaagtgtgacctctggtttctcctttctagatgtggagaagagttcttttgtcttgtcttatggctatggatagaatgaaattatttcctagtaagaaaaagattccttagagaaatggtagtgatgtaagcctacgtttttctcctctctcctttcacaactttgccatatcttttggcctattctctacctaaacagatgaaattagtatgtaaaccttagattatgcatgtttctgaaaaactactcaaaacattttgttccttcagtgctacatgtagattattatataaaagataaaaattacaggttttgtatacagtattcaaagttacatgtgtagctcgagtctttttaaagctaactggtttgaacagtagtaaaatatgaacaagtttagctatgcaatcattaccttatt

SEQ ID NO: 49318 - DNA, 1047 bp, Homo sapiens
ctcccgcattcctaccttattcatgaaatcctccaattatgttcaaaggcagatcagatttgagagactgtctgtcctgatctcttgctttggctaaatcgaataaaccttcctctgctcctaagcactgatgggtcagggtttggcttactgtgcattgaatacgtgaaccaaaattttgggatttgatgacagaaactgcttgctattgccacaagtagctacaaattaacaatactgcacaagacaagataacccaagccttatagattaacaatatatagccaatcactaaccaatattatttctataaaccaaagagaattcctgacaaacaactttgtatcagcccactctctgtcccccttttttgcctttaaaaatctgcttgtacacaggcaaccaaagcaaaaatgtacaaatgggatcacatcaagttaaaaagcttttgcacagcaaaggaaacaatcaacaaagtgaaaagacaacctacaaaatgggagaaaacatttgcaaactacccatctgacaagggattaataaccagaacatacaaggaactcaacccacattataggaaaaaaatctaataaatcaaaaaatcacaaatgatttgaatagtcatttctcaaaagaagacatacaaatggcaaacagggatatgaaaaaatgctcagcatcactgatcatcagagaaatgcatatcaaaacaacaagatatcatctcaccccaattaaaatggcctatatccaaagacaggcaataacaaatgctggtgaggatgtggagaaaagggaactctcctacactgttggtgagaatgtaaattatcacaaccactatggagaacagtttggcagtttctcaaaaaactaaaaatagagctaccatgtaatccagcaattctagtgctgggtatatactcaaaaggaaaaaaacaaaaacaaaaaccaggatatcaaagagatatctgcactcccatgtttgttgcagcactgttcacaatagctaagatttggaagcaacataagtgtccatcaacagat

SEQ ID NO: 49319 - DNA, 1045 bp, Homo sapiens
gaatatatacaaatataattcccaggaaagaaaatcctcctctttatttttggttttacagacaggaaaataatgggcctcatgctgttttggttaactgggaaaaacagaggagatgtctggatagtaacctgttagctagcctcacactccacatctctcctttttgggttgtatacttagcctgcatcagaaacaagaatcagcttgtattaaataaatggtctcactttatttatatttaatcatttgggaaatgaaatagaaccattagaatagataatagatgtcagttttaaaaataaatactgaggcaaaataaatttctttacttttccatgacatttttctggaagcaggagcctattagactgttacgatgttctattccattgacttatctccaggttcccttttttaaaagactcgatcttttgaaatgcctttacattcaccatttatatgtacttacctacttaccacttctgcatcactagtactctgtctgaattcaaattttgtatgtctcatgcaaaactcaaaatccaactgtgcagcttcttgaccaaaaaagatgggggggagtgctgaatgtcactatctaaataaaaaagaattttactgagtagtggtggcctggagattgagttatgtggaggttctaattgtgaatttcaagtaaatatgagtaagccacccatttggatggcacacagaaatatactattaataattttctggaacatcttaattgaaagagaaaatataattagaaagtgaagacactcattttatttctcaactgagcttggtttgtataccttctagccaaaaataaagcaaatttcttgttcagtatttccagaagcagctctaataactaaatatccaaggacatcttacagaggtttttttccccaaagttgtgagagcttggtaaagatcaactgtgggaaacttctatggaacttaaaagattgaaaacaactaagagtcccccctcagatattgtctgcttatcctctctttgcagatctgctcattc

SEQ ID NO: 49320 - DNA, 1027 bp, Homo sapiens
gatgggactgcgaggttagcttccaagaagaatttttttacccacatgcctagtaccttagtgctctttgatctctcactctctacatgttgtatcattcttcagagcctctacgtgtagcttgagattctcacagcatgatggtctcggggtagttgcccttcttacaggatggctggcttccaagaggcagaaagtaggagttgccagggcagttatggcctacaagtggaactggagtagcattacttccactgactcagttggtcaaagcactcacaaggcctgcacagatttaaaggaggtggcgatatagactccactttttaatggtgcagtgtcaatgtcacattgagtgaaaatggcagagtaaggacctctgaaaattcactcctacataaaaataataagaacactgaaaaatggtcagaatcaacattttcagaactctggaaattaaccaaagggttgcgctaatctggggagcatttattcaagaacaatggctaaaactcattaagaactgcaaaaatttctggcattttaactttccatattcccatccccctctcttcagccccatggtagccttaaaaaaaccaatagcctacaatcagtgaaaaccagcatcctgacagccaccggaaagggtagaacagagttgaagcactctgcaacattccagagaattatcattatttgacctgtctgtggttccctgaaagatcactctcaaagctgtctttattttacctgacttggagcttgctcagtatgtaaagctttttcttcagagaatttgtcaaaaacaacagaggcaattgttgaaccttgaagctgcctgaggtggtacatagattgcaattgaggtagacaataggctaaacaaaaaacttaaatggaataactggaaaatgaaatgtccatgggggcttcaaaaattgtaacatgtttctggaaatctggagggccatgcacatatatagggctctttgcatgctcaagaaaaacctgagaagtctctaac

SEQ ID NO: 49321 - DNA, 1050 bp, Homo sapiens
atctagtgggtaaaagccagggatgttggttaagtatcctacaatgctcaggatggccctgcacgacaaagaattatgtggcccaaaatgtcagtagggctgagactgagaaaccctgttttagtggaaataagtttttatctttccttacattttctccccattcactgttattttcatgttttgtcagtgaattatcagttcacatttatgatctgtggagctctaatatgattgtttaatctgctttgttgtggagagtctatatatgtacacatatacacaataaaatttgccaattttaagtgtataatttgatgagtgttgacaaatgcatacagttgtgtgaccaccatcataacagtgtttgatatgtttaaatttcatgtagtttccaatatgcattcattaaataatattatattctaggacagaaggaaacctgaagtaattcaggtactgacaggtagcttgtgactgataggtagaatatacatggtaattaatgaaggataacacccttgaactgacttctgaattttaccatattttaatattaatctaaagattcttaattttacttggacatgatttgacccctggatgattggctgagaggagtttctatattgtgaaacaggaaatctatattaacatctctcataaaatactgagttttatgtccacaaattcctagattctctttgcatcttctaggtcttttttattcctgcaggtataaaacaagactgagtgtttgaagggaaaaacagaatatatacttctttcctaaaggataatttccagaatgttggttgctttggtagttgaatttaaccttggtaagtagtagcagttgtctgcagtaaagtggatggaaacccttgattccattgctgaaccaccttcttagagtgagaggtttgtcttgaccactaattgctataattggagcttgagagatggtttgagatgagtcttgaaatgataagtgtgtctatctgcttggcaggtgttttctctttccttttaattccctttccaaatcaa

SEQ ID NO: 49322 - DNA, 1050 bp, Homo sapiens
aaaatgtaaggctgtaaggaaaggggtagaagatcagaggaattctcatcaaaatattgcaaattatcccctgaacacaaactggtaacggtggtttgcttaagggaaggaaattcggagattagggatactgggtgaaaggcagattcttttttttaccatatattcctttgtatcttttaaattttgtattacattcgtgatctttcagaaataaataaataaaaatgcagtagcttcctgatcagaaagagggaataattgctgtcacttgcgtttcagaaacatagcatccaaactgatgtgattatggtgacctgtcccacttagttttgctgatgtactataattactttctccagtgaggctgacttcagaaacagttgcagatgcagaattttaatccagggtatgctgtatataagtaacttttgcatttacaatctaccatttggcgttttatggctaataatccacaaatatctaaactaatttataaaggcaaaaactactgatttaatgtagtactctgcttctgtatccccgaggtgagtcagaaaaatttcaagttgccacgccttggccagaccccacagtatattggttattggtcctgaagttagttctttaaaataacttgaaatgtttcatgcttagttctaggatctatactttctttgatttgactgggactgaaaggctcagaataactgaatatccttggctctaaataagaagctgtaactttgggccaggtgcagtgcctcatgcctttgggaggccaaggcaggaaggtagcttgaagtcaggaatttaagacagtctgggcaacatagtgagacccccatctctataaatgctttttaaaagtagcagggcatggtggcatgtgcctgcaatctcagctacttggatgggtgagttgggagcgtcgcttgagcccaggagttctgagctgcagtgagctgtggttgcactactgagctgtgattgcactcaaggctgggccacagggtgagaccctgtatttaaagaaaagaaaaaagaaaa

SEQ ID NO: 49323 - DNA, 1067 bp, Homo sapiens
tattttcttatggcagcccaagcagactaacacagcctgcaaaccccctgtgggttagggctgtatcttactcattgcgctgtctccttccccagttcttagcacattaccttgttatatatttcctttctatttgttgaatgaatgaatgaattaaatcttctcagtttcaaaatcaacaattattttttcagtcagaactcatgattgcaagtgttagaaacccacctaagcttgtttaagcaaaaaacaaatcttttgggtcagatgattgggaatgttctggggtagcttctaaaatctgaggaatgagtctgggagccggggcctcaggtattggcacaggggaccacacacctgccagatcctctctccataccctctccctgaggcagttggccttgttcttgcagaggacgtggctaccaagagaatggcagattgcattttccaaagatgacagcaagaggctcccccatatcccagatgctcatcttacaatgtgacttggacactccaagtcacattgtggggtctgtgttctctgcccttgaaactgggtgggcccgtgactacagtggaagtgacaccatgtgactttcaaggctaagtgataaaggatgaaacagcttctgctttgtctgctggagtgttgcctttggcatcctggctgccaaatctgaggttgccatgctgtgaggaatcccaggccacatggagaggccacatgaaagtgttctggcccagagccccagctgaggccccagctagcagccagcatcaaccaccacatgtgagtgaagaagcctctagatgattccagcccttggtcagccaatcactcttggccttcaactcctccctgcagaggccccagatattagggagcagacacaagccttccttgtgtgccctgtaaggcttcctgacccttacagaatctgggagcatgacaaaatggttgtttgatgctgctgtgctttgacataatttgttacatgacaatggtaagtggaataaagagcccaggatgttcggaggccaagatgggaggatcttttgagccg

SEQ ID NO: 49324 - DNA, 1032 bp, Homo sapiens
caaaagggcttgtttggaaatgatttcgggcttctaaatttccatagaaagtgctggaaaaaagtttaaggcttctttttaaataccatctgaatgatttttcttcccactttggttcacataataattgcgttcttactcttaaatttcaggcagttccttttagtcttgacagtgttgcaaattccattcactccttattttctgaggaaactcctgttgttttgcagttggctcccagtgaggaagtaagtgataagggttttattcaagacattttaaaaaataagcttttattatttgaaaattatgaaatgtaattttattatgaaaatataaaactaatttatgaacaatgttgtcatacctctgggtattggaactaatctgtagaatttgagcaacttaaaattttctattcttcttacagagagtgtatatggtagggaaggcaaactcagtgtttgaagacctttcagtcaccttgcgccagctccgtaatcgcctgtttcaagaaaactctgttctcagttcactccccctcaattctctgagtaggaacaatgaagtaagtgcagttattcaatgaatacatgaatatcattaatttccgtctttttaaaaaatagagacagggtctcactctgttgtccaggctggtcttgaactcctggcctcaagcaatcctgtcttggcctcccaaagtgctgggatcacaggcttgagccactgcatctggcctcccattccttatactacttgaaattttggaaattttgctattttagaaaatgaaagattgtgcacatttactgctggggtagattcttctttagtgtaattttcttatgactctcatgaataaactgatcctttttgtgagttgagctgtggtaaataacatcacattttagcacgagggttgccacctattaattcaaacaagccagaggtcatagatctacttggtgactggtggagctgtgtggatctggtaacttggaagccattgttcactgcctctgctgattt

SEQ ID NO: 49325 - DNA, 1030 bp, Homo sapiens
gttttccaaactttttcaacaggtgttggttcggggagtctggaagtgtagtgcattcctgggatcaaactggtccagccatctgttctttcatacgttggcccatacctgagtttttaaaactgaggaattttgttgaaagcttttattaaatatccaaggagtcttgtactgctcctaaacatgagattcgtgttggatttatcagaaacgcttattcaaaccagtttcttttgccaccattttagactatttgcatgttgtggtacactggtatggtttagtttagcctagtttagttaggcataaaactttaactggctgtgtttgacgtctttcatcttactttatccgctacctttttttgtttgtttgttctcctaagctgtctcgtcataagcatctagccaaggatcattctcctgatttatattcactggagctggcaggtttggatgaaattgggaagcgttatggggaagactctgaacaattcagagatgcttctaagatccttgttgacgctctgcaaaaggtaaatatcaatgcgacatgagaggttggagtatgaccatttcacttttagcctcttaatagaaaaatctgctgtttcaaacactgttgattgaactcttatttgccttctttggggctcctctaattatactggccaaggatggagtagggtcaaaaatgtatattgatatatttcttcctaatgctagaaagaacagcattaggaaaagttatctcacacaaagctttacaaaattattgtggtaaaatatatataacataaaattaccactttaaccatttttaattgtacagttcagtggtattaagtgcaagtacgttcacatgttgtacaaccatcaccatcttctatttctagaactttttcttcttccccaactgaaactctgtactccttaaacactatgagataactgaagtagaacacccagcacagtaccagacagtagatgcataataaatgctagttcccctctgcccttgaagttcttca

SEQ ID NO: 49326 - DNA, 1034 bp, Homo sapiens
aagggggttggaaattggctgttttgttaaaatatatcttttagtgtgctttaaagtagatagtatactttacatttataaaaaaaaatcaaattttgttctttattttgtgtgtgcctgtgatgtttttctagagtgaattatagtattgacgtgaatcccactgtggtatagattccataatatgcttgaatattatgatatagccatttaataacattgatttcattctgtttaatgaatttggaaatatgcactgaaagaaatgtaaaacatttagaatagctcgtgttatggaaaaaagtgcactgaatttattagacaaacttacgaatgcttaacttctttacacagcataggtgaaaatcatatttgggctattgtatactatgaacaatttgtaaatgtcttaatttgatgtaaataactctgaaacaagagaaaaggtttttaacttagagtagccctaaaatatggatgtgcttatataatcgcttagttttggaactgtatctgagtaacagaggacagctgttttttaaccctcttctgcaagtttgttgacctacatgggctaatatggatactaaaaatactacattgatctaagaagaaactagccttgtggagtatatagatgcttttcattatacacacaaaaatccctgagggacattttgaggcatgaatataaaacatttttatttcagtaacttttccccctgtgtaagttactatggtttgtggtacaacttcattctatagaatattaagtggaagtgggtgaattctactttttatgttggagtggaccaatgtctatcaagagtgacaaataaagttaatgatgattccaaatttgtgtcattgcagtactaaatctattttatattgtaaaaacctaacaaaacaggcttttctttcatcaggattggctgttttgttgtacagataatttcatggtgtttcttttacacttgtttattctcgctgcctcctgagatttagtactaatgtaaggaaggcattttaat

SEQ ID NO: 49327 - DNA, 1842 bp, Homo sapiens
ctatgagggttttttttttttttttttttttttttttgagacagattctcactctgtcactgaggctggagtggtcacggttcactgcagcctccacctctcctgggctcaggtgatcctctccccttagtctcctgagtagccgggactacaggtgctcccatgcctggctatttgtattttttttctcttttatagagatgggttttgccttgttgcctaagctggtcttgaactgctgggctcaagctgtctgcctacctgggcctcccgaagtgttaggattcccggcatgagcgactgggcccggccctatgagcattcttagtgtgacacaagattccccaaagatctttttgttaaattatagaaaatgagactataaggatcatgaaaaaagttgatgtaataaggaaaaagacttaaaacttctaacacttacctatattgggcattgaatttataatttattgtggattataaagtgatgaccattgtaatatacttttaaagaataacttgtgaaaaagtatattgttaggatgagatcgcttacctaaaatttattcttcaaagatactcatgctaaatcttggtgtcttcaacgtgtgtatacacacatatcttatatttggcagcaaatggattttcaattttattctcaatcactgcctaacaaggattttctaccacctctgtgtatcaatcatctgtggagctttttcaaaatatatatttgctctataggtgagtctgatgtgtaaccagaggtttttttttgcagtcccttttagggaaaggggagaattgagaccctttgcatgtcatgtgttccaccattaggcagcagtactcttgtttgagtttcgttttgttagtcacacagtcaaaaattccagactgaaacacaaacatgtagtgaaaagctcaaacactagaagagacagggattccacactcacatgtattatatacagtatatgtgcacatatatatcaaatttattgtcacttagcaccttctcggtgttacggttccagctctactataaacattaatatctgttaagacatttgtttcctttttaatccgttcaacaaatacttctggggcatctgctgtgtgctaggcactgttctagagattactgttgtctagaagctaacatatgaagtgaggtgggctggactagctgatctctaaagtctttagtgctagttttctggcattcttttatgtacctcgtaggagagattggattaagttgttatttaaaaaaactttgttatggtatatgccaattgaattttttttgtcactaaatagaatttcattctgaactccagttttctccagtgagcccaaatgtcaagtatagtagaaataggttcttttggaattcttggcatactggctttaggaatagctgtacttctgatgctgttaatttttgaccagaaattacatactctggtgtcaccccttactcctgccattcctttgctgtattgatgctctattatctctatacagtgtgtttttctatttaatttactttgtttaggtgttttgattaattttgtcctcacaattctatctttaaggttagtggctttcattctaagtcagtgataatatccttagcacctagaaagtgcctggcatatagacatttagtaactgttggatgaatatagtttatcacattcttgctattttacttattttttgctaaatctttttacttctgggagtcacttttcttactaatctcattacaatgagaaatcctggaagagatctcaattctttctagtcagacccttcatttttcagatgaaa

SEQ ID NO: 49328 - DNA, 1044 bp, Homo sapiens
ctgaagggctttattttatttagaatcctgtgggttaattgtgcttggcccacagcttgtactgtgaatttagggaccatagactttgtagccaggggtataatttctttgttggcagagcaacttaaagtttggttaagttttcatctgcagtctagtgctttaataacataacttgctaaaaagtgatatagcctgctaggggaaatagtatttagggggaaattattttttccgaattgaagatgaaaatacacagataaatacagtaatagtgatttttatctggcacagatggtttcagagaaaatgttgatacctcatttcttattttactgtaagagaactagcaaaagaagcttattttgtttcttaggtgagtcattctcaaacttggtctcaggatgcttttatactcttaaattattgaggatcccagagagcttttgtttatgtggggttacagccattgatgatttactgtattagaaatgaaaacagacatttaataaagttatgtatgcttttaaaagtaacaaaaccccactgcatgtcaattagatatttttatgaaaaataacttttccagaacaaaaattagaagagaggcattgttttacatgttttacaaatctcctatctggcttaatagaagacaactggattctctgcctccttctgccttcaatctattgcgatataatacgtcatatagcctttggaagaactccatagtacacttgagaaagaatgacagtgaaaatggcaagtaaagtcttaagaaaacaattttgacctctctgacctcttgaaaagatctcagggatctttgagaaccagtgtcttagactgccaagagaagatgtgatgttatcttttgagtggcttatctactgtaaattttattttaactgagatatataacttacagtaaaatgcacaaatatgagattgtatagcttgataaatttttagaaaatatatacatctgtgtagtcattcagatcaagatacagaatatttccagcaccctggaaggttccc

SEQ ID NO: 49329 - DNA, 1044 bp, Homo sapiens
tcactgcaacctctgcctcctgggttcaagcaattctcctacctcagcctcctcagtagctgggattactggtgcccaccaccacgcccagctaatttttgtatttttagtagagatggggtttcaccatgttggccaggcaggtctcgaactcctgacctcaggtgatccacccgcctcagcctcccaaagtgctgggattgcagatgtggccacctctcctgttttaaagatgatcatcccttgcttttagctgttctgcttctaattttatatgtgatattctatcaaaaaattgctgacctctggtctttttgtttaataatagtgtctctataattatggggagaaggtaccacatactgaatttaaatattttcgtcttttatatactatattttaaatttttaatgtttttatttttgctttaacattgtatttgaaaatttcatttgcagtaactcgatacagctttcactttagatttttctgttttgagtattagcccttccggtgttaatttgagtgttcgaatctttaggattaattgtgcaaagatataaagactttagagaagccagccaggcacggtggctcacacctgtaatttcagcactttgggaggcttaggcgggtggatcacgaggtcaggagttcgagagcagcctggccaatatggtgaaacccagtctctaccaaaaatacaaaaaaaaaaaaaattagccgggtgtggtggcacatgcccgtagtcccaggtacttaggaggctgaggtaggagaattgcttggacccgggaggttggctcactgcaacctccacctcctgggttcaaacagtctccctgcttcagcctccctagtagctgggattataggcgcccgccaccacgcctatagcaaagatcgcactactgcactccagcctgggcgactgagcaagactccgtctcaaaaaaaataaattaaaaaaaataaataaataatgactttagaggatacttcttctcagatctttcttagtggaatttgtgtatgtaaaactat

SEQ ID NO: 49330 - DNA, 1149 bp, Homo sapiens
agactgtctcaaaaaaaagaaaaagttaattattaatactgccttgtctaaaatgtcataaatgaaatgagatctttcttttcagtgtattgggttagcatttcatgattgggttagtaacttagaaaagttagataattttgtcaaaaattggtaaaaagctgttaacagataactttgagtttatcttttttttttttgagacggagtcttgctctctcacccaggctggagtgcagtggtgcaatcttggctcactgcaacctccacctcctgggttcaaacaatctccctgcttcaacttccctagtagctgggattataggcgcccgccaccacgcccggctaattgttgtattttttagtagagacagggtttcgccatattggccaggctagtcttgaactcctgacctcaggtgatccgcctgccttggcctcccaaagtgctgggattacaggcttgagccaccacgcccggcctaactttgagtttatcttaacctgttgtttcaacagagtagattgatagttaggcatacccgcattctgtaacatttgatgtgacttatgtctaatattaagtcaacattgctcacctattggctgatttagggactgggatttgtcggaacttcacagcctttgtaacgatttaaaaaaggagttaagaaaggtgttttctttttaaaataagtcttttcgttttgatgatatttttcaacattagtacatgcatttttggattatccagatgactgcctcataatcaagaactgttaacatcatttcggtacttatgttagcttaataatgtgttggtgccaagggcaaatgatgtcacaggatactatgtgtatagagtagtgtaatcattcaggtagaagtaggaacatatgatggtggtatagccatgcaaaactcgaacccatgccttagcattcagtaatacactgccatctgtcacgttatattaatagttttatttgtattccatttataaatttattttagttttagttatgagagcagtaagcataaggaatttaatcctaatttcatttctgcatttatttaagcaacattaaaatagaaagtgattaaattagtttttaaaaattctgttatgatagaaccagaatttgcaag

SEQ ID NO: 49331 - DNA, 1046 bp, Homo sapiens
tttctaaaagaatacatttctgctgccacaaagaattttgaatgcaggatgcagttctgttgcagtgacttataggaagtagccatggatgtacacagtaatttagtgacaaaaatcaggaatctgtaaggggtgtgtatgtgtgtgtgaatagtgttggaaataaaatacgagcatttagctcaagtaacatatttgaatttaacaaagattaattggacatctttatttgcattaacctgaattattgattggatttaaagctgtctagaagtagcatcacactggggatggggggggcaggaaacctgtgcttaatacagttatcttgactggctttgggtataatttatcataatgtgtgataagaatgataaagtctgtgcaaatgataatggcagtgctggtggaactaggaaaagaaaagcttttacctttgagcaaaggccacattttaaaataacttagggatgtttaggtgtatagctgtgggctcaactattaaaaataacttactgtatttcagactccttaacatgaacctcctcatttaacacactctgtcagagggagagatccccagacttctcagccactcctgcctgtttgagaaggattctcaaacaccccctcccccagagaaggggcctcattttgttgcccaggctggcctcaaactcctgggctcaagtgatcttcctgtctcagcctccggagtagctggggctataggtgtgcaccaccacagccagctaatttttataacatgattttttattccatatatctgaggaatacagctaattgtgtcttagttccttgatatgtactataacagtgacaacgatacttaacatgcagaaattgtgaattaagtgaaaaatccaattttgtaaaacatgtttctgcatcaaaaactaaacagtttgtcttgggagtggggttatggtgagattaatggtagtttccccctcccttttctgacattattgatgtatggtgtgatagttaaaactgtaggacactggcacttgtactgtctgagt

SEQ ID NO: 49332 - DNA, 1299 bp, Homo sapiens
ttttgagacggagtttcactcttgttgcccaggctggagtgcggtggcacaatcttggctcactgcaacctccacgtcccgggttcaagcagttctcctgcctcagcctccctagtagctgggactacaggcatgcaccaccatgcccggctaattttgtatttttagtagagatggggtttctccacgttggtcaggctggtctcgaactcccgacctcaggtgatctgcctgccttggcctcccaaagtgctgggattacaggcgtcagccactgcgcccagccagtctttgaagatttttaagcagtgctgtgacatattttgcatttcagtaaaactcatagtgatgatttttaataccgaaagaacaaaacaattgtaggaatggatgcaggcctgacagtcactgctttcaaaagaaagctcaatcccttttccctgttgtttccttttctccccgtttgaatttatagagaacaacagattctgtagagaaccttcatggtatagttggaagagccaagggttttagagtcttaacggaaattattgtgatcttgtataagctcagtgtacttaatctcttagcttctatttatgtctgttaaattggactgatggctgtatgagataggtattatgattaaatgagattatacaaataaagcacctactgttgtgcttgatacacaagtaagtacttaaaacttttcaagaataatatacaaactaagaactggaaaggagccacagagaacttttgaatggaatggaaccaacaagtccacaaaagaaaaaaaatctttagcataaatactgagacctgtttcgccttgcccacagggtggttatggaccatagtgtctaaatataattgattgtgaggtgtatgctacaagtaattataagcaattaaataattagttaaaatagtaatgtttgcaaatgagattacctaaaaatattagagtcaagattatccccttaataattattttcactcacatttcatgtgttttcgattgaggcaccaaaagaatccttgaagtccagcatataagctattaatgtttgctgtttttattttgtgctctgctttatacagtttttgttttttggcaatttctctgtgtccatagaagtgtgtcaaacctgtgataaccttattttagtgtcctttctcatgctgtggtagaaaaactgctgtgtaggttactttttcttctagacaacaatgcactaaaattttgtctttaaaaacataattgaatctgtcatagcaacagcatgttcaatt

SEQ ID NO: 49333 - DNA, 1040 bp, Homo sapiens
ataggtaccatagattgaggtctgaggtctgcagctgtggttgtccgccatttcagatgattgatcttgtaaacagatgatgtaattttactttattggtaaaaacagtacagtactataaatacattttctgattttcttctttccttttttttcccttttcttttttttttttttgagactatctcactctgtcacccaggctagagtgcagtggtgcgatcttagctcgctgcaacctccacctcccgagttcaagcgattctctgcctcagcctccctagtagctgggattaaaggtgcacaccatcacacctggctaattttttttgcattttttattagagacggggttttaccatgttggccaggccggtctcaaactcctgacttcaagtgatccgcccgcctcagcctcccaaagtgctgggattacaggtgtgtgagtcaccaccccttctgagtttctttttttctctagcttgctttattgtaagaatacagtattataatacatgtaacaaaatatgttagtcgcctctttatgatcagtaaggcttcttgtcatcagtatgctgttagtagttaagtttctgaggaatcaaaagttatttatgggccgggcgcagtggcttatgcctgtaatcccaacactttgagaggccgaggcgggtggatcacgaggtcaggagttttagaccagcctggccaacatagtgaaaacccatctctactaaaaatacaaaaattagcccggcattgtggcacctgcctgtagtcccagctgcttgggaggctaaggcaggagaatcacttgaaaccaggaggcagaggttgcagtgagccgagattgtgccactgcactctagcctgggcaacagagcaagactccgtctccaaaaaaaaaaaaaagaaaaagaaaaaaaaaaaaagtagtgaggtctggcgccctctactggtgaaggctaagtatagcttgtgttgtacagttaggtctcttgtctctagtgagtcaaatattttaatggaaaaacaagggt

SEQ ID NO: 49334 - DNA, 1034 bp, Homo sapiens
attctaaccttttttgcaatgtttctgacttgcatggctttagacaaaaatcaaacctttaatttaaccttactcttattttaaggtgtacttgatgatttttagagctcttgggtttgtgatattcaacctaatattctatgtctacattgtgttctttttcttctaaaaactttacatttttaaagatgactggtaatttaaaataacaaaggaatgaaacaaattacattatccctcactcttacattttgtttttctctactttttaatgttaggattttattttacaagatctgacacggttgtaccaagaagcagcaaccaaagtgttaatcactgttcaatttagggctcgctttttggatatgctttttatgtgctggcataaagggaatttctaaaatcagatttttcacttaattttttttaagcatgcctttaaaaaaaattctcttagagaattttaggctttagtatgtagtaaaactcgataaatgaaacagccttggcagagacaccgtgggatgaacactcttggatgtggttgctgggagggtgcaaattttctggaatgaaatttggcagtatttgtcagtggccttcaaagaaattgtttatactgttctagtaattatatatccaggatcctatcctaaggaaaagttgaagttcaacacaaaggtttatatatgagaacattaattacagctatgtttatgtttgttagcagtaaaaattaccaaatactaaacgtccccttaattttgtttaattcatgcaatattatctggccattaatatttttttaagattcttaatcaaaaaattgaatacctagatatattgaatggaaaaggacagagacttatgtataattccagttttattgaacatatatatggacagtttttatttactcttaaagattacaaggaaataaatatcggtggtgtttataggtgtggaattacaggtgttttaaattttattttttatattttctatgagcatgtgtaaactacctgtatatc

SEQ ID NO: 49335 - DNA, 1045 bp, Homo sapiens
ataaaagtaaaaaatagagagcctttttacccaaggtcaaaacataattctgtggcaaaattgggataaagaatccaaagatcctaaaattggtcctgtactcaccctaccatggtgattgtgtacttaaataatatttttctgagtaaatgctggagtgtagaatcttcttaatttcagtattatttatgggagcatttctgtatgtgcaaaattgttataaaatttcataattttccattaaagcaacacataagtatattttaccagtattatattttgtaaatgtgttttgaatttccttatattatttaataatagtgtgagcaattaagaaaaaattgttttaatttctgctttcaaacacgtttttgaattaacatttaggaatggatacagcagaacaatatcttatccatagtgttgcgagatagtcttcatcagccacagtatgtagaaaagttagagaagattcttcgttttgtcatcaaagaaaaagctctgaccttacaggatcttgataatatctgggcagcacaggtaaggaatttaagatgatggctatttagtttttaaaataaagatactaaaaactgaagaaatacagtagctgtcatgaaatggatgcaggcttgtattgtttgactttgagaacgtttaaatgcttgttaccctgccaggaatctttttgaaataaccaataatcttttaaaaataaaaatattcttttatctgtatttgataaaggttgagaatttgtcagtggttttaaataaagatgcaaacagtaaaatcataaggaatgtctattgaaagagagtaaagacatctgtaattggtttcttcatagatttaatagaaagcaaaaacctccagtgtcaggagaattaattcacttgattatttataaagacctgtaataattattccagagaatttataactcttcagaaggattagtaacctttttagtttttgagttggaaactacaactccttctattatcttaatgacagttttctaatcgtggatttcttgggaagc

SEQ ID NO: 49336 - DNA, 1095 bp, Homo sapiens
tggagtgattgagaagggaacaagcaagctgctagtctccgaatgagcataggacaaaaacataaactttctgagtggtgtgatagcagcctccaagccacacagacatgcagtggtaaagggtaaaaatctactagtcaaggaggcttaaacacagcgtttggccaataaggggcttatactgatgcaggggcaactcctaggtaggcaggctaaaggattaaaagaaggaggaaaacatgggggcagagctgtcggaagctgtgcactgtgagggaaatagactatgaagtctatttcccagtcactatatcccatagccatagcccttatttcccatagtcatatttctgtttcccatagtcatagcccagtcactaaacaagcaagcaaacgggtgggggaagggagatcagtattcaggttgttgttgcatatctaacatgtccagattttgatgacaaaaattgaggcatgcaaacaaatgggaagatgggacctgtagactgacgcagagactgcctttgaaggaggccaaatggagggctttgcagacagacttgacagcaaagacttgaattacaaatatgctcatagaactgaagaaaaccatgtctaaagaatttttaaagtatgatgacaatgtctaatctaaattagaggatagtaaagagaaattattttttatttaaaaaatcatgtagagattttgtacttgaaaagtataataaccaaaatgaaatattcataagaggggctaaacaatagatttgagctggcagaagaatgaatcagtgaacctgaagatagattagtagaaattatgcaatctgaagaacacaggaaaagtgaacagaatctcagggaaatattgggtaccatgaaggggaccaacattaattttaatgggaataccagatgaatgagagtgacagaaagagacatagtcactgaaaacgtctctaatttgatggcagacaagaagcttaaaaaagaattgcaaatagggtaaatgcaaagagccccagactgagacacattatagtcagagagaacaattggaaggtggtgagagaaaaacgagtcttcctgcac

SEQ ID NO: 49337 - DNA, 1040 bp, Homo sapiens
tactccatccaacaatagtgaaactactaaaagcacatatcatcttaatagatgcagaaaaagcatttgtccaatccagcctcttttcaatatagaaaggctcaaactaggaatagaagggaacttcctctacctgatcaagactgtcccaaaaaacccacagctaacctcatactaattaatggtaaaaaactggttgctttccccctaggaacaagaatgagacaaagatgtccactccaaccacttctatttaacattctgcttgaggcattagccaggataactaggcaagaaaaagaagtagacaacccaattaagaaatggatgcaaaggatctgaatagaaatttctgcaaagaaggcatacaaatggccaatgagcacttgaaaagatgcttagtattattagttattaggggaatgaaaatcagaaccacagtgagataatgctacttcatacctactagggtgacaaaaaagacaacagtaaatgttgatgaggctatggagaaattggagcattcatatagtccttgtgggattgtagagtggcacccaccttgcaaaatattaatcgtagaatttaccatattacccattcccagttacatacccaagtaaaatgtatacataaatctgtacaacatgaatgaactttgaaaacattatgctaagtgggaaaaagtctgtcagaaaaataccacatattgcatgattcttttttttttttctttttttttgagatgaagtcttgctctgtcgcccaggctggagtgcagtggcgccagctcggcacactgcaacctccgcgtcctgggttcaagtgattatcatgcctcaacctcccgagtacctgggattacaggcacatgccgccattcccggctaattttttttttgtagaaacggtttcgccatgttggccaggctggtctcaaactcctgccctcagatgatcagccctcctcagcctcccaaagtgctggaattacaggcatgagccactgtgctcagccatgattccatttttatatgaaa

SEQ ID NO: 49338 - DNA, 1289 bp, Homo sapiens
tacaggttgagtatccctaatccaagaaatccaaaatttgtctggtcccagacatttcatataagggattctcaagctgtattaagtatctttaattcacatcctcttgtttaataagaaaatacttagtgttaaatccccagcattattttcttggcaacaaaatttcagagtctgctgaatatgatgatgtctgtctttctttttccccccagagcattccgcggtaaacacctctcttttgtagttcgatttccaaaccagggcagacaggttgatgacttggaggtatggtctcatacaaatgatacaattggttcagtacgacgatgtattctcaatcgtattaaagccaacgtagcccatacaaaaattgagctctttgtgggcggtgagctgatagatcctgcagatgatagaaagttgattggacaattaaacttaaaagataaatcggtatgtatgtatagttaacagatttttcaataaaatcaaaccagagactatcgtttaatcagtaaatactaattgagcatttgttatgtttgggactgtgttaggtgttagagttatagcattaaagtatagcatgtagtctttcggattttttggttggtatatcactaagttttgtgttttgtgtaagtatttttccttgtttttgatattaacatagtatataattttcagcttattacagccaaacttacacagataagttccaatatgccttcaagccctgatagctcttctgattcctccactggatctcctggaaaccatggtaatcattacagtgatggtcccaatccagaagtggaaagctgtttgcctggagtggtgagtagatacagttttgaactactgtatgtaaggcatcatgctagggtttttgagaataaagtatatagagtggttctttcttttcttgaggagcttacagtttaatgagacaaaaaaatacagttaaccaccaacttcagaatggatccctctaaaaggtaattgtaacacagttggaatttaaaacataatttccccataggtatagtattgttacttttacataaaattaaccaattagagcttaattataacactattggatgtataaatttagaggaaaacagtcatccctcgtatacgtggagaattggttccaggacctctgcatatacccaaaatgctgcagatgaccctgtgcaaccagatatacaaaaagttagccttccatatacttgggttttgcttgctggaaatactgaattttctgtccacatttgattggg

SEQ ID NO: 49339 - DNA, 1870 bp, Homo sapiens
taaatggaccgtgctttttggtatagactataacaagagttgacagatgacagcccacaagccacatcaagccccctgcttgtttttgtgcatcccaagagctatatttttaagtggctacaaaaaaaaaatctagaagaataatattttgtgatacatgaaaattatatgaagtttaaattttagtgtccatgatcaaaaccaggctcatttgtttacattcagtctacatgactgcttttgtcttaaaatagcaccgcccaggagttgtggcagaggccatatggttcacaagcctaaactgcttaactttcctggccctttacagaaaatgtttgcctatacctggactataatatgggtcatgtgtcatctgcggtattgttccttttttatccttagaaacaaccacttccaacttctcgcttttactttagtatatatatgtaccattatgtctggagtgtcctcatacagctatttctttgttacttacagatatatactgattttctgctgtgtagatgaaaacttaactgttacatacccccacatcctcccagtatttgcttaaatccagattcaacatctacgtttccaagattgtttgaaatatagttctctagatcactgacaacttttatcctggatttaataatttcccttttattttcctgattgtacacctatcacttattcttcccacatacttttttttgagatattttttatctgaatgtgggcaaactatcacgtttgattaatggtttgtgtatagaatcctaggtttgaaaatatattccttctggctggtggcattgctgatgagaagaccaaagtcctcttggtttctattcctttgcatgtgaccttcgtttctggaagttttggttttatccttacgttttgaaatattatgatgtgccttagcgttaagtctgttttgtggtgcgtcacctgtgggcctggagatttcctcagttgagagagatttgtattctttgatagttttctcaccagcattttgcgttttgtgtgtctttgaaatgtctaagtgtgatggtgaatttactagatctgattttaccttttctctcttcccttctctctttaatcttattccacctttggggtggcttctttaaccttttccagctcttctgttggcttttcccctccaaatattctagtgttaaaatttcaagacctttgtctccttagtgatccttttccatatacaggattttgtttttcactaacacattcttgcatttatgttctaatatatgtgtgttcctttaaaacctaatgttcggcaaaattatgcactaaaaatagtagggcttttggggaaaaagtagagttttggcagatcattcaagcctatacaacctaaaaattttttaaatgtattttttggaaatacttacaatcttacagaaaaattagaagtataattcaagaacacttgagagtaatttactggtttttgtagtcccatcgcccaccaaatactttccctacaaacaaggatatttgtctgtataagcaaaattaagccatctataccaggaaattaatgtcgattcattactgccatctacttagcagactctattgagtgttttcagttatctccttcacagcaaaaagatatagttcaaactcagatatagtcagccctccatatacatgggttctggatctatggattcaaccaactgtggattgaaaatgtttgggggaaaaaacattgttgaaagttccaaaaagcaaaacttgaatttgccacatgctgagtactgtgttgaatccacacgaatgaagctatgtgtaagcattgtattaggtgttacctaatacaatgtac

SEQ ID NO: 49340 - DNA, 1063 bp, Homo sapiens
atttctctctaggctattactgatggatattatgttttcttctttttccagcatcatcttttactgtccttgagttttttaactagctttttatattaaaataatttcaaactgtttacaaagaatacagttggctcccaaattcagtaattaacagtttgccgtagtgatggcaaaagtttcctaacatttggagaacaagttgtagacaatcatctttttcttcctaaatagcttagtatatgtcttctaaaaacaagaatgttctcacttacattaacatagtattattcaaaataaaaaaaatttagcatatacagtaatatcatctaatctgcagaccattttcatattttgacactttcctcagtattggactttataacaatgttttctggttgaggatctaaatccaggttcatacattgcataattattcggtatctctttcagttgtctttaatctggaatagttcctcagtctttgtcttttgtgactttgtttttgaatggcacatgtcagttgcgctgaatatctctcattgggtcttatctgttctgatgattatatggaggttgtacatttgacagagtactacttgtatgttgatgtgtctaagagcatcacattgagagacacatgtcactgtgtctttggtgacattaacccagatcacttagttgatagctgccaggtttctcctctaaaggagagagatgctttgtgtagagagatgctttgagacttcgtaactatctttttcctcatcaaacatttgttttatcatctattgtgattgttgcctaaatgtttttactatgatggttgcaaaatggtaattttgttttaattttgtcatcctttctacatttattagttgacattctataaggtagtgctttgttttctcgcctttatatttgtcatatatgatcactcttatgggtttattttattcattgggttataaccattgtaatggttatttattttgatgctcaattgtcctagatatggtcagtggaagcccctataggttagacccagacatacaacctcaat

SEQ ID NO: 49341 - DNA, 1039 bp, Homo sapiens
ctcatgcttgtaatccctgcactttgggaggctgaggcaggtggatcacctgaggtcaggagttccagaccagcgtggccaacatggtgaaacctcgactctactaaaaatacaaaaaattagttggacattgtggtgggcgcctgtaatcccagctacttgggagactgaggcaggagaattgcttgaacccggaaggcggatgttgcagtgagctgagatcgcgccattgtactccagcctgggcaataagagtgaaactccatgtcaaaaaaaaaaaaaaaaaaaattgaatccccaaatacatactggccccaggggtttcaaataagggattgtgagctgtgtacaaatctgcccctcagatggagtttataatcctatagtaacgtttaagcatagttatttacaaggtacttctcacttaatccgtatagcaactcagaagtagactttgctgatggagaggcacaaggactgtagaaattaaatgactaacaagggcataatgatcactaaatgctaacactaagactgaaggttttctgcttcttgagttctgacatttctgccacacaaattgggctctgggtgtaattataatccaccagcaaatatgtgaatccctacctatgtgcttggcaattaaaaccaaagtcaaataaggcagttcttgcactcaaggaactttgagagagaaattggtgccataaaaggtaaaatactttgagaattggaaaggccataacttactttctacctggaaggagcaaaagtgaaggttttgtgcaggatgtagcatgtgagctcatgtttgggcaggatttatatgtgcataaaagtagaagatggtcattgccagtgcgctctctctctccctttctcactcccagttatgtggcttttacttcatgtgtctttgaactccatacactttcctcctcatggtctaccctgatctaagcagtctggacccattgcctggacaatcatagtatccttgatcttcccacctgtagtgttgtactcttctaatctg

SEQ ID NO: 49342 - DNA, 1675 bp, Homo sapiens
aatgtattaaatgtgaaacattttttatttcagaactgttcgtcaggtggcacaggagcagttctttttaatgtgcaccagatgttgcatgggacaccggcctctacttttcttcattactctactctttactgttttgggggtgagactttttaaaatatgcttatcaatgtgattcattctttaagcaagaaacattcagaaatttgtggttttagcttgcattaaagttaggacagtctatatttaataaatgaagtactactttatttcccgcactgtggtagtcatcttctctagttaactctgggtttttaaaaaagtggattttgaggatggacgtgtaaattgatattattctactctgtttccagagcacagcaagagagagagctaaacactcaggcgactactttactcttttaagacaccttcttaattacgcttacaatagtaatattaatgtacccaatgctgaagttcttctcaataatgaaattgattggcttaaaagaattagggtaagttttagttaatactccatttatatgtcattattagtaaatagaatgttttattgatgatttatattttttgagcattttggttaaatggaaaactccaaagattgataaaagggaccaaagaatgtactctgcatcagtggacgttagtaatctgtgattcacaaaatgcatatctagtttagtaaaatgaattgcttacttgacacttgaaatactgatgttcagcttcttttattttagcattttgggcctttttgcaaattctaatttttaaaaaaagtattcttgaattgtttatgtcaaaaatgagtctgatagagcagaactttctaccataacatctgatactttttacttaggcaaaatgatacaagaatttatttctgaagagatttgtagtttttaaccttcaaattagcatttcttctagtagttcataaagccaatttctagaaagttctgaagaaaacaaagttgtttgaatggaaagacttaaggaaattatctcatatccctccagctctgtctcgttctggctcctctctccctctttacctccctttcataagctagacatttgatttcttcccccccccaccccaccccccgcctttggcaggatgatgttaaaagaacaggagaaacgggtattgaagagacgatcttagagggccaccttggagtgacaaaggagttactggcctttcaaacttctgagaaaaaatttcatattggttgtgaaaaaggaggtgctaatctcattaaagtaagttctgtgttcttggttgtaagctacatatcataaccttctaaatgtttataatcaaatttaattaatttatagtagtatcatgtctttgtactttcttgatcttttctcttttttaagaatctttatcaaatttacagtaatttaagaaatacagttatgccttactttattcaagagacatttctaaatttgtatttaaataagatttcatggctggacttgctggcctcatgcctgtaatcccagtactttgggaggccgagtccagtggatggcttgagcccaagagttgaagaccagcctgggcaacatggtgaaaccccttctctacaaaagaaaaaaaaaaaattgccaggtgtggtggcgcacacccatg

SEQ ID NO: 49343 - DNA, 2306 bp, Homo sapiens
catttggcaagataaatttcatctcatgaaacctgtcataaaattcaaactccagattaaaaggtagccaaagtaaatgccgtagagtatagacgtaaaactttattttatttatttatttttttgagacggagtttcactcttgttgcccaggctggagtgcagtggcgcgatctcggctcactgcaacctctcgggttcaagtgattctcctgcctcagcctcccaagtagctgggcttacaggcgcctgccaccatgcctggctaattttgtattgccaccatgcctggctaatattgtatttttagtagagatagggtttcaccatgttggccaggctagtcttgaactcctggcctcaggtgatccacctgcctcggcctcccaaagtgctggaattacaggtgtgagccaccgcacctggcccagacttaaaactttaagttgcatgtattggaaaacctttcaggtcttcacttagaagttccgtaacgttatgagttcgaagaaaatctggctttgaagattagaacgtgagaagttaccattttggtgcaccttatttatgttctcatttaatgcccacaccaggcgcatgaataggctgcagatttcagaccttacagataaggaattgaagctcaaaagggcaagggcaatataaaatattaataacagaaaaagcagaaataagcataattgatgctgttttaagagaaaatcgctatttagaacacttaagaatataattgattatagtaaatctttaagaacatgtcaaattactttttgatgtgtttcagaatgtttggaagttttaaataacatctcaggaatttctgaataaattgattgcttaaaaggttagacctttagctgtcctatcaaatctatgtattgtgagaattcttgtattttttttttaacttaatgggggttaattttttaatcacagattggagtatagtacaacgttgtttgcatccttccctatctgccattgttccctgtcaacacagaaatatttacctaattccatttttggccatgcagtttggtatgatataattaactggccccctagacaatgatacttaatgttgtttccaggtttatactaggtggagggagataggaagatgtacagtgatttacaattatcacaaatctgctgtcttgcttgctcctcaaaatagcattatagatatcaggaaagcaagtgttacttttattattacatttactaggaagaaacagaaagttacctaaaggtgggggaaaaaaagtggtaagcatcagaaccaggatgtgagcccatgtggttttaggattatttaaaactgagaaaattataatgtgttgatatatttagataacatttcattccttgccaaatttgaaggcaaaagtatcaaatattaagaaagtgaataatggctaaaaataaagatgcaagtaaagttagcatgtagacattagaattatactatcttgtacttttgagactgccatagaagcaacatcatatgaaacgggtttgcgggtgattggataagaagctgcacagtggtgcctgttgctgtatattttagattgttggaagatgaagtgcaaactcagaacactgcttcaggttgctgtagggttagtcgaattatgggtggtagaattattgccagggttgctttgtcagcataatagagtttgaaaggacagaatggccgtgttcatgctacaagaatctttccttctctcagcttgtgaagcacttactgagtgggaatatctgccacctgttggaccccgcccacccaaaggattcgtggggctgaaaaatgccggtgctacttgttacatgaattctgtgattcagcaactctacatgattccttccattaggaacggtattcttgccattgaaggcacaggtagtgatgtagatgatgatatgtctggggatgagaagcaggacaatgaggtaaatttgagttaccatttctgttttctgtgtttcaagttatgataccagatactattctctcttaagagagtgttatactttcatcaaacgtattaaagtatatttgaaagttagggatgggccgagcacacacctgtggtctcagctactcaggaaactgaggcaggaggattgcttgagcctgggagctggaggctgcagtgagccatgatcatgccactgcactccagcctgggttacagagtgagaccctgtctcagaagaaaaagaaaaagtaagtagggatggacttctcccagccagcatgaactgctacctcttaa

SEQ ID NO: 49344 - DNA, 1771 bp, Homo sapiens
agctcttacatttaggattttgatccattttgagttaatttttgtatgtagtgtttcataagggctcaactttattcttttgcatgtggattatccagtttacccagcaccatttgtggaagagtactagtcatgcaccacataacaacgtttcagacaattacagaccatatatatgacagtagtccaatgagattataatgtcgtatttttactgtaccttttctatttttagatgcacagattcaccgttggtttgcagttgtctacagtatgtagtacagtaacatgctgtacaagtttacaacctaggagcaattggctataccatctaggtttataggtacactatgatgttcacatgacaaaatacctaatgatgcatttctcagaatttatccctgtcattaagcaaagaatgactatactgatataggtatattttattgacagatctgagcattttatatacaacagctacacaaaggatatattacccccattcacacataaagaaacttgaagcctagaaagtttaagtagtttttacttgctcaaagttacttggtttataagtggtagagcctgcatttatgtctagttcagtctaaattactatgctaatgctacactatattatctatctttcttacacatggtcagggttatttggttatgataactaatatgtgaaatggtggggataaacactaaataactaaaaatttataaattgaaaagtgctttggaaatgagcataataggaatacaaatcatttgttcaataactgcttggcatttgtctcaacgtattttattatactttagctcattggtgacattttttggtttctagagcaatgttgatcccagggatgatgtatttggatatcctcaacaatttgaagataaaccagcattaagtaaaactgaagatagaaaagagtacaacattggtgtcctaagacaccttcaggtcatctttggtcatttagctgcttctcgactgcaatactatgtgcccagaggattttggaaacagttcaggtaaactatggatggacagtaatagagatacttcttaaaatgaacatctcaatacactaacattaaacctctaaaagacatgttggaaggcatctttttttaagcactggtaatattcaaactgtccttaattgggtgggtttttttttttttttttaggtccccttaggaagaagtagaaactgccatagtaagtaagggcaacatcctttagtctcttaaccatattattaactttttattaggaaaacatctaataaatacagaagtagaaaaaatagtatgaacccctgtatacttgtcacccaacttcagtagtagtcaacttgtggccagcctcatttaatctatattcttaacctattttttttttctttttttctttttctttttctttttttcttttttttttttgagatggagttttgctcttgttgcccaggctggagtgcagtggtgtgatcttggctcactgcaacatccgcctcccagattcaagtgattctcctgcctcagcctcccaagtagctgggattacaggcacccaccaccacgcctagctgattttttgtatttttagtggagacggggttttaccatgttggcccagactggtctcgaactcctgacctcaggtgattcccatctcagcctcccaaagtgctgggattacaggcgtgagccactgtgcccggcccctacctatttctttctagattgtttt

SEQ ID NO: 49345 - DNA, 1035 bp, Homo sapiens
attccatctctgccttaaggctattttagcatttctgtttatgctcttccaaactgaagaacacaaacagaggcttatactgggttttttttttttttgagacagagtctcactctgtggcccaggctagagtgcagtggtgtgatctcggctcacggtaacctctgcccgctgggttcaagcaattctcctgtcttggtagctgggattacaggcgcctgccaccatgcccagctaatttttgtatttttagtagagactgggtttcaccatattcatcaggctggtcttgaactcctgacttcaggtgatccacccgcctcagcctcccaaagtgctgggattacaggcgagagccactgcgcccagctgaggcttacactttttaaactttcgtcttgtcattcagttacaattttttctcttgtaatgcctttgcttttttgacttttcagttactcgctgtgctagtggagctcggtttgtatagactagcactttggattatccacactttagacacataatctactcttgacacaagcgggttagttaactacacttcctcaccccactcttttattttgaaaagtttcaaacctacagaaaagatgaagaagaggtataattatcacctttatgttatattctttatgcggttttactaattaacattttgccatatttgcttatcttgccatatgtgtgcttggtttttggtttattttttttttaagttttgtttgtttgtttgtttgttttttgtttttttgagatggagtctcgctctgtcgcccaggctggagtgcagtggcgtgatctcggctcactgcaagctccccttcctgggttcacaccattctcctgcctcagcctcccgagtagctgggactacaggcgcctgccaccaatgcccagctaattttttgtatttttagtagagacagagtttcattgtgttagccagggtggtctcgaactcctgacctcgtgatccacccggctcggcctcccaaaatgctaggattacaggcg

SEQ ID NO: 49346 - DNA, 1081 bp, Homo sapiens
agaataaggcaattttcctacttatgtatgatacagttatatccaagtaatataataacgatttttaatctctaatattcatcagtatatattccgatttcccaaaagtggtctttataacttatctctctatcccaatctgatactcatgaaggaatcacaaggatttggctgttagctctttagttgccttttatgtaaaataatctccctaacttgtgacttgtatcgcactgaaatttttaaagaatccaggccagttgtcttgcagaatgtgttttttgatttgtgtgattgtttcctgatgattagctttatgttaaatgttgagggggtgggggcaataaaactacataattgatgttttgtgtttctcactgcactgtattgggaggcatgtgttatccacttaattattaagtgatattaattttgatttcttggtgtcttaacagatctctcctttataaagggtaccttttcccttttgaaattagttgattacatgtttgaaagtttgaggagttgaatatggtttgaaagtaaatagaacggactggtgtaatttccagtaatgaaacaagctgatttttaacaaataatatatttgattttaaacttactgtatacaaatttttacttgtgtaaaatataatagagatcagattatttgctatgtagaaaaggtttttacaaaagtataaacagacagttcttgcatactttaaaatgtcatttcttgcttagaacaaatacacttaaattctctatatacattattctgtatatacaaaatcaggtattattgatagtttccagcagtgcctgagttttagcagtatgagttctcatttttgtggtatgtagtgatggtgtcttttcttagattactcaagagattaactctagaacaagttaaacctttctctcttcacttgggaaaaaaataaatttaagagtaactagatctgatctttttactatttataatccaaaatttaagcaaaatgaaagaaataaaatagtgattgtaacatccacataagagtgagatccaccacctcatcttaatagtatcttt

SEQ ID NO: 49347 - DNA, 1034 bp, Homo sapiens
tatcacctatgttataaaaccatttattttggaaacttattagcagttctttgagagagatgattcacacgcattatagtaatgaataaggtgtatctttgggagctcccaaaccctttcaccctcaagtcacttgtgttgttttggccttatgcaccacttagagaagtcctgaagtttaaagattgagattgtgggctgtaaagccatactgcctgccacctgcagctcctgagacctgaggcaagttacttgacctctctgtgattactagttttcatcttttaaggttcagtagtacacacttgagaaggttgtaaggattcggtatgtttttacttgtgcggcacttagtatatattacctggcatctgaattacccaacaaatattagctactcttattgttattgtagttctttggtttgtgcataggaaaccaccttcgtgggaacaacagtaaacatcaaacaggtaataatggctagataacaatgacagaaaccagtcaacaatttaccatttgcatattattaatttcagcatttaaatcagctgataggattatcttgattatgctcattgtcatgtatttgtttatacttaaaaattcagataagtcttaatatcatttaaaagtttgcttggggtttttttttttttcctgtggattttaatagaacatctggtaactttgtcttgtttattttaggttgataccgtaaagcgcttgctgattaaaaaattacctcctgttcttgctatacaactaaagcgatttgactatgactgggaaagagaatgtgcaatcaagttcaatgattattttgaatttcctcgagagctggacatggaaccttacacagttgcaggtgtcgcaaagctggaaggggataatgtaaacccagagagtcagttgatacaacagagtgagcagtctgaaagtgagacagcaggaagcacaaaatacagacttgtgggtgtgctcgtacacagtggtcaagcgagtggggggcattattattcttacatcat

SEQ ID NO: 49348 - DNA, 1080 bp, Homo sapiens
cctattggagttctagtgaatgttttatcttaaacctaggacaagggtaaataacaggttctccccttttcctcagaattttatttccttttttattcttttttctcactgcctaagtttcatacttaataagcctgtttctttagaatgacttttttaattaaggaggagctagcttgggcatttggtaaatatttgaatttcattaatgatgcccgaggattattttatgattatattacatttgttttagaattagtcacttgaagcaacttagtcattagtcacatgaagtataatagtatatgtaaaaagtcttcaggtaagtacggtttccatttttcatggtacttatattctgtaaagtcaccacagacactgagttagcaaatactgaaccattactcctaggaggaaatacagaattaggtttctataagcctctgtttacatttttatcaaccagtcaatacataaccttgttgtatgtgtgtttctacttaaagtcatttaatatattttgttgactcataaagttcacagccaacagctctgtaacttaagcctgaacttaagcttctcaatgcattctgcataaggcacatcacagccttcttgtggttaggaacattagatagcacttcaacattatatacttgggtcattttaaacataaaaataaccagcaaaagcacaaatatgtggaaaatgtggcactaaatacaccatgaagaaggacacttgtttacagtttaagctgaaacaagagagaatgacactcttctggacttcagctaggaacgtttgtgttggacaacttgatatttttgctgctctgtatatgtccacagatgacgaagaaagcaccttgatgattgattttgcagttataaataaagtttaggaagtaagcgaattcacaaatgtggaattcatgaataatgaggggatcaattataattagtttttatgagaacttttagaatgttaacttttttcccccgtaaaaactaaggttatccagcttaactggccctcaaactttcactagaatttttctatttgtttttgggggttttt

SEQ ID NO: 49349 - DNA, 1050 bp, Homo sapiens
gcatcactgcactccagcctggacaatagagcaagactctgtctcaaagaaaaaaaaaaagaaagcaagcatacaaggagcttgtgatcattaattaactaccaagtaaggaggctttcctgctattaaaggtaggtgaatgaaagagcataattggccaataaaactttggggaaaacagtaaaaaggatactctagcatgggtgcagtggctcacgcctgtagtcccagctactctggaggctgaggcaggaggatcgcttgagcccaggaggttgaggctgcagggagctatgattgcaccactgcactccagcctgggtgacagagcaagacttgtctcaacgacaacaacaagaaaaaagaatgttctagcatgtacaatgccaactggtttatgtttctagacactatattaatcttccaggatcctcagaaaacacttcacccctggctggtctgactgcagtggtgtttacaactagctgatcacaactacttacagatttctttgttccttctccactcccactgcttcacttgactagacttaaaaaaaagaaaagaaaagaaaagaaaaagaaaaagaaacagaaaaagaaaacactttactccaacatttgtcagaagagttttaccaaggaggaaggcaatgatgatttccatgcccaggaaggaaggggaaggaacctgtattgggcctttaaaagaaatacgttcccagtattaccaccatgaaacaatcacaaaagattcaaactttaaaggcacatttgaagctctacatatattttaatggctgcgaagttctcacacatcatgatgtaagaaacagttttaaaagagacagtgtggccaggcgcggtggctcatgcctgtaatcccagcactttgggaggctgaggcgggtggatcacctgaggtcgggagttcgagaccagcctgaccaacatagagaaacctcttctctactaaaaatacaaaattagccgggcgtggtggtgcacgcctgtaatcccagctactcaggaggctgaagcaggagaattg

SEQ ID NO: 49350 - DNA, 1008 bp, Homo sapiens
aggggagcgaatgcgtaaggttggaaaggggggcgaagaggcctaggttaacattttcaggcgtcttagccggtggaaagcgggagacgcaagttctcgcgagatctcgagaactccgaggctgagactagggttttagcggagagcacgggaagtgtagctcgagagaactgggacagcatttcgcaccctaagctccaaggcaggactgctaggggcgacaggactaagtaggaaatcccttgagcttagacctgagggagcgcgcagtagccgggcagaagtcgccgcgacagggaattgcggtgtgagagggagggcacacgttgtacgtgctgacgtagccggctttccagcgggtatattagatccgtggccgcgcggtgcgctccagagccgcagttctcccgtgagagggccttcgcggtggaacaaacactcgcttagcagcggaagactccgagttctcggtactcttcagggatgagtcatgtggcagtggaaaatgcgctcgggctggaccagcaggtgagccgcaagaaccccaccgggctggctgctgcgtgaattcctcccctgacctaacctggctaatggcgcagcgctaaccggcacccttacttttcattttctgggtgccccgggctggcgggtgtgagtgccccggggctatagagggataggaatgttggttggggctgtcgcccgggcccggtctcggcccgctgtattgtccccgggacgagcacaatggcggcttttgtgtgtgcgtgcgcaggcgggcggagggggaggaagtgcgcgcgctctcgcggggacgcgcatgcgcgaatcccgactgattagtgacctgggggggtttgcgggagtgcgcagcgcggcgggacgcgactggaggcccttttggcttggagggcttcggccttcacggctggcgcagcctggattcccgtccggaggacctggcggcacccggtgtttgcgtgcctgcgagcaaggggtagaacg

SEQ ID NO: 49351 - DNA, 4142 bp, Homo sapiens
ccgggctcatgcttgtaatcccagtgctttgggaggccaaggcaggtggttcacctgacctgaggtcaggagaccagcctgggcaacatggcgaaaccccatctctactaaaagtacaaaaagtagcctagcgtggtggcgcacccctgtaatcccagctactcggggaggtggaggttgcagtgagccgagatcacatgactgaattccagcctggatgacagagggagactctgtctcaaaaaaaataaaaataaaaacaaacgaaacagtcaaactacttaagagttgtgcttaacatagtgttctgtaagtggtaggtatattgctatttttttgttgttcttaagagtactacccgactaaaaatacttgggcaatatttagggatgaagtatctaactaaaagaacggccacttcgaaatttgtcctgacatttttcaggtgtgcattttaggtttaaaatatcaagtattacggaaagttggcattggaaactttcataaccggcactaaaacgaatcctttatctatttgacattgaggaataattttgagattcagtgtaagctttagtttggtgattagggagcctgtgctatggaacatgttagtgaaaatttattttgaatgcatgaattaaatttggacagtttctactgaacagcacaagcatcttggtgtgccgccttctgtagtatatacaatagtaatattgcatttgcttagagcattgcagacttgaaaacattcttagtcacattctcattaagggttggtattagccctgtgaggtggactgggcaactacttgaatgcagtactagcaaatgctagagggcaggactagttttctcttaatgtagtatttgagcacatggggtgctaaccatctcactctcttctagtttgctggcctagacctgaactcttcagataatcagagtggaggaagtacagccagcagtaagtacaacatcttgtgggtttattgaatattagagcttaacatcttaagatttcattgggcttatgtaaaatttaagaaatttgcctttcaattttttactgcttaaagaattatgtagtctttgtgttatagaattatgtagtacttagtgatcaatctaaagcatcgttgccttttttttttttttttggttgagatggagctttgctcttgttgcccaggttggagtgcaatggtgtgatctcggctcaccgcagtctctgcctccgggttcaagcgattctcctgcctcagcctcccgaatagctgtgcctttctgataataaaacatcaatgactagctggctctcttgagtaaaagcagctaatcattggaaagaaccttattatatcaaattatctctagaagagtttttgtccattataaatcctgagcccagtttagaggtgatgggaatgtgtccctgttaactgactatatttattaaattgaattaagggaatatgcatttcattggttatagctactcctttctcctgaagaacagaagactatactgaattttggattggtggttaggttaggttttcaaatgtgtcatttcttttaaaaaggcattagaaaagttgctttttttcttctaaggggggttatttagagacttgttagaggttagtgttaagataggggatcttggtggtttattataagggcaatagacccttatttttagctcagatctcttcctacttattaaaacaaaagtgagtatgggctatgatgtgtcctcatttttaggcaagaacagcttcactgggaacaaaacttggtgtttgctttaactttcaccttatttgtcatgctaagaatcttttaggaactgattgtcctagtagagatttttaaaaatatttaattcagtctagaagtgaaaaagaaaaatgacacgtttactagttataaagcaaatttatttggctttatgttgttttttttgcttatccatattctaggctgtactcctgctcgcatacagagcaactgtcaactttccttaaactcagcaagccccaaattaaaacctgcaattccttgaaattaactcccctttgcagcttttccttgtttatttattgtatgttttgcaacttactggcatagaaacaaaagattgtgagatatgttacatgagtaatcttaaattgttacagtaatacttaatgcttttgttgacagttttgatgacagttctcttaaatctagcaggcctttaaaaaaatcacattaaatgaccactggtggctaaatgtgctcaatttgtggatttcaactattaggttccaaatcagcttttttttatcaaactcctttcagagttctccttatgaagcagtaacccatttaaaattagattcttatttttcccccctctcagtgtccaggtaagtaatcagattggaaggctggagattttaatttcccagaaccattttttagtaacagaaatttaaatgggaaggttttttggcatttaattaattttatatatatatatatttttttagaagggcgctatattcctcctcatttaaggaaccgagaagctactaaaggtaggtcctcacaagtaacttcgtaggtctattttttgcctcctttagaagttagtaaagcctaaggaaaaccaggcatttgggggaggtctaaacatggtgttgtttttctatgcttctgtcagccttggttcaaatactagagcttaataattttggaagaactcatctaatgttacgcagtgggaaattcggcattcctatgtcaaactgttctgacgccaagggcatggttttgtacagtttcactagtgttgtgctgaatctgtttgtaatcattcacagcatggttttagtttggaagaggtgggtgccctactgtgtaaaccaagctgtataatgataacaacctggttatttctgtcttggcaaagttgctagaaatgaagatgggcttattgtagaacagttaacaagttacagcgttggaagtgattctctggtttcatctccttgccttgctgcttttgaaaggttttgtccaaaatgtattacaatatctggtgtcttttcccattgtaattgtaacgtagtgatagatgacagctagtatatgtttcatattatgagacagctgttcgggtgctttatattctgtaaaatagaccatccaaaatttggaggaaaagggaaagtcaggaaaaccaaagattaggagggaagatactgtataaagaaggcagataggaagagtggagagtccacaggggagcacatggtttgctgctgttcctccatctccatatgtagtctgtattaccttcactgtcctggcaatgcatggatataaaatctgtattatttctaccagaagatcactttggctttttttttttttttttttttttgagacggagccttgctctgctgcggaggctggagtgcagtagcgcgggctcactgcaacctccgcctcctgggttcaagtgattctcctgcctcagcctcccaagtagctgggatcacaggcatgtgccaccatgcccggctaatttttgtatatttagtagagacggggttttgccttgttgcctaggctggtctcgaactcctgacctcaagtgatccacccgcctcagcctcccaaagtgctgggattacaggcgtgagccaccatgcctggctggcattatattctttttaggggaggttactttggaatttgtctttatcatcatggatgttctcaatattcctagtatactagctagaattgaccctcgtgtatatggcagtatcatagaggttttagagctggtagagatctggcaatctaacttaactctttcttgctagcaaaggctgttggtcacctgactggcctaacggtaggaggtagaaggcagaaggaaagtaactgaattgagaagctgtttctgtttaataaggtgttgctgaagctagttaaaccctctacctgtctttaaaccctctacctgtctttgggttaatttacatgtttgtcatccccttacctggatatttatagctgtacccaggaaccttgtctatactgagaatatatagtgatgagggtttttctttttcccaggtatt

SEQ ID NO: 49352 - DNA, 1486 bp, Homo sapiens
tttcaaattcagaaagattgataataccttaacatggttcctatttctaattaataataaaatgtatttgtgcttttttaatcaaaggtttctacgataaagacagttcagggtggagttctagcaaagataaggatgcgtatagcagttttggatctcgtagtgattcaagagggaagtctagcttcttcagtgatcgtggaagtggatcaaggggaaggtaagtgatttcttaatcaccttacgtgtatgtataataacagtttaataagtcgttatcctgaccacctgtttggatgttaagcattatgtctgtttggtcattgtattttcttagccgtaagaggcttttactaaattgaacctgttacttagaaattagatgaaaataggaatatgctcattggcataatgaaatgagttattctatttctcgagttttatatgttctacttaaaagagtaagttcatctagtgaatggcctaatttggttgggatttttgtggactctataacaatttctaaacaccttgtatttttgattacacaagtgtggtgaactgaccccacgtgcctaatagctgtggttagtcctgtgtcctgatttttcgcaaacaggcctaaaactcttaaaaacatcttagttcaggtaaggattattttctaccttttatccaaagtctgtcacacaggtgaattgtcctttaagtgacatcctagtataactaggacgattgatatttggtgtgctattttcttgttttccctaccattaaatatatttggatgagcactttaaatgaaggttgtgagctgtgtgccgatttcaaataaaatccttattcttaattttggcatctgtgaggccttttaggctatacaactttatagaaatgtaaagattactgattttagaaaacgaggttatgtaaatgatgctggttagagagccttatttgtcaagtaactcagaattggattgttgacatccttatggttagccataacttaagtctccagatacagttctagagtagggataagaatctgataatggttaaatgatatgattctgattaattgcttgtgctgttcaggtttgatgatcgtggacggagtgattacgatggcattggcagccgtggtgacagaagtggctttggcaaatttgaacgtggtggaaacagtcgctggtgtgacaaatcagatgaagatgattggtcaaaaccactcccaccaagtgaacgcttggaacagtaagtttttgaagtgtatgttacttgtgatgaagccttactagctagtataacaaatgaacttatccattttttgatttgagggaactcttttctggaggcaacactgggattaattttgagaaatacgatgacattccagttgaggcaacaggcaacaactgtcctccacatattgaaagtgtgagtatttttgcttgactttttaagacacagagaggttaaatgt

SEQ ID NO: 49353 - DNA, 2172 bp, Homo sapiens
caggcgaggctttgagggccatgaaggtagatgtttctttataaaatgggaaattgtagaactttgtaggtggccattgagagggctttctaaatgatgctaagacttaagtagaatgaaaaccagttttcaagtgtaatctgtaatctataaattacaaaagggaattatgttgtgatgaacttttcaaacagggtaggtagagttaacttaaaaattaacttatttcttaggaaaatggaaggtatgggcgccgcaaacaatacccaatctccttggtattagcaccaacgagagagttggcagtacagatctacgaggaagccagaaaagtaagtatgagttccagtgattattagctttttcattgattctaattaaatgttttatgaacatgtaaaaattttgaccttgaagttcataacattttttttgcttatagttttcataccgatctagagttcgtccttgcgtggtttatggtggtgccgatattggtcagcagattcgagacttggaacgtggatgccatttgttagtagccactccaggacgtctagtggatatgatggaaagaggaaagattggattagacttttgcaagtatgttttattttgtttttgtttttttgttttgttttgttttgttcttttgtttttggcagagttgcgctcttgttgcccaggctggagtgccatggcgcgatctcggctcaccacaacctctgcctcccgggttcaagcgattctcctgcctcagcctcccaggtagctgggattacaggcatgtgccaccacgctgggctaatttttgtatttttagtagaggcggggtttctccatgttggtcaggctggtctcgaactcctgacctcaggtgatccgcctgccttggcctcccaaagtgctgggattacaggtgtgagccatcgcacccggccaagtatgttaatttttaaatgtatgggatgcagtattaaagttactgcccattagttttgtggtgatgttaacattgtctaaatgttaaggctgagaagtgatgtatttcagacatctaactttcacaaaaagcttgttcatggtaattttaatgttgaaaaatcagtaacatcttggttgagacttacaacaatgatcagctcgtgggacagtcaactaggatgggctaatttgactgtgtaatcttgaatgacttatgtagtggcaagaatcctgtgctgtgtctgtaaaattatgcagtgtgaggcaccatcttaatgaatatataattgtaataacctatacaattgtatttgtaattatactaacagccatactaaaaccatgttgatttctcctcaaattctaaactcaggcttgttttttttcatgacatgacagatacttggtgttagatgaagctgatcggatgttggatatggggtttgagcctcagattcgtagaatagtcgaacaagatactatgcctccaaagggtgtccgccacactatgatgtttagtgctacttttcctaaggaaatacaggtactgtttgatgttgcaaattttatttatttagaaatttgtttatctcaggtaataataaaaattttttttctttcagatgctggctcgtgatttcttagatgaatatatcttcttggctgtaggaagagttggctctacctctgaaaacatcacacagaaagtagtttgggtggaagaatcagacaaacggtcatttctgcttgacctcctaaatgcaacaggtaacattatgaattttttattttattagacatgggggtttctctttgttgcccaggctggagtgcaggggttattcacaggtgtgatctcattactgatcagcatgggagtatttgacctgctctgtttctgacctgggcctgttcacccctccttaggcaacctggtgctcccttgcttccgggaggttaccatgttgatgccaaacttagtgtggacacctgataggcatagtacactacagcccagaactcctagacttagacaatcctcctgcctcagtctccagagtagctgggactacaggcactcaccactgcacccagctaaaattatgaataatttaattgctctggtaataacccatttgggctgggtgcagtggtacagtgcatgtagtcccagctacttggcaggct

SEQ ID NO: 49354 - DNA, 2977 bp, Homo sapiens
agaggcccttcaccagttccgctcaggaaaaagcccaattttagtggctacagcagtatgtataaacatctttcttttattcaaattgagcatgttcaagtatttgttttcttttaagtgggccatatctcataaaagttattttccaggtagcagcaagaggactggacatttcaaatgtgaaacatgttatcaattttgacttgccaagtgatattgaagaatatgtacatcgtattggtcgtacgggacgtgtaggaaaccttggtaagtatttgattacttgatggtttcattgttttttgctgtgatgtgtgcaggaaagaacttgctaggatctaaaatacatttttaacaatgaaagtgacaaagattttgctcaaagcacttgtttaaatattacgtggtaatattttaaatatttctacgtaggaaagtaagaatagtagcaagttactttatggaagacctttgtttatatacttttttgggaactcttttaggcctggcaacctcattctttaacgagaggaacataaatattactaaggatttgttggatcttcttgttgaagctaaacaagaagtgccgtcttggttagaaaacatggcttatgaacaccactacaagggtagcagtcgtggacgttctaagaggtgaggtataaatagtatataatgaggggaatgggtgttcacttacagttcatagtgtttcctctgcatgcataacgtccaaggttaactgtacagtatttaaaaagcttaatcatcttaggcttcctagattctttggtaaggggttgtattagaatgggtgacactctgttggggaaaatatggctggatggggaattgtttgaatggaaaaattagaaattggtcattaggaaagagttaggttactttagtggaatttcatcttcatgtgaaccaacataatttttttcttatagtagcagatttagtggagggtttggtgccagagactaccgacaaagtagcggtgccagcagttccagcttcagcagcagccgcgcaagcagcagccgcagtggcggaggtggccacggtagcagcagaggatttggtggaggtagtgttaatctgtaacttcatagctttgggaagggtttttttccttttagtcatctttttcaaagcctaattaaacaatttaagttcagcactatagaaacttgatggcaaattacgtaagggaaggattgtatttaatgatggataacttcattaatttctctctctttttaaatctctcattaggtggctatggaggcttttacaacagtgatggatatggaggaaattataactcccagggggttgactggtggggtaactgagcctgctttgcagtaggtcaccctgccaaacaagctaatatggaaaccacatgtaacttagccagactataccttgtgtagcttcaagaactcgcagtacattaccagctgtgattctccactgaaattttttttttaagggagctcaaggtcacaagaagaaatgaaaggaacaatcagcagccctgttcagaaggtggtttgaagacttcattgctgtagtttggattaactcccctcccgcctacccccatcccaaactgcatttataattttgtgactgaggatcatttgtttgttaatgtactgtgcctttaactttagacaactttttattttgatgtcctgttggctcagtaatgctcaagatatcaattgttttgacaaaataaatttactgaacttgggctaaaatcaaaccttggcacacaggtgtgatacaacttaacaggaatcatcgattcatccataaataatataaggaaaaacttatgcggtagcctgcattagggctttttgatacttgcagattgggggaaaacaacaaatgtcttgaagcatattaatggaattagtttctaatgtggcaaactgtattaagttaaagttctgatttgctcactctatcctggataggtatttagaacctgatagtctttaagccattccagtcatgatgaggtgatgtatgaatacatgcatacattcaaagcactgttttcaaagttaatgcaagtaaatacagcaattcctctttcaacgtttaggcagatcattaattatgagctagccaaatgtgggcatactattacagggaaagtttaaaggtctgataacttgaaataggtttttaggagaattcatctacttagactttttaaatgcctgccataaatgaaattgaaatggtagaatggctgaccacagcaatgaccagccctcattagggccctggatgatttttggtctaataacgcatgctagtgttgatgttttttggtcaagagggtatgaacaggaagaattaaatgcagcaggctttattttaaatgccgattcacattactctgttcaagctgcgttgagatgttaaactggcttactatagacttcgtaaaaatggctccagaagagtaacaaactgaaatctttgagatcacacaggttggaaatatgtacataactgcacaaggtgtcaattctgctctacagtgcagttttagtcagttttagttgcataggtttccattgtatttatagtctgtttatgctaaatctggccaaagatgagcattgtccaccactaaaatgcctctgccactttgaattctgtgctaattttgtggccagaatgcggtgatcaaaacgctccatctttttacagtggcataggaagacggcaaaaatttcctaaagtgcaatagattttcaagtgtattgtgccttgttctaaaacttttattaagtaggtgcacttgacagtattgaggtcatttgttatggtgctatttcaattagtctaggtttaggcccttgtacattttgcccataactttttacaaagtacttcttttattgcacattcagagaattttatatatatgtcttgtgtg

SEQ ID NO: 49355 - DNA, 1045 bp, Homo sapiens
tgaaagtttaaagaaacttgaccaaaagacagtacaaaaacactggcacttgaatgttgaatgtcaccgtatgcgtgaaattatatatttcggggtagtgtgagcttttaatgtttaagtcatattaaactcttaagtcaaattaagcagacccggcgttggcagtgtagccataactttctgatgttagtaaaaacaaaattggcgacttgaaattaaatcatgccaaggttttgatacacttgtcttaagatattaatgaaacacttcaaaacactgatgtgaagtgtccagattctcagatgtttgttgtgtggattttgtttagttgtgtgtttttttttttttttcagtgaatgtctggcacattgcaatcctcaaacatgtggttatctttgttgtattggcataatcagtgacttgtacattcagcaatagcatttgagcaagttttatcagcaagcaatattttcagttaataaggtttcaaaaatcatgtaaggatttaaacttgctgaatgtaaagattgaacctcaagtcactgtagctttagtaattgcttattgtattagtttagatgctagcactgcatgtgctgtgcatattctgattttattaaaataaaaagttgaactgcacagtctcctttgttgttgtcaattgtggtttattttcagaggtgtaaataaagtgctcttgcctgaaaaattgtaaaatgttattttttgcttgtcatccagtgctattttttgagatgcctcttggatacagaatgactcataccataagtatttgcaatgaaagatgaagatagtattagtttgaaatacagtgaaacaggatttttgtaatagacggaaatctaaaaggcccttactgataatacagcatgtattagaaattggcttatactttgaacaatttgacatgggtgggagtctctttgttctttgaagtatctattatgaaggatggttgaacagtggaagaatgagcaggataaaagtcaagtgtgtcagtagtccaacaagtgatggtaagtat

SEQ ID NO: 49356 - DNA, 1049 bp, Homo sapiens
cgaaactccgtctcaaaacaaaagaaacaaacaaacaaaaaaccaaaaccctgccgcaatccttccactactctcccatgggaggaagctcagagccaccctgaccgctcttcatttcaccacctctctccatttgtcagtgacctgaggctgcctcattgtttctgagcactgttcatatcagctgttcttccacgcttccttcagcctagaccccagaaacagctgcccctctgccttcattctctcacccttctgtaacagatatccccttccactccttccttcctaacagaaccccaatttggttcaggatggcaatgtgcctctctaagaatagttggctcctcagccttgtactccaggagagacttgcctcccagttccggtcaatgtagtaatgggagtaggtgggagtattaggtggaagtccatggggcgggtgccccttcccaagcaaagcctcacaagaggcttttggctctgctcttttttctctcctagaacttggagcgtgatgcccagaagtgtgtgaactggtctgtgaccacaaagatgagaaccgcatgctgagattggtggaatggagacttcagtgagcctacatgcagatgacatggtgacacccgtgcccagcctgagctgttttcttctggccctcttattacatgagaaaaataaacacctatgcaccttggcctcatcccctcggctgtctattcttgcaactttggggcaggtttaaatttttttccaaattaaaaattggggccaggtgcagtggctcatgcctgtaatcccagcactttgggaggctgaggcaggcggatcgcttgagcccaggagttaccaatgaaatggagtgatgtctgggatttgcttccaaatagagaggaagtgggtcagggtatagatgaaacaggattgatcacagttgacagttgttggagttgggtaattggtaagtctttaaaaaaatattctctttagataaattcccaagaatgctgtgcgaacacttatgagcttgatattgtgttatgaattga

SEQ ID NO: 49357 - DNA, 1048 bp, Homo sapiens
tcatttacttacaagcattttttgcagttgttccactgtttggttagccacactgatgccattgatttctcgaatttcatcaccaacatgaagtgtacctaagaaattatataacattataaacatgaaatgatatatgctttcatagtaacaaaatccagaggcatcaatgtaatttttaaaaactaagttgaatattgagggccaatatttcagaggcaggtacaagtttggttgcagcagaattatttaactcatgtagtaacctcatcaaaacagatatatctacttgtggaaggcacagttttgatggatggctgcagaaatctatttttctgagagaggtggtatgtatagtggtttaaaagtatggcttctggatccagactgcctgggttcaaattccagcttccttgcttactagctttaagatcttgggtaaattactgaaactctccatacctcagttttcacatttgtaaaatggagatgaaaatagtacccatctcataggattgttttaagaactaaacaaatttaataaatgcagaaggcttagaactgttcttggcacataccaagcaccatgacagtgttggctgctatcgttatctaccagatatgatacgaaggttgtcaattttccaagagttgtgacatgataatatctacacaacagcaaattctgttaaagataatttaatcttttggttggcatttcagcatcttgtaatacttcagctagaaagaaatgaccaagaaccaatgcttagagtgttatttacaatgttgcttccttatttataaattgtgcagaaatgtacacactgacctggcttcattacaaaaagatacctctgcatgcaacaattaaagaataaacattcatcttaagtacacgtgggccatttataaaaacgattaaagtgctatgccataaagcaagtctcaacaaacctcaaagaaatggtgtcatacagactacattctctgaccacaatgtaattaagttagaagtaaattacaaaaagatatacagaaaatcctg

SEQ ID NO: 49358 - DNA, 1049 bp, Homo sapiens
ataatcagaaaactaaatggaaataatgcttttcagtaagcccggcccctttgaccgatacagaaaacttgaattaaactttgactacgtaggtattaattggcttcattacaattattgctgtaaaaatgaacagtgactagctctggaaagatttaagcgtcagtaattgttggtctcctgccttaaagtttttttttttttttccaatttgagtatttaaagtattttatttaaaaatatttgactgctgtcaaagttgtcattataaaagattaaacatgatttaaattaaaagagcattattttgttttggagggattattgttggtctaacatgggttaataaaattgcttgcaaagataattcacgtggaaaagtttggccaaatcgattgcttttggttatggtgatgaaaaaataaatggaatctgatgttttatgttgagaatgtgtaaaatgctagttgattttatgtcttagaatgctcatattcatatagattcactgcgaatagtgcttaacattggatttcggattgtaatattaaaccctgcagttatgcactaacgagtttaaattttaaaaaagtaaccattttcaaatattcttggcaagttgtgcattacttgatgtttgaatacatcttaaaaatgaaaaactagtgaagcttcactatgtttggggccttcatgatatatggggtaatttgatgaacgattaagcagtttgttaaactaaagaaaaaaaaatcttcactgcttcagactcagtgcttgtgaggtgtcctacctgcttaggacaagattcatcagccttaacattaaaataaaaccttctgtaatatgtgcttgcaaccgcatatagttcttggttgcatctttgtgagcctgaacataccagtggggtgtgtaatgtaaagcctgacattatataacttcgcaccctctgtttgaattgggttctgaatgaagtgaatgagctggagtcctgctgtaggaagtcttgaattatttagtttcatccttcttttaacagtcctcgaagc

SEQ ID NO: 49359 - DNA, 1062 bp, Homo sapiens
tttgagacagtctcacactatcccccaggctggagtgcagtagagtgatctcggctcactgcaacctcggtcttccaggttcaagtgattcttatgcctcagcctcttgcgtagctgggattacaggtgcctgccaccacacccggctaatttttgtgtttttattagaggtggggtttcaccgtgttggccagactggtctcaaactcctgacctcacgtgatcagcccaccatggcctcctaaagtgctggctttgcaggtgtgagccgccgcacctggccaatatcttaagctgttaagaaaaactgcctgagagatgaatttttgtgacttaggtgaagtgataggtcatgcactttaaaccaaaatgaaagttcattgcttggctagctgcagagtaagtctttttctgacttaaattatgtaacatttagtttttgtttacatagtaccaatattctgcatctttgaaaggatttctgttaagtttatttttactttgaaattcattgtgatgcgttgaactctttgaaattgatgttaatgactgctaacactgcattattaataatatttttgaaatgtgttatctagagagctaatttatgttaagaaaacactaccagcttgtctaagaattgaaatggtggttaggctgtttaggactcacatgtattatttgtagattagttaattaataaagtttatttaatgaatgcataattgacagtcttaagtactcatattgaaacttcacatataattttatcagttttccacattggtttgtaaattatcgtgacagtaaattaaaacagtatattaatgtacactatgtgcaagccttctatgtagatagtatgaagatagcatagatatttcttgcccgtgttgaacttaaattctttaagaggggtgagataagtttaagggtgactaacacaggaccatctttgggagaagaaaaatgtgaaatattctgaaagtttatgagaaaggtaaatttaacaattcacaagttagaatggctcttaaagatggggattgtttgttgattgtg

SEQ ID NO: 49360 - DNA, 1996 bp, Homo sapiens
gagggtaggagtgaatggagtagagatgtacccaattaggtcctatttctttgtgttttagatggctttgtgacagtcactgcgctcattcttcattttgatctttagcatttcattgctgactttattttgagtctgatttggcacaggctgatacttgggacctgattaagaactgtaacctgggccgggcgcggtggcgcatgcctgtaatcccagcactttgggaggccgaggcgggcatcacgaggtcaggagctcgagaccagcctggctaacatggtgaaaccccgtctctactaaaaatacaaaaattatctgggtgtgatggcgcgtacctgtaatcccagctactcgagaggctgaggcaggagaatattgcttgaacccaggagatggagattgcagtgagccgagatcgtgccactgaactccagcctggcgacagagcaagacaccatctcaaaaacaaaaaacaacaaaaaaactgtcacctggaagggtgggagtaatcccttgttagacagttttaggtttctgagctaatttgtagactgcttgcaactttcttctataagcttttattattttttctcttacctatttcttccttatattccatcatttgtttacttctgtatattattaaaactgttggtggtgttccattgtgaatgtattcttgtatgctttttgtaattttctctgtggtactattttgtcttttttttttttttgagatggcatttcacttttgttgcccaggctgcagtgcaatgtcgcaatctcgactcactgcaacctccgtctccagggttcgagcgattctccttcctcagcctcctgagtagctgacattacaggtgtgcaccaccacgcctagctaatttttgtattattagtagagatggggtttcactgtgttcgccaggctggtctccaactcctgacctcagttgatccccccgcgtcggcctcctgaagtgctgggattacaagcgtgagccaccatgcctggctgagtattttgcctttgttagaataaatagaagatgctgctgctaagtttattctcaggaagaaagttggggttatacttaagggtattatataaggtcatctaattcattttagtttagaacagtggaagaaattgttttagacaaagggttatttttaaactacaaatttattacgtgttcattagatttttctctctttttgaaaaaaaagtttattaggaaaaattttcagtgttttcagaaagtattgcaaatcaaccatcacccagctttaatagtttgcaactcatgaccagtcctgtttcatctatatatattttgcccctcactcatgttattttgaagcacatctcagcaatcagtcacagcatttaatccatagatgtttgtttctgaaacataaccgtgatgcccttattacatgtaaaataatttcttaatctcaaatatctgtggaccttgttttttgctgtatggaagttaagaaataattgcttggaaaatgagtagaaaacatgtttagctgagtatgtgatgtgaattttgtttgtattttgatactgctatagtgttctgtgatagaatattacataatatgtgacacaagaggtaatttttcctgagaactttatgaatcatagttgcttgagtctggatagtttttatttttagggaaaatttgttttcaagatacagtagttaaataaatattttaggtttctgaatttcaaatatcagaatgagaactacaaaagcttttgctttgcttgattgattggtgaaacatttgttgagctgctgtgggtgagggattgtgtcaggttctggggcaaccaataagacctggcctctgtcctgcagtcagtctgttgggagaggctgacagactgagtgatcatatgatgtattaagtgtaataataaagatacatgcaaagtgctgtgagctctgaaatgatggagtaattaaaacat

SEQ ID NO: 49361 - DNA, 1055 bp, Homo sapiens
tttttttttttttttgtaggcagggtctcactgtcctccaggctgcagtgtagtagtgcaaccttggctcactgcagcctccgcctcccaggttcagcctcagcctcccgagtagctgggactacaggtgcatgccaccactcctggtttttgtattttttggtagagatggggttttatcatgtcggccaggctggtctcaaactcctaacctcaagtgatccacctgcctcggcctctgaaagttctgggattgcagacaagagtcaccatgcccagcccagaatatgtttatttttgttataaagatgaaaaatttggtgatagagctaggacagtagtgcttttttggagtcatttaccccttgagtgtcagtaaccctttagctacaaacattttatatatgatttcagagagtatagggaatcttccttgaagctcaactatggatattagttcaatattttcagctagtttagtttactaattcttgggtagaggtgtaaatgatgtgagtatgtcagggagaaagaaaagctttagaactactggcttggttagactaaaatggcatggattttgccacatagttttgtggtgttccgtggccacatcacatattctctcaaaatctctattaataataaggatgctaggggaagacaatttggattgatcctggagaacctatggctttaactggaaaaatatcctaagcacagtcgccattaacatagttaataggctttagtattgtttcttcagcctgagtgctcaaaatgctggtttgcttgggagggtaagtgttatacctaggaagaacaatagattggaaaactgaagacctgaggccaagagttcaggaccagactgagcaatatagagtgacccctggtctctagaaatttttaaatttagattagctgggcatggtggcattcgtttgtagttccagctacatgggaaaaccgctcgagcccaggaatttaaggctgtggtgagctgtgattgtgccagtgcactccagcctgggcaacacagtgagactccgtct

SEQ ID NO: 49362 - DNA, 1083 bp, Homo sapiens
cgcctttaatcacaacactttgggaggctgaggcaggtggattacttagggtcaggagtttgagaccagcctggctaacagtggaaccctgtctctaccaaaaaaatacaaagctgggcgtggtggctcacgcctgtaatcccagtactttgggaggccgaggtgggtggatcacgaggtcaggagatcgagaccatcctggcaaaacatggtgaaaccccgtctccactaaaaaatacaaaaaaaattagctgggcttggttgccggcgcttgtagtcccagctactcaggaggctgaggcaggagaatggcgtgaacccgggaggtggagcttgcagtgagccgagatcgtgccactgcactctagcctgggcgactgagcgagactctgtctcaaacaaaaacaaaaacaaaaaacaaaagttgtctgggcatggtggctcatgcctgtaatcccagcactttgggaggccgagtgggtggatcagctgaggtcaggagtttgagagcagcctggacaatatggtgaaaccccgtctctactaaaaatacaaaagttagccaggcgtggtggcacacacctgtagtcgcagctacttgggaggctgaggcaggagaatcgcttggatctgggaggcagaggttgcagtgagctgagatcgtgccacagcactccagcctgggtgacagagtgagactccatctaaaaaaaaaaaaaaaaaaaaaaaatagccagatgttgtggtacacgcctgtaagtcccagctacttggtaggctgaggcaggagaattggttgaacctgggaagcagaggttgcagagagccgagatcgcaccactacactccttcagcctgggcgacagagcgagactgtctcaaaaatcaaaaacaaaaacaaaaaaaaccttgctgggattttgataggaattgcatcaaatcaacctgggcataattgatacatatatattttttgctatactgagctttccaattcatgaacatgagttgtctctttgtttacttaggtcttctttgatttgttccatgaacatttgttaagtttatacctatgaatctcat

SEQ ID NO: 49363 - DNA, 1050 bp, Homo sapiens
tggcacgatctcggctcattgcaaactccgcctcctgggtttgcgccattctcctgcctcaacctcccaagtagctgggactacaggtgcctgccaccacgcctggctaattttttttatttttgcatttttagtagagatggggtttcaccgcgttagccgggatggtctcatctcaatctcctgacctcgtgatctgcccgcctcggcctcccaaagtgctgggattacagaccatgagccaccgctctgggccaacttttatttttttaagaaccaactttttattgattgctttttttttttttttttattctgctgttctcctggcttcaattttattgatttcttctctatttccttctttctgcttgctttgggtttatttgctctttatattttctaggttcttgagcttggaagttggattattaatttgaatcatttccttttctctgatgtaacaatttggtgctataaatttacatttcagcactactttagctgtgtctcacatacttttgtatttgtattttcattttgattcagttctgtgcattttaaaatttctttgatccatggagtatttagtagtgtgttaagtttctaagtatttggagggttttctgttttctttctattattacttgcattttttgtgtgtttctcattcatctgctttttttttttaccttcttatgggttatcttaatatattttaggattccatcttgatttttaatgtttttgaatatatttctttgtatagatttcttagtggttgctctggatattgcagtattcatatgtaacttaccactgtctactggtattggtgttttaccactttcagttaagcacagaaacttttcttccacttaggtccttttgccctctttactttaaaaataaattttttttttttttttgagacagagtctggctcagtcacccaggctagagtgcagtggctggatttccgctcactgcaagctccgcctcctgggttcatgccattctcctgcttcagcctcccgagtagctgggact

SEQ ID NO: 49364 - DNA, 1060 bp, Homo sapiens
tcataatatactttcctggtttctggtatggcatgagattttcatttgtactctggacattttggatatcatacatattttgagaactgtgcatcttgttccttttttcttttaagagacagggtcgtgatcagtcatccagactggagtgcagtgatgtgatcatagcttgctgtaacctcaaactcctgggctcaagtgattctcctaccttggcctgctgagtaactaggacaacaggtgtgtgccaccatgcctggctaattttgtttttttgttttttttgagatagggtcttgctctgttgcccaggttggtcttgaactctaggacttaagtaatccgctgcttcagcctcttgagtagcaggagtcacaggtgtgcaccacagcacctggcctattcttttttatactaggcagttcccttgttgaagtgtagtgcaagggttaggtgggtgtgttcattcagcttcttgctgggtcctgctgataattactgtggaaaaagtggggcactaagtcatatggccttaatgcagactggtgggatggaagttcaattcctcccttaccctcacatcttcctaacaaaagttgggcaccattttatgccaccttgttgcctctgagtaggggtataagatgaactttctgacgggccatgctgcctcagcaagagagaagtagggaggctatctcacactgcactgatgctgcagggtgaagaaaaagctccttacctcataccacttcccctgagttgatgccaggtggggaatggaagctcagccccctctgggtaccactggcatttgagaatggctgaaatggttgtcagctactctgtcttacactgcttcatttagccttgatactgggtgaatgtggaggttcagctcttcactggttaccactgataccaggggttggggcagggagtagaaagctgactgactctaactcacatctccttgttcagtcttgttgatggctgggtaggggtgcaggttcaggttcttgctgggtcctgttgacaccaggcctgtgtgtgcaggagg

SEQ ID NO: 49365 - DNA, 1071 bp, Homo sapiens
gaataagcaagggaaaacttaataggtaggaggcattagtcttccttaggcagggaataattattatttcagcaatgtacatgtagtaaagttctacaattttaattcattctagctctaaaaattctatgattttatccttttttctgttcttttaaacttgttcctgtacaatttatagactttttttctgagaaaaatcttcctggagaaaagattgttaggcccttcaataatagggagtttctcttaaaataagtttagccgttttgttatttaagaaatgatttggccgggcgtggtggctcacgcttgtaattgcagcactttgggaatccgaggcgggcggatcatgaggtcaggagtttgagaccagcctggccaacacagtgaaaccccatctctactaaaaatacaaaaattagctgggcgtggtggcaggagccggtaatcccagctactcgggcggctgaggcaggagaatcaccggaacctgggaggtggagatcgtgtcactgcactccagcctgggtgacagagctagacttcgtctcaaaaaaagaaagaaatggtttgtttattttctgtgtaatatgtttaataataatattctgcatttttctttgatccattagttattttggagtgtttaaagtttttcatatatttgtgaatttctccaatttgttcctgttactgatttctaatttcactacattttggtcagagagcatagcttttaaaattttaattcttttaaaattatgaggacggccaggtgcagtggctcacgcctgttatcccagcactttgggaggccatggcgggcagatcacttgagggtcaggagtttgagaccagcttggccaacatggtgaaaccccatttctactaaaatacaaaaattagccaggcgtagtggcaggcacctgtaatctcagctgctcgggaggctgaggcaggagaattgcttgaacctgagaggcagaggttgcagtgagccgaggtgacagagtgagactccatctcaaaaaaatatatatatatatatacggggacttgttttagtgg

SEQ ID NO: 49366 - DNA, 1033 bp, Homo sapiens
gaacagagataactccattttcaaattgtcatgtttaaccagaagtcctttgcgtgatgatttttgtttttaaggaaacttgttgaagtgtaacatgaacccatttgagttcacatatcacaagtgtgccattcagtgaattatcacatagtaaacacatttggtaaatgctacctcaaatcaggaagtggaacagtagtagcaatttgaagcatctcttgccccttcatagttaatacctttatcttcctcctcaagggtaaccattacaccgacttctatcatcatagattaattttgtttattttagaattttatataatggaaccgtataataggtacccttgtgtttggctgcatttgctcaacaacacatttgagattcatccttcttattcatccttgagtttgcaaaaacagaaacatcatttgtttttattgctgaatagtattccggcgttcaaatacatgaatttatcccttttgctgttgatgtctcctatagtggttaaaggtctctggatcttcactcttatttgtattgtttacttgcatggtgggcactttaataactttcatttaatagcttatctttgactttgctgccacccttcacccccccacccaaatgattatattttgatcatgtcttctatactatatggaggacctttatttaccattctctgttttgaaatgtatagtcacctatagataactatacatttcaaaatactaataccgtagagtattagtcatctatacatttctgtaatgtactgtgaaataagaagtaggacaaaaaggaaaggtctttaagtcaaaatgtatctcacagtccagttactgagtttatttttatttcagatgctagtctaataaagatggctgcttatttggtttcctttcccgtagaagattagaacatgtggattaggagagaagttgttgcatgctagtatactgatgtcaagtagtgtagtagtgaaaaaaattaggtgactgtgtgaaaagaataaaggagataaaagca

SEQ ID NO: 49367 - DNA, 1066 bp, Homo sapiens
ataaccctgtctcctttgtttggtgtgctctcctggctggacagcttatttagtagcaccctttctgcagaaagtaaagctcgcctttctgagagatcatttgttcccgcattaattctttttttgtgacaccaaaaactttattcccaacactagttatgttttgggggagtcaaaagttacatgtgaattttcagctgtgctgggggggtcagcacgcctatctgcctcgttatttaagggtcatttgtacttacctcataggtttctgtgaattaaatgagctaaggcatgtaaagtgcaccgtacttagcagtgagtaaatgttgttaataattaacaattctgataatctacttggtgaacaagaataggatatgttagaatgatgtctcatatatgttaatgcagaagttttttatgtctcagataagttttttaggtagataaaggaaatgaaggaaatgattccaggaagagcactgtgtcaggagtgaatcataagaaagatgttactattaggttgtggattctaggtattctttgggatgtttctttttcatatgttccctgaccctatccctagactttgccacttaccagctgtgagactgtggataggctaaactactcatcaaagtaccagtttttgtaagttatttacttttggaaaagaaccagatgtaattcaaagttttctctgtaataccacccttcttatttacatctagtatactttcttgagtggttggacaaagtgggtggcattagcaaagctagcttggaactgagcataatactggatactcttgtgagagtatgtctgaagtgagagcattctgtggccaaaaagtcatacagccactgtcttacactattttcttgggttaatttttgacccatagtggtaaacctagttatgagtctgtcctgctacatttacattctgtgttgatagaaacatttggagctggctaggcttttctagaatctagacaactgctttagtcagttgtacattgtggatgtttcctaagcattgaccctagctccaaggtttttttct

SEQ ID NO: 49368 - DNA, 1060 bp, Homo sapiens
tttagaatagtaatgaaacatgtggactctggagttgtctttttccaatccttacttggccagtaattgtgtctcggtttcccagtctgtaaaatgagagaataaatagttaccttgcgcaagggctgttgtaattaaatgaattaatacatatgtagcacttagtgtctagcttataatagatgccatgtaagtattgtctattatcattgcattttaaaatttcacttacagggctgcctcccacccccgtcatatttactggccagtaatgtttctttttctgtgagttgcagttagtcttttctttaaatgttagcaaagtagtacatgcatatagtttagagtcaaaaaaatcctataaagtttacaaaaagggagcccttatctcccttcagtagagacgcaaccttccttttttatttcctgaatattttcaatatgcagttggttgagtccatggatgcaaaacccattgatacggagggaaaactatatataaaacaatagcaatctgaacatcaaatgactaaaggataacattatagctgcctgaagctgcagtgttggcaggggcaatcataagactagctggagattttacttggtaatctggggaatggaacagccatagtagaccttgataagctcccacatattcatgggtgtctggagagctgcacatgctcaggagagagcagagaggcctccagctgtctactcacctggctcaatgtgcagctttgctcaagcagaaagtagaagtcagaactgattcataagccacctgaactttgagtggggtccaaaccaacacagagggagatgctttggtaaaggacagaagccttactggcacaatatgtttaaacataacctcttatttatcattagccggtcaccaaactatactgacctaggagtgacttctagaaagccaagcttaaaaataaaaattgaggaaaaagtaaaaaacagaagacaactaaccagagacatcagtggtcatacactattgagaagactatagaaatagtccaggcaagtctgtaaacaaaca

SEQ ID NO: 49369 - DNA, 1029 bp, Homo sapiens
atgcatagagaaaagtctgaaagggtatattcgggcctattaaaaagttttttttttttaaagcacttattttgggggagggtcctttatcatgttgcagtttctctagatttaaggtttttcatatgttcaagaaataaatctaagtgcctacattttagaagttgtagaattcaaggcatattttcagtggagctcatgctcataaaccctatctcttccaccttttcatgcaacctgaagtgcttgctttttcctttttatgtgcatttatttaaaaatgtgtgtaaggcaaaggaatgcatactttgctaccaaagatattaatttgaactacatatttaaccagggtacagcatgcagaataatgtagtcttttaccttcataaagatatggtctacataattttgctgcaggcgggctttctttatacatgtatctttttggaattctgagttaaatgtgtgcagcttaaatgacaggcataatgattgctgtaagactgtttctgtcaacctctaggtaaataatagaccctgtggagtagcacaagcaaattaaattaaaaaataaagggttataatgccaacttttttttttttttgagatggagtctcgctctgtcacctaggctggaatgcagtggcgcgatctctgctcactgcaagctccgcctcccgggttcaagcgattcttttgcctctgccttcgagtagctgggactacaggcgcgtgccaccatgcctggctgatttttgtatttttagtagagatggggtttcaccatattggccagcctggtctcgaactcctgacatcgtgatccacccgcctcggcctcccaaagtgctgggattactttacaggcgtgagcccctgcgcccggccttgccaactttttcatatggaaaatcacaggatcattctgaagtgaaattatctctcatactgtccttggccccaaaatacagtttttaaaagatcatttaaggcttaattcgttgcttaatttgagtaaggagacttta

SEQ ID NO: 49370 - DNA, 1047 bp, Homo sapiens
tgtatttttagtagaggcaggttttcatcatgttggcctggttggtctcaaactcctgacctcaggtgatcaacccgcctcggcctcccaccgtgctgtgattataggcgcgagccaccgcgttcaacccctctgctgactcttttgacaaaagatgtgtattaattgaaagtaggaaatagagagacagacagggtagagtgacaaatgtttaagttcctttatcatctcgaaaatgttagatatgggtgacgattaactgggtttccttttttcttccctccatcctttttgtgtgtgttaatgattatttcattaggcagttgttttgttgttgttgttgttggttttgttttgagacagagtctcactgcattgcccaggctgcagtggcgtgatcacagctcaccgcagccaccacctcctgggcttaagtgatcctaccacctctcagcctcctgagtagctgggaccacaggtgtgtgccatcatgccagcataattttaaaaatgtttttgtagagatgggagtctccctatgttgcccaggctggtctccagtaatccccccacctcagcctcccaaagtgctgggattacaggtatgagccattgcaccgaactttgtttttttttttgtttttgttcttaagcgaggaaagagggttacacacacatctgtctcttaaagaattctcaaaaacagtcagttctgggctgcactggaactctactgttccaggaacatgggcttccatttcctactctgcggatctcagctatggcatctacctcttagtccaggagagttactgaagttcttgccatctggatgattctacccaagtaggcagaggaggggatgaagtggagcctgtctttcccttatattccattgggcagaatttaatcaccaagccacacctacaagaatggctgggaatctcagccttcagtctgtgtaaaaatgtgcctaattaaatttacgggttctattaacaaagaggagaaagggtatctgagacacctagaatctgaagcaagtca

SEQ ID NO: 49371 - DNA, 1030 bp, Homo sapiens
ctctagccatctgccagataagaattatatatgacttaaataaaaaggattttgaaatttcataccttcagattatagtaatttctgagacttcagtgtagcattcagacttttttaattatagggaagcagaaagattaattttcagtgattgtgatttggtacatatagctaagagtagaacaggaattgaagacaagttcttttgtaaacccttaggctttaaggataatagactcagcctagaattcgccttgtttagaatggattatccaaacttgttgaatatttatgtgcttaggataggtaaatgttaggatataaatttttaaactctatattaaaggctctgtatttcacaggagaggaaaaatgaaggcattcgaagtgagtactctgtcccacatcacattttcttatctcaacaaagttcttgaaatggtagtgaaagttttttattgtgatagaaactaaccaagtttctttctttgtggataccaaacttgcaagtgttcctgggagtatatcagagatttgagaattcacacacatttcttactttaatgactctgggacacattattaacagagcaatgttacggagcacttaattgttaatgggagaaattttgacaaaattattgggaaccttgagagaattagagctttgttattacccgtgaagataaagaaacaattaagtacctattgtgtcctgaacactgagataaagccttagagaagttttctagttttaatccttttatcagctctttgagtgttactaaaatagaaaggataaattccccaggatctcctgtagcaaatgacaactggaatttgtcatcaagccctagaactgggttctttccgttgttcattttctcctgcagttgtcctgtgttataaaaacgaatttatattgttaaaatagtgttatttttttctttgggagaggaaatgtgagagtgagagcatgtgcatgaattggagttaggaagtaagatcagaagcagttggtgtgtgaagt

SEQ ID NO: 49372 - DNA, 1071 bp, Homo sapiens
ttcacggagattgaaaatctgttgtttagtgtagctacctttatcagtgatcttagctagatcttctggataatttgctacacttctccatcagcacttgctgcctcatcttgcgcttttgtgttatggagatggcttctttccttaaacttcacgaaccaacctctgctagctttacacttttcttctgcagcttcttcacttctcttggccttcatagaactaaggagagagttagggcctttcactggagtaggctttggcttaagggaatgttgtggctggtttgatgttttatccagaccactcagaccatgtccatatcagcagtaaggctgtttttgcttccttgtcttttgtgcattcactggaatagcacttcaaatttcctccaagaatgtttcctttgcattcgtaacttggctgtttggcacaagaggcctagcttttggtctgtctcagctttcaaagtgccttcctcactaagcttaatgatttctagctttggatttaaagtgagagatgcgtaactctttctttcacttgtacactaagaggtcatcgtagggttattaatatgcataatttcaatgttgtcatgtattagggaatacagaagcccaaggagagggagagagactagggaatggcctgttggtggagtagtcagaacacatgcaacagttatcgattgtttactgtcttatgtgggcacagttagtgattccccaaaacaattacagtagtaacaccaaagatcggtgatcacaggtcatcataacagataacaataataatgaaaatgtatggaatattggtttaccaaaatgtgacacagagccattaagtgagcacatggctgttggaaaaatgacaccgatagacttgctctacacagggttgctgtgagccttcaatttgtaaagaacgcaaatatctgtgaagcacaataaagcaaagtgcaataaaacagggtatgcctgtagaattctatgcaatctgctacttttttattgctgcacctttatgtagttggaggacatgctattttgagagcatgtaaagagagac

SEQ ID NO: 49373 - DNA, 1050 bp, Homo sapiens
ctgaaatatcactatctactgggaggtgggtgtggtgggaatcttgttaccgtgtttgttaagtgtattattgactttaaagtgagacataattatgactcataattattttcctttcagcattatctgcataccagaggtactacagtttacagtctgactactggaaggttagtgtacatttgcatgctgatttcatgtttgtgttttgggcagattattgccaattatactcaaaattaattgagctcttgcttttttttgttaattacttaaaatattgcttctaggggaaaggtattggaaaagggttgagagtatttatgtttgtgctgtcttgtatgactctccttgtattttattaagaattagagtcctctgacacattttactggtcaaatgtaatagaagtgtgataagtaaaaatcaagcaaaactaaacaaataacaataacaaaatgattccttggttttcttttctaaagttggtacctgggagtaaaagaaggctgaagacgtgtatatcaggctaaaatgggaaggtgtaatgggaaagttatgataaactctttcttggtgtactctgtttataattggagctttgaggagagctgaacctattttttagaagacctacctaaatgaaagactgtgcatagcagtgaaacaattaatcatccactttcttatcttaatttaagcagtgattaagcatgatcttttacatcatgtttacttttaagtttattgagcagtgagtttttttttttaaatctgaattgctgtttcagattttttgtggattttatttttctattggttaatttgtctttctttttgaagtaggtacttattccagtcttatatagactggctttgtctggaaaagcccttcaacagtcagcctatgcagagattttgagaacaccgtgtagaggttttagacatatatgtatatatattttttcttttttaagtcttttgaaaatatcttctctaatctctggcttttttttaaaagctttatcacatgctataaaattatagctt

SEQ ID NO: 49374 - DNA, 1049 bp, Homo sapiens
cattatgcggtctgcaaataaagaaaattttattttttgttttcttatttgtggatgcccgttagtttttttcttgccttgttcaactggctaggacctcccatacaatgttgaatggaaggggacatccttgttttgtttctctggggaaaacattacatttttactgttgaatgtgatactacctgtagggtttttgtagactaatattgaagatgttcccttctgttgctagtttacttcgagggctcttccctcttccccctacttcatgtttttataatgaatagtgtgaggatataggaaaaaactcagttcctcctatactctcacaacacagaacatttctgtaacaaaatgtgtgtgggttttccccctgcatacctggcaagcaatcagttctgcagtggctgctggtgtcctctaattcagttcaattctgacattatctacctggagatagtttcagatcccacagagtgagagctaagtcccacaagactacccccacttcagatgccattgcaggcctccggaacttttgaatgactggctatataaatcggggttcccatgaccctctccttggttccattaatctgccagagtggcacagacctcagcaaacagttagggtttactgttttattataatgggtacagatgaagagatgcataggatgaggtcatgtgggaagtggcatggagcctccatgccctctctgggcatgtcaccctctagggacttccgcttgtgcagctatccagaagctctccaaaccctgtccttttgggtttttatggaggcattattatgtaggcatgactgattaaatgattggccactggtgatcagcttaaccttcagtccctttcctctacccagaggttggagaatggggctgaaaagtcccaacgttctaatcatgctttgctctttgctgtgaccagcccccatcctgaagctacatagggggctgcctgccctgagttatctcattacagcccccaacctgaagctacataggtggctgcctgccctgagttat

SEQ ID NO: 49375 - DNA, 1030 bp, Homo sapiens
ggctgaaatgaatatgggagtatagatgttataaataaagttttagtgccgcaaaagaaatagcactcgaatataaagtttcctttttaattctcaacaaggcaaggtacttctatagaagggtgcacccttacagatggagcaatggtgagcgcacacttgggcaagggaggggaaagggttctttccctgacacacctggcccctgctgctgtgtcgttcccctattggctagggttagactgcacaggctaaactaattctgattggctaatttaaagagagtgacggggtgagtggtttggcaggaaaaatggttatgacagggcaggtaattggaatgagtcagggtggagcaggtagtcgaaaaacgttgctttacgaggaagtgaagtttaaaagtagaaggcaaagaaatgaacatactgattccttggaaagaaatttagaactcatatataacatagatatctctttgaaattttgatttcaatttctatgatttatagctagtagtgggactgctggatcaaatggtggttctattgttagtttttcgaggaaattccaacattttactaagaaagaatccccaggggttcagatttatgtgggaaatcttgggtacaactctgtgtggtacctaatttgtttcctaagtctcagggcattttattggctttcagtgttggcttacctttctgtattctccttttttttcagcctttttccttttgcggccagctcagccattcatttataaagatccttttaaaatatgtcatctaatattttaaataattttgtattaggaaggtttttcagtatgtatactgcttgccattggccttatttttggaaattatactataatttaaggaaatataaatgaaattgttgggatactatttatttatttttatttatttatttgagacggagtcttgctctgtctcccccaggctggagtgcagtggtgcgatcttggctcactgcagcctctgcctcccctgttcaagcaagtctcctg

SEQ ID NO: 49376 - DNA, 1048 bp, Homo sapiens
cacctctagtttgaggtgggacaagaagcaaagctttcatggggaaggtggcatttaaatggatcttgaatgattaatagaatttatagggtggtggggattgaataagatttcctagagggagaagaatgaagttgggagaatgtacagtgtgtcctgaaatcagaaatgcccgtctctactaaaaatacaaaaaattagctgggcgtggtggcgggcgcctgtagtcccagctgttcaggaggctgaggcaggagaatggcgtgaacccgggaggtggagcttgcagtgagccgagatcgcaccactgcactccagcctgggcgacagagcgaaactccatctcaaagaaaataaaaaataaaaaaaataaaaataaactcatatttctatagtacgctcactccaccctgtccaggcagttgcctaaatagatgttaagatgttgctccctttcctttcacaaccaccctcacccccacacccccattgtctttcaaatcttgactttttaggtagaacactaaatgactctggattaactattaccacttttaccacattctgaatatccatgcctcctctcccccaccctctagattgcatacttcttgagagcaggggaagtatattttattcagattggtttgtttaacccttgagaattgtccctggcaccaagtaaatgctcagattatttcaggggatgggatagtagatgaatgatcctgattaaaaacagtttcaactaaatttaaaattaaaaaaaatttaaacaggaaatttaaaaatggatgttgtctgagacctttgtgactcctggaatttgtgaatacttctgtaatataatttcctcattcggaaaattgggggtaatgaggacttaataaaatgaaattaccatatttttacatttgacaatgtatttaagaaacttagtgtttctagaaagatacttagaattcaaaggaaatgcacaatataattttaggacaaactttagcatttttaaaaagcaagaaaagtcactcagcttgttactggaaag

SEQ ID NO: 49377 - DNA, 1031 bp, Homo sapiens
tatataaatataaattatataaatagctggatcctattaggagtccagaggtcaaagttagtcaggataagtgttgacacatgtcttgtttcatactgcaaaaggagtcaatgatatttaaagcacaagatgttaatgcctaggtgatgattggcatgatgctatttttcttaaatactaaaatttgttttaggtttatactgtgcatttcctttgaattctaactaccttcctggcagtactaaatataaaattaaatccaattcaagaaacaaaaagaaccagaggaagaatgtagatacaagcaagagagaataggataacataggctgagcattctcttattcctgaagaatagatttttaattttagatttgaccatagaatttctgctagtaaatatttttatttcagggctggaatacctctctaagttgattggaatctgtgccatctgatcactgttattttggtgttttaaaaatatattgtaatgcatgatagaattttaggacttaaaacatcttggataccgtattttacaataataacatcatatatgttagatacaagtatttttcctaaaaatctttttcccttcctttacagaatgctgcctttttatatggtcttggtttggtctacttccattataatgcatttcagtggtaagttgacataaaaccagtaattcagtcattttcagtaaatggcttgtttgcttgttttgtttgtgcttgattttttgtgtgtgtgtgtaataaatagaaaatttagtgtcattaaacctacacttttcagtaatcttttgaaatgattagattgttccttgaagggtgttggctcaccttagatttttagagttgtatgttttcctgaaagaatctagtataagattctgttgaagaaggcttagattagaaagctttttggaatttcttagtcattcattatggactggtgttccccaagttatttgaactggtgaatcactgtgatctcagaagtcaagatatgtgggtaaatggtct

SEQ ID NO: 49378 - DNA, 1066 bp, Homo sapiens
caagattgaccacttctcccttccacataccagctagcactttccaatatccagtaactaggcaccaactcataaactctcagttctctgtagaatagtaccacttcagagttggagattaaatataataatagtaatatataagattttctaaactgtaaagtgaagtaccctgtaatattatggcctttgccccattgttgtttttctgtttaccagacaatagtatgcactaatggggtaaaaaggcatatagttttagttgaaagattggtattgttgtcacagcattgccacttagtttgatcttgaattaaataacttctctaggtctgtttcctctttagtttgtttatttatttatttatttattttatttatttatttattttttgagacagggtctcactctgttgcccaggctggagtgcagtggcgagattgcagcttactgcagtctcaatctattgtgttcaagcagtccttccaccttagcctcccaagtagctgggaccacaggcacatgccaccatgcccagagagtttgtttttatttgtagagatggggcctccccctatgttgcccagtctggtcttgaactcctggcctcagggcatgctcccacctcagcctcccaaagtgctgagatttacaggcatgagcccccacgctggcatcatcatttgtttaaaaaacaaaactacatagcagtcacttgcctttcctatagagttttgatgatcaagtgagatacagtacattttataaaatgtcaacccaatgtagattttttttttttttttttttttggtcagagtctcactctgtcgcccaggctggagagcagtggcacgatcttggctcactgcaacctccgcctcccgggttcaagcgattctcctgcctcagcctcccaagtagctgggattacaggcgcccgccaccatgcctggctaatgtttttgtatttttagtagagacggagttttaccatgttggccaggctggtgtcgaactcctgacctcaagtgatccgcccacctcagcctcccaaaatgctaggat

SEQ ID NO: 49379 - DNA, 1033 bp, Homo sapiens
gagtgtaaaatatatgcagcagagtgctagaaaccagtctctaaaaagccattgctttacatgtgcatgcatgcaagcccctgcattcacttgttcttattcattaaggtggctctttgctaggggataccttgaactgagctccttgcctttggaaggaaacctatatcctagggtgagagtaagtgaaatacaaagcaaggaaaagttagactaaaaaaagatagttgggggaaaagataaagtcagtacaatagaaatcattcttccttgtatagcttatagccatctctctaaatatatcttcctaagaatccttattaactatctctgtcctgtaacctttttccttctttccattccattgatcaatatcagaatggtcttatggcagcaaatgtaagagatactgtgctagaagcataggattttggaaattaagcccccaaatataattgacaggcttaataaggaaatgtgataattattactttgacataaaaaaggattaggagaatgaggtagaaatgaattcagaaagacagaaatattaacaaattactactaaagttttcttttttcttttctcttcttttttctttcttttcttttcttttcttttttttctgagacaggatctcagtctgtcacccaggctggagtgtagtggcacaatcacggcccactgaagtctcaacctcccggggctctagtgatccttctacctcagcctcccgaatagcttggactacaggcttgaaggcttgaaccactatgcctggctaattttttgtatttttttttgtagagatgaggtctcactgtgttgcccaggctggtcttgaacccctgggctcaagcagtcctcctgccttggccttccaaagtgctgggattatagatgtgagccacggagcctggtgtaaagtttctgtaggattcattttcatagcactgtactagtcacaagtgttcttaggggtgtaggaatttctactctcctgtatagtcactgctttgggttcagtaaaga

SEQ ID NO: 49380 - DNA, 1046 bp, Homo sapiens
catcatttttataaaaccaacatttcctttaaaacaatattgcataaaacagaagtttcaatgtactaccaagcaagaattcatgcacgtgttaaaaagttaagatatcttatgtctatattctttcagggcaattaaagcatttcaggaggtgctttatgttgatcccagcttttgtcgagccaaggaaattcatttacgacttgggcttatgttcaaagtgaacacagactatgagtctagtttaaaggtaggttgttgggttttttcaagatacaatgtttaattttgtggtttttttgtttttgtttttcttaaatattagagcattgagaaatgttggaatttatattggcactttaaaagaaaatttgaaaattcaggtgacagaactgtttatcaactgtgaagtagagtttcaaggtacaaagtagttatgctaagacttccatggtaacattatacaattacactttaaaaaaatagttttaactaagatctgtcatcaggaaagggtgaaggtttcagtctgtttggatatgtaaataactcctctagaaatgatttgccactgtagagttcagaaccagctgaatggttctgaaaggatgtttttctgtgacccaatcattgaccctgtttccatgggtctcagtacttctaccagcagaagcacatcttatatttaaattagaaaaaagagtgttctctgcaaggcatttggactgttggtttgtgagcataaacgttgtgggaaaagatgatatgttgttgattaacttcgtatccatggaaatgtgatatttctccagtttttaatttttcattgagttttttatgctatctgaaccatcaatttaggtcttgctgggctttttctgaaaatagtgctttcctgcccaacagaggaattatgttttgaaaggagtagcagttgtaggaaaaagtttaagtttttgtgaatttatgtttattgtttataatggttgttgtattctgaatctccattgcagactatcttgattctaaaggaagggtggttgggg

SEQ ID NO: 49381 - DNA, 1069 bp, Homo sapiens
aaacaaatactgttggttttttttttatgcctacataatttataaggtctgttttgatgttttggcccaagtgttacaataaggcatatatgtgccatgcagagttcatacccaccagatacaagatcctgctacatcccgttatttatattgttataggatgtaatcagacagtttgagatcatttatgctggtggttcccaaacccagctctatggcagaattatttgggaagctttataaatcagctgtcatggggagttttaaaaaattaacatcagatttctgggtacctcaaccctccccatctgcactttgcctccccatcccccctctgcctccccatccctcctctaccccatactctagtttttctagttctctatgagatcactggtctgtcattagctaaagaagcagaagtttttttaacctttatttttaatgagtatttttgccggagatggaattctgtttatctgactgctttgaaattcacaatacattgtcttttggctttcattgtttctgatgtggagttgtctgttggtcttactgtttaatcctgtgaaggtaatgtgggcacagggccctcctcccattgattcatttgataattttttttttttttttttttttttttattgatcattcttgggtgtttctcgcagagggggatttggcagggtcataggacaatagtggagggaaggtcagcagataaacaagtgaacaaaggtctctggttttcctaggcagaggaccctgcggccttccgcagtgtttgtgtccctgggtacttaagattagggagtggtgatgactcttaaggagcatgctgccttcaagcatctgtttaacaaagcacatcttgcaccgcccttaatccatttaaccctgagtggacacagcacatgtttcagagagcacagggttggggataaggtcacagatcaacaggatcccaaggcagaagaatttttcttagtacagaacaaaatgaaaagtctcccatgtctacttctatccacacagacccggcaaccatctgatttctcaattttttccc

SEQ ID NO: 49382 - DNA, 1031 bp, Homo sapiens
gaggcggaggttgcagtgaactgagatcgtgccattgcactccagcctgggcaacaagggcgacactccgtctcaaaaaaacaaacaaacgaaaaaactgatcatctcaatagacagttctttcaaatcttccttatgttagcggtgtgtgtgtgtgtagctccttaattgtttccatcattaggacaaccctgtaggtagcaagattggatattagctcttgttttattgcatcagttttttattgatgttgaatcctagtttaagtgaattgcctgaggttcatacagcctagttttgtatttctacctacttttttttgaaaatatttgtttgctcaggcagttatatactggtaatgatatgaataaaagccacttcaatccattgttctgccaagtatgttttacaggtaatatttatgagcctttcttttgttagttttttccttttgttttgggggagttgtcttaaggtttgtaaccatagcaataaagagtttcagttatattagtactcttgagaactgtggctaaatggtttcatttagacatttgcctgtgaaatcctaagtcttacagacattgttaggctgtaacagagttttgatgtctttaaaatcatatgtattataaatatttttataagatattttatatatactagaaactgtatctttaaaatttagatttttaactacttttgtacttatttagattttgtctacagcatttttgacatgtgctttatttatttatttagagacagagtgttgctctgttgcccaggctggagtgcagtggtgcaatctcggctcaccgcaacctccgcctcccggtttcaagcgattctcctgcctcagcctcccgagtagctgggactacatgtgcgcgccaccatgcctggctaatttttgtatttttagtagagacgtggtttcactatgttggccaggctggtctcgaactcttgacctggtgatttgcctgcctcggcctcccaaagagttgggattacaggtgtgagccacc

SEQ ID NO: 49383 - DNA, 1064 bp, Homo sapiens
aatttgccatataatcacattaaattttaattatatggcttcatttttcctttaaggaaagtatgtttgtatgagacattaattttaattaatgtaattttaattaatgtaatattactttaattaaagtaatattaatatggttccttccctaaaaatatttgattactcatagtatgcttagaaggttaaggaaaaaaatttttaaaaacatttgattaactcattattaacatacaataagagttgactgaaaaggtatctaatttttggtgaggatttcctaatccctccccaggcttataaaagagcctaatttggattgcttctaaataaagctggagggtccaaacttttgtgtttctcttctacagtagcagaaactggattttattatttttgtatctttttgcctgacaaagtggctattcgataaatggatgacatgaactaactaaactccatttgcttttggagctagcactattactgttagtgttgtggagtgtgaggctttatatagtgactgtaaaggaggtctggaactgggaaacagtaggtgcctgtctcttgttttcaggtttatatatgaaaatttcttttagcatagattaaaacgaatgtatactagaaagtatgttccttctgacctaagatagtttaatacagtagtgtgtagatgtctttttagtataggtttttaaatttaaattctagttacgtaaaattataatgaaccatgtgtagaattaactatcatagtcatgctgtaattttcagcttcgatgagcagtatttaatcatcagtatttcagtgagcagtattttatcatttttttccagttaactaattttacattgtaaaacattatgatgcttttaatttaatctttttgggtaaatttttccaaatatacaatatacttttcctgactaaataaaggatacttatcacaatttaacttggtttcgggttcaaggttatcattttagacatattattttccatctgtaataataaaattctaaatcttttagacttttcatattctctttcactgcct

SEQ ID NO: 49384 - DNA, 1063 bp, Homo sapiens
aaggtttgagtttttccatcccaaacccttagtatcatattaaatatagaaagtagggataaatttgcattcatcaaatcattttattcatctccctgccgttaagatcccagcacacttttcatcatcactttttactgacattgaaataaatttaatgttggatctagtggacagtgtggtgtttaggctagccgtttgggccatagtttgagggtgggcctttttgggtggcttattaaatagtcagtaatttttaaatgtatgatttctaagtttaatatgcatgtaaaattattttttaaagaatttaatgttataacatctttttaacatgtaaatattccaattcatagtcatttggcctcctctaaccattattattaactgtggatttaaccaaatattctttaattttttttttaaatcgattttcctcagaatacttctgacaattggagtggtggacatgctgtgtcacatcctccagtacagcaacaagctcattcatggtgtttgacaccacagaaattacaggtatgtaagatgtttttgacaaattgtttattaaaaaggagtagaggtagcaaacaagtattaattttttttttttttttttttttttttgagatagagtcttgctctgtcacccaggctggagtatagtggcacgctcttggctcactgcaacctccgcgtcctgtgttaaagttattcttgtgcctcagcctccagagtagctgggattacaggcacgcaccatcacaccccgctaatttttatatttttggtagagactgggtttcgccatgttggccagactggtcttgcactcctgacctcaagtgatccacctacctcagcctcccaaagtgctgagattacaggtgtgagccactgcacccagccctaagtattaattcttataagttaaatggcagtacattcaattaaaatgcacaaaagtaaaatgagcctgcatttaccagaataatgaagagcattcattcttgtttttaatttctttttttttttttaaacaggacatggtttacactacata

SEQ ID NO: 49385 - DNA, 1861 bp, Homo sapiens
tcaataaagaaaatatactgagatgtctctacttggtgtaggtaaatagatagtaaacaaataagcaatacatatataacattagatgatggttgtgattagtgctatggaaaaaagcactaatagaaagggaacagcagaatactagagattggtggtaggagagttgcagttataaatcagaagggcagggaaggcttctctgaaagatagcatttggatgagagttacaggagtgagccttgaagctatttgtgataagattgttccaggtctagggagcagcacggagcaatggaccctaaggtaggattgtgctgtgcacatttgaggagaatcaaggtggcaagcatggcagaacaggacaggcaaggagtgagaagagagagaaatgtgctccagctggaaacaggatggctaaatcatgatcagccttataaggatactggattttattctgagtatccaggaaaccgtagggggattttgaacagaggagtgatgtgatctaactttgtttttgactaggtcctctttggtactctgtggatagactgaaagaggcaaaagtagaaatggtatgaccattttagagattatacctgtaatccaggttaaaagttgatgatggctcccagagtggtagtagtagatggtggtcagcttctgggtatatttggaaggtacagccaacaggattagttgatatagagtgatgtgtgagaaaggagtcccagctggcctgaccaactagaaggatggatgaaactggatggtatcaccaatcagtgagaacagattgagaaaagaactcaagattgagccttagggcattccagtgtattaggctaggaaattgaagaactagcagagaagaatagaagagattgacctgtgacatagtaggagatcaaagacaatgtgagtgatgccctggaagccaaatgaagaaagtttcaaggaggaggacatgatcaaataatgctcataggtcatataaagtgaggactgaaaactgaccatctgagatatttgctgacattattggagtaaggaaactacaggttacaggcaaaatttaccccacgacctgtgttttttataacccgtgagctaagaatgatttttatatttttgaagggttgtaaaaaaagaataatatatgatactgggtgacccacaaagcctaaaatatttgctatctgatcctttacagaaaagatatgctgaccattggataagggcaatttcagtggattgttggggtgcaaaagcctaattgtagttcgcttcaagataatataaaatcggcagagaaaaactgaagtagcaagtatagacagttccagcacacatgcttacagttgtttgggctacacactgcacagtgccaaggcttccatttccatataccgtggcataaaagagaacaacaaccgggtgtagctgacagggaaaatgggattaggagttgttgtcttgttgttgttttaaatttaaaatgagagaaataacagtaaaagtcaatgggaaagattcagtagagagggagaaaatggcaaaggagaaaggggaattgttagaatgggtgagaggatgggattttgggggttcattgtctttaagcattaaacagttgttaaaaggataacacgagatttttgttaaaatgcctatcatagttctaaggtataactggcagttaataagtgaaagcctttgttatgattgtaaagcatagttctattttcttttctctcacatctacttctttggctcacttagttgctgaagttttcaatactctcttaaccctgttttggaaatgtgggattctttaaaaacgtaattcgtaattcta

SEQ ID NO: 49386 - DNA, 1917 bp, Homo sapiens
tgtgcagttcagtactgttaagcatattcacattggtgtccaaccaatctccagaactttctcatcttgacaaactgaaactacacactgaacaactacccatttctccctcctgccagcccctggcaactaccattctactttctgtttctataaatttgactattctagatacctcatgtaagtggaaccatacaatatttgtctttttgtgactggcttatttcacttaacataatgtcctcaagattcatccatgttgcagcatgtgtcaagattgtcttttcattttaagactgaataatatttaaaacactttgattttgaagtttaatttcagtttcatttctcctacatatttttgtcatgataaaatggaaaggagaaatgtatgtggttactatctgattaaaactagaatcaaaagtcacagtgataagatactgtcaaatagaaatatcaccccataaaatgcgttatttaaattgtgaaaaataatgaatattaatttggagcataatatttaaataaaagctctgttttcctgagatctaaccacatattttaattttacagttggaaaataaacgtgatgctttctttcctccattacatcaattttgtacaaatccgaacaaccctgttacagtaatacgtggccttgctggagctcttaagttaggtaagccttaaattaaaaaaggaaaacgtttgtctctttgttttgctatcttttaacttttccagcactggcagatacttttcttttttttcttttttctttttttttctttttttgtattttaattttacttttttttagtactaagaatgagagagagtgtgtgtatcacttctttaatccatgatgtgaatatattgttggtgatactggttactgacaatttggtggaggtttttaaatttagctattactttggtccgtttacataattgtgatttaggttaatagaaaaaatttgattataaaatgtaggtgaaatttgatgctactaataaatactatagccccataagtatttcctggcatctgcagaaattaaataaataagtgaaatttcagtcctttcacacttaattctttctcggatgggatgacatagcagttagattcagggcttcagcgtatggttctgcaaacttggcacatagctcaggttgtgcagaggccctagttttttatgggaactggatacagtgccgtaaaatgctttaccttcttcctttaaaaaaaaaaagcacttaaaatattatcccaaatataattttcattttttaactacatttatgtattcatgaagacctgggacttttctctactaaaactttggtggaagctaacaatgaacatatggtagaagtgaggacacagttgttgcagccagcagatgaaaactgggatcccactggaacaaagaaaatctggcattgtgaaagtaatagatctcatactacaattgctaaatatgcacagtaccaggcctcctcattccaggaatcattgagagtaagtatttgtatcctaaagattattttaggattttaaagatgattttactttggagttttgaaaggacacattacttttatatgcatctcatcattttatgttacataaaatactttgtaagtgttctccagttgtctcgtatgtatatatgtatgtatgtatgtatgtatgtatgtatgtatgtatgtacgtacgtatgtgtattttgagacggagtctccatctgtcgcctaggctagagcgcagtggcacgatcttggctcactgcaccctctgcctcccaggttcaagcgattctcctgtctcagactcctgagtagctgggattacaggcatgtgctaccacgcccagctaacttttttgcatttttagtagaaactgggtt

SEQ ID NO: 49387 - DNA, 1039 bp, Homo sapiens
ttgcaccactggagctccaattttttttcttttcacatttcaggtcatcaggaaaataacaacttctgttcagttaacataaatattggcccaggtgactgtgaatggtttgttgttcctgaaggttactggggtgttctgaatgacttctgtgaaaagtaggtttccaaagtaaattttcttaaaacatatattagaaagcagtaattgtaaacgacaacttaccaagctggatctcctaatggatacattgccagtattcacttaccattcagcgaagaattcattttaaattatttgattccaaacctcatattttgtgttattggaaatactttaagaaagatgccatgaaacaacttcatgcagtagtagtacccatgaattaagaagatagaaaagttgagttattagtttaatttttaaaatgatgcatacttattcatttgaaatgtgtgtattccaagaaaaattgttttgttataaatggttttaggaagtagaaggaattctttattgagcacccgtataggctgtgaataactcaagcttgaccataataccttttgccatatcatgatataaattctttttaaactgacaactttttctatgaagaaattttataaaatgtattatttattttttatttttaaatagagatggggtttcaccatgttgcctaggctgctcttgaactcctgagctcaggcgatccacctgcctgggcctcctacagtgctggattacaggcatgatccaccacatccagcccagattttgttttctctagttgaaagaacttggatagttcctttccttaagatcccagaaatagcttttatttacttctgtgtcttgtgttaaaaagtactttggaatttttttttagttggtttcaatttgatcatttgtctagatagaaccttactctcttcttttctagaaccttattctcttcttttctagaaagtacttcattatataaggacctggtattttcatttagtaataacattagcaaattagtataggatga

SEQ ID NO: 49388 - DNA, 1489 bp, Homo sapiens
tcatttggtcccaatttcctaaatatatttaggatttctgcagaataaatcccattcaacaaatgtttgaaaactcactctatgccagacactgttctaggcactgatgatggacataccaatgtttaagatgaaattcctgtcctctggagacttcaattctagtagaacaagacagaaacccccagtataatttatttatatgaataagataaaatacaataatatttgggaggagggaaggtcggagtgctccttttgcttaactggtctgagagtgtgagttttctgcttagccctgaataatgagatgaaatcaactacacaaagatctatgggtagaacctttcatatacagagaacagatgaaggctaaattgggaataactttggcatgtttatgggacaaaaaggccagggtgactatagctgaatgagagaaaggaagagtgatggtgataaacttaagcaagcaggaatgagatcatacatgggctttctggacatggtaagaagtttatatattaattctaggtgttacagcttgccatagaggattttaagcaggaaaggaataggtttcactttaaatttagaaaatggatctagtgggtgcagtggctcatccctataatccttgcactttgggaggccgaggcgagccggatcacttgaggtcaggagtttgagaccaggctggccaacatggcgaaaccccatctctactaaaaatacaaaaattagccgggcatggtgatgggcacctgtaatcccagctactctggaggctgaggcggcaggggtggtggggcggggggttgcagtgagccaagatggtgccacttcactccagcctgggtgaaagagtgagactctctctcaaaaaaaaaacaaacaaacaaacaaacaaaaaaaaaacggatctaattgctgtgtgtggaatgagttccaaggggtaagcttagaagtagggaggacaaattaggaggcaattgtaacagtacagaccaacctggacagagatttccctgtaaaaatagagagagggggtcaaactagggagtcttatggaactaaagcttgtagaacttgctcatagattaggtggttgagtgagagggaaaaaggaaccaaggaaaacttatagtcttttcttcttgttgcctgattgtcattaatgtaaacattaatcacctctatcatcttttccattccctaccccaccctcaatattcttgataccctttgagactccttccagtttatcattaaaatgttgaggtatcgacatttatgttgttataaagttgtcttgtgttgaggttggacacacaaaatttgtgtgtttttctacttataatttatagtgatactgttgtttcttatacatttcttttttttaacctagatgcacttacattcttatctatactccattttgccctacgctacaaaatgtctcatcatttaaatcttgattgcattcctg

SEQ ID NO: 49389 - DNA, 1052 bp, Homo sapiens
tgtagctatctcgtaaggctgctggctgaaaactgtgtctatgcaaccttccaagtgcggagtgtcaaccaactggacgggagagagtactgctcctactccaggactctcacaaagctgatgagctgtacttcagaaaaaaataataatttccatgttttgtatatatctgacaaaactggcaacatcttacagactactgacttgaagacaacctcttttatatttctctatttctgggctgatgaatttgttttcatctgtcttttcccccttcagaattttccttggaaaaaaaatactagcctagctggtcatttctttgtaaggtagttagcaattttaagtctttctttggtcaacttttttttaatgtgaaaagttaggtaagacacttttttactgcttttatgtttttctgtcttgttttgagaccatgatggttacacttttggttcctaaataaaatttaaaaaattaacagccaagtcacaaaggtaatggattgcacatagactaaggaataaacttcagatttgtgatttttgtttctaatcttgatgtaaatttacactatttataaatacatatttattgcttgaaaatatttgtgaatggaatgctgttattttttccagatttacctgccattgaaattttaaggagttctgtaatttcaaacactactcctattacattttctatgtgtaaataaaactgcttagcattgtacagaaacttttattaaaattgtttaatgtttaaagagttttctattgtttgagttttaaaaaagactttatgtacagtgcccagtttttgttcatttttgaaatctgattatatatattttatatatacttatgtatgtatatataatatatatagaaatctggatatatatgtataaatctttagaacttaaatttttctcgttttaagtttcacatctatggtagatttttgaggtgtctactgtaaagtattgcttacaaaaagtatgattatttttaaagaaatatatatggtatgtatcctcaagacctaaaatg

SEQ ID NO: 49390 - DNA, 1029 bp, Homo sapiens
tagcagttcaagttgactaagacagctggttaaagatataacaaaagtctaagcagaatcggacagtggagttacacaaacctaggtttgggtctcagtgaccttggttaaatcatttaacctcagggactcttagtttccttatctgtaaaatagtcatactacccatctctcaggttcttttataagaatagtgcttatgaaatgcttagtacaaaacctggcacatagtaaatatccaataaaatggccaccaaaaactagtgtattgtaaggcattctcacttctaaggtaatgtttcatcaggccgtataataagtaagcaaaactgtagattaggtagtttttttgggctccttgcattctcttttcccaaccaatggcccagaaattaactagggagtcaatatgatcaattaatccacagcctggtggcaacaccttttttttcttccataaattccaaaaagtgggaaagtagagaatgactggtagtagaagttcagggatcagtagaggtttggaacaagggtggtggtcttttgagtgtgagcttcttctccctaacccttcataccacatccttaaggtgattcgttgttccacacagtgaattttggatacaaaagactcaaggcttttactccattgagcattctgtgcattttagtcaaaggattcattgcagaagcctcgcactggacatctgtagacataacctgtagttgcccatccaccattgttttcaggcactcatttcccagaagacagaaagccccaacttccaggacaggctccacttgccaagaatttctaaactctttgaagatcagcttctaccttatcaggtaccttccaaatattctcagatggatgacaacagtctctcctctcagggttgtgtttgcaagtctagaagtttctgaagaatagtaactgaagagttactattgcatattttcattgccatcaacaacttccagtgatataaagaagaaacttttaaagcatgtgatggcaaatcctga

SEQ ID NO: 49391 - DNA, 1027 bp, Homo sapiens
gctgaggcaggagaatcccttgaacccaggaggcggaggttgcagtgagctgagatcgcaccactgcactctagcctggacaacagagtgacattccatctcaaaaaaaaaagaaaaaggatatgcgatatgcaccattatgagttcagtgtctctgggttgtaggaatataggcaaattttttattagtaaaaagttagatacatatgtatatatttatattacctttctatcttgtctatgtgtttattctcacatgtggagagaaacacacaaaaaaagctaggaagaaactacaccctctattaatagttatatttagaacaaaaattattgatttttaatgcctctgattatactctcaaatttcaagaaactaccaagaaggattatttacaatgtcttttatatagttttctttatccctccttatttttctattcagttttattttcaatatattacactactctgctactttctgttctgcacacatcatcccactttgacatgtctacacatactctattttccatgtggttgtctgtttgatctcattgttagaagaatatattctacaactttgagaaagtatctcttatgattttaacttggagagtgattttctaatgagagctaaaacattatcttgcttttacacttcatcctcacaaatcctgtgacctaaattggaagataccagattttacatatgagaaaacactgtagtgagtaactcaaggtcccatgggtaataagaacaaactgacgaaaacccaaatctccagaaaccaaatataaattctgatactggtgattgctattggataactattttctcttttcctcttttttccgtattccctatcaccagctcacaaaatgcactgtggtgagtatatcttaatattgatttgttatgaaagtaaaggcttttcattttataaaagcattacattgatgaattccactgattgtcttggtaacactattaagagggaagacaatgacagtcccacctccactg

SEQ ID NO: 49392 - DNA, 1050 bp, Homo sapiens
caagtctttgctattgtgaatagtgccacagtaaacatatgtgtgcatgtgtctttataataggatgatttataatcctttgggtatatacccagtaatgggatggctgggtcaaatggtatttctagttctagatccttgaggaattgccacactgtcttccacaatggctgaactagtttacagttccactaacagtgtaaaagcattcctatttctccacatcctctccagcatctgttgtttcctgactttttaatgatcaccattctaactggcatgagatggtatatcattgtggtttggatttgcatttctctgataagcagtgatgatgaacatttttccatatgtctgttggctgcataaatgtcttcttttgagaagtgtctgttcatatcctttgcccactttttgatggggttgcttgtcttcttcttgtaaatttgtttaagttctttgtagattctggatattagccttttttgcctgttcactctgatgatagtttcttttgctgtgcagaagctctttagtttatgtagatctcattagtctattttggcttttgttgccattgcttttggtgttttagtcatgaagtctttgcccatgtctatgtcctgaatggtattgcctaggttttcttctagggtttttacggttttaggtctaacatttaagtctttaatccatcttaatttttgtataagttgtaaggaagggatccagtttcagctttctacatatgactagtcagttttcccagcaccatttattaaatagggaatcctttccccatttcttgtttttgtcaggtttgtcaaagatcagatggttgtagatgtgtggttttatttctgaggcctctgttctgttccattggtctatatatctgttttggtaccagtaccatgctgttttggttactgtagccttgtaatatagtttaaagtcaggtagtgtgatgcctccagctttgttctttttgcttaggattgtcttggctatgcaagctcttttttggttccatatgaactttagtttttt

SEQ ID NO: 49393 - DNA, 1021 bp, Homo sapiens
tttgagatctttttttctcatgtatgtatctagtgttacacattttcctcttagcttcacaaattttgatgttgcattttcattcaatatagttttattttcaatgaattatatttaagtatgttctttaattttaaaatttctggataatttcctgctatctttctgttattgacttctagtttgattacactatggttatttaatttattattattatttcaatttttaaacatttgttcagatttgttttgtggaccaggataggttcatgttgtgaatgttccatgtatacctaaaaataatgtgtattctgttaataggtggaatgttctataaatgtcagttcaattctgttggttgatggtactgttcagtccttctgtatccttactgactctctgtctagtgagtccatcatttgttgaaagaatggtgttgaagttttcaactatagactcgtccatttcttctttctgttctttcagtttttgcctcaggaaatttgaagctctgctatttgctctgtacatatttaggattgctataacttgtttttggattgaccttttaaaccttatgtaacattcttctttgtccctggtaattttctttgctctgaagtctattttatctaatattaatatagctactcttcctttcttttgattaatgtttgtatggtgtatccttttcagccttttactttcagcccatctcattatattagaaattaatggtaatgtttttaaatccattttgccaatctcttttagtttatgtatttaaaccatttatacttaatctaattattgatattttaggacttcaatttgatttgtttgttccctctgtttttattcctttgttttccttttcctgtcttcctttgagttacttcaacattttttagaatttcattttatctgtagtgtttttgagggtatctctttgtatgtttattttagtggtttccttgaattatacatgtgtaacttatcacagcctactggtgtcaaca

SEQ ID NO: 49394 - DNA, 1050 bp, Homo sapiens
atatatgtgtgtatatatatacatacatatacaaaacaattgcttactagatgcacaaatcaatggaatagagagttcataaacaggcatatctctctttacatatatatatctatatcgatcacactatatatatgtgtgtgtgtatatatacacacatatatgtgtgtgtgtatatacacacatatgtgtgtgtgtatatacacacatgtgtgtgtgtacatacacacatgtgtgtgtgtatatatatacacacatatatgtgtatatgtgtatatatgtgtgtatatatgtgtatatatgtgtgtgtatatatatacacgcatatatatgcgtatatacatatatatggactcatatatgtgtatatacatatatatatatatatatatatatatatggactcacagtgtgtccttggacaagttatatagtctctgtgtgcctcaattttctcaagtataaaacagagataattatagtacacaacccttatggggtttttatggattgagtgaatgattatagagcacttagtatggtgcctggtacatatatagtgcttcttatactcctgaatctttttacttctattcagactggattttcattggaattaacaaatcccattattttatctcacattatcattatggaaatttaactgtggagatgaattttaatgaaaaatttgtattgccgcttagtaagataataagatgttcatttttgttttctgttaggaaaataatgcttaacttggtttaatagctgtaggacattaaattgatatcagacgaattacaactcttgaaatttttctttgatttttttttttttttttgagacagaatttggctcttgtcttccacgctgcagtgcagtggtgcgatctcggctcactgcaactctgcctcctgggttcaagcgattctcctgcctcagcctcccaagtagctggaattacaggcgcccaccaccatgcccagctaagttttgtatttttagtagagacggggtttcaccatgttggccaggctggtctggaac

SEQ ID NO: 49395 - DNA, 1062 bp, Homo sapiens
ctttgttgtatttaatgaactgtgataaatgtaatgaactgtggcatttcatcatgtgactgtaccataatttacttaaccattctcttcttattggacatttgcagtatcaccaaactaaaacttccatctggttgtagaaaaattttaatcatgttttaaacttgagagataattcacatttatttgacccttaaccttaactgcagtactaaaccagaaccacccatctgtaagaaagaatctcatatagtgagaacttattatagcaaacaccctgaattagacttataattaaaacaaaaatcagtgtgctgttgttgcattttatacagagaaatactagaataggaaatcattgttttagtctcagaagttcattttaaaatctcaatgaaattttattttcacagatggttggtaaaggctttttcctagttcagacaaaggaagtgtccatgaaagctgaggatgctcaaagggtttttcgggaaaaagcacctgacttccttcctcttctgaacaaaggtaccttctggatgattggtatacttttgtggatattttctttacatgctgatttgatttacttttgcctttaacatttgttttacattgccttctctttctcatttgttctttgttttttttctattattgttctgaaatgtcaaaatttcacatcactcaaggagccctagacaactaactagaaattaggcattctttttttttccctatcctctgttcttagtactgaaagtcacattttattatgtatcttattatcattttaattgttgtattattgttgtacctttatagtgtagtgataaatatttcatgctccctgctcagagttgcaaagcacttgatgaagattctttctaccttcagtgtgctttaatcatactggaaaagaaataagaaatataaagtggtatactattttatgtatttaatatgattgattaacttccatgtataattagaattgttttccctagtgggtaaatgccaccaataaatttcagatactggatataggtcttcaaagagagg

SEQ ID NO: 49396 - DNA, 1045 bp, Homo sapiens
ggatgtagtgccgaacccctgtaatcccagcattttgggagggtgaagtggaaggattgcttaaggccaggagtttgaaacccatctgggcaacgttgcaagaccttgtcactacaaaaaatacaaaaattagctaggggtgatgcatacctgtagtcccagctactcaggagctgaggtgggagggttgcttgagcccaggagcttgaggctgcagtgagttatgctcatgccactgcactgcagcctgggcaacagagcaagaccttgtctcaaaaaaagagaagaatgaaggtaatgatttaacaacagaaatctatgcatccatattgttaaacaaaaaggggagagaagaaaagaatgttcatctgctgtttatggaatattgtgagctaaaaaatgcagaaggaatgctggactttggaaatcaccatttccaaccccaatgtaataattatttcagacaaagattatcagtgggtgctaaaactattggggtaaaagttgctaagaagtaggatatttggctgggcgtagtggctcatacctgtaatcccaacactttgggaggctgaggcgggtagatcacgaggtcaggagttcaagaccagcctggccaacatggtgaaaccctgtctctactaaaaatacaaaaattagccgggtgtgatggcggttgcctgtaatcacagctactagggaggctgaggcagataattgcttgaacctgggaggcggaggttgcagtgagccaagatcgctgctgcactccagcctgggcaaaagagcaagactctgtctcaaaaaaaaatggccgggtgtggtggctcacgcctgtaatcccaacactttgggaggccaaggcgggcagatcacaaggtcaggagatcaagaccatcctggctaacacggtgaaaccccgtctctactaaaaatacaaaaaattagccgggcgtggtggcgggcgcctgtagtcccagctactcaggaggctgaggcaggagaatggcgtgaacccgggaggtggagcttgcagtgagccaag

SEQ ID NO: 49397 - DNA, 1052 bp, Homo sapiens
tgctaggattacaggcacgagccaccgtacctggcttagaatcttttatactatttcaccctaacttctaaactgatcttatattaaatattttaaaacttgtctcacagtaatctggttttaggatcatgtagggtctggacatttttaatccctcattttactgatgaggaagaaaattgaggctgggcacagtggctcacgcctgtaatcccagcactttgggaggccaaggtgggtggatcacctgaggtgaggagttcaagaccagcctggccaacgtggtaaaaccccatctctactaaaaatacaaaacttagctgggtgtggtcacacgcccctataatcccagctacttgggaggctgagctaggagaatggcttgattggcggaggttgcactgagctgagatgatagcaccactgcactccagcctgggtgatagaatgagactccatttcaaaaaagaaaaaaagaaagaaaattgagggccagaaagtttagacggcctgtccaactcacaccatagtcactgaactttaatgttgacctcttgactttatccccatgattaccaggagaagactcagcccatccatcccttcctgtatgaagccttttctaatactctgaggtagaaaggccctccatggtgctcacatagtactctttatagatttccaagtacctgcaacacttcactctatttctttatccatgcgtttcttgctactcaaagtgtagtccatgggccagcagcatcagtatcacctaggaatttgttagaatttaaggctctactccagatctcttgaataagcctcgacttttttttttttttttttttttgagatgctctgttacccaggctggagtgcagtggtacgatctcagctcactgcaacctccacctcctgggttcaagcaattcttgtgcctcagcctccggagtagctgggattacagttgtgtgccaccatgcacagctaatttttttttttttgtatttttagtagagatggagtttcgctatgttggtcaggctggtctc

SEQ ID NO: 49398 - DNA, 1034 bp, Homo sapiens
tctttcaacatagtactccaccattgcctggcttacgtgatttctgatgagaaggctgctgtaatccttttttttttttttaataccttaagttctgggatacatgtacagaatgtgcaggtctgccacataggtatatatgtgtcatggtggcccgctgcacccatcaacccgtcacccacttcaggcacctctcccaatgctatccctcccccagtcccccatcccccaacagactccagtgtgtgatgctcccctccctgcgtcgatatgttcccattgttcgactctcccacccatgaatgagaacatgtggtgtttggctgtctgttcccgcgttagtttgaggctgctttaattcttatccttgttcctccatagttaatgtgtcttttttcctctgactactttgaagattttctttttgtctttggttttcagcagcttgaatatgatatgcctaattgtggcttttaaaattttttcatttttgtcctgctttgtgttctctaaactttattatatctgtggtttgttgcctgtcactaattttggaaagtttctcagccattatttcttcaaataattctatcttgttcttttttttttctctttctgggattctaattacaagtgtgttatactgtttgttattgccccacagttcttgagtgctcttcagtattttcattcgtctctttttaatttttattgactgatcaataaccttgatcttcaagctcactgagtctttccttggctatgtcaagtctactgttcagcccattgtttttcttactgttttttttttaatttctagcatttccctttgattcattcttacagtttctatctctttgctgaaattatctgtctggtcttgcatattgtctattttttacattagagtctttaagatattaatcatagttcttttacatttttttctgatagtctcaacatctgcatttactgagtctggatttagtaattcctttgtcacttggaatgttttcttgccttttgttacgcct

SEQ ID NO: 49399 - DNA, 1034 bp, Homo sapiens
aggacccagtgaaaagctcatcttttcactacagtggtttcttccacctctgaagccccacaggactaaatgtgctcaacactcatttacccagatgggatagtgtggtagagtacttactggctacaatgtcctttcatctctgtatgtacacttagagtgtgattttgcagatccttgcaacaagaggtggagtctgtttctctactccttgaatctgggctgtccttgtgactcactttggtcagtaaaacatggcacaggtaactccagatgacttatgagcctaggtctcaagaagtgttgtagcttctttcttactctccattctgaggcaaccatgtgaggaagccccagctaacctgctggaggaagagagatggtatggagagggagagagagatccagtcatcaaccagccatcagatatgtgagtgaagccatcttagaacattcagccccagtcacattggcagatgactgtaaccatatgaaggaccacagaaaagaccagcagaacaaccacctagctgattctagccgaaattgctaatccacagaattgtgagctaataaaatggttattattttaagctactaagttttggggtgaattacatagcaataaataactgaaagggcagggtttgtactgctatatccccagggcctagagggcatgaccatggcaggttttcagtaaaagactgttgtggattactgtcattgtggtgtcactcctctctttgcttaatagacaaccaaacttcccagtcctcttggctctcacaaaagttcaaagcttgacttcaacacattcttccagaataacaccttgaagttcttctttgccccactgcaccagcatccatccatttgcccccatcacagccctatgacagacagttcattacaccccacctcagctccatgttgcgtccctcctacttacccttattctctaaccctgtggggtcaacccattgaccacctcagtgccataaagctcttctcaacttcccagccccccatcc

SEQ ID NO: 49400 - DNA, 1097 bp, Homo sapiens
aggttgataccgtgtctttgctattgtgaatagtgctgtgatgaacatatgagtgcatgtgtctttatggtagaataatttattttcctttgggtgatatacctagtagtggaattgctgggttgaatagtggtttgatttcacattctttgagaactccccaaaccactttccacagtggctggactaatttacattcccatcaacagtgtctaagttcctttttctctgcagcctcaccagcatctgttactttttgactttttaataatagccattctgactggagtgagatggtatctcattgtggttttgatttgcatttctctgacaattagttttgttgagcatttttttcatatgtctgttggccacttgtatatgacttcttttaagaagtgtccatgtcctttgcccacattttttttttttttggatacagggactcactctgttgcccaggctggagtgcagttgtacagtcagtctcagctcactgcagactcaagctcccaggctcaggtgatccccctgcctcagcccctcgagtagctgggactataggcaggtgccaccatgcctggctaattttttttttttttttttgtagaggcagggtttcaccatgttgcccaggctagtcttgaactcctggtctcaagcaatctgcccactttaacctcccaaaagtgctgggattacaggcgtgagccattgtgcctggccttttgtccaccttttaatggggttgttttttcacttgttgaattttttaagttccttatagattctagatattagacctttgttggatgcacagtttgtgaatatttttctcccatttgttagggtgtctgtttactctgttgatggtttcttttgctgtgcagaagctcttattaggtcccactggtcaatttttggttttgttgcagttgcttttgaagacttaaccataaattctttggcaaggctgatgtccagaaggtatttcctagattttcttcttgtatatttatagtttgaggtcttacatttaaatctttaatccagcttgagttaatttttgtatatggtgaaaggtaagggttcagttt

SEQ ID NO: 49401 - DNA, 1035 bp, Homo sapiens
ctttattgaagtataatttatataccacaaaattcacctgcataagtatataattcaatgccttttaatgaatttactaagttgtgcaaccatctccataactcagttttagaatatttccatcacgctaataaaatcccttgtactcatttgcagtcactccactcttctcccctcagccctaagcaactactaatctactttctgccattgtagatgtggacatttcatataaatagaagcgtataacatatggtcttgtgtgtccagattctttcacgtagtataatgttttgggggtttatctgtggtggtacaacatatcaataattcattcctttttgttgctgaataatattccatcatgtggatgtaccacatcgtggttattcctttgctagcagatgggtatttgggatagttccagcttttggttctcatgaacagtgctgcagtgagcattcatgtacatatccttgtgtagacataagttttcatttctcttgggtagaattttaggagtagaattgctgggctgtatgttaaatttatatttaattttttaaagaaactgccagttttccaaggtggctgaacccttttatagtcctaccaataattcctgggaaatatagcttgtgtacttgaaaagcatgtatattttgcttttcttggagtgttttgtagataccagttaggtcaatttttaaaatagttcttgtttaggttttgtatattctttatttttttctagttctatttattaccaagagtggaatgttaaactctgttagtgtccaattgtctgtttcttcagttctttgtctttagttttcagcagtttgatcatgatgtgcctaggtgtagattcctttgtatttattctgtttggtgttcttagtgtcttggcagttttaaacttttttttatttttattttttatttttatttatttttttgagacagagtctcgctctgttgcccaggctgtagtgcagtggcacagtctcggctcactgcaacctccgcctcccg

SEQ ID NO: 49402 - DNA, 1031 bp, Homo sapiens
atttttaaagaaatgaccgaaatattttctagaatagctatactattttacattcccacaagccatgtacgagtgatatagtttctctacactttctccatgatttgatattttcactatttctttatttcagctattgtaataataagtatgtaataatatcttgtggttttaactggcatttccctaatggctggtgatactgaatgtcttttcacgggcttaaatgccatttgcgttcctctttggtaaaatgtctgctgattttttttttttttttttttttttttgagacagagtctcgctgtcacccaggctggagtacagtgatgcaatctaggctcactgcaacctccgcctcccaggttcaagcaattctcatgcctcagcctcccgagtagctgggattacaggtgcatgccaccacacccagctaatttttgtatttttagtacagacggggtttcaccatgttggccaggctggtctcgaactcctgacctcaaatgatccgtccgccttagcctcccaaagtgctgggattacaggtgcgagccaccatgcccggcccatctcttgatttttaattaggtcatttgtttccttactgttgaatttttagagttccttatgcattctgtaatataagttcattgtcagatatgtgttttataataaatattacatgtataatatttctaagaaatgaccaaaatattttctagaatagcgattcctttttacattcccaccagcaatgtatgagtgatagtttcttcacatcttctccagcatttgatattacacgtgtgtgtaatatgtgtaaatattctgtcccattctgcttgcttttgcgtcttcttaacaggggctttctcagagcagaagtttttttaaaaatataagtagatagtttatttgggccaagtttgaagaccacaacccagcagcatagattcaagttgccctggatatgcttctgagagcaaaagtctttaattttgatgaaaacacatttttctttgccaatc

SEQ ID NO: 49403 - DNA, 1050 bp, Homo sapiens
tgatccaatcaaattagggctcctttgaagatagttcctgagatctgtgtttgagatttcttctgaccgcaagaggctctttccctgctgtctctttctctggttctctctggcatattaggcagcctaggcttgaacttctgtacactcagttgcaaatgaagtcagtttcattgcaggagaattgaagccccctattctatgccctgcctctctccctgggaaaaatctttgagccacagctctggcgcagtggatggagataaatggtgagcttccctctgagtgtcagccccaggtctcccaggtttgcctcttctggtatagaacccccaccccacaaggtaacgccagagcaatcaaggctctggtattcttggtggcacaacacccaaggcatagcctccatcccatgagttgggggctaggtggaagaagggagcccccacctctcagccacattctcctggaacgtagcctcagcaaaagtagctgggaacgggataagagatgccgacatcctgttcttcccaggaagaaaggagcttggagctggggtagaaggaaccctgtgttcttggctactgtactctggcatgagatctttgctgggagggaagatggaggaagtggttctagatccaaatactgcagactttgactttactttatgaattttagtagattttctcgaataagtacttcatttgctgtatgcccttaaaaccatttccagagactttaaatggttgggttttttttaattgaaataactttcaccaattttgctgggaagagggtcgtccatggagctgctcacactgttatgccagaagtggaactctgtgagctttttaatgtaaaattttgttgctgctattcttaattgctcagagtggccttgtatttggatttctacctcctcagtagattgtaaatagcttgaaggcagtagccctgacctttattcattatggaatcatgatagcccctggtagcatgttgtatgttgtggcacataaaagaatgtcagtcactggctatattgct

SEQ ID NO: 49404 - DNA, 1086 bp, Homo sapiens
ttgctagccaggaaagctcacccttggtgttcagcgattttattgagagttggccacgtaggcattgctcaccatccacgtggctgatgttactctccagtccctccagaggtcaggctgatagaaggtgccccaaagtctctaccataaatcacatcgttagcatagactatctcacttggcccaaggacccaaggtaaacaaagacactcttatcaggcaggacattccaggggcttaaaggttacttctaaggagctaaagacaaacagccaaactttttttttagacaaggttatcctttaccgcacaatacccaagagaaacaaaaacatatatccacacaaaaactgctgcatgaattttcatagcaccattatttcataacagacaaaaagttaaaacaacccaaatgtccatcaactcgatgaaatggggtatatccatacaattattttttgcccataaaaaggaatgaagttataatacatgctacaacatagaggaacctgaagaacatgctaagtgaaagaagccagactcacacagccacatattgttgtaattccacttatatgaaatgtccagaataggcacatcaatagagacagaaagtagattagtagttgcttggggctggagttggtaacagggagtaactacaaatggacacaagatttggggttggtggtgatgaaaatatcctgggattaggtagtggcaatggttgcatgactgtaaatatattgaaaaccattgaaatgtacacattaaactggtgaactttatggtatataaaatatatcttaataaagctatttctgtcatttcagtgaatgaatataatgaccatgctgtaatgcacgtagtaaagtgtttaaagacacatgtataaaagatgctttgtacaagtgctatttgcttgccacaatgagaacagtgctatctcaattttttattttaaatttgtaaagataaaaatattttttaaatgggcataataaaacctctctatcaccttccgtggttacagtggaaataagtgagatgtatgcaaaggcattttgtttaatagaatgcgccaga

SEQ ID NO: 49405 - DNA, 1073 bp, Homo sapiens
cccgagtagctgggactacaggcacgcgccaccatgcctggctgatttttgtatttttagtagagactgggtttcactatgttggccaggcttgtctcggactccttacctcatgatccacccgcctcggcctcccaaagtgctgggattacaggcgtgagccaccgcgcctggccttacttatttttaaagcaaattcttctagatcctgagtttctggctttttaaattaaaattacaagaaaatgtattgattcctctggtgttaacaggtctggagacatacatttatgatgctttggagctattgataatatatagagtactttattcattaattatttcattctaaaaaccctgctttatatatccccagaatactaaggcctggtggggaatatcttataaataattaatggttattactaattattaataataaccgtcaatgaaagtaagatagaaactgttaagagattcagttaagtactgtgtaattttgtgttgattatatctgccagtaatattcatcatgcattgcatagaagtgggattgtctttctttttctcctagctggtttgtgagaaaattgtgagcaattttgcacagggagacttcgatgtctgactaacatttattgactgcttgtatgtactaggaataattctaaatgctgatcatgtgttatttttttctctttttttctttttatttgtcattctaaatgcccttcatgtattgtctcatttaatcctcacaaataggcacatttattctcgtcatactacagatggggaaacatccgtaagtggcagagatgggatttgaacccaagccgtcttaaggactgcactggaacggtgttttttgttttctaaaatgggggtaataatacatgtaaagtgattagaacatatagttagctctgaatacatggcagaacttactgcagttatggccttgtttaaggctcccagccaccctgtgagttagggatcaacatgatcccccttttctacaagaagaaacaggttctgagagaataaatgacttgcccaaggccactcggtac

SEQ ID NO: 49406 - DNA, 1060 bp, Homo sapiens
tggggtagaggaaagctgttgatttctgtaagttacccctgctgtatgcccttattatttctaatacttcattgttgattctgatgttctttctaagtagttggtcatattgtatgcaaatctatcctgtcacttatttatttttcttcatttatagtattgtccaggacttttagtaccatattaaatagtataagtgatactgggtacacaaattaagatttactttggctggttgtggcagaaagtccaaaggataatggcttagacaagatagtttacttttctttcccataaaggcagtctgcagaagagcaattaatctagggctgacaggcagccccttctgtgtagccatcctcagcacatggcagttgagacagtaggaagaagggagaggaataaaagggaatgtgtctaaagtttctccattaagtatggtgcatgcagtaagtttttagaatgtatcctttaataaatcaagaaaattatctaatcttcgtttgctaagattgaccataaataagtattgaacttcaaaatcctgtgctttttttctccctttgtccattaatttcataaattgtggcctggcatggtggatcacagcaccttgggaggccaaggtggttggatcgcttgaggccaggagttcaagaccagcctggccaacatggtgaaacctcatttctactaaaaataaaaaaatcagccaggcgtggtgaagcatgtctgtaatcccagctactggggagactgagacatgagaatcgcttgaacctgggaggtggaggttgcaataagctgagatcgtgccactgcactccatcctgggcaacagagtgagactccatatcaaaaaaataaataaaaattttgtaaattgcattaaatgatatccttggcattcttgagctataccccacttgatcatggtatgtatgtatatgtttatgacttcttactttgaaaatatctcaaatttacagaaaggttgcaagaaaaagtataatgaattcccatatatcctctactcagaattacttgttttaagtatttt

SEQ ID NO: 49407 - DNA, 1063 bp, Homo sapiens
tgagtagctgggattacaggcacgcgttaccacacccagctaatttttgtatttttagtagagacggggtttcaccatgttggccaggctggtctccatctcctgatctcgtgatccgcctgccttggcctcccacagtgctgggattacaggcgtgagccactgcgcccagcctgtcctttgttttttaaaacaatgctacagtaacttttttgtacatgtgcaagtatgtgtatactttaaattcccagaagtagaactgtgggtcaaagggtatatagatttttagttttgtcagctattgccgaattctcctctataaggattattccatttttaactcctaccagcaatatgaaagtacctgttttccatacagtcttgctgtttgttttcaaacattggactgttgtaaatctgttagattaaaaatgttctatcaaatcttccttactagtgattattgtatagtacaatactatattatttaatagttatcataaataataattttaatataactccaaataatgtagatactccctcctctaggaggtagagcttaattaccctccttttgactgtgggctggtcttagagactcacctctaaagaatagagtatggaggccgggtgtggtggctcacgcctgtaatcccagcactttgggagggcgaggggggcggatcgtgaagtcaggagatcgagaccagcctggccaacatgatgaaaccccgtctctactaaaaatgcaaaaattagctgggggtggtggcaggtgcctgtaatcccagctacttgggaggctgaggcaggagaatcgcttgaacccgggtggaggttgcaatgagctgagatggcgccaccgcactccagcctggcaacaaagcgagactccatctcaaaaaaaaaaaatagagtatggagagagaaatagagaaattttacagggaagaaacctggcagacagcaccttaactaggtgatcatggttaacatcaccagagataagtcatgttgttatcatgtactcttctgtgatatgatcagaagggcatttcac

SEQ ID NO: 49408 - DNA, 1050 bp, Homo sapiens
acagtcgaattgttaactgtaatcatgaaagaaaagcacagagcgttctgagagcccatagcaggtagctcaagcctgaaggccactctgaccaggccaagtcaaacctgaaactggaggctgtggttttgtagtcacctctgtcttccctgaggggaagctgaggctcagagaggtggaaccatgggtgaacctttagctgtgccctgtgccttgctcctgatcacagggacttggatgccacagtggcttcaggtctgccctggggccagcattgtgattccacagtttgtagaggccccaaccctctccccaggaagtactctgcctagtcagggagagtggtgcatctgttttaaaaaaaaaagtcccatcagaggattggtgcttaacatttctggagagataaagacaaagtgacagtggaactccttcctgtgtttccagatagcctcaaaaccagggaattctcttttttttttttttgagacaggatctggctctgtcgcccaggctggagtgcagcaatctgggctcactgcaacctctgtctccagcgctcaagccatcagcctccagagtagctgggaccacaggcgcatgccaccacacccactaatttttgcctttttatttttattttttttggtagagacagggtttcgtcatgtttgccaggctggtcttgaactcctgagctcaagcagtcctcacgcctcagcctcccaaagtgctgggattacaggcgtgagccaccacgcccagcccaaaaccagggaattctcttgaactccttcccctcccctgcatcctgttggccaccaggtcctgtcacttccatcacagaaacgccaccttccctccctcgccattcccgctgctcatgccaatcgtcacgctctcacccactcactgtggagccctctctggtatgctggcctcttgtcctctttctcccacgccctcacctggaacattcctcaaaaccacctctgactacccacgcctctcctcctctgcttaaccagccccagctcagcttaagcataa

SEQ ID NO: 49409 - DNA, 1049 bp, Homo sapiens
ctctcccacaccagtttcggaaagtccattgttccctccgataacaatccctccccagcaaggcttaacaaaatgaaacttctgggcatcccaggtcaaacctccctgcttctgtgcagggactgtccctgccgagtaaatggcaccccacccccagcccatttccctccccgagcccctgctggatggtccatgcagaccgacctgcccctcttcatgctgcatctgcccctgtgctattaggccatgagggcagagaccatgttctggccatgtgcagcagggcctggcccaggagtggtgcttagtacctgagtctggaacagagatggagtgtggtagaagctgggtctccagatgctggaacattcaaggaaaatttctcaagcgtagcaggatccaacccagtcctagagctaagaggaggggtgcgggtctggctactgacttctagggctgaaacactgaaaggtttctgaatagaggagcaagtttcagggagaggaacctaataaagggattgaatacctgaggcggggaacagtcctgggagttggtggccttaagaaggcagaggaaggagaggagggagttgttgtaccaaatgggggagttgtttattcctgagctgagtgggttggcacagaggacaaatgagagtctggaaagggaagatgcacagtactgagaacaacatcagaaggttcagaaggcacctgccaccattgcctaggggctttccttcctggggcactgcggggtccctgggagatctcttcatccaagtttggagggtgcagtgggaaatccctgctccctctgacggcctggcctgtgcctcacagtgtggcgtccagaacttcaaacgccgagagaagtgcttcaaatgtggcgtgcccaagtcaggtgaggcccacctacctctcgtgctctccagggcggagcggttggggagaagggaagggtgaggggtctgtgctcagggcttggtatagggaggagggtgaccagtcgtggagccttccccttatcaccagcctgtctcccac

SEQ ID NO: 49410 - DNA, 1016 bp, Homo sapiens
gctctgctgggaaaggtggtcaggagccgtagcccagaggccagatgaagccttctgcagtggttcggactagggatagtggctggcccgtgtttgaggatgcagggcagtgggtcagcagatagagttagtagccccagggtcatgagggttctgggaacctcacctccaccctcacccccagattgccaaggacatggaacgctgggcccgcagtctcaacaaacaaaaagaaaacttcaaaaatagcttccagcctatcagctccctgcgagatgacgagaggcgggagtcagccactgcagatgctggctatgccatcctcgagaagaaggtgtgttggggccacccccctgcaccctgccccacaatcttgtccttcctttgggccctctgtggagtccctgaatttctgtgtccctccaccccagggagcactagccgagagacagcacaccagcatggatctcccgaaattggccagtgacgaccgcccagtgagtgcccaaggcagagaggggcgggggctctgatctggccaggcctgaccgcccaccctcaccctctacagagccctccgcgaggactggtggcagcctacagcggggagagtgacagtgaggaggagcaggagcgtgggggccctgagcgggaggagaagctcaccgactggcagaagctggcctgtctgctctgccgacgccagttccccagcaaagaggcgctcatccggcaccagcagctctcagggctccacaaggtaacagcggatggttggcagggcatgctggggcctggcccactgaggctcatcctcttcacttctcatcctgtccctcttgcagcaaaaccttgagattcaccggcgagcccacttgtcagaaaacgagctagaagcactagagaagaatgacatggaggtgaggtgtgacctgaccctgggctccctcccctgtgtcccttccaagtccccatcacctcaggcagctggagttcaatttctcacgtgttaaccc

SEQ ID NO: 49411 - DNA, 1663 bp, Homo sapiens
agtcctttccctcccaggacttctaacatctcctttcccatttgtctcagagcctccttgctcttagacacccacttcctgattctcctctcacgttcccatggacttctcagttaacccctcccagaaagcttgacatgctccagccccccttctctatgccctagcttctccatcctgctaacctgcctcctctcacacctccaagactcctccctcaaaccctctggtttgggaatagagaatgcttacgcttgaaaatcttcagtttggagactcaggtatgtttagaaactaagccacagctcagctttgccaaacagttcacagtgtgtatgttatggtgggggcctgagcaaatgttgaggtaggaagggtgtagattgtttttctgctgggggtgggggatctttagctcctctgcagagtttctgtcccagactcctgcttgccttgagacagggctgttccaaacctttgcagtcaaaatccacttgaacaatcatctgaaacttcttagactcttgctgcctgcactggggatccagaggtgaaatgtccagatattaaagtgctctctggccctggatcatctctaatttatggagtgaggaaatggcatgtcccaaacaaactgaccaatgacaaggcaaggagataactaagtaatagaggccactacacgtgcccagggaggaactcacatcctcaggtcagtgagttctgaccacagaccttggcttctttaaccctgccagcagccccttgaagacagtttcatttgtcccagcttttggagaaaatgaggctcagaggaaatgagatctctaccccaggtcagtcagagagtcagtaaatggaaaatatggttcacctttgtctctactaactcaccaagcctcttgctacccaggttggctcttagcattctaagcaattcacctggctatctcaggggctccagccagcctgctgcctcccctcatctcccattccttagccctgtggactgggccctgagcccaggggcatttggcaaacagtcccccaccagctgcatgcctctgggcgagtgaatggggttctctaagcctttcttttcccatttgtgatttgggcatagggttatctgggtcatggggattgttaagattagacaaagccctttcctctttgattgacacacagtatgctcttggtagatagtagggagctcttgtcattgtggttggtgctagtgacaagtgccaagatggaatcttaggtacattgggatacttagtgtcataaaagtctcagtgtgggaggacttgtgtgaacagaagactcagtgcctagaggagcacttggggtgaggggaagtgacgctgggtcctcccatctccagcatgtggacccagtcacccccaccaccagatttcacttccacagcaggctttattgttctgtctctgggacctagcaggtgaccctgggcaagttacttctcatttgtccggcaaggacactaaactctgccttgctgggtcagggtcatggaggggatgaaacgtgataacacgaggaagcagcctgggcttcagagtcagcagatcctggtctggtcccagctcagtgtgtgggaaccttggtcaccgaacgtccctgagtgaatttttttcca

SEQ ID NO: 49412 - DNA, 1916 bp, Homo sapiens
ttatttatcatctcgataaccccgtggggaaggtaagtggtattatcacccctgtttcacaggtgagaaaactgaggcctgtggcggttaattattactgttagtgcgtggcaggctcaagatttgaaaccaggtctgtcctgaatccacatccttcccctgacctcgacacaagtacattcttgtcattcctttcactccaggattggagtctctccctcattatgctgggctgggaagaagcaaatggcttagtggtcagcagtgtggatttgcaaatcagaccacctgggttcagatcttaggtctgacagctgtgttaccctgggcaagtcctcacctttctgtgcctgtcccctctttgctgtaaaatgggggtactaatacttaagtcttcccttcccccacagttgctactaacaaacagaaaaacggtacccatgtgctccagggtcacctctgacctttttttcctccagatgtccagctcgccgctgtccaagaaacgtcgcgtgtccgggcctgatccaaagccgggttctaactgctcccctgcccagtccgtgttgtccgaagtgccctcggtgccaaccaacgtgagtgtcctctccgtggagactggcagacgaggtggtgggtgggaaagtcttttgtatcactgtctgtctatccatgctccactcctgtgtgtctccctaaacttgttcttttcctctattcctagggaatggccaagaacggcagtgaagcagacatagacgagggcctttactcccggcagctgtaagtggggccaaggccgggctgaggggtgtggaatgggacattgagaggataaggttgggtggggcaggccctgacctagagtaccccctaacctggcaggtatgtgttgggccatgaggcaatgaagcggctccagacatccagtgtcctggtatcaggcctgcggggcctgggcgtggagatcgctaagaacatcatccttggtggggtcaaggctgttaccctacatgaccagggcactgcccagtgggctgatctttcctcccaggtacctcttcctagcacccttccccctttcccccttcccgaggcaccactgttcccggtgccacagccatttcatctttttccctactgcacacccttacagttctacctgcgggaggaggacatcggtaaaaaccgggccgaggtatcacagccccgcctcgctgagctcaacagctatgtgcctgtcactgcctacactggacccctcgttgaggacttccttagtggtttccaggtatcttgggggtactacccagccttctgcccagttttctcagagcccatctctggtttattcagtagtgttcaatattgatttaatgggtcggcctgaatgtcaggttttgtgctgggggactagagtatgcaggcagcagttagcccctggccctgccttttcttttcttctttttttttttttgagacggagtcttgctctgtcgcccaagctagagtgcagtggcgcgatctcggctcactgcaagctacacctcctgggttcacgccattctcctgcctcagcctcccgagtagctgggactacaggcgcctgccaccacgcccggctaatttttttttgtatttttagtagagacggggtttcactgtgttagccagggtggtctcgatctcctgaccttgtgatccgcccgcctccgcctcccaaagtgctgggattacaggtgtgagccaccgcacccggcctggccccgccttttcaagtggggaagatgtgtacagacagtacagcatagtggttgtgggcacagactgtagagccatactgccttgctgcaggcctccagccttggtagtgtgacttcaagcaggttgtttcatctcctgtacctttgttttcc

SEQ ID NO: 49413 - DNA, 1057 bp, Homo sapiens
ccatttcgagagtcagctgtgtgaagtctggaatatgctaataagcatcagaaccttgtgaagattgtgcccttgtgtccgcggaggaccagagtatgttgaggttccagggggtgctactcgggggtagggctgcggaggggatctagtgtgtaataagggggatcagggctttcatgaagggatctaagtgtgaaccaacaaggattatatctgtggagatatctctgagcagagagcaatagaggacaggaatgtgtgatgatctcggtgtgctaaagtggattacagctagggagggctgaagtgtgtgctaatgggagtcagggctgaatgagacctgtgtgcactaatgagggtcaggccatggtagaacagtgtgtttgtgtgtccctgcggaatagggctgagtaagggttcagggtgcactaatggggaggcaggactgtgtgaggcccggcgtgtgctaatagaaatcaggcctgagtgaagactcagtttgtgctgacagaggggacaggacagtggaaggactggaatgtgtgttaaggatggtcgtagctgtgaaggggcctgagtgtgggtaacactggttagagatctatctgtaaggttcactttatgttaatagcattcagagcagcatgaagaaggtccagtgagtgctaatgtgggtcagctatagagtaccccaagtgcatgttaatagaggtcagaatcatgtagggggaacagtacgttaatgaggggagtcagtactatggagaaggtaacaagcagctaggccagggaggggcccaagaatgtggtggcaagagttacttagaggaggctaagtgtgtgctgacagagttcagggcggtatgttatgtgttagggctttgaatgctgatgggtatatgagataatagcaggtaagatgtagtgaggcctccttgagggtctagcgtgtattaatggggatcaggacatagggtgcgatgaccaagtccttagtggttggtgtgttgagtatccttgagtatgagagtagtctgaggatgggtgtatgtctttg

SEQ ID NO: 49414 - DNA, 1026 bp, Homo sapiens
cctctccctgccaccagagattgtgcacgaggacttgaagatggggtctgatggggagagtgaccaggcttcagccacgtcctcggatgaggtgcagtctccagtgagagtgcgtatgcgcaaccatcccccacgcaagatctccactgaggtgcttgaccccgtctggatggtggaggaactggaaaagggggttggacctggggaggtggagctcatgatcctgtttctctcttgccttacctgctaggacatcaacaagcgcctatcactaccagctgacatccggctgcctgagggctacctggagaagctgaccctcaatagccccatctttgacaagcccctcagccgccgcctccgtcgtgtcagcctagtaagcaccttctgttcccgtcctctcctttttcttctctcccagacccttctcctgagccagctttaacctgcctcatttgtcccacagtctgagattggctttgggaaactggagacctacattaagctggacaaactgggcgaggtgagaggcaaataggaggcccatggtggggatgaaggtcagtgggaactcctggaatctcatagcacctctcctgtcacacttcctcacattccagggtacctatgccaccgtctacaaaggcaaaagcaagctcacagacaaccttgtggcactcaaggagatcagactggaacatgaagagggggcaccctgcaccgccatccgggaaggtacacacccccatcccatctgccccaggcttccccaacccacccctggcgcacacactccataatgagaacaaagactggttctaagaccccccaaaacactctggctttcatgggaatgcctgtcacccacatatccaggtaataatcagggtaaccaggaatctgttcccatttggataaaaggtagatgaattgcaaaccagggtttggttctgagaacacccctgaaagtgctcaccagtttatttactgtaacaatttctagtcagaatatcacatggaatgaat

SEQ ID NO: 49415 - DNA, 1031 bp, Homo sapiens
agtccctcacccttgtctttgagtacctggtaaggttgagtggcagtaggtcccagggggaggtgaggagaaggccaggagccataggaagtaaccctcattcctgtaccacctcttctttcctcaggacaaggacctgaagcagtacctggatgactgtgggaacatcatcaacatgcacaacgtgaaagtgggtgtggggcaggaagcaggggcacaagggggcccccactcacccactccaacccacaaatctcccagaaacggacttttccctttggctttttttgctaggagcccttggagggcactgggaccctgtcctcttttgtgtgacaaggctctgggcctagtgtctgtgtttgggaggggagcagtgcctgctgggggtcgggctagtggatagtctttgacctctgcctgccattcctgggtccccagctgttcctgttccagctgctccgtggcctggcctactgccaccggcagaaggtgctacaccgagacctcaagccccagaacctgctcatcaacgagaggggagagctcaagctggctgactttggtaccactggcctcccctttcttattggctccccagcctcctactttcccatgaccacttagtctcacttcccttcagccttgccagattttgcctaggacaccctcagtctcaactgcactctccccgagactttgcccatgactccctcattctagctgtcctttctctgatttccaggcctggcccgagccaagtcaatcccaacaaagacatactccaatgaggtggtgacactgtggtaccggccccctgacatcctgcttgggtccacggactactccactcagattgacatgtggtaaggacaggtggaagtgtggcaggggccatgtggtaaagggggtggcttggtcacaacagccacccagccagctgcctttctattcactgtgccctccctgcccaggggtgtgggctgcatcttctatgagatggccacaggccgtcccctctttccgggctc

SEQ ID NO: 49416 - DNA, 1057 bp, Homo sapiens
atgggaagatgaggcaaaggcccagtatggccatctgactaggaaaccatgaagaggagggaatgttcaggacggtagggggtagattttggaccactgagtaggtagagaaatcctttaatacatggatcaaattaagcagtggggccatagatggacctggaaatttcaattattagtgtccaggaagtaacagaaaccatgggcatgggtgagagagtttgcaagaggccagggatcaatgacacaacctggggtttgccctcagatatgaggataattgaaacttattttctttgtcctgtgagttccagccccagtcccaccatcttgggcaaagccaaggattgttttctaagcagaagagggggtgagcagggccaggcaaatactgcaagtaatggcaaccctaattaagtggctgtttactaaagcccagtggtgggggcccatgaacttctaatcactctactgtgtgtgtttgttttttgagacagagtctctgtcgcccaggctggaatgtggcggcacaatcttggctcactgcaacctttgcctcctgggttcaagcgattttcctgcctcagcctcctgagtagctgggattacaggcgtgcacaaccacgcccacctaattttttatttttagtaaagatggggtttcaccatattgaccaggttagtctcgaactcctgacctcaagtgatccacccacctcggcttcccaaagtgctgtgattacaggtgtgagccaccaagcccagcctctaccgtgtctttctaagcactttagtgatgtttcagcttgcagcctcatggtgccatgatgactgccatgtccccagagatggaaaagcaagcagggaagacagaacaccttccttacctgtctgtgttcttttaacggctggaacttccacaagctcctcagcagacttcctgtgccatttcttggctagaatcagatgacatggccacttctggcagcaagggaggatgggaaaaggagggccttgcaaagggggacaggattgccaggctggatttaaaaggtct

SEQ ID NO: 49417 - DNA, 1030 bp, Homo sapiens
tgtgttgtacataggggttttggcaaatagatcatgacatatatccaccagtgcagcttcatacagtttcattccgtttcacctgtgcttcagcgattcatcctgcctttccctctgcccgaacctctatcaaccactcattttttactgtctttgtagttttgccttttttttttttttgacactgtgcctcactctgttgcccaggcaggagtgccatggtgtgatcactgctcactgcagcctctacctcccaggctcaggtgatcctcccatctcagcctcctgggtagttaggaccacaggcacatgccaccatgtctggctaattttcagtattttttatagagacacggttttaccatgttgcccagtgtggtcttgaactcttgggctcaagcaatttgcccacctcagcctcccaaagtgctgggatttacagatgtgagctattatgccaggtctagttttgccttttctaaaatgtcatgtagttggaatcatgcagtatgtagtcttttcaaactggcttctttcacttagcaatttgtatttaaggttcctccatgtttttttgtggtttgatagttccatgaattggaagtaccacagtttgcttattccttcacctaccgaagggcactttcattgtttgtaggttttagcaatgatgaaaaaagctactatgaacattcatgtgcggatttttgtgtgaacatgttttgaactcaattggctaaataactaggagcataattgctatgtcatataagctttataaactttataagaaactgcccaggcagggcgtaatggctcacacctataatcccagcactttgggaggctgaggcaggtggatcacctgaagtcaggagttcgagaccagcctggccaacatggtgaaatcccgtctctactataaatacaaaaaattagctgggtgtggtggcaggtatctgtaatcccagctacttgagaggctgaggcaggagaatggcttgaacctgagaggcagaggttgaagtga

SEQ ID NO: 49418 - DNA, 1030 bp, Homo sapiens
cacgaaggagttgttatagatgttcaagagtcatatattctatttcttaataattatctcctagagatgcaatcgttgacatttctgggctgtgaatcactggcccagtacacacgctataaatcacctccatagaacaccctgttttctgacttccaaaggctcctaatcactgcttcacacgctcagcaacactgaccccaggatctggtgttgattaacaaacactgatccataatcacttccatctactgtccccccaaaactcacttacttcatccccaaaccccttaattacaaacacttaatcactaagaagcatagatttcataagactaaggccccacccagaccacatggaacaaaagctaccccacaggcaccagtcatatggcctctaaccactgacccctagagcacccatatcccagaagcccaccagtcactatcttgtagcttggaagttgtcactcccatcctcacaagaaaaagagctgaacaaacggaaacaaaacaactcttcccagatttgtcagagaattgagggcacagggcaaactgatgccctgaaaaagtggaaagacagcaatacagagaatcacagcttatcaggagcaggcatgagtaggaaaaggtaaaccaacagatcaactattggagtctgagctgctctcaactactggacatgaagttcctctgtcccctcatccctgccaaaacatggcatgatccagctctccaatttatggcaggtgtaatggggcaggtgtaaataagttgattacatcatgtttccttttatttatttatttttttgagacggagtcttgctctgttgcccaggctgcagtgcagtggcgcaatctcggctcactgcaacctccacctccctggttcaagggattcttctgcctcagcctcccaagtagctgggattacaggcacccaccaccatgcccggctaatttttatatttttagtagagacagggtttcaccatgttggccaggctggtctcgaactcctgacc

SEQ ID NO: 49419 - DNA, 1050 bp, Homo sapiens
caaaatgtgggtcttctcatttgcctgctgcgaactgggtctgtgtgtgggccaccattcttgttactgcattgccaggaaggcttccatctttccttcccctctgcttgggctacaatggtaatgttctgtttatagtgttggttcttgttattcattaattctaataccttgatttaaacaatattatcatcatcaccataatctaatcattgcttaattattataattgctgtaatatgtaatcaatacagtattcatctagtcacgctaagaaagccaggtgtctcctttttgctgctatagttactatgtagcatagtactgtatacctatatactacaggtagtactggatagcgtctaccaaccctggggatgttggcattggcttttcctctgtgtcagatgggcacaattatgttacagagaataaggtagctaatgcaatgatcagttttacagttgaggaacatgaggcccagagaggttaaatgtctttcccaaggttgtaccttgagtacctggtgaggcctagatttgaacatgagtccagactccaagctctttacctctaagcttctcatgctgctgaacaggctctaatcatcatatatcaccaatgttttaatcctgcatctatccatattatattgatacatcagtgaggaaggttggcattctgctttctcatctgtgagatggtcacagacccaggtaatggtcagagtcagaggggtgggggatgttaatgattagaaatgctgctgtaggcagggagggggaggggcagcaattcctccctcctgcttttgttgggagactcggatggggaagctccacatatgagcccacagcacagaatcatagcccagtaaacacatctcacaaattcatggaatctggcaatgctttggtcctgagtgccccaaaagacagggtgaaaataaatgaccgaggaaggtaaagaacagtgccactcctgatgctcggtaagtgacagttgctatttttcctccccacctctgacactgccctccctgcctgcagg

SEQ ID NO: 49420 - DNA, 1042 bp, Homo sapiens
gatgctgggtccccagaggtggagcccagtcttagagaggcaaagcctgggaatttggctgacccaggggctgtgggccaggaccatgggcaggcgggatctgagggcagcagtggagggccgtggggccactcatcctccctctctccatagctgtccactgccaaggagatcatccagcactttaagggctgccctgcggacctagtggtgtgtgacggggctcctgatggtaaatagcaacagaaagtgggaggccaggcggggccccctgtgtgtgtccttctctgtatctcccaccttggttgacttattcacctcttcagttactccctgcctctcccttccgcactcagctttctcccacatctggcaacttctccctacctctgctgcctgttctctctctgcctctctcttcctcccacttgcaccccaccctttgagtttcatgtctgttgtctacctttccctgctctcatctctctgcaactgtccaattccgttgcactgttcattcattttcagccagccagccattcaacacacatttactgagcacctattgtgttgggaaaacattcatgaataaaattccattaatctttaacctcatggagctgatgttctagtgggagcaaatgggaaagaaaataaatgattcagctctgtaccattaaaaggggatggggccaggcatggtggcttccacctgtaatcccagtgctttgggaggatgaggtgagaggaacacttgaggcaggagtttgagaccagccttgcaacatagcaagaccctgtcttaaaatattagctggcatggtgatgcatgcccatagtcccagttactcaggaggctgaggtgggaggatcacttgagcccaagaggtcgaggttacagtacactttgatcgcaccactgcactccagcctgggcaacagagtgagaccctctctctaaaaaaacggggtgaggaggccgggcacagtggctcacgcctgtaatcccagcactttgggaggctgaggtggtcagatcacc

SEQ ID NO: 49421 - DNA, 1067 bp, Homo sapiens
cgccacgcgcgggggcggggctagaggtacaaagagagtgtctattggttgggagcggcacgggccgccttcttcgcttcaccattggctcgctccgtaaggcaagagaacccactaggggatgagcccgaactagggatgtgacagagcgcgagacccagcctaaagagagcccggagccagcgtgggaggccgctgccgtcgcgcgccttggtgagtgccctccacccggcccctgctccctcccccagctctccccggctacgcggccagccctcggcgtgccagcgcgagaccctttgccacccgccccccccaccgcccttttgcgcctgcgcgagacccccagctaccgcacggttgtccagaggacagaagatccgtcttctcattgggcagcgggactggagggttctggttcggattgaccggctttgtgttccgttctagcgctgcacgccagacaccggcctttcaatatccgtctcttccctgcaggttgacggcgttgcacgctctcgcggggaggctctggctttccaaacgctggcaccgagggttgtagttctgattcgttttctttcctctgtcccccagttgcagttttcaggactacgtgggggagggaatagctttttgttgaacggtttaagacgctgacctgtgcaactggaccacgcctggttcctgtgtctcttaccaaaccgtgaccccggagcacaggactgggtttggtggtcgtgagcagtttgtgacccttgaaggaagacaccaggcctggtcctgtatctccctcgccagactgtgaccagggagggctgggatcaggtgttgttcccatgtgcctcccaccagactttgacccccgagggctgagaccgggactgtttctaccacatcataatatggcttctaaagggctggaacaagctttcagcctttctgtggccttgtgtttcagtcatgttctttttcttttcttttttattttattttgagacagagtctcgctctgttgcccaggctggagtgcagtggcatgaccccggctcactgcagcctctgcc

SEQ ID NO: 49422 - DNA, 1034 bp, Homo sapiens
gaggctgaggcgggcggatcgtgaggtcaggagatcaagaccatcctggctaacacggtgaaaccccgtctctactaaaaatacaaaaaattagctgggcgtggtggcaggcacctgtagtcccagctactcgggaggctgaggcaggagaatcgtttgaacccggaaggcagaggttgcagtgagccgaggtcgcaccactccactccagcctgggtgacagagcaagactccgtctgaaaaaaaaaaaaaaaaacggaatgtaattagaagtgttacaatcctgtctgttaactggtaaattcggtccatttacatttctcatgataataaactatttgaatttgattttattatctcattctgtactttctatttgtccaggtttttctgttccttttttttttttttttttaacttcctgcctatacacacgcagccatcagcccacaaagacatgactaccaacgcgggccccttgcacccatactggcctcagcacctaagactggacaactttgtacctaatgaccgccccacctggcatatactggctggcctcttctctgtcacaggggtcttagtcgtgaccacatggctgttgtcaggtcgtgctgcggttgtcccattggggacttggcggcgactgtccctgtgctggtttgcagtgtgtgggttcattcacctggtgatcgagggctggttcgttctctactacgaagacctgcttggagaccaagccttcttatctcaactctgtgagtcctgatttctttcatatgctgtgggatgggatttgctgggcagggatcggcttgcatgtttacctatccacctattcttcttccattgatttattttaaatttttatttaatcttttaaaaaatttattataggccgggcacagtggctcacgcttgtaatcccagcactttgggaggccgaggcaggtggatcacttgaggtcaggaatttgagaccagcctggtcaacatggcaaaaccccatctctactaaaaatacaaaaattagc

SEQ ID NO: 49423 - DNA, 1047 bp, Homo sapiens
tcacctacattctctctctctcattggctacttcactcactccatcatctacacctgcttccttttataccacacacacttcttgagtaccaatcacagccacactgttttgtgtcaggctttacacatattaccttgttttagagaaataaaccactagaatccaaacagttaccccatttcacggatgaggaagcagacgcatgggaaggttatgaagtctgtcttcttgcagggacccccagctctcacaagtgtgtgttcctttcactgcctttattcttcatatctctctcttcttttcttcagggaaagagtatgccaagggagacagccgatacatcctgtaagtgtttgcctctgtcaatggagactggcattggttttcggggggtggtgagttggggagcactaatgggctaacctgtaggaagagcacaccgataccagtgtcccctcatgctttctcctgcaggggtgacaacttcacagtgtgcatggaaaccatcacagcttgcctgtggggaccactcagcctgtgggtggtgatcgcctttctccgccagcatcccctccgcttcattctacagcttgtggtctctgtgggtaaggaaagggcactagaggggcactgggcactagaggggttgatgggggatccacagacacagatgtatccctgtgggtgggatctctcaacggtgcccttccaggggtaagtcagactgaatgacaaaccccctgaggctctggaaaggtcatgcccttctctgagcctgcactctcaggtggggagggttcatttttcttcctcctcctccttctccatcacaaagtctcctgtgaaggttacatgaggtggcccagggtggcaagaagcccctggaacctccaggatcagggctctgagatcccttcatgtaagattctgtcatattttttttaaaacagggtctggctctgtcacccaggccagagtgctatggtgtgatctcggctcactgcaacctccacctcccagactcaagcgatcttcctgcctcagtc

SEQ ID NO: 49424 - DNA, 1043 bp, Homo sapiens
ctacaggcatgtgccaccgtgcctggctaacttttgtatttttagtagagatggggtttcgccatgttgcccaggctggtctcaagctcctgagctcaaacagtcctcctggcttggcctcccgaagtactgggattacaggtgtgagccactgtgcccggcctcagtcatcttgtgttattaaattgttagctttctttagttctagcgatatgagttatctttagtcccagaatcctaagctgtcttggatttgaggattttgaacttccttaaatctgaaggtgtgagctctcctgagttctgaaattctcagctctctggtgtctggaatctcacttttctgatttctcagattttcagctctgtgatttcagaatacttagctctgagaccttgaatgatgacttggaaagtgctttggaatagagaattggcgaaagtgtccccttcctcactggggcttctccttcccctcctgccacccacaggccagatctatggggatgtgctctacttcctgacagagcaccgcgacggattccagcacggagagctgggccaccctctctacttctggttttactttgtcttcatgaatgccctgtggctggtgctgcctggagtccttgtgcttgatgctgtgaagcacctcactcatgcccagagcacgctggatgccaaggccacaaaagccaagagcaagaagaactgaggagtggtggaccaggctcgaacactggccgaggaggagctctctgcctgccagaagagtctagtcctgctcccacagtttggagggacaaagctaattgatctgtcacactcaggctcatgggcaggcacaagaaggggaataaaggggctgtgtgaaggcactgctgggagccattagaacacagatacaagagaagccaggaggtctatgatggtgacgatttttaaaatcaggaaataaaagatcttgactctaacactgagagatccttaattactaaccccagagatgcgctatgactgaccccacagatcccaccatcatt

SEQ ID NO: 49425 - DNA, 1066 bp, Homo sapiens
ttggatgtttcttcagggaaatgtgtgcatattcacactacgtgggttatataaagactatatatagtctcctgtcagttcagatcaggttttgctactaggtgagtttgtgtttgtagacattctttgcctgttttttgtttgtttgtttgtttgtttttttgagacactctgttgccaggctggagtgcagtggcacaattccggctcactgcaacctctgcctcccaggttcaagcgattctcctgcctcagcctcttgagtagctgagattacaggcacgcgccaccacgcccagctaatttttgtatttttagtagagacggggtttcaccatgttggccaggacggtctcgatctcttgaccttgtgatccgcccgccttgcttctcaaagtgctgggattacaggtgtgagccactgcgcccggccttttttttcctttttttgagagggagtctcacattgttgcccaggctggagtgcagtggcgcgatctcagctcactgtaacccctgcctcccaggttcaagcgattctccttacctcagcctcccaagcagctgggattacaggcacctgccaccacacctggctaatttttttttgtattttttagtagagatggggtttcaccatgttggccaggctggtctcaaccttgtgatccgcccacctcagcctcccaaagtgctgggattacagacgtgagccaccgcgcctggcctctgcctgttttattagtgggattgagggggtggtttttttaatcagtataaaatgtctctttgtgttaaatgcttttggccttgagtgatgctttttctgacattctcatggctactatttttttctgtttgtgtttaccagatatacctttaggattctttaatttttaacctttttgtgtcacctagttttaggtatgtctctcatacctctcgtaaaaacgtcatagcagaatttatgctttttaaggcaactgacagtgaaatcttttttttttctttttgacacgtagtctcgctctgtcgcccagactggagtgcagtggcacgatctcag

SEQ ID NO: 49426 - DNA, 1019 bp, Homo sapiens
gagacggggtttcaccatgttggccaggctggtcttgaactcctggcctcaagtgatccacctgcctcggcctccctaagtgctgggattacaggcgtgagccaccgcgcccggccctacaccactttttaaaagtcgtgtttcttctcttttttataatgttgtacttctgatttctagggaatgattagcaaactcacccctgacgctatgtcccttggacattatccttgtatacacaaaaagtgcaattaacgagtgggtagaagtcaaggggtggagcctccgtccttgggcttgaagccaatgtccctcaatgcgcctgcgagactcccacgccctgggaaggatgcctatcgattcgctctgggctcggcagttctttctgatagcaggcagccatcttgcctggagcctgagaaagggaggagagacagaaggaaccggcgacagtggtctcagggccgctccggggggcctcaagaaccggaggcagccccggaggtggtccccgatcccgggctatgctcttggatctgagaagggaaggcggagggcggcggggacaagatgggtggagaatgtcaagcaaggaatgctaggcgggggaggggcgttgctatggcgactggggaggggcggtgtctgttctgaatcgctgtgtgtcacccgggcgctgcccaggaagggcagggctggggtgatgaccatggtaacacccgggggggagttcgtgacatctccggcgcggagggactcgatgtctatggcaatggtcgcctggtggaagggacggaactagatcccttcgctcgggacgctcacattccaggcccttgtcctgcaggctgccgcgggcggacacgccagaggaggaggccggggaatggccgcggtgtggcagcaagtcttagcagtggacgcgaggtgaggcgtggggtcaaagcccatgggagcagaacttactgtggtgcatgcgcaatggcgataagtgaggctgggcggagaacttgccttat

SEQ ID NO: 49427 - DNA, 1021 bp, Homo sapiens
gcccgagaggggtctctggagaagggaggggaaggaagaagtgtggcgggggagtactggagctacctggagggccgccacttggacagaggacaggctgctaagccaggaagcagaatcaaagtaaacagcagtccccatgtgtctcctgtgtgctgtgcactgttcttggctgaggtacagtgggacccctacccagggaagggcctggtcagctacgcttggggattggcaggaggctgccgttgctggcctcagggaagaggggccatggggccggagatttgttggcgtggattgggaggcaaggacaggctggggctaggatggcagcaaagcttcccatttcctaggacaggtagggaaccagctggggaggaggcacccactgccgtctgaagcaccagttggcactgcgcagccctgggccgagggagagcttctctcactgtgctctcccttcatctttcctcctcctctgctgctgtctctgaagtgtgtggcctcagcctctttctggctctctgaacctgggcctccctctgcctctgcctccacctctcttgtcttgaggcccttgccccctttccccatggcctgggtctcttcttcccctctctccacgccctccctgctgggtcctgcatgggctcaggctcccttgcctggatcagtaagtatctctccctgtggcaccctgggtcactttctttcttgcccttgctttggtctctcctgatcaccttcctgctccgtcccaaggcactggaggctccaggggttcttgggcagctcttgctgggtggcggcaggaggtgctcgcgtggccccagttgggccctgcagccaggccagcctgcactcaccgccagggactcctcctgctagccagaggcctgaggcgggccaggcagttgccagctgaggcccagctcctcaggaagggccgacagactctctgcgtcactgcccatgtgtgtccacgggcaggggtgcctcctgctccctgtccttcagaagt

SEQ ID NO: 49428 - DNA, 1023 bp, Homo sapiens
cccatgatgagctattactgttatcatgatctgattgtgtgaatagatggtggatgtgtggacagagtgatcggggttcccccaggggcttccagatttagaggcctagtgctatgtggcttgaggaaagctagcttccagagcaggtatctgagctgaactttaagaggagaaaaagagtgagtcagatgaagagggtgactgagggaagggaagaacagacagctgaaccagtgtggccaaaggcctgaaagtaggatttggtgtggctactgcaggggagcagagaacattacctgaactgaggcgggctagggaagaaacagaatgtgtcttatatcctggctattccttcaggttgacagttgggggagccaagccctaatttgaccagggggttggtgtatggacagctcagttggggaagagacagggccctgaatctcatctcccatctgtgtctagcctagaatatattgatctgatggaaacaacccagtacatgaatgagggagaactccgtgtcctagcagacacctacgactcagtttatctgcatccggtatggatgagaactctgcgggcagggaatggtggcaatcttggggtccccatccctatgcccaccccaccctgggggaagcagctgagtggatagggctgttctctcccttactccctttctggctccccactgtctctccagaactcatactcctgtgcctgcctggcctcaggctctgtcctcaggctggtggatgcggtcctgggggctgagatccggaatggcatggccatcattaggtaggactctacagcatttgactttttacattgttttaaagtccttccttcaagtgtaaaatgtattgatatgggtaatatattcatgtgattcaagaatccaaaggtaaaaaagagaatataattaaaaatctgtctcccatccttgtcacccagacacctgcctcctctcatgggaggtagtcattggaaccactgactcatgtgtcctcccacaaa

SEQ ID NO: 49429 - DNA, 1041 bp, Homo sapiens
gggccccaagtctttcggatttaactctgcctcggccgttttattcagttaaggaaactgagtcactccatcccaaagccagattcccgcggttctaagctgaagctgtctcgggtgcatttgcattccaaaaaggcgaagggtcccgctattactgctcctggtacctggagctgccaagcacccctgcgatggggcgccccgggggctgtgcgccaggctgggagtatccttggggggcggggcgagggggcttccggggcggcagcacctggcccggctccggccccgcccgcgtcagctctgcgcggtgattcactccctccttcgccccggggcccccttcccggccagacggcgggcaagacagctgggtgtacagcgtcctcgaaaccacgagcaagtgagcagatcctccgaggcaccagggactccagcccatgccatggcggattctgagcgcctctcggctcctggctgctgggccgcctgcaccaacttctcgcgcactcgaaagggaatcctcctgtttgctgagattgtgagcgttctggggcaggcgcgtgggcaaaagcgggatggggtggctggaccatgcggaactggatggtccgggtgaggcaggcacttggccggggcgctcggcagtggggtgcaggtgggtgggttcacggtggaggcccgaaacccggggcgcagggcgagtcggtggggtttgacgaaggttgttgagatctggtggtccccggggtgaagcaaggagcctataacgcatacggagggctacgtggggacagcctgcgtgaactcatcagtggacgcatcgaaggggtcccagggtgctgggaagtgggggcctcctgtggcagggcgtggcgcggcctgggcacaggagggcgggctggcagcgcgcccaggggcagggcctgttggggtggggcccccccgccccgcgctagtcccgcggtgtagagcgccccgcccttcgccagttcttcctcgcccttcagaggccgggcgggatgtccttagcttttcggg

SEQ ID NO: 49430 - DNA, 1024 bp, Homo sapiens
tgagtcacttgtaaaaggggtgcggcgcctttaacggagtcctgcctctctggtgtcactctcaccgcttcccaaaggggttgctgggggaaccgcgtgttccgccccggtcaaggccacaaagctggcgtcagcggggctcacaaaacacctggcagcgccactcccctcaggctgcccgtaacctagaagggaaaagaggaaactgaggcacccaactctactccttacttgttgggtgaccctggccaagccattaaacctctctgtgcctcagttttctcgtctataaattagaaagagtaataatagtacccagagcattagattgtcgtgatgattgaatttggaacacagtgagcacataaaaagtgtttagctattattgtatgtcatttccccagccctcgtaggcatcttagtatgggacccccaatttaaaccaatcttctcagccctggttgctgattgaggtcccctttcccatgtcacccttccagatattatgcctggtgatcctgatctgcttcagtgcctccacaccaggctactcctccctgtcggtgattgagatgatccttgctgctattttctttgttgtctacatgtgtgacctgcacaccaagataccattcatcaactggccctggagtgtgagaaggggtccacaatggcaagaccagggaggggtctgggcagttaggattgtcggggaactgtggttgctgacttccctcttctcctccctacacctcacaggatttcttccgaaccctcatagcggcaatcctctacctgatcacctccattgttgtccttgttgagagaggaaaccactccaaaatcgtcgcaggggtaaaggccatgggagcagctctgaagcacagagcgaagggtttgaggagccagggaccatttctgcctttgcttctggcagaaatcgtgtgacccacagcaagtcacacttgtcctcagacatggaggaaagtctggcccaggacttggttttgcctcccaaggtctt

SEQ ID NO: 49431 - DNA, 1032 bp, Homo sapiens
ctcctactccaagatcttaggacttgaggatttccctagttcctggttttccaaatggaagtcacagtcaccaacatccaggatctgtctgaactgtaggcatcctccctgccccgaccctggtactagtgtttccaaaaggctgcagggctcagcctgatccctgttgcctgactattcctgtgatcaagctggtccccttcttcagggcagttcctccagatgtgcagaccttgcgcgccttcaccactgagctggttgtagaggctgtggtccgctgcctgcgtgtgatcaaccctgcggtgggctctggcctcagccctctgctgcctcttgccatgtctgcccggttccgcctggccatgagcctggctcaggcctgcatggtgagtggccctcctcctaatgcacacatcctctttcttcctcttttacaaagtaaccaagttcctttgcaacacttgcctttcctctgcaacacttgcctttcctctgcaacacttgcctttcctctgtcatttttcctgcggcttagttttcattagtggttaaggctgctgactgtactgccaaactgcctgagtagtttagatcctagccccaccacttggtaactgtgtgaccctaacccttctgggccccagttttcctatttgtgaaatggagatgataaatgtagtgcttttatgaggagcaaatgagtttatccagtttgcacctgggctgctcctggcttctatgttttaaatttagctgcaaaataccacccccaccccatagtatccatttcctagttccagaaaatactctgtctgggtcatatactcctaaactaatcactctgtgctctgattggcccagtctggatgacatggtcattccttttttttttttttttttgagatggagtctcactttgtcgcccaagctggagtgcagtggtgcgatcttggctcactgcaacctctgcctcccgggttcaagcaattctcctgcctcagcctcccgagtagctgggactacaggcgtgtg

SEQ ID NO: 49432 - DNA, 1050 bp, Homo sapiens
gggcccctggctttttcatagcactcatcagcccagcacgtgctaagctttgttagagaatgtcccatggcagagcagatgaacatcgccaccagtcgaggggtcatcggccaccctgcctagcagttctactatatttttttgatccactcgtttctcctctgaagtgactctttcaaatgttctttaccttcagactttctctcctgcttcaaaaaacaaaacagaagccataagaatggaactccctataacttgtggcccccaagtctgcacgctgatttccctcccctgtgttacagatgacgaggagtcccttcttgctcaggccacttctccctcctgtgctctgggtcccagtttctgctacttgctctagaatctgacatcatcagtcaccttttctctcctggcaggttttctgctgccctccttgcttgatcctctattcacctttgcctgtgccagcatcccttctgtctccgctgaccccacgttctctccctcctgcttctggccagcacctcatcaccctccccttcactgctgacccctgcagagttgcctgtacttgccttctgcacttgctcacccccgtaagtgttagcccccggcatctgccagattctgcaggtggttttttagttttcctcttgaagtggttgaccactcctacttaaaacactttgtcttcccttgccttgagaccacactctgctggttttcctcttaactctctggcccttctctttctcctggctcttcccttagcttcatgtatccaaactcggcatctccacttgactgatggcccaaataattcctcaaactcaccttgtcggggactgcattcatcacctctcccacagtgttcccaagcagcctctcactcccctacctccccacttgctcgttttgcttttcagcatccttaagtaagccctgcctgaccctgtagattgggccagggacccttattctagggcattctttccttttctaaaggcactgatcgcagtttgtagttatatctttattagggggttgctg

SEQ ID NO: 49433 - DNA, 1021 bp, Homo sapiens
ttacaaagataaaatgagagatgatgttcagtagtttgcctgaagtcattcattgtgtggggccttccactgagacagagtgctggagtgggagcaaagttgagatgatttgaatttgggtgcctatcagatatccacctagagatgttcatttccccatggcctggggtatagagagggtctgggctcgagtagagatttgggatccttcatgtatagatgatatatgaagcctaggatatgagtatactttgagagggaaaaggtgccaagggtagaattctgggggaaatccaggtactcagtttgagggatttccctcacctccttatatagcaacccaaacaaaaaggaaacaagttatccagcctcagaggaaaagctgtattattttgtctacttctgcttcagtcccttctctgtttattgtagatactacttattcaattatacctcttttcttctggtttcttcttctcttcctttccactggacccattcgctgtcgtccataaacatgttctggtcttcgtttgctgtatcttctagctaccagtacctatctagtcagccacttaatttttctgggcctcaatttcctcagagattgagggacgtgatgtagggaggaggttatgatttttaagaagcctctttctgacctaaattctgttctgccatcttatttctctaccttttcccgttttgggttgtgttgactgttcagttcctttttgaaacttccctcccttggccacagagttgtactcctctagttccctttctgcctgcctctgtcactgcttctccattacttttgtttcctcctgcctcctaattatgtccatattcaggggtgtaaagttctttaccttttttctctttatactcactgcctcagaaatttcatctacactcctggcttcaccttttttttttttttggtttttaattatagaagtaacacacaattacatgttcctattaaaaaataatatagatgcatctagagtaaaaagtg

SEQ ID NO: 49434 - DNA, 1049 bp, Homo sapiens
cctacccaccacctatccctgtgccaccaccattccacccaactagctgcattttctaggttatgccccttgtaggcagtgtcgacctcagcctcttgcctcgttttgtggactgactgttgcctctgtttctaaaacagtcaaagctctatggcccttagttgaaacctgtaccctttaagctccaaccagaaccctgaggatgggaatacacatatctgtagacacccaacaaagtatttgtgttttacagagttggcatgtttttttttttttaacagcttccgattagctgtttagtcaccccccagcccatgagtcccccatgaggtaccataagcatagccactgtaaaagtctctgataatttgactgcttttgaatactccttgtttattataatgactttcgtgtgctttccactgttcaatttatttttcagacattcatctagatttgactcagtatctttacattctgtctttacttttaatgatgtacttactgtgtactccaaagacagttcaacctagcaactattaaactgactttcaacatggcacgattctttctttttttaatatttaatgaaggaaagccctactgctctatttccccagaggtagaaatctcaatttatgttgtttgagctgggagaacttgttaattaaaactgtcgaactgtagtgaattttgctattttaatatatgtttcatcagttgatgggggcaggggttggaatagtaaagagtacacagatacttttgtgatttggttatgatgagactgatcttctaatggatcttcaaattgacaaattctgggaaagccaaaaaccaatcccaatctgtatagaactgtaccactattccaaaggtctgtcttaattctttgagcctgattctcttgccttcactctgctttaggaccagtctgctttaggacattagagctaatattagccttagactggagccatgccacttccagaagggttccacactgggttttgaatccaaacaggcctaatcttccaagattcttaaaa

SEQ ID NO: 49435 - DNA, 1049 bp, Homo sapiens
tatcggctttatatattgttggatttgctaaaattctgttaaaaatgtttacatgtatgtttattagtgatattggacttcagtttttttttctcaagacatctttgcctggttttggtatcagaataatattggtctcatagaatgggtggagaacaactctgtcactagaactagtattatttcttccttcaatgtttggtagaattctagtgaagccatctggacttggagttttatttaggggaatgtttttaactacaaattcaattttttaatagatgtagtatattcaagatatctacttcttcagtatactttggtaatttgtgtgtttcacataatttgtccatttcatctatgttttaaaatttgtgataaaattcttcatggtattttcttacatgtttaaaatttgtagaatctgtagagatgtcccctctcattcctgatagtgataacttgtgttgtctctcttttcagtctgttctgtctggttaggggttgataaattttatggatcttctcaaagaactagctaagcatttccttgatttttctttcatttttatgtttcctttttaaatgttttctatctcattgatttttatatctctgatctttttttttttttttttttttttttttttttttttttttttattatactctaagttttagggtacatgtgcacattgtgcaggttagttacatatgtatacatgtgccatgctggtgcgctgcacccactaatgtgtcatctagcattaggtatatctcccaatgctatccctcccccctcccccgaccccaccacagtccccagagtgtgatattccccttcctgtgtccatgtgatctcattgttcaattcccacctatgagtgagaatatgcggtgtttggttttttgttcttgcgatagtttactgagaatgatggtttccaatttcatccatgtccctacaaaggatatgaactcatcattttttatggctgcatagtattccatggtgtatatgtgccacattttcttaatccagtctatca

SEQ ID NO: 49436 - DNA, 1029 bp, Homo sapiens
taagcactggtttcactgcatcccacaaattttgataagtggtttcttcattttcatttagttcaaaatgttttttaatttttctttagacttctttaacccatgtgatatttagaagagtgtttaatctccaagtatttgagttttcaagctttgtcttactgatttctagtctaattccattgtcctctgagagcatactttgcatgatttctgttcttttaaatttgttaaagtatgttttatggctcaaatgttttctgtcttagtgaatgttctgtgtgagcttgagaagaatatgtattctgctgttgttaaatgaagtgttttatagacatcaacttgatctagttgatggatgatgctgttcggtttacctgtgtctttactgatcttctgtctgctgtatctgtcaattactaatagaggggtggtgaagtctccaactataatagtacattcatctatttctccttgtatctctatcagtttttgcctcatatgttgacgctgttgttaggtgcttatttattagagattattatgtgtttttagagtattgacccctttatcattatgcagtacccctctttatcgctgataattttccctgctgtgaagtctgctctgtctgaaattaatatacctactccacatttgttttgactagtagtagcatgttatgtctatctctgtattcttgaagagatttctgaagatgtctgctgtaattctgtccttgctcctccataggtaaaaggtaaggtatttgttttaccccggcaactttgaagatttttttcctttgattttctgcagtttggatatgatatgcgtaggtatagatttttttgtattcatcctccttagtgttctgtgagcttcctgcctggacctgtggtttggtatctgtcattaatttggaacaattcttagtcattattactttatgtatttcttctatttctttctttctttctttctttctttttttttttgagacgaagtcttggcctgttgcccaggctg

SEQ ID NO: 49437 - DNA, 1070 bp, Homo sapiens
tgtaatgctaagtattgcagagaggctgaggacaaggaagatggctgagaaaagattatatgacctagcagttaggaacacagcaattaccttgaaaagccatctcagaaaaatattagaagctaaatctattcggtttgtgcaaaagtaattgcattacttttaatggcgaaaaccgcaattgcttttgcaccaacctaatagatttcaagggaaggcaaccactgtagaagttttggtagtcataggagagagaggaagggtaaaggcttgaaatgataacaaggacaagggacagcattttattcttcagggtaggggaaacctaatacaatttgtaaccagagaagaaagaactgactctggggaggaggagaggtagaaggagaagacaggattgagggtaccagtgttaggtgaaataagacatgtacacgtgagacaaccagagaataagccaaactgtataacatcatggtaattttccgaatccaggcagtaacagatagaaggcagagaagattgtggaccggagtggccaagagtaggtgtcaaacaatgtgttagatttgactagattcttcaagtatgtaagtaacctgtgttaacacttttagcacctaccaaaacatacacgacatggcttcccgcccgttggaatgtaggcataatatcctcaactttttaatgtatttcttgtcactaggtggtcagtgaatatttttctttcccttgtacacacagggtattttgtttttaagcattggagagcaacaatagaagcagtgtgtctgaatgctggaacagtctgggaattcaagggctgtgaattttgtgatggctttactatttccctaaagcatgattctgggccatttaatttctttatgccagagtttcttcatctggatgacagaaatgatgagaaggccagaatctaaattactataactgtcttaaccctatcagtctattagccacagtgcatcctaagtccccagttcacgattccatttcccatcattttctttggtgaatgttctgtgtataatactgtttgctctttctca

SEQ ID NO: 49438 - DNA, 1054 bp, Homo sapiens
ttcagatgtgaggggggcaaatatgttttcaaaaacttagtgtgcaatagagtccattatagaaattaaccactgctatatgttttaagtagttcaatcacctgttgtggttcagtcttgattattgtttattttgttaggtgataagtaggaagatgcacttgttatcccacactatctcttgttttgttttgttttgtttttaaataatgaacagtgcaatctttgaacttgagtttttaataatgatagcaaagacaatggtgagaacttgaaacagccagcatattttatattgccaaagtacttactgatgactgaccacactgtcttgtgaggaactgggtcccctgcactggatcagagccaaatgcaagccacccatcagttcagaggaagcaggaaaacatcttttgggtggtgcatagaacattgagctcttaaaaacccggagaaaaattaggaatttagaaagtaagtgggaggtagaatattgagtccttttttaaaaaaaagaattgatgtctaaatatgtagtctgaacttaagtgtcctaaaaccttgttttttgtttttttgttttttgaggagtcgtcttgctctatcaccaggtgggagtgcagtggcacaatctcggctcactgtaacctctgcctcctgcctcccgggtccaagcaattcccctgcctcagtctcccaagtaggtgggactacaggcgcacaccaccatgcccagctaacttttgtatttttagtagagacggggtttcaccatgttggccaggatggtctcgatctcttgacctcgtgatccacccatctcggcctcccaaagtgctgggattataggtgtgagccaccgcacccagccaaaccttgatttttttagccacctctgggattgcctgggttccctttggagaagaaactaaaagttatggccatagaaaaagccctggtaagaaaatatttgaatggtgtaagatggtggaaggaaagccatcccacacccctacaacatatgttctggcatttataaactgcttgattgtgt

SEQ ID NO: 49439 - DNA, 1046 bp, Homo sapiens
gaggcagacctaatcaggtgagcacttacaagggcccaggtttttgctgagagattcgaagcatgagagagcatttggagggggccacgtgacaaggaactgcaggagtcctctaggtgatgagttgctgccccttgttgacagccagcaaaagaatggagggacctcagtactacagctacagggcactggactcagctggcaacatagatgagtctgcaagggcttcttccccagagatccagaaaggaacacaggaagtccaagagcatctcaccctgtgagaccttgagcagggaaaccagtcacatggtgcacagacctctgacctacacaactgtgagctaataaatgagtgttggtgtaagctgctaagactgtagcaatgtgtttaacaccaacagaaaccactatagattttgatacctggatgtgaggtgtagtcactgtaaacaccttaaaatgtagatgtggctttggaactggatagtaagcaaaggctggaagaattttgagatgcatgacagggaaagcctaaattcccttggacagactggtagtagacgtcagctggatatccaaactgctttggaactcctcttttctgccttctgttttctcctgtataaaatagaatgtttatagatgttatcctatgcccgtcccatcattgtatgtggtggtgttgggggaagatagcttgtcactttagtgctgatggtccacagttggagagggattttgccctaggagttttactggataggatcatacccaggaatctcatccgttcatgattcagatgatgaaattcagatgagcttttggaattgagctgatgccataatacaaagaaatttggagactgtgggatggattgaatgtattttatacgtgggaaatactggatcactgagggccagagggcaggctgaggcaggcagaattctaagatgacctctaatgacctctggtcttatatgaacttctcttgagtataagagcagcctgtgaatatgatgagataccactcctatgataatgtt

SEQ ID NO: 49440 - DNA, 1101 bp, Homo sapiens
taatgttttcctttatcgttagtggtttttgtgttgtgttttagatataatttaccccaaggtcatcaagatatgattgtatcttattttctagaagctttatctttttgaattcattttgtgtatggcataagttaggagccaaagttatttttttctatatggctggatatccaatttgtccagttccacttacttaaatgattatctttctccctgagtactgcattggtatctttgttgtaaataaggtgatcatatgtgtgtgtctgtttgtggactctcttcttgtcctattggtctatttatctatctttatctaaacatatatatctttatttatctattcctgcgtaacaaaatgttactgtacacaaatcatactatcttaattatggcttttctgactgtgaaagttcttcaaattcttctagatggctttggctgttcttagatctttgatatccattcatattttagaatcagtttgctggtttacattttcaaattatctgttgagattttgatttgtattgcattgaatacatagactgtttggatgagaattttctctgatttaattttcataatattctaatctacaaacatgacatatctctgattaacgtagggcttctttatttaagaaatgtcatgttgatttctggacaaaggtcttatgaatttttttattagatttgttcctagctatttgatattttctgatgctataggaaatggcaattttaaaatttcctctttatactttttactgctaatatgtggaaatacaattccattgtgtaatattgaccttatgtccactgattacaccaaattcatttattctaatatttgatatatattctttaatttttaagtgtaaaaaacatgttgtgtcttttattttttcaagagctgagaaacctttccccccaaaaccttaaaacacaagcatccatatcttattgactgcaactgggaaatgactattcccaaaccagtcactggagtggtagtgagattactatgacctggttagtcaatcacactactatatatatatccgctacactgtgttataaatcaaattttctttat

SEQ ID NO: 49441 - DNA, 1934 bp, Homo sapiens
cctatggcattaaaaatttttcaaaaacatcctgtaacatcctatataagtttattctctaggcatctagcattctactggaaattgggttgtttcagatttttaaaaataattgacactataataatcacctttgagcatataacactgtaaagatatgagtatattttttagaattaatgcctggagaggaattatgcatttcatataagactttttataggtatcatcatatcatcaaattttcatcttggaaggtgctatgaatttataattctatccagtagtatatatgagagcttgttttgttataatagcttaaaacctgtttaaacataattcttttcagaaatacagtagctatatttgcttagtacaagagtgatatatgctcattgaaaccattcagaagatgaagtatgaaaagaacgaaaaaccacactttcagatttttttaatgagtacatagatacatatatacttttaaatggaacagaggcaaagagaaaggtgaggatattgaagacaacaatggagttaaaaagaggggcttctttaaagtttgagatcttggaggatagcaaaacaataagtagaagacatatatattcctttaaagagagcaagggtagatagcattttaattattactaagtcagggaccacgactaaggcccacggagattcaagaaaggaggaaaactctcagggaatagattgaaatgactcccaagtggaaaagtggatccataaaactggtgaaagttggcctacagaacaaagagaatagctataagtggggttcataccccaaaatttcaactatacagggaacagtggttaacatggtcataacagaatcactgattcccaccatcttcctgatcttttcaactgagcaagttttccctgtttcggtaagtggcaccatcatccataaaaatataggattcatcatttactgctgtccttccctcatgatctcacagccgttcaagtttccagcagaagtcccagacatcgaggaacacagacaatccatccccactatgtaccgtctgaattctagctctacaaaatccatgggaatgttaaaatggatgttgtttcatgacactaaattgtggaataatgatgagcagacatattctgttcatttttcttcttcacttatgtctatcctgtattttatcaatattttgttttccatattccattcttattgaattcctattctatccttcataaactgtattctatatttcattctaaatttcattctattccggtatttaaaaatctatactgtttatttcatagtccatttatttcaggccattgcacattttgttccgttctatattccttccaattttgatttccttttattttctttaatattttatttcatactgtattgcactcattccttttctcatatatttttattttattccatatgacattagatatttctttccattttctgttccattccattttccaattaaattccattaaatttccaatattccattccacatcctgttcaaacccgtattctactccccattttattccagtttccattgcagtctccatttcatcccatcctgcataccatttcaaatccattttccatactatattatttaacactccaaataccattccattctatttttgtgttgcatttcagcccaattgttcaccaattccattaaatatccgattttattgtgctcaaaatgttataacagtgacattcaggagactagtttgccaatatttttaatcaaagaattacaaatgtggctgggcgcagtggctcacgcctgtaatcccagcactttgggaggccgaggcgggcagatcgcctgaggtcaggagtttgagaccagcctggccgacatggtgaaaccctgcctctacta

SEQ ID NO: 49442 - DNA, 1050 bp, Homo sapiens
gaaacagagagaagtgcttgtcagattgaaactaaagctggaaaaaagaagcccgctctggaagaaccttcttccactagcttccccttgcctgccactcggcctgtcttctgcaccttttttcccacctctgctttatctttcactccctccttcctcttctactctttgattttgaagggattacattttctctagactcatctgtatgttttcttgtaaaattctgtgataaattcccatgattttatgttaccttggtatccatttcagtcttcctctaaaacacccaaactacttgaaaaagcctaaattttctgtgctttgaaatgtaaatttgttgccctgttctctaaaattcggtaaaggcatcagccatgtgggacagacaaatgtcagtttattccatttacagagaaatagtttgaatctaactgttctttaaactatgagttttacctgactcatagctacaggcttaggattaaagctacaagatcttttttgtctgtctgtattttctttgtgtgtgtgtgtatatgtatatatctgtatattgtctacagaaccaaattggcttataaataaatgaatactcgtaaattaagcaaataaacgcaaatgcttttcaagttcatgtgacagccatcttttggtggatgggactggtctaatattgttggtttggtggcaatggctatgtcttctgagtcattagaaaaatacgtatatatttaaatttagggttcttttatacttatctggcatacagtaatgtaaaattgttgacagaaaattttgtttacgctagtggctagatttttctagtgtctcatgaagtcttctagatgtaattgttaagagtgaatgaattgaatggatgtaaatgggataaaagtttgtaaatgaacttttgaaaatggttatgtttcataatatgtttacttgggaggacgttcattcaattgaattagatcatttccagataagatgtaattctgagacattggttactgaatacgagttcaggctcatatgcttttggcttct

SEQ ID NO: 49443 - DNA, 1001 bp, Homo sapiens
gcaggggccatcttggtcgtgcctggagatgtccagtgtcggtgagacttaggatggtgcatggcaaatgctcattacctcctagggcttcagttttatggggattcaaggggactccctggaccccaccatggtccagctttgctcttagggacacccatggcctcctggatttcaatatatgtttcaagcagaaccccttattcccttaggtttagtcctatcctctctgttgggattagcagggtcagctatgggagttggagccttgggaagccagcataaactgtctcaggagactgcagcggccctccaacaaacagcaaaggacctaactaggcttcaacaacagctagactccctggtgctatagtcctacagaatcaaagagccttagatctcctcacagctaaataaggaagaatatttttgtatctaagagaaaaatgccatttttatatcaacctgtctggtctggtccaagaaaatattaaaaatattattttccaggcagacaaaattgaatctttaggaacttctgtggaaacttagaagcaatggctattatctgccctgcttcccttaatataagtggcaattattaccatacttttagccttaacttttgggctaactttgtttaaaattctaactgatttcttgctctctagcttacagcaattccaggaccacatgatggttttgcaaagcttccaacctttagctgctaatgagctatctcatttcttgtccactggtcccatgaatgacatggcttacactccattagatcaggcaagaagagactttagggcccagctaggcagggacaatgttgcactgagcaggaagcagtttcagaaaaaattacctagcccctcaacctcccatatgattatgggccctaaaatctcttaggtggggaattgaggcaggataggtggtcaaggaagtgaccatgtcctcgggatgcagcaaccatggcgaccatacagtcaaca

SEQ ID NO: 49444 - DNA, 1049 bp, Homo sapiens
gtgagtttttatttaagtgtacttttttagtttaaaaaaaaaaaaaggatgctggtgaggtggtggagaaaaaggaatgcttatacactgttggtgggagtgtaaatcagttcaaccattgtggaaattcctcagagacctaaagacagaaataccatttgacccagcaatcccattactgggtatatacccaaaggaatataaattattctattataaagacacatgcacatgtatgttcattgcagcattgttcacaatagcaaagacatggaatcaacctaaatgcccatcaatgatagactggataaagaaaatgtggtacatatataccatggaatactatgcatccagtataaagaacgagatcatgtcccttgcagggacatggatggaactggagaccattattcttggcaatccaaaacaggaacagaagaccaaataccacgtgttctcacttataagtgggagctaaatgatgaaaacacatggacacatagaggggaacaacacacagaggggcctattggagggtagacgatggagggtggaagaagggagaggatcaggaaaaataacaaatgggtactaggcttaatagctgggtgataaaataatctgtaaaacaaacccccaggacacaagtttacctatgtaacaaacctgcacatgtacccctaaactttaaataaaagtttaaagaaattctcactccttcagggattatgtaaagagtttttggcattcatttaagaaatcaacagttgatctagttataaaccaattgaaagaagttgtaaaataagttgatgatggaattccattgtatcaggagaatatcaccaatgctttttacaaatgcctttatgcagccatgatgcaaaatgaaatcaataaaatatcaattattgcaaagttaaaaatagtgtactttttgactaatttttgaccaaaaagaaaactctgttaaatatttcaataagtttattctgagccaatgtgtcaccatggcccagggaacagtctcaggaggtcctgagaaagta

SEQ ID NO: 49445 - DNA, 1073 bp, Homo sapiens
gaaaaggatatgaaaaacagagattttacataaggaaggatcttgtatggtaaattcttgtcctaaaaggaagtgactggttgtttaaagaaagcatgtttagaacaagtcagaaagtttaagtatgttgtaagagagtatgtgaaagtcatgaaaaaattttaataattaaaggaaaggattgtcaagattaacactaaaattattttagccacccagtaatatatttctccaaattttattgcaagttataaaaatggtctaagcctaaagttattctctaatggcaagttaagggggaaaatgtatgctcttctcaaggaaaacgttagctttatatgaacgtttctggtaatgtacggcgacatctagtggagacaaatgggtattgcaatccattcacttatcaaactcagtaatggtctataggacccccactaacggtggtaatcctaatactcatattctaacactatattttaaaccatcttgtaaaatttatctcttttcacctagaagcaatcaaactccaaatggtgctagcagaaccacacatggacaggccattcttctgagaacccgtagctcaacctcatgagaaggtccaattgcttttcccccacatgatgccccttttcagcaggaagtagccaggaagaatcatcgtctaacaccccttaacaacagttaggtttacttctcttgaggggggaataataaagttattaaggaataattttaggcagatagagaaggtaaaaggagttatcagtgaggctttttttttttaaaaatagaaacagctcctgaaacatttcttaacagaaaggcggcttgaaaaaaccaggcagacaagtattgatatgcaaatgcaggcgattataaactaggtccatccaatatggcaattcccaccctcatccccatgtcaccaagtgtcatggccgcctccagataactccgcgtgtgcaggacatcttggcggcccacatttgcatattaaaaggctagggtgggaaggccaggtttttcttgggctatgtaaatgacacatctggtcaaaccaatcccct

SEQ ID NO: 49446 - DNA, 1090 bp, Homo sapiens
atggaaccaagttggaaaacactctgcaggatattatccaggagaacttccccaatctagcaaggcaggccaacattcaaattcaggaaatacagagaacaccacaaagatactcctcgagaagagcaactccaagacacataattgtcagattcaccaaagttgaaatgaaggaaaaaatgttaagggcagccagagagaaaggtcgggttacccacaaagggaagcccatcagactaacagctgatctctcagcagaaactctacaagccagaagagagtgggggccaatattcaacattcttaaagaaaagaattctcaacccagaatttcatatccagccaaagtaagcttcataagtgaaggagaaataaaatcctttacagacaagcaaatgctgagagattttgtcaccaccaggcctgccctaaaagagctcctgaaggaagcactaaacatggaaaggaacaactggtaccagctgctgcaaaatcatgccaaaatgtaaagaccatcgagactaggaagaaactgcatgaaataatgagcaaaataaccagctaacatcaaaatgacaggaccaaattcacacataacaatattaactttaaatgtaaatggactaaatgctccaattaaaacacacagactggaaaattggataaagagtcaagacccatcagtgtgctgtattcaggaggcccatctcacgtgcagagacacacagaggctcaaaataaaaggatggaggaagatctaccaagcaaatggaaaacaaaaaaaggcaggggttgcaatcctagtctctgataaaacagactttcaaccaacaaagatcaaaagagacaaagaaggccattacataatggtaaagggattaattcaacaagaagacctaactatcctaaatatatatgcacccaatacagaagcacccagattcataaagcaagtcctgagtgacctacaaagagacttagactcccacacattaataatgggagactttaacaccccactgtcaaaattagacagatcaatgagacagaaagtcaacaaggatacccaggaattgatctcagctgtgca

SEQ ID NO: 49447 - DNA, 1090 bp, Homo sapiens; identical to SEQ ID NO: 49446

SEQ ID NO: 49448 - DNA, 1035 bp, Homo sapiens
aaggtgattgtacgagaagactcctaacataatttttttttttttttgagacaaagtcttgctctgtcgcccaggttggagtgcagtggcgtgatctcagctcactgcaaccttcgcctcccgggttcaagtgattcttctgcctcagcctcccgagtagctgggattacaggtgaccaccactacgcccagctaattttttgtatttttagtagagatggggtttcaccatgttggccaggctggtctcgaactcctgacctcgtgattctccagcctccacctcccaaagtgctgggattacaggcctgagccactgcacctggccagaaatttttcagagtggaagttgctctagaatatagccaacacttgcctttgtcttggtagctattctaatggttatgaatggtatctcactgtggttttatttcgcatttctctgatgatggacctttccataagtttgttagtcttttggatattttttatgaggtgcctgttcaaatcttttgactactttttctcctgggctaacttttttttattgatttataggagctctttctatattaaggatgtgaatgctttgtcagatatatgtattacaaatctcagtggcttgtatcttcagtctcttcatggtgtcttttgatgaactgaatatctgaattctaatatcattccgttcattattttttttcatttatggttagtgcttctttgtactgattaggaaacttttatatttcccaaggccatgaagatagtttcctaggctgtgttattgtttaacctttcatatttatgtttataatctgtaattgatttttgtgtatattgtcagtatgggtatatgtaaaggccctttttttgttgttgaagtgacattcagtcaaccccaaaccacttattgaaaagatcattctttcccttttgtagtgccatccttttcattaactcaaatatataaatcaataatttgatatagttctgaattctgttcagtttggtttgtctatccttgtatgaata

SEQ ID NO: 49449 - DNA, 1070 bp, Homo sapiens
tactactggggctcaaattggttattatgtcaggatcccactatatttaatcaaggtgcctcctgtaatctaaggggagttcctgaacaggaaagagataaacaagtatacctcacattaactatcagaactattgccttgcctgaattcctcacatttgtaccattcattgccttaaaatatcccatagtgggtatgagcactctgatccaatgagtgataaaattaagtatttggcacatgtgaatccgtttgacaatgtgagatcccaaggactatacccccagttaaaataggttaatacagcccactgtaaattagaataagtctacaaatatggaaacccatgatacaaggcctatttggtgaaagggtgattatccccatgtcttctccattaacaacccaatttggcttgttcttaaacttcaaatgaatggcacctaatggtggattaccataacgctaatgttgtggtcccacacattaaggtccccatacccaatattgttgacattactgactccatccggtctgtgactggtaaatattttgctattatagatttggctaatgtgttctattcactgcctatttcaacagcctttcagcctcagtttgccttcacctctgaagggacacaataaacatgtacctggctactcatgggatacctccacagttttgccattgtacactatctttgctggcaagatcttaactgtaccgagctttttctagatgtacaggtgtgatgttacattgatgacatccttccctgaggagatttatttgacacactcattcaggaaatacagatactcacaaaattgctcataaaatggtatggctgttgtgccacacgtagtgcaaggccctaccacttttcaatacctacacattatttgctaaactgaagaccattctgtctctgacactgtcagaaaagcagctattgaccctgtcagcacccacaacttcttttaggttcatttgtgttctggagacaaaacattcctcttttataaattttattgaagcccatttacgctatttcttacaaatcagtt

SEQ ID NO: 49450 - DNA, 1684 bp, Homo sapiens
ttatactgtttttaatatttacctatgtagttacctttaccagtgtactttatttcatcttatgatttcacgttactatctagtgtcctttcctttcagactgaaggacttcctttagtattgctcatagggcatctgccagctacttgatatctctttcagttttgtttatctgataatgtcccattttctccttcacttttgaaggatagttttacttcctttattagatatagaattcttgattgcagttttttttctttctgtaacttgaatatgtcttcccactgctttttggccatgacttctgaggagaagtcaactgttaaacttctgttttcttgtttgtgaagagttgtttttctcttattgctctttgggattttctccttgtttttggctttcagtatttttattatgatgtgcctatgtgtatatacttctcatttttcctacttggtgtttgtttgctttttagaatgtgtatgtaaacattttttcatcaaatttgtgatgctttcagctgtaatttgttcaaatatcttcttcctcttttctattttcttctctgattcccattatatgtattttggttgctagatgatttcttacaagtttctgaggctgtgtttatattgtctctgtgtgtgtgtgtgtgtgtgtgtgtgtgtctgtatatatatatatacacatacatatatacacgtatgtatatatacacatatatatacgtatatatacgtacatatatgtatatatacatatatatatatgcacagacacacacagtctcagaaacctgtgtgtgtgtgtgtgtgtgtgtgtgtgtgtgtgtgtgtaaaatttctgttcctcagactggatgatctgaattggactatcttgctgactatttttttctatcagtgtaaatctgctcttgagcccctctaatgaatttttcgtatctgttactttatatttgtagggggcttgaaggatttaggggcttatcaaagaaagacatatgtctatgaggtggcagtatcacacacaagctttattgggagatgtgttgacaggcttgcatgttggggaagtctctcacagtaggagcctgtccagaggccatggcttgggagttgctactctgaaggggaagaggccatggaatttccagagagggagattgtagaggggacttgacttacatgtttaggtgatggctactcagcagcacagtggggagtctctgggtcagagagagctctaaagggcaacaatgtgtcaaaagacaaaattacaacaaatttagtttaaagatctcacttggccgtatttgtgattctagaatcaggcaacactattccacaaaatagaatacttgttcaaatgagctgagagcagaagaggttgacttcgtagaggagaagggctgaagaagcaaagaacaaagtgtatttattgtatgtgtaaccactaaagtatctactcagtagcttagccatcattggataaagatttccttaaatgcctgggaccaataaattgcatcatctttaacaaagggatctgtatacatcttggggcatgcaacacttagccaggcagtttacaaccgtacattagccttcacttcctgattgcaaagagccgaaaagtcagttagaagtgagagtttatggccttctcaggtgtttcctga

SEQ ID NO: 49451 - DNA, 1051 bp, Homo sapiens
tatcaggatcatgctggcctcatagaatgagttaggaagtatttgctattcttgaattttctggaaaagtttgtgtagaactggtattatttcttttttaaatgttggtagaatttgcttgtgaagtcgtctgactctttaaaatttcgttgtgggaaggttatacagatgctccttgatttacaatggtgttaaatcccaataaagctgtttaagttgaaaatactgtaagttgaaagtgcatttaatacacttatcctagcaaacattgtagcttagcttagcctaccttaaacatgcttagaacacttaatattagcctacagttcggcaaaatcatctaacacggagcttcttttataataaattacatgaatatctcatgtaatttattgaatactgtgctgaaagtgaaaagcagaatggttgtattggtactcaaagtatattttttatggaatgtatattgcttttgtgtcatcgtaaagttgaaagatcataagttgaaccatcataagttgggaattgtctgtactactaatttagtttctttgttcctttgttactaatgtgtctttttgtttttcctggattgtttccagagtttttaaaaaaatctcttaatcagattgattgtgatgagccttgtagtttccttcatgtttcttttgcaccaaatttgttgatattttttgatttggaagttaaaattatcgctaaaataatggcaaaacccacaattaatagtaacatttgaagaaacagtggctaagaattttagctgccttcctctcccgggactctgagcttcatctccttacctcaggggatctgccaggtgaaaagtattaatacttctctcatccgctttggggactttacctgtgtattaagttgcttgccattgttcaacagtccactgatatttttcatacttcaaaaaaattcttttctgtttcattttggatgatttttatttccattttttcaaattctttaatctttccttttccatagtttaatatgtcatttatccaatttgtcgtatttt

SEQ ID NO: 49452 - DNA, 1099 bp, Homo sapiens
gcttcaccatcaggaacaaggtagagttacccagttcttaaaaagattgagtaggaatggagaggacagatgtggtgagagcttcaggaacagagtcaggtcattctaggaattataaccaaacaagccaaaataaagtagaattcagcctataaggaagtggagaagctagggtatgtggcatgattttctccccagatggatttagctataggttgcttgtgtatcacccagtattcagaggaacttgaatttgaaattgcttcaggaatatgcagtactctagcactgagtcaaaaataagcgtgactttcagaaactcaaggtataagaaatattaataaattgattttctaccttctcacttcaaggaggcagtgtgctacaccagaaagtattcaggatctaccttcaggtataactgggtttatttgccagcttaaccaccttctagctgtgtgactttagttatattaataaatctctttgagtctcaccttgctcattttttttttaggtcaggatataatactgtaccaagttgtaaggattctagataaagggtataaagtgtctagtatggcgcctggcatgtagtacatacctaataaatatgttattgaaatatattattgttggttctgcaaggatcttaacactctataatagacctctccaaccccagttggggaatgaatgtgttacacttgtgttgtgatagtattaatcactttagattatggggcttctgctggcttatatggtacctttgtgtgaattgtaaaataatacctcttcctcaaaagactttcttaccacttgctagaaaattgtcataataaacacagatatctttgatggtcataatgtgaatggtattctgcagaatcatgcggcccacaatttgcaaaacctgaagttggtaggctgaataaatggccccccaaaactgtctgcattttaatctctagaacctgtgaatatatattacctgaaatggtaaaagggacttcggcagatgtgatcaaattaaggattttgagatgcagggataatactggattattagggtgggcccaatgtaatcacaaggatcctt

SEQ ID NO: 49453 - DNA, 1025 bp, Homo sapiens
gctctggccatgtaagatgtgcctgcttcactttcaccttctgccatgattgtgagtttcctgaggcctccccagccaagcttcctatacagcctgtggaaccataaactaattaaacctcttttctttataaattatgcagtctcaggaatttccttatagcagtgtgagaacagactaatatagaatttgtttttaaagctttgagctctagaaagtttttgtgtgtatatgctgcattttcctcaggtgttcttattactttttagtcagtttttacatatcttgtctaatagctttgttttatttctctctgactgctgaaactttttaatgtttgtttttatgaatgatcactttgtgggccttgatgtagattggaatgtatttgagtcagtactgctagaatatcaactatgtgcagatatgaatggtgttactatggaaacgaggtcacatgtgagttctgatcttcacactgccttatttccagcgaaaagttgccatttctttagaacactgattgtccccggataaaactgtgaacattccaatatttaggcctagtcaccttggacacaaattgcactctgaaatattgttctttcactgagagcagacaagcacagtatttaagtttatatgcaaggtctcaaaagctaacacaaagctagctagcaaaaagaaaaaagaaagagctaaaatgactgttagatgtaattctacataacctgtttttaacaagagcattctataagactaaattctaaattttttcatcaaagggtgtttttctactcctgattaattttcacctactgtaccatggtaactctacccattcagaatttgaattcctagttcagggaaaggaggaatctggggtagtggcaatgcaatatccttgtttagacttgatgttaatttgtatcagtgtttgctggtaatgctaatcaaaaacaaactccacctagaaacctgttagtggtaaaacatggataacaccagtaaagagaatttatatg

SEQ ID NO: 49454 - DNA, 1053 bp, Homo sapiens
agggagaggacaggataatgggacactgggatcattgtgtgtgtgaaaatgtggatgggacatgttgatgtagagggaggttggaatggggcaggtgtaatgtcattatggaagataggtacatgatggaagtgagaaggctggtgtatgtctgtgtgtctatgtgtgctggggaaaatgagaagtgtgtctctttgtgaggacagatggatacagtgagcatgggtaatcacagtcaatgaaaatgtgataatttggagtgggaaaatcatgagtgtctgaatagggttgttgaataaagtatatgatgggaaaatgcaaagagtttctgagtgccagtgaggaatggggaatatatgtgagtgagagcagagttgatgtggttattggttgtgagtatgtatgaaatggaggtggtatgagaatgtgtggaaggagatttggaggatgatacaagtttgataatggagatgtggactgtgtgtatgatagtgggtgtggctagacactgcgtaatggtgtagtgtagggattgagtaattggggtgtgactatatgaatgatggggatggtgtgtatgataatggggattgatttaagttagtggtatttgacagtgggtgtcgtgggtaccatatctgttctggtctaaagacattttatttatgatagtacaggataggacagagtatgtgtggaaatgggagtgatagagacagtgtacatgttagtgggcatattaatccattttcacactgctataaagagatacctgagactggacaatttattaaaaagaaagagggtttagggtgctggtattgcaggtgtgaaccactgcccttggcctggaagatctccatttttatgattttttttcatttttaatttttttttaagagacagggtatccgccgggtgcggtggcttatgcctgtgattccagcagtttgggaggccgaggcaggcgaatcgcttgagctcaggagtttgagatcagcctgggcaacatggtaaaaccctgtctctacaaaaataatgcaaaaattagac

SEQ ID NO: 49455 - DNA, 1033 bp, Homo sapiens
gtagggggaccggcagccaggcaggcagacgggtagcaggggccagcactggcccccctcccagcttggcagtggcatgaagatgggagtgggagtgtatagtggaggaagcacctgccgggacccccacctgccagctagttggacaccccaaggctgtgtgctgcccacctggtgttccccaacacccccagccctacccagtgcacccctccggtgcctgctttccctgatgcctgcgatttagaccagcccggctgtatccacggcaacagaagcaggagtgtcactggccgccagatcactgagggtcccacaatgtggcccgggctgtgatttacctgggtgagacagcttgagccccatcgtggattccaagacatccctgctgagagagccaaggtaagcagtcagcatccctccaccaaggatggggggctgggacttctgttctgtctccccacacatacttcagagtctccatcactgccatgctctctgtctctgtctgactctgttagtctctttctgctccatcaaggggctccttggtacccaagcctggggactcctcatcttccccccatcttccccaatcccaaatgtcccatgagaaagggaaccaccacctgtttcccctcacagggtctgtttttatcatcatggttgcgtttgggcatgaggctgtgttaatctttccttgtgtgctggctgtggaagggatgcctgggagcccggcggccgtgttcccttcacaatgcctgcaccctgggcaggctcagcctcttgcggctgctcctctccctctccctcctcctccactctcctccaggatccctggcctgctggccgggtgtgtgtgtgtgtgtgtgtgtgtgtgtgtgtgtgtgtgtgcacctgggtagcaagcaggtgggtagacatgacagagaagctgctcccagcccagaccatcccccactccttctttcctcctttccttccttccttccttccaccctccccacctccccatctctccctacaggtagca

SEQ ID NO: 49456 - DNA, 1034 bp, Homo sapiens
gctcatgcctgtaataccagcactttgggaagctgaggtgggaggattgcttgagcccaggagtttgagaccaacctgggcaacgtgacgaaaccctgtctctaccaaaaatacaaaaattagccgggcatggtggcgcgtgcctgtgatcccagctattcaggaggctgaggtgggaggattgcttgagcctgggaggttgaggctgcagtgagccatgatcacctcactgcactccagcctgggtgacagagtgagaccctgtttccaaaataaataaataaataaatgctcacaaattgaatgcaacagaaaattttcattttgtgtatcttaaaataatgatgaagcttttcccctaagtgaatgcagacattgctctacttaccctaataagtcttctttagtattcaaattgcaacaccaagtaaacatcacccagggaaccatacttgacttcacatttcctaagttgaagttttgcttcgaatccataaactctgtcagtagtcttcacgctattctttagtgtctttaacattttttatgtaactttattcgtgtgcaaaaaaagccatttgttgaagccagtaaacataaaatctgtgcctgagctcagaagttcgaaatcagcctgggcaacatggtaaaaccccgtctctactaaaaatacaaaaaaaagaaaaattagctgggcatggcagtgtgcgcctgtagtcccagctacttgggaggcagaggcaggagaatcgcttgaacccaggaggcggaggttgcagtgagctgagattgcactactgcactccagcctgggcaacagcgagactcaaaaaaaaaaaatctgaaaaatgagaagcattcacaaagaaatgttgccatgtttcttttacctcattattattattattactattatttttaccaaatctctacacatttgggtttaaaacaacacggaagggtgtactgatcccagttccttacagaaagctgaaaggcaggtgggaaatgtcttggatttaattacattcatc

SEQ ID NO: 49457 - DNA, 1054 bp, Homo sapiens
aggattacaggcgtgagccaccgtgcccagccgaccttttctcttaaaaaaaaaaaaaaacagaaaagaaaacaaaaacaaacattgtccacataggtataggccaaactccaaaacctcactgatgataaactagcaaagtaataatcatactatctggaatgtttcaacgggaagtgatgaaaacagttaccacctctctttgcacatggttgctctggagccattcttgctctagccctctgctgtggtaggagcctaccagctgggcagctctgctcgtttgtccacttacaagtgcaagagttagctggtctctgcacatgagcaggtttggctccagcggtatacctgttgcaggatgtgtatgtcagttaagtgtatctgtgtgtgagcaagtttatatgtgtacacatgtttgcccatgtgtacttgtctttgtgtgtgtctgtatatgtacaatatgcaatttttatctttgtgtttgtttgcgtattgctaaagtgtatgagtgtgcctttgtgtgtgtgtgttggagctgttataagtctgttcatgggtgggagtgtatatgtgaatgggtgtgtgtgtgtacatataccaggatatacatatttgtgttggtgagcacacctaatctatgtgagagagtttgaatctgtctctttgtgttagagcatgtgtgtgtatatgtgggcagttttttacttgcctgcttttttctgggtgcatatatatctataggtctctgagggggattctatgtactatacctgtgtgtgtatgtgtgtgtgtatacacacacatggtagggttcaagtgcgtgtcagcctgctggcatatgtaagtaactttgagtgttaatatcgtgacagtgtttatctatgtgacaatattaatatacaactttgtgtatatctgtgttgtgtctgaatatgtgggaggatttgaatcatcagctatattgggtcaatgagtatatatatgtctgtgtgaatgaaagtatatgtgggtaagtttgcttgtgtgtacctatctgtcagtgtttgagatc

SEQ ID NO: 49458 - DNA, 1049 bp, Homo sapiens
tttgcacgcgtcttgagcctcagctgggcccgggctgcagctgccagtctgcggaggaaaaccctctcctcacttgtttgtaaaatgtcccgagctttcccagggttgtgtttgtttgctgctattgtttgggggggatgtggggggttttgttttatctttagcttttgttttcactgagactcagggctacgcattatccaccttctcggtcttagcgtggctctccgtgtctccctctctatctccatctttatttctgtctctctctctatctctctccagctaccctctcttatctctgccccaccccaccccgtctctatttttctttctttcctggcgttagccctctccctctccctgctctccttttctctctcttgctctctctctctctctctctctctatttctctcccttctctgtctggcatgctggtttctgtgtgtgcctctgtctcttttttctcactctcattttcacccttcttcccctttttgtctctctcttcctctctgtatgtaaggatctctctcccctttctctgtttctctctctgtctctttctccctcctgtgtctccgtctgtctctgtcacacacacctctctctccttctctctctctgtgtctctctggcctctctcttacattcagtctctgtctgtctctatccctttccctctgcctcccctcaaggtaaaggagagagaaagagaaagagagagagagaaagagagtaagtgtgtgtgtgtttacattcacccagctgcgggctgttccacagtctgagggggctgtcaggccttgaagggctgaaagggagcccaccaaccccatttctgctcagcccctgccctagcactttctaagtactagtttggcctcctgtcatgggctctgagatttcagggtgccattaaaaagcctggctcgggcgcagtggctcatacctgtaatcccaacaatttgggaggccaaggcgggcgaatcatttgaggttacaagttggagaccagcctggctagcatcacaaaaccctgtctc

SEQ ID NO: 49459 - DNA, 1038 bp, Homo sapiens
cctctcacttcctgtggggccggaatctgtatttatccatccccctttcccttctttatagaagtccctgtcctaaactccctccctagcccaagagagccccagaactggggaagcctgacccatacagaatggggagggcactctaggcaggagagacattaatgagcctggctgcagagtggccctggaaaggcaggccagagtggctgagaggctgggagtaggggagcctgttctctcagcgatagtgatgggggtgcctttccgagggggtggggtgggaagaccaagggggtggggggtagatagggtacatttaggagggttttcctccatttcttttttctaactgcctggattcaccattggattttgtaaatggaaaaactgaaatgaacaatgctatactggatgttttctctttctgactgtgtgtgtgtgtgtgcgtgcgtgcgtgcatgtgccctgtctgaccacatgtggagagacatgattgagtgatagtgtgtgtctgtgtgactttgtgtggggaggcactcctgaagaaaacttgcccggtgcacacacgtaaaatgcctgtatatggggacagatacagcacgtgcatgcatacacacacacacacacacaccacagttgagaggagacaaactagagtatgtgcccgtggtaggaagtcgagtggtcaagagatggatcttggaaactacataggtcggtagcaagagggtagactcccatctcacaagatgggcctcccttggcccaggccctgagcacgggagggctggggccgccagggaacttgaaaacctcatctcctcacaaagcctgtagccccatctcaaccccgtctcagtctccttcccaaactcaaacaaggtgttcctaaaattggaccaccatggagaatggggactgggaattgaggatcaaatgtgagggaaactgatgaggttaggaaatgccccccacaaagtaatggcttctggagggactgctcagtctgggatgggagcccttcctaggggccac

SEQ ID NO: 49460 - DNA, 1033 bp, Homo sapiens
ttcttgagtctttctttgtcttttatgattttgatcatttagaagactcctggacagttatttcatagaatttgggtttgtctcaagtttcactgtgattatattcaagttatgtaattttggtgagaataccgcagaagagaagttatgtcttcagtgcttcctatcaggaggcatgtgatgtcattttgtcctgataccagttttgttgactttgattccttgtttaaggtggtgtctgtcaggtttttccactatagttccccttttttctttcatgaaatatgttgggattatataaatatcaacaaccttgttgtaaatctcatatcatcagaatataccatcagctaccactctgtatcatcatatacagacatacacccatatctgcccatcattaccatttctaaatgaatttagctgtgatctcactgtcattctctttaacactggtccagtcctaattcttggtgattttaatatctttgtagctgatccttccaatattttcatctgtcagttctgtgatttgccaccctacaatgatcctgccttttaaccccacctcagctacctactccaatagtctgacccttgttttgtttgttttttttttttttttttgagatggagtcttactctgtcacccaggctggagtgcagtggtgcgatctcagctcactgcagcctccgcctcctgggttcaagtgattttcctgcctcagcctccagagtagctgagattacaggcgcctgccaccacgctcagctaatttttgtagagacagcgtttcaccatgttggccaggctggtctcgaactcctgacctcaagtgatctacccgcctgggcctcccaaagtgctgggattacaggtgtgacccactgtgccaagcctgacccttgtccttgtcagtacctgtgactgcattgttttcatattctcagtttcaggcatcctgttctctagccagtacctcctatttttctagctcacgcctactagtactccaactccagcaatccctca

SEQ ID NO: 49461 - DNA, 1033 bp, Homo sapiens
gcctgcttttttagttttgagatttgttttcttattcaatttttttcctccctatttttaaatttttttctattctttctgtggttatccttgatgttttccatatgtgtttaacttataaagtctaaagttaaacaatattttagcccccttcttaaagaatgcaggaagcttagaaaccttcaactctagtcattcctctcctgatcacatactgttgttttcaaatatgttagtttgttcctttttataaacctcacaattttacatcattgtcagtgttattttatatagacagtgtttgtttggacttacatgcatacattcttgtatcacacatcatcctttgggatcattttctttcattatgaatatagtgtttaagtgagttttttttttttttagtacaggtctcttgatgttaaattcttccagtctttcttatatgtaaatgtctttattttatcctcattcttaaaagatagtttgttacaggtatttttactcaacacttagaatatatggttccattctcttttggctttgagatgtctgttgctattaagaagtcgactatcagactaattgctggttttgtgtgtgtgtgtagtagtagtagtagtagtggtagtagtggtagtagtagtagtggaatgtgcagggggtcctgcagttttactctaacatgtttacatatgtatttttttttaattctactttgggaatgtcatgcttcgtggctcagtgaattcatgcttttcataatttctgggaaattctcaaccattatctcttcaaatattgcctttcattttttctagtttttctttcttggaatacagttagtcatattttggacctcctcattctatcttccgtatctcataacatctctgagattttctatctccttgtctttctgcacttcattctggataatttctttaggtatatctttcagcttactgattctcttttcaactatgtttaatctgctctaatctgcccattgagttttttatttcaaaagtta

SEQ ID NO: 49462 - DNA, 1027 bp, Homo sapiens
tgtctgttcccttggcctagtcacccactccccatggcatcatcctttagagtctgctcttcactgaggaggaaacagccacacctacactctgctaacctgaggccagaatgcccaggtgagcctggcgcagacggtctgtacttggctggttttgagtatgtgctggtgcggctcctgcacaccctctcaccagcactgcagctgcctggagcaggtgtggacatgcatttcaccacacagaagttgcctgctgtgatctactattgagggtgggggctggtcacagagtttggaagtgaagagttagagcggcccattccctgtcaaaccatatggtaaccagaccatatggtaactaatttctggtccacataacagccctgccagtgccctgactatgctgagacatgggtgtattttcctggcctcatttataaccgtaccctctgacttccccagaagcagctcttgtaaactcttagggaaactgaagccagactcactatgactgagagattctctccagcttatcctctcctggaactcttcacctaattgtagcaatactgctccttccataaccagcttagcttccataaccagcaaaacaaaacaataccttgttcagtgatacatacatgggaggtgaaattttctcaaaagcaggccaggcacagtgactcacgcctataatcccagcactttgggaggccgaggtgagtggatcacctgaggtcaggagttcgagaccagcctggccaacatggagaaatcccgtatctactaaaaatacaaaaattagccggacgtggtggcatgtgcctgtaatgtcagctgctcgggagactgaggcaggagaatcacttgaacccaggaggtgggggttgcaatgagctgagatcgtgccactgcactccagcctgggcaacaaaagtgaaactctgtctcaaaaaaaaaaaaaatttttccgcaaaaatcgaggaaatgagaacataaaggtcaaggtagtggtttcttctgggca

SEQ ID NO: 49463 - DNA, 1206 bp, Homo sapiens
ggagaatcgcttgaacccaggaggtggaggttgcggtgagctaagattgcgccattgcactccagcttgggcaacaagagcgaaattctgtcttaaaaaaaaaaaaaagaaatataaacaatgtgtcattggcacagaaacagacaagtagaccaatacaacagcatagatacagacacctgtatataaaaacctattgtataacaaatcaagggagaaaggacagttgcttagttaaaggtgttgagaaaactggctcatgacagagaacaataaaactggatcccttcctcatgacatgtacaaaaatggattctaggggccaggcacagtgtctcaacgcctgtaatctcagcgctttgggaggttgtggtgggcggatcacttgaggtcaggagttcaagactggcctggtcaaccagacatggtgaaacaccatgtctactaaaaatacaaaaaattagccgggtgtggtggtgtgtgcctgtagtcccagctactcaggaggctgaggcagaagaatcgcttgaactcggaaggcagaggttgcagtgagccaagatggtgccactgctctccagcctgggtgacagagcgagactccgtctcaaaaaaaaaaaaaaaaaaaaaaggaattctaggtagattgaggacctaaatgtgaaaataaaactgtaatgttaatagaaattgtagggagatgtctgtgacctaggggcttggacaaaacttcaagactataatccatatgctgaagagatgattggattatagcaaaattaaggatttgtgctcaatgaaagacactatggacaaaagtaagagataatgtgcagattgggagaggatatttgcaatgcataaaccaacaagggatttgatacctagaatataaaaagatttcctgtgaatcatcaagaagagaggttgggtgtagtgatttatacctgtaatcccagtactttgggaggctgaagcaggaggattgcttgaggccaggagtttgagaccagccagacaatacaacatgaccctgtctctagaaaaaataatttttttttaaattacctggttgtggtggcacatgccagtcatcctagctactttgggaggctaaggtgggaggatcacatgagcccagtagtttgaggttacagtgagctgtggtcatgccactgcactgcagcctgggtgacaagcaagacc

SEQ ID NO: 49464 - DNA, 1091 bp, Homo sapiens
ttagattcaatctgctcttttcacaattttttctggtaacatggaagctatatcttttattatcagaatcagcatctattattaggtgctgctttaaaggaacataactgatttcattttcttagttgttattcccccattgttttaccttccctccctcccttcctctttccttttttctttctctctgtccctcattctttcttgctctcactctccctctccagttgctccttctcccactctctattattggatttttttttaacggcagcacttttatttttccttacacaatgacgtgttgctggggcctaatgttctcacatgacggtagaaaaccaaaatttgttgtcatctctttaaagaatttagaattatgtagaaaaaaaccttacataaattaaaaggatgaatatatttacaggtgtaaatccaaaccgcttccaactcaaggcaagtaacagcccacggtgttctggcaggaaaacatcagctaagaaaggaaactgggtcctatggcttggactttccaactctgacagaccggcaggacagaaacaactggttcaggagcccttgccagcctctagagaaatcccagaacactcagccctgatgacacattaataccctgcacatattggagactgctgaccacgcatactcaccaagccacagacttgtcttccacaagcacgttcttacctcagccacaaagtgcccaagccacatgtactaaaggttgaaatcagagacatgtacagggtattaaacagataccaaggggaacagttaacttgaatatagcttgaatagaaagtcaaaatcagcaacaagtctacaatccagtgctgatatcagatacaagcttcaaggacaactttctgtgtatgtttttttttttttttttgagacgtagtctcgccctgttgcccaggctggagtgcagtggtgcaatctcggctcaccacaacctctgcctcccaggttcaagtgattctcctgcctcagcctccccagtagctgggattataggcgaatgccaccatgcctggctaatttttgtatttttagtagagacggggttt

SEQ ID NO: 49465 - DNA, 1034 bp, Homo sapiens
aatgttcctgccacccaggaacacccccaaagaaaccccagaataatgtttgactaaatatctgggtaccccaagacccagtcaagttgacacaattaaccatcacaaatccatgccttgtgaacttggcacccatatacacctccttaaaccacatttaatcttcaaatgaagaccataacaaggtcataattccatctaacatgatacaactgttctacctacaaccgaaaacgcactaaccttttccccagaaaaagaggtaaagtccttcactgatgttaactcttttctttgatatcctgtaacttaaatactatgatgtaaagttaacaattcttaaatactattatttaaagccaatacatcttatgttacatgataaggggataagagagggaagaaaacaaaagtatttgatacatacaaacaaatatattcataacaaaataagcaggaaatatgacaattacagcccttgtttctctaactggtcacatgataactgatatttataactaccttcttccactacccattccatattctgtttgccttcagcaagcaactcaactagtcatagttctttactggtagggtaacccaaagcttcattgttgtagaatctgggccattagtagtcctgcctgggttgggttgttgtcgttttccattgaccttaatcataagggatggtaacactaagagattctctagagtatttcctgtattctagaatactcttccttccctccattgtagagtagtattccagtttcctcttggtagacaggatcaatcactccaaccaacaccacaactcccttctttgccttaacttctagctcaatggaatcgttgtgtctcctggcggaagcattcctccctttggaactgaaacctctaggctagcagaccaaaagatctctgtaacaggaggagaaattttgctagtgggtcactagggttgatagggacccattgatttccacccattgattcatggatctgtgaatcctggctgtgggagaaac

SEQ ID NO: 49466 - DNA, 1026 bp, Homo sapiens
gttcagcatttgaataacaaaggtaacataagtacttaagatctcaaaggcccattacattctattaataatgacaaaacaacatatttactgaaaatagtcttttttctttgccttccagttttacactttttaaaaaacacaaaattggacaagatcaaataactaggtggtaaaacactgactttaaaaaattacatctttaaacccatgagaatcataattctaagtatggccattgggggcaacttataaacctttgaccctttcttaacactatgtgactgatttttcacaaagaaaacacaaatgccattaagaaagtgtatttttccttgacacactctgcaatcttggttaacagactctgaggctccaaacatgtaaacaatttatcctgtattatgaaagagcaaagttgtgatagcaatataatgaacaataaagtatagcttctcccaagaaagagctaaagattaagaagtgctgcattcttgaagtcggttcagttttacccaagcttattttaggtaatcaaaacctagagcaattagcttaggtaaaacttaattaaggaatactgaaagctagatttatttgctgcatttatcttcattgtggacaacacgattagaaatcccggaatcacagatgaaagcatagtttttcctgagatttgatactatgctggaaccccacccccatccccttgaaaaccaatatatcccatttcagccttcataggtagactaataaaaaagtctcataattcaggcacacactttggccaagtttagctttatcacatctaaaaaaaattcatgtataaaacaaatatcagttcaaaagtatagattactttttaagaagaacctgcagtttctttctgcagtttatatttctataaaaataattaaatctggtagaaaggaacctgcctgaaattgaggaggccgaggcaggcagatcatttgagctaaagagaccagcctgcctaatgtacattaggtacagctgttctccagg

SEQ ID NO: 49467 - DNA, 1034 bp, Homo sapiens
tcccaaaagctagagttaaggtttttgccaatttaaattccatgtcagatatacactcacagacaagcaagttcgcaccaagtgtttcacatcaaagggcaaaaaatgcatagcaccaaacacagattctagcaatcctaaggtgaatgggctttgtacgccattatttaccacactcacttttaattcctttaacaacttaaactctagtgtgtgttcatgaataacctgctgtggattatttggatcaggccttacagaaataggaaaagcgcaaggtcctaagggctctccagctatggcagcagagtgtaaaattctttgtattggggtttgtatttctgctactgaaggaggtggtacagatgtttctgcaattggaggaagtggtataggccaatttttatctccctctcctgttttttattttcagttggagctgtgggtgggacaacagattctttcagatttttagacttagcctgctgtccagcagaataatgaggagataatggcacaagtacagtatgaactaaactccaagtggagaaaacagaagaatcaactttaagaccttttggatgagcctgttttaatccttctcctgccctatcccaattttccacatcgagagtgcctgcctgtggaaaccgtgggttatgtgtaataaccttttgtggcttctgcaggaggttagtgtctgcgaattaacctgagctctagattgtctcagcagaactttaagcaactgcacataatgtttttctttaatagacgaattcttccccttgttaccctgattcagaaaacttcccgttcccagtacttctttaaagcactgctcccattacctctttagggcaccgaccttatatccactgccggcagactcgtcctggggtccccgtttgccttgtcaaattcagttcctctgctccagcagaccttcgttcacgtcctcgaagtccctgttctggggcgccactatgccgctgacctattggactgaacaaaggggggcaaacacgggaata

SEQ ID NO: 49468 - DNA, 1038 bp, Homo sapiens
gcccagcctccagtcctgggttccctcaggaattcgaagaccttggctaggtggtgagcttggaagagctgggctttgttttctgtctcctctaacctctttccttactccttatcccatcccatttgagttcaggggtgaggcttaagatcttaataaataataccttactgcttaatctgtggcttgacctgtgagtagtagccttagaatcagccttctgggagctcagcttcagagtttacaagggagcagtttctgggcccaccctagcagcctggtactttggacaaccaaacagatgaacgaacggagcacagcagtgctatgaaagttactgtaagcctgaaataaactgtatttttcttaaaaaaaaaaaaacacacaaaaaaacacaaaaaactgagtatccattgtcctcccccctgtttccctgtcctgcccgctggccctgccatgggtctggacgataaaatactgggtagccttggggccgggtagaagctgtaagccatgggagaggcaggagaggtctagttgccaccccacgtggagttgtacgtgtgaagacactggctgaggaggcagggctgggtcggggccccagggtcagtggcagagctggcacttgaatccaggtctcctacctctggtgctttgtggggaactgggtggaggcaggatctgtggtagggtattgagggatgagggagaaaaacgacctaattcaggtaggactggcaacggctcccaccctccctggggacagggattaataaaaattgacatcactgtaggaatatattttttaaaagcccacgttttgtgaaaagatgaattaaaaaacccaagacccagcattcgggattgaaagtgcccgtgatgggagttcaagtattgactgagctgggagggaaggggctagagcccccaatcagacatgggcaactagagtgtggggtgggggctcccagtttgtcccaaaccctctaggtcttgtctcgggtctggggggattcggggggttcagcagtggct

SEQ ID NO: 49469 - DNA, 1362 bp, Homo sapiens
ggaaccatgtgacaaggactggagtgccattggctgtggactgttcaggcagggaagtacaagaccactcttgtattcaggggcaaccaaaggagagaattacgtacttgttgagtacaaactgcaccaagccctggagacccattaccaccgttaaccctcaatacagctctgctagtaagggattcgtctccccaaatgaaaaaaaaaagtaatctcagaatgttggccgagcatggtggctcacacctgtaatcccagttatgcaggaggctgaggcaggagaatcacttgatctcaggaggcggaggttgcagtgagtcgacatcacaccactgcactccagcctgggggacagagtgagacttcgtctcggaaaaaaaaaaaaaaagttgacaggatggccagacccaagtgggcgtattaagtggtggtgctaggattggaacccaagcgtgattaaaaccctatgcaggccctttcctctatattgtactgcctccttaacaaaggaagattgattaagcccctactttgtgccagtctctgttatcaagtccgttaaatgcatttaacgttaaattttttcttttttggtttaaaaaactctagtttcttaaactactagtttttagtgtcttgctaaaactatgtgctcttgaataggctacaacttatttcacactatctcattgaactctcctggtatgtgatagtgttataatgaaaaattgcataccaggacagctaagtctattttgcaaccatacagcgtttcataatttagcatttaaaatacagacagtccccgacttttggtggtttgatgtgggatttttggtggaaaagcagtatacattcagaatgcacctctacttatgatggggctacttcctggtaaacccattgtaatgtgcaaattacgggtttatcaggaggtgaccccatcggtaatggagaagtgctgggaggtaaatattagaaatggaagtatctaaatgagtaagaaacagcatgggagcataatttggccaaaatcaaacagaactaaagtagtcatgtcggtaagaatttgggactgcaggccagttacgatagctctcacctgtaatcccagcattttgggaggccgaggcaggcggatcacttgaggtcaggagttcaagaccagcctaaacaatatggcgaaacctcatctctaccaaaaaaatacaaagattagctgggcatggtgtctcatgcctgtagtcccagctacctatggggctgaggcaggaggatctcttgagcccaggaggtcgatgctgcattgagccgagattgtgccactgctctccagcgtgggcaacagagtgagactgt

SEQ ID NO: 49470 - DNA, 1081 bp, Homo sapiens
taaaaaattagcacagactttgtggcttaaaacaacacaaatctatcatcttacacttctagaggtgagaggtcccaaatgagtttcactgggccaaaattggtgttgtcagggttacactctctccagagactctaggggagaatccatttccttgcctttttcagcttctagaggctgcttagattcctagaataatggcttctttcctcatcttcaaaataactatgtagtatcttttttttttttttttgagacggagtctcacacactgtcgcccaggctgttgtgcagtggcacgatctccgctcactgcaacctctgcctcctgggttcaagtgattctcctgcctcagcctcccaagtagctgggattagaggcatgcgccaccatgcccggctaatgttttgtatttttagtagagatggggtttcaccgtgttggccaggctggtcttgaactcctgacctcatgatccatctgcctgggcctcccaaggtgctgggattataggcgtgagccacgacgcctggccaacaatgtagtattttttctcttttctgaacctctcttccaatccttatatcttctctgactctgatcttcctgcctctcacttaaaaggactcttgtgattactttgcatgcattgggatcatctaggataatctccacatctcaatatgtttaagttaatcacatctggaaagttcctttaaccatgtaaagtaacatattcaaaagttttggagattaggatctgtagatctttgaggatgggaggcattattcagcctactgcagatgtaatttgataaatttttgcttggaatttttgcatctacataaggatattggtctgaagttttcttttgtttaatgtctttatctttggtatcggggtaatgctgacctcatagaatgggttgggaagtgtttcctgtttttggaagagtctgtgtacaattggtatcatttcttaaattttagagtttaccagtaagttttatttgtgggaaggtttaagactacaatttcaatttttaaaatatatatagggctattcaggttatatttctt

SEQ ID NO: 49471 - DNA, 1056 bp, Homo sapiens
tgctgggattacaggtataagccaccacgcctggcctaaacttttaatttttagatgcagttgtacaaaacaatactgagaaattccatgtaagctttacccagtttcccccaatggtaacatcttgtaaaactataataccatataactaacagaatattgatattgataaagtcaaaatacaaaacattttaattttattttagagacaggatttcactctgtaaccgaggctgaagtgctgaggcgctctcttggctcactgcagccttgaactcctgggctcaagtgatcctcccacctcagcctctggagtagctgggactacaggtgcatgccaccacacctggctaaaatttttaaattattttttgtagagatggggtcttgctgttgcttagactggtctcaaactcctggcctcaagtgatcctcttgcctcggactctcacagtgttgggatcacaggcatgagccactgtgccccatcaatgttgcccttttatagccacccacttctttgctgtcattacgccctctttaaaccctagcaactactaatctactatgcattttaattattttgtcatttcaagaatgttatattactagagtcatatagtaatcttttgtgataggatttttatagttagagtaattctttggagattcgtccaggttgttgcaacaaacaatagtttgttcctttttcttactgaatattattccatggtatagatgtacaagttagcttaaccattcatctgttgaaggacattaaggctgattccaattttttactgttatcaataaagctaggatgaacattttttttggtgcagattttggtatgaacatgttttagtttctctgggataagtgcccaagagtggaatttctgagttatgtaggagtagctttatatttattgattgaagaaactgccaaactgttttccagagtaggtgctgtcatttggatgtttgttctccaaaacatcatgttgaaatttgatccccagtgttggaggtggtgcctaatgagaggtgtttgggt

SEQ ID NO: 49472 - DNA, 1026 bp, Homo sapiens
agtgatgggatgtcactcccaccattaggttatattacataaaactcttgtcttgctggatggagactctagagacttttcttggcttgatgaaataggtggccatgttggaataggctgtgtaacaagatacttcaggtagtctctgcaggtggcttttaggaactgtgggagacctcttgttgctaacagccgagagctagcaagaagccagggccctcagtcctactgacacaagaaaacaaagtctgcctacaatcttagcaaactttgaggtggattcttccccagtcatgcctccagatgataaggcaggttggctgacatcttgatttcagtgttgttaaatcctaagcagaggactcagataaactgttcctggaatcctgacctatagaaattgtaagataataagtgtgtagtattttaagctgctaattttgtggtaattaatttgctatgcagcaataataaaatataagcctagaacatcttgctgtgtcagaaagtaagaagggactcaaataactgtaagctatgacaaaaggaccctgaagtaaatttgaaggtgctctcactagccatatctgggacaatatgagattcaaaataaataatagtattaatataactcattgaataaaatgggaaataattagttcacatttatataaataaataaccaatcaatcaatggaaagaagagagagctcttccttgctactataaggacaactaattagtatagaagaaataatataattagaaaatatttattttgcaaccatcatagtaatagttaattcaggcagaaacatcaataattgctaaaactaggggtgaaagtgggatgataaatgaatatttacatagcttcaaagtatctttccacaaactaattaattacaaaggtaaaagaataaatttacaggggaaaatctggaaggtatcaccaagaaatcaaacttaacgttagcagcaattggacatattgacatttgtacttctgatatgatgtactgtgaa

SEQ ID NO: 49473 - DNA, 1034 bp, Homo sapiens
gatgaagatttttctttctttcctttcctttcctttctttctttctttctttctttctttctttctttctttctttctttctttctttctttctttctttctttctttctctttctttcttctttctttctttctttctttctttctttctttctttctttctttctttctttctttgtctctctctctctctctttctttctttttgtatatttgcaaattcatacagctgttatttgtgcttggaacctacccaaagtcggaaatgtagtaggagaacccctgagcagaaaaaaaatgaaatttctaaagactgcaccttagtgtaaaggtaaaggagaaataaaccctgtcaagcagaagggcagaaagaaaaattgctcattttgactttgttgctgaattgaaagaaaaaatttccctattgtagcaatggggcacacctaggacccagatcttggattttaagtattatttctgactaaaaaggactcagaatgccttggaataatagctgattccagggctggatcagggaagttataaggctggaacatcttgtggtggcagaaagtaaggaaatgtcctccagatggtaggtgcatgtcacaaggacataggagtcaccttgaaggagtttgcactggccagatctgaggcaatttgatcatcataataaataaaaatgttaacagattataaccattgaataaaatagggatctatgagtctgctccaataaataaataaataaatgcaagtcacatgtagctggtggctaccttattggatagcacagctctagaggatctcacatatttacatgaggagtcatgtataaaaatgcctattgtaacattgtttgtaatagcagaaaattagaagcaatataaaagtacatcagaagtagaatgaataaataaaattgtggtttatttagacaatgaagcacatacagcagtgaaatgaataatttactgttacatgggccaacgtggatgaagctcagagacataatgttaactgaaaaagca

SEQ ID NO: 49474 - DNA, 1032 bp, Homo sapiens
tggatgacttgttgtagacagccttacactgtgcatttttcagttttaggctttgagagtaaggctactgctgaccctggctccttctccccaagtcaactggatagtgttagcctcagggcctggggggtatgaatgtgcacaattgcaaaaatattccataaatagtatgagcttgtaaggggtttgttactattgtgtttatttccatgtcagttaactttggtagagaggatgggaccaatttttgcttcaccagttagttgagaagtttcttatagaaatctgagttaattagcatagatttaatcccatgatattgtttccttttgtgtagtgggaagcaactggctaactggtccactacttaaactggcttgttatttgtgtgggaaaaggaaaaggtcattcttaaccaagaaggaggctgttctttagatttcaagtccatgtgccaagaatctggggaaagagaaaacttctgtgcttgtgcctggatcccatcctcttctgtttctttagctacttcaccaattatccctttcttttcagaagtttcaacttaccttctattagcattggaggatgttcaatatttttccattggaaaaaggaaacccacatccctttggctacttccccataagccttctccttcacacaaaacaatttcttgaatgagttgttcacacttacgtttcctcaccttttacccactcatcaacccactgtgatttggcttttccctctgccctctactataattgcatctaccaccatcaaccaactatctcttacttgttaaattcagtggcttttagctgtgttttctctctccttaatttgtcaccacatttatctctgttgacaattttccccccgctagaaacttactctggctttcagaaacttctctggttgctggggtctgaatgtgtactcccttcccgcaaattcatatgttgaaacctaacctccaaggtgatggaattaagaggtatagcctttgggaggtgattaaataatgaggag

SEQ ID NO: 49475 - DNA, 1061 bp, Homo sapiens
agtaccttttggctaaagaccagacgaagattcccatcaagcgctcgggtaaagtcctaccaatcctccctctgccctgagctctgccctccattgcccttacaccattgtgctggggatatcccctgctcttatgcttatgtctctgtcctcccaaagttctgatttggcagtgctagcatctctgttgataagcacagaaccgggttatgccacccttggtgtggttggcaaagagtctatagcttgggcatcagggccacctggcatctcttcagtcaggtgctcacaacactctccccttgcagacatgctgaaggacatcatcaaagaatacactgatgtgtaccccgaaatcattgaacgagcaggctattccttggagaaggtgaaggggcagccctgggggatgggcacagtggggaagccttgaattgaacaaaaatgtacaagtcccttctcgggaaccaaagagacctgctaatccagctccatcgctatgctgaggggcagacagtggcctagggaggggtgtagattagcgatgggtcacacagcaagtcaatggtaaaagtgcagctaggacccaagacacccaacttaatcctggcttctgtccgtccatggcagctcctgccatgtatttgagatttcacctctccctttcattccccattctctgtctccctagagtcccactcaccacaaagatgatgatgacaatagtacatttgcagcgtgtttaccgggtgccaggcacttagctatgtactttgtgcgtattatctcactgatttctcacacatgcgaaactcctaggtacatagggagctgcagcatgccccggaagctgaattttgtcatctcacaagctgttctccccatccacaggtatttgggattcaattgaaggaaattgataagaatgaccacttgtacattcttctcagcaccttagagcccactgatgcaggcatactgggaacgtaagctgggaaagggctgaggtgtggggggcttctgctttggccatgtgctgctactcctcctttgtcctactt

SEQ ID NO: 49476 - DNA, 1159 bp, Homo sapiens
tgtaccaggttgacagccattcttccatcttcttggcaacctgaggaagggagaatatgattttcccattttactgaataatagaccaaggcttgcaaggtctaagtgccttgcccagggtggcatagagctggaagcagagactgggcagaattctgtatctgaggaatctgggagaggttagcctggtgagctggctggtgtatcttttgcggatggctgctgaaacataaaccttctttctgtcctgttgaaacataaaccttctttctgtcctgttattcccttaggaccaaggacacacccaagctgggtctcctcatggtgattctgagtgtcatttttatgaatggcaacaaggccagtgagggtgagtggctgggcatgcagctgaatgggcggccatggtctggattccatgtgttcaatttctgtccctgtctcctcttgcctcccctcacagctgtcatctgggaggtgctgcgcaagttggggctgcgccctgggtatgactgggctctctcagcgcttgctgtccgtgttgtcctttggcaagagaggatggtcctaggattgcatcagtctggtggtctggtggagcgggtggggtgctggactgggtagagggcccagggttctgacctgggtggatgacgggcaaatggtcctgaactctctgctgtctctctccttaatgtcctctgtctgttctaagctgagatgttagatagaccttcagggatccctgacaaagaggcatctggtcttaactgcttgcttctagtggccatgtgctcattactttcttcacttcattgagactgccccatgtgctagagaggtctcttccatgttgggaaatgcctctgccctcatctgggcagttctgatctgtgttcatgggttatttttcccattgtcagggtgaggcattcactctttggggaagtgaggaagctcatcacagacgagtttgtgaagcagaagtaagtggtgtttggggctttgtctggccctgaagtgttctgggtatactgatctggttcagaaagtgcttagtcagtgcctttcttatactagctttagagggatgggcatcctgtgtcctagaactgatactgtctaaaattcccatgggcagacctttccaggactgggc

SEQ ID NO: 49477 - DNA, 1131 bp, Homo sapiens
ggaagcctcaatatgggagagggcctgtctgagctcttgggcccaggaaaaagtatatgggccaggactgctgcacccctttctaacaatcccacattgtgtttttcagccatgtgatcattctgggtgacctgaatacagcccaccgccccattgaccactgggatgcagtcaacctggtaaggctccctctaggtgcctggccccactcctgactgattctgtttgtccagccaaccaaccctgagtttttggcccagggacagcttcctttatgggaaagcggagcttggcttgcaatactattcttatagtactgaggattggtcattcattcaatagacaatactgactctgcccatggcctggccctgagccacatactgaggactcaggagtcagatccagcccttggctcctaggagctctccagcatggtggtgggctacagacacatggctagccaattataggatggtattctcagggcagaggcacagatggcatcccagaaagctacaggagctcagagatgggattcctaggtgagctcggacatcaggacaggcagctgaaaatggctgaatcttaacagatgagtagaacagagctttgaagtagaaagcattctagcatgggcaaaggtttcaaggtgagaatttgcattgtgtgcatggggaaccacaagtccctttcttcttagtgacacaggaagggaggtgagtggcagaaggtggggctggagagttgttgggggtcagatttcaaggactgtgaattccacattgccttggtcatttccttaatacactgtatttcttgtttatgaactttcagtacctccctgttacctctgtgatgcagagaaaacatggagacctagcattcaaggctctccttggtctgtgacctgtctcttatttccaccttcagtgtccctacacattttgtcctctctagacaggttgtctcctgtcggcccgttgtaaaagttattctcattctggcttttctcactgtgccctgaattggtggacatgaccccctccctgtctttttgttatatgaacctcttatctctaagttcccctaggcccatggttttcagcccctaactgcatattagaacaa

SEQ ID NO: 49478 - DNA, 1049 bp, Homo sapiens
gaaggagttacggacctcattctggaagtctgtgctggcggggcccttgcgcacacccctctgtgggggccacagggagccatgtgtgatgcgtactgtgaagaagccaggacccaacttgggccgccgcttctacatgtgtgccaggccccggggtcctcccactgacccctcctcccggtgcaacttcttcctctggagcaggcccagctgaaccaatggaggcctggggacatctggcatggtcacccctgcacatgatctgaggccagctccccttccctgagctgcctcctgcttctccctcaaagtctcctacccttctcttcctcttttaagccctctcttcctcgctttccttcctacctagctccttgttggtgagcttcttgtgccttaatcctgtgacccagccccttacaccactttccaccttcctgtccgaagtacacggacactagctgccccaggaagttgtgtgattttaaatcacttctgtctttgctggaaagtgtatttgtgcataaataaagtctgtgtatttgtttcagggttgcactttggacattgtggaggtactccataaagttgagtcagagaagctatctcaatacttggtttgccggctggctgtagcccaatgatgtaattcccagagaaaggggaggagggaggggggaggagggaatagtgaggcgtgagcagcagtgctcaccataaagggttctctgctcagttgtaggaatttcctgtacggctaaggtgaaatcagcaaggaaggtgggctgtgtagccttaaaccagagctttccagctagtgcgtcccacagctgccacagtgggttacagggttgaaagaaacggtcctcagccctcagagttgccaggcagggcctgggaccacacaagtttcagggacgattgcctccttagcaagtagtatcattagtacccctaagtgtgccatggaaatgtttcctgtatactgtgacctggaaagtgggagcattgctttgaacacagtgcttgctctagccaagcctcttctc

SEQ ID NO: 49479 - DNA, 1048 bp, Homo sapiens
gctatcagatttaatttttctaatatgaaaatccgactgagtcatctacatacttaagaacctttagtaacttctttaagcccatggaataaaatccaaatgatttcatggccctttaaaatctgttcctgaccaaaccctgtgccacacttatgcaccctatcacagccctacagaatttattgttctccagatttacaaattaatttgcactttgtgtaagccatatacacacaccatacaggcctctgtctgcacatttatttttaacctaactcaagtgttaccactataaggtcttattgagttcttcagatagaattggacacaccttcctttgtgctctcatagtactgtgccctacgttggggtttaggcagaattgctaagagtgcagctcaagctaatttcttaaccttttggggcttcagtttcctcatttgtaaaatggtagtaataatattaactgtatcgtaagattgttgtgacgtttaaattagtaaatgcctgtagaacacttagatcagtacctaacatgattagccttggtaagtctttcataggcaattgaaagaggtacactgtataaattaataaccgaaggaaatgtaccatatttagccttagcttcatctaataattcagttctgtaactacagtttgctaagagaatgttcttgatgagcctgtctgaagttgctttcattgagaatgcctaaaagtacagaaatttctacatgattaagaacaaaaattagcttgatttaatcattctgcattgtatacatatatcaaacattgcattgtacctcctaaatataaagagttattgtttttcaattaaaattttaaagtacaaaagcaaactttttgtagcaactttagactggctcagcagtggcatttccttagtgagataaagttatatagctacatttttagattaaatcaagtctgagtgtagtatattttcatcaatacttcttatattagtaattagaaatttgtataaaatatcttgggattgaaggtagaacataggttccct

SEQ ID NO: 49480 - DNA, 1564 bp, Homo sapiens
atatgtaatggttcccccgggattcagaaagctgtagtggatcagaccagcagcagaccaacaaacagtgactatgactttttttgtgcaagtttggctttgggaagtactttagagttcttcttagtccatcctctgagccagttgtcaccagttgtcatataaaatccactttttggtgcacatcccaatccaattgagagatcatttgttgttgcataggataagagaagacaacacttcaaaatgattttttttttttttttttgctcagctcgtgagcaaaccttttgagctttttcacctttccaatttgcttcaaatgctgaacaactgtagaatggtcgacgttgatttctttggcaacttctcatgtagttgtaagaggatcagctttgatgattgctctcaattgatcattgtcagcttctgatggctagccactatgctcttcatcttgaagtcttgtgtctcctttgcaaaacatcttgaaacaccactgcaccatacgttcgttagcagttcctgagccaaatgcgttgttgatgttgtgagttgtctccactgctttacgacccattttgaactcgaataagaaaatcgctcaaatttgctttttgtctaacatcatttccatattctaaaataaatataaaataaacagcaagtaataagtcattagcaaaaaaacataaagcgagaaatggacattaaaatgatgtctaacataaccacatttacttaagaatgtattccaaaatcaaatggcaaattgcaacaatacaaaaaccgcacctagttattttcttctatgtgtgtatcttagggttctccagggaagcagaactaactaatcatgtgtgtgtgtatgtgcgcgtgcatagaaagacaggaagagacacacacacgcagagagaggggtatttattttaaggcctccaactgattaaataagactcacttatattatagagggtaatctttacccagagtctcctggtttaaatgttaatctcatctgaaaactaccttcacagtgatatctggactgctgtttgactaaatgtcaggatactgtggcctagtcaagttaacacataaaactaaatattacagtcataccccttgtcaacttggcactcatacacatctactgaaaccatacctaatcttcaaataaaaacaataacaaggtcatacttccatttaacatgatacagtaatcctgcgtacaaccaaaaatgcaataatcattttcccagaagaggatgtaaagttattgactgtttactcttcttttacattataatgtaaagttaacaatacttaaatattatgatatatcatatgatatgttcatgataagggattaaaagggaaaaaacagacatttactttatatacatatatacatattcataacaaaatcaagatgaagtactcatgacaattgcaattctcatttgtataactggtcacgtgatttttaactggtctttataactgccttattcagttccagattacctttgcccacagcactcacctcagcttgttgtatatt

SEQ ID NO: 49481 - DNA, 1047 bp, Homo sapiens
aggtatatgttaaatatagcataattaggttctgatctttagagaaatctacactgttggacttaaatatttgtgactagattaggagctttttaacaaagtagatcatatttttcaacttttttcctaaggcaacatgatggcattaaatatttgtttgctttcaattatcaatggaaagaagtttctccagcattttacaaaagtgtttgaacttaaaaaaaattcaactcaagggtaaaaatcagatgctagcttcattttctcatttcatttgtgttatatcatatttaatgtcagtatttgtttgggactggattatcatcatattttgctgtccacatattatagtgtacttactaatttcaaaggtctgggactgactagctgttaataatagtacactgtgtttctgttctgttaggcttggtccagcatagtttatcagctgattcccaatgttcagcagctggaaatgaacctaaggaattttgctgaaattatcgaagctgatgaagtacttctttttgagagagctacttttctggtaagaactttctgctttgcagatgtacttcacactgtacgttctttgttttcagcaacagagaacagcatgtcactactttcaggaagaacctttttccctcttgtcaactttagcatgtacagacttatttataaaatagtattgtcagcaagtgacctgaaagaagccctttggtgtgtagctctttggaagttagtgaaacttagatttttccaggtatgtattattagagagttcagattgttggctgggcatgggggctcacgcctgtaatcccagcactttgggaggccgaggcgggtggatcacctgaggtcgggagttagagaccagcctgaccaacatggagaaaccccgtctctaccaaaaaatacaaaattagccaggtgtggtgacgcatgcctataatcccagctacttgggaggctgaggcaggagaatcgcttgaactcgggaggcggaggttggggtgagctgagatcatgccattgcactcc

SEQ ID NO: 49482 - DNA, 1060 bp, Homo sapiens
tagaccatatgtactgactgatagcagctggggaaactctggtagtaatccatgcctgaagtatatttaaagtctattcaggatgcaactggagaaggaatgcataaaaagtggagggaaaataggatttatgaggtccaggagtggttaattaggtgtaattccataacacctaatgagatgcaccttcattattctatcaagcagtattaaaacctttttcaagctggcagttgtctttaattttgtcctctaaggaaaaaatgaagcactgtgaactgtgagaaacggagtttgataacacaaagccctaacattttcagtttccatttgcaggaaaagagaagacagaaccatttagggaatctatagcacagtagacagtagactcatctcatttcttcttctgcatgtcattaaggaacttcttctaaaccactggtctctcaccttttctcatcttagtttaatagtcctagttgagggataagtagagttttcactgagcagcaaaaaacatgtttttttgctacgtgacctatgttatgtagactaaaactctcaacttgtaaaacaattttatgggaatatttctatcaacagctgtgttaatcttctgcagaaggagagatttaagtgttccagagtctttatcctattagcatctaggaaaatgaaaagagttcaggaaggtgaagagtcattgaacaggggtgtattctgtgactagtaatgagtcattatttggcatgttattattttcaatatctggggtgggatttagaagtgggattcacttctaaatcagacattcacactacttgaatgtgttctttataaggtggatagatattgatacatatagagacattaaattagatgagcccagaaaaatcataaggttatgtctttatcctatttgcccttagttcattcagtccttgctcagattatagttataacttggacatagatgttttgaaaggttagacaaatgaggttctgattagacttaatccttcttatggtgatggccagatagctgtctttgtcactgaag

SEQ ID NO: 49483 - DNA, 1979 bp, Homo sapiens
tgcctccatgacttaaaaaagtgaaattaggcaaacctggccagagaataagtaataccagacatattctcagactactttgtgaagcatggggcatgctgaacctgtaggtagaaactgaacctattcatttagaagagccatttgttgcctaatcttgttcttatgcagtttgtcattctcagttttggttctgtcctggtttttgtgttctgtcagatagtcagcttcaaaaaattatgtccaaaatcagaacaaaaaatgacacatggaagttgtcgaggcagggccctaggaatgcataaacatttgactgtgtgaggattggagggttactaaaagcaaggattatatggtttactcatggataacctcagcaaagtgactagaaaaactggaggcactttcgaagtacaggcggaaggcagagaatggactgagtacctgttagaaacagctgttgcaatggacagcagtcaggaaagggctggggccaggaaatgtgttgtgatagactgactctttatgtcttttggagtagatcatggcttactcttttttaaaaaaaagcaccaggatctctctatgttaacattactttgcatttcaaggcttccaactgatcttacagataagtagtcacctgttctgatctgggccttcttttggttctgtgctatccctttgggtttgctcagacagagggaggtgcttatggtcccagctcttggagattgtgcagtcctggacattctgaccaagtgctttgtgctttgtgaacccagaaaatctgagacaggtgtcaattaatttagaaagtttattttgccaaggttgaggatgcacccatgacacagcctcaggtagtcctgaggcatgtgcccaaggtggttgggacacagcttggttttctacattttagagagacatgagacattaatcaatatatgtaagaagtacattaatttggtctggaaaggcgggacatcttgaagcaacggtagaaagactggaagctgggagggtgcttccagatcacaggtgagacacaaatggttgcattcttttgagtttctgattagcctttccaaagaaggcaatcagatatgcatctatctcagtgagcagaggagtgactttggatagaatgggaggcaggtttgccctaagcagtttccagcttgaattttccttagtgatttggggggtgcaagatatatatcctttcacagcttccactgaagattgtcctttaagtcctttcagcatgaatggagaaaccttgcagccattcaagggacaggtaagtatcacctgagaacctaagaaaatgcatttctgtgtcagttcccaagctcaatgtgccatatggagggccaaggcatcatggtttcaaataccaacattgctacttatatgctgtgggattctgcctaaatctttagatctctctgcagttcagtaaaacacttttctataatatgtgaatatttttttctggatccctaatgaccatgttccactctcttttagatacttttcagtgtgtctggcaaggtatatagggatcaatatttggtgtgtatgtgtgtatctgcatgtaagagaggtctataatccctttagcaaatgcacacaaacacacacatacacacatgtttgtaataattgcatagtaattatagaattactatagtatgtttagtaatatcctgaggcaaagtgttttaaaaggctgtcatctaattgaccaaggaagtgacttcctctattccattcccactgtcttggaacaagggaccagcttctcactgccaaacaggaagatctagaaaagcaactggagtgtgggctgagagggtggtgatcagtcaagagtcagtgtgattgccacgtaacacttctcattccagacacaaattttatggattatgcgttatgtgtggagaatggtgatctggcctcagcctcactcccct

SEQ ID NO: 49484 - DNA, 1028 bp, Homo sapiens
atttaaaagcagacattacaattcatttcacagaaatccaaagaaacattacaggctaatataaacaattatacaccaataaattgtaaaatctataaaaaattgataaattcttagaaacatacaacgtatctacattgagaaaattcaaaacctgaacagaccagtaataagtaatgagatcaaagctgcatttaaaagtctccccacaaagaaaatctgatgactcaatgactgtgctgctgaattgtaccaaacatttaaagaagcactcatattatttctactgaaactattccagaaaataaaggatggaatactttcaaactcattctatgaggccagtattactctcatatcaaagccagacaaaaacacattaaaaaaactccaagtcaatttctctgatgaacattgaattgaaaatcctcaacaacattaactagcaaaccaaattcagtaatacgttaaaaagatcattcatcatgattaagtggatttattccaaggggtcaagactgttttaacatgtataaatcaatcaatgtgatacactatagcaaaagaatgaaggacaaaaaccatatgatcatctcaattgatgctgaaaaaaaaatttgataaaattcaacatcccttcattataaaaaccctcaacaaaatctgggtatagaacaaacagaccacaatgtaataaaagtcaaatacaacagattcacaaccagtatcataataagtagggaaaaaccaaaacctttaagatcagaaacacacggatacctgttttcaccactgttattcaacgtagtactgcaagtcctagctagagcagtcaggctggagaaatacagggcatccaaattggaaaggaagatgtcaaactgtttttgtttgcagatgatatgatcttatatttggaaaaacctaaagacaccacgaaaaaactattacaatgggtaaattcagcaaagttgtaagagatcaaatcaacatgcaatcatcagtaggacttctatatgccactagca

SEQ ID NO: 49485 - DNA, 1046 bp, Homo sapiens
tagtgtcagatgatcggttgtatttccctggtattagttgtaatgtttttatttttatttttgattataattatttgaatattctcttttttgtgaatctagctagttgcatataaattttgtttatcttttcaaagaagcaactattcattttactttttttttgtattgttctatctcaattgacaccttactttaaaaaaagacattgtttcctttgcatgtatgtatcagtcagtttctttggttgcaagccactgaaaccagctctgtctcacttaagcagatgaggaatttgtgaaaagggcagagtaattgctagaattgcttggaagcttagtgaaacagacagagtaaataggcaagaacaaagcaccacagccatatttacactagaggagccatctgatatatgggccttattgttgctatcactgatactggaatgctgcagtgggcactgatgctatctctggaaatggccaccgctattgggatcatcgaaactgctgtgcttagaaatcaggtgttgttgattccaacacctgtacaatgtgtacttttttcttgttgcttctctgcatactttcttccagaatcaaatgtccaggacatcacaatcatgtgatgagctgagttcaaatcatgtattcatcatgccttagcagcctaatggtgggaaaaagagaatatctgcatctgcacccattctttcctttttccatcttgttaatgatggaggacgaggccctctttctttctgtggccaatccttggactatgctttagaccctactcactggttctttcctggaaactttattatttctcccttttgcatcttcaatttctctatctgtatgtaatgttttctatcagtaaacaagctatactttcttccatcttaaaaataaaatcagtcttctttcccgtgggtaaacaagtaaatctatatattctcctcaaccagatttctcaaaagacttatatgcattcactgggtacattgcctcagttcccacttgctcttcaacctcatagtcatg

SEQ ID NO: 49486 - DNA, 1024 bp, Homo sapiens
atgagacaaacaaagacacaaacaggatgaaaaagctgtattttgaatatcatggccaaagtggctgtgctaacatcagaccaaacagaatttttgacaaaattgttcctagatgtaaataagggcattttataatgataaatgggtcaatgaatcaagatgatatgataaatataccttcacctaaactgaacccccaaatacaaagcttgttatatacactggtattcatactttttttttttaacacaaacactcctttgattgttgcaagagtttaatttttagagttctaaaaatgttgattttgagaattattaccagcattcttattgcttttatggaagaaaatatttttgcaggtctttactcccccttttcaaaaatctcaactcttagcagacttttcaatggatgtaaagaatgtcattctatcaacatgctctgatgcatttattcagtaatctactgatggacatttatttaggttgtttctagtattttgctagcacaaacagaactccagtgatatttttccacatataattttatacaactgtatgagaatagtcatacaagtagaattatttagatcagaggatatatacattttaatatttgatagatatatattagttttctctaaggaagctgtaacaaattacatgcccaccaatttatgagattgaatgtttccacacatttaattttttaaaaaatttattttacaacactgcgtactgacaatatttttaatctttatcaatctgatggtgaacaaaatgtctttttaatttctttttttttttttttggagttagagtctctctgtcatccaggctggagtgcagtagcgcgatcttggctcactgcaacctctgcctcccgagttcaagctattctcttgcctcagcttccgaaatagctggaattacaggctcgcaccaccacactggactaatttttgtattttttgtagagacagggttttgccatgttggccagcctggtctggaactcctgg

SEQ ID NO: 49487 - DNA, 1026 bp, Homo sapiens
cgatccagcaagatgtggtagtagggagggagctaatgccaggggcaaacccagcaggatgacttcaccctcaagacagctttcctcatttgcttttgtcctctgtttcaggtacgtgatatcatacatactttctctactcgtgtgggaggggaggggcagggggcatatacacaacttggaaacaaaacctgttggttcattaaaggggacttttgcatcaagttgagatctccatgctagttgagaaactaggatcaggagacacctgtatttgggtgtggacaagcttgccctctgagagaggacagcctgctccaaattatgttaatctgcagtgtcaaaataggaccaaattgactaattcctgttagggccaagcctagtgatcagggttgagatgtcaggaaagccatttggcctgtgtcttataattcaaaaagggattcaaattcagacttttgacactatcctaaatgaactgataactctagccacaaagccagactgacctgatgtaaatgtttgtcatacagcttaatttagtatatgtaaagaaattaaattatttggcaaatttgatattcctaattgagtattattaaaaaaatatactgaggccaggcacaggggctcgctcatgcctgtaatctcagtactttgggaggccaaggtgggcagatcacgtgaggtcaggagtttgagaccagcttggccaatgtggtgaaaccccatctctactaaaaatacaaaaaaaattaaccaggcgtggtgttgcacgcctgtaattccagctactcagaaggctgaggcacgagaatcacttgcacccatgaggcagagattgcagtgagctgagatcacaccattgcactccagcctgggtgacagaatgagacaatgcctcatagaattaaggacctattctcatgccaccattttcccagaattctgttagaagacttaggggaaaagcagttttctgtaaatagaaaggagaagcatgattcagcagatatcagactg

SEQ ID NO: 49488 - DNA, 1008 bp, Homo sapiens
actcagctctgatccaagcggacctaacagacatcaacagaactctccaccccaaatcaacagaatatacatttttttcagcagcatacgacacttattccaaaattgaccacatagttggaagtaaagctctcctcagcaaatgtaaaagatcagaaattataacaaactgtctctcagacgacagtgcaatcaaactagaactcaggaataagaaactcactcaaaacagctcacctacatggaaactgaacaacctgctcctgaatgactactgggtacataacgaaatgaagtcagaaataaagatgatctttcaaaccaatgagaacaaagacacaacataccagaatcgctgggacacattcaaagcagtgtgtagagggaaacttatagcactaaatgcccacaagagaaagcaggaaagatccaaaattgacaccctaacatcacaattaaaagaactagaaaagcgagagcaaacacactcaaaagctagcagaaggcaagaaataactaaaatcagagcagaactgaaggaaagaggacaaaaaacctttcaaaaaattaatgaatccagtagccggttttttgaaaggatcaacaaaattgatagaccgctatcaagacaaataaggaagaaaagagagaagaatcaaatagatgcaataaaaaatgattaaggggatatcaccatcgatcccacagaaatacaaactaccatcagagaatactacaaacacctctacacaaataaactagaaaatctagaagaaatggataaattccttgacacatacaccttcccaagactaaaccaggaagaagttgaatctctgaatagaccaataacaggttctgaaattgtggcaataatcaatatcttaccaaccaaaaagagtccaggaccagagggattcacagccaaattctaccagaggtacaaggaggaactggtaccattccttctcaaactattccaatcaatagaaaaagagggaatcctcc

SEQ ID NO: 49489 - DNA, 1035 bp, Homo sapiens
tattagtttatattctacatcaaggtagagctttttctccatttatttgtttattaattactttggacacatagatttttactttattttaaaaataccctattgttattatttattttaatacccaaattgtctcagatttagtgactggctgcccattcaagttggctcccctgtcttttgacatgtgtcatcattcttaaacacactttttacttactttaaaatttttttacttccttactttcaagcttgtcttgtacttcctaccccattaatcatttctctatagacctctgttatcttttatggagacagtatttagaaactaagtcattgtatatagctgttttttagcttaacattttgtcattgttttccatttaaaagacaatattgcttatgtgataatgattatttagtgtttgttgaaacttgctttatgtcctagagaacatgatcaactagtgttttatgtgtgcctggaaagattgtgtatctaatttttgcgtgtagtgttctgttcattaaatttaactgtgttgtttaaatcttctctattcctaagttttttgtttgctggacctatcagttaccaagagagttaaaatctcccactgtatttgtgtatttgtcaaattcttacacttttgacaatttttgctttgtatacttgaggcattgttagtatgtacatacaagtctagaatagatacatattttacaattttaggaactctttttatctttttgaatgtaaattttttttgtttgctgggtctttttaattttgtaaaatctttctgggtacctagtagttgtatacatttatggggtatatgagatgttttgatacatgcaaagtgtaataatcacatcatgtacaatggggtatccatcatttcaagcatttatcctttgtgttacagacaatttaattatacagttatattattattgactatagtcaccctgctgtcctatcaaataataggtcttattcattctttttgtatacccgttaaccatccccac

SEQ ID NO: 49490 - DNA, 1056 bp, Homo sapiens
gattatggactccagctccatccatattgctgcagaggacataatttcattgttttctgtggctgcatagtattccatggtgtacatgaaacacattttcttcatccagtctaccactaatgggcacctaggttgatttaatgtctttgctattgtgaatagtacagtagtgaacatacgagtgcttgtgtctttttggtataatgatctatttattatcagttatgtatacagtaatgggattgctggatcaattggtagctctgttttaaaaatttctttgagaaatctaaactgctttccacagtggctgaactaatttacattcacaccagcaatgtatacgtgttcccattgctccacagcctcaccagtagctattgttttttgactttttatagtagccatcctgattggtgtgagattttttttattgtggttttgatttgcacttcacaagactgtactcttttgtcagataggtttttatttgaagccttatcagtaccttagaactctgctgcaccctaatgatatctgtgaggaaagagatattgaaacagctcttgaggggatgctccaagaggaaggcaagacttcaacaactctttttatttttattttatttatttatttttttgagatggagtctcactctgttgcccactctggagtgcagtggcaagatctcagctcactgcaacctccacctcccaggttcaagtgattctcctgcctcagcctccgagtagctgggattacaggtgcacaccactatgcccagataatctcttgtatttttagtagagacgggggtttcaccatgatggccaagctggtttcgaactcctgacctcaagtgatccacctgcctcggcctcccaaagtgctaggattacaggcatgagccaccgtacccagccagcaactattgaatcataaaaatcagaaagcctatgattatttggatgggtgtcctcacagtgaaatagaatgtttatctaatgtgttatctacttgaaggcaaaatgaaatatccagaaatttgaagagact

SEQ ID NO: 49491 - DNA, 1032 bp, Homo sapiens
gaaaatgaggattcctgaaacctaagggaagaaactatctcaagaaagagggtgtggttaacagtgtcaaatatttttataagagaaggatttaaaagcatccattggtgatggggacagaagggaaggaaaaaaaaacattgagtctatcaaaggaggtcctgtattagtgactttggtaagagaagatttattggcatagaagggacagaaaaaagattgtagtggattgaagagtgcatggaggagtgtgaggaagtgggtgaagatagggaagacattgcttccaggaatttgagctgtgatgagtagcaaaaggggaagaaagttataataggaggggaacaaggttaaaggaaccatcttttaagatggaaaagacttaaacttgtttaaatgtcagtaggaaagatcaaataaagaggaatagctgaagagagaggaaaaagtgagtataatgaatagttcgaaggaagtgagattatatgggatccagagcagaggtggaagagtatgccttaggagaggaggagaattgaagggagaaataaacagttccacaataatagttggagacttaaataccttactttcaataatggataagacatgtaaacagaagatcaataaagcgatagtgaacttgaacagcactgtaaaccagtagatctaacagactgtaaagacctaacagcactgtcccatagacctaacaggcatgtatagaacacttcatctaacaacaggaatatacacatttttctcaagtgccatggaacattctccaggataggccatatattaggccacaaaacaagcttcaataaatttaaaaagatgaaagtcatacaatatcttctacaatgacaatggaaggaatctaaaaatcaataacagaggaaaactggaaaatcatataacatttttaataaatggttcaaagaagaaatcttaagggaaattagacaaaattgtgaaataaatgaaaatgaaaacatgccagaacttaagggacacagtaagatcagtgct

SEQ ID NO: 49492 - DNA, 1062 bp, Homo sapiens
tctcgaaaaaaaaaaaaaaaaagaaagaaaaaaagaaaggcagccaggtccaacaggcatctgcacattgttgacccatccagcagaacagggtcgagaaaggcatctgtcgggatggggcaggacaggacgagacagactattgtctgaggcatttggctacctctctgactggaacccaggcactcatatgtgcccaggaatgggtgggatattccggatgggttccacaggtggctctcctagagagacccacttggcatatttgatgatggagcatgcaggctccctggaacgtgatggctcactagttagtacccccggcatcttggtcattctgctgaagtgcatgggtagccaggcccccggcagtgctcagtttctcctgggcccctctgtgttcctgtggtgggtgtggaagtggaggttgaggctagagtgtctttgagggtggtggggcagctgtgccttgatttgatacagagctctctgggctcctcaagctaaactctggtgcttgccagatactcagctcagataatgaatgagacggtggaggacaaattattttgcccctttagggtctccaggcagacatgcaaaagcctggtgcagggccttcatacagagcccatgttgggtgcaaagccatgaccccgttgctctaaaggttgcatgtcctacccataccgcttggtacctggagagcagcatggaacacaatgctctcagaatattgaaaaggttttctgtgtctccactgagggatactcctgcctcaggccctgtggctgcctattgagccatcagcccattctggtgacctgcatgtgccaggacaatgtggtaatctcaaccaggagctccaggtttacataggcccccagtccttgggtaaatccttgtgtaagccagctgggtggctcccactttctcctggaatggcagccctatgatcccagtccacctgtggtgtcccagtggccatgattatgtgtcctttgtcattactttctgcactagaagcagccacaaaacctggagagggccaaaggaagggca

SEQ ID NO: 49493 - DNA, 1029 bp, Homo sapiens
ggttttgtcttgggagaaggtacatgtccaggaacttatccatttcttcaagattttctagtttatttgcatagaagtatttatagtattctctgatggtagtttgtatttctgtgggatcagtggtgatatcccctttatcattttttatcacatctatttgattcttctctcttttcttctttattaggctggctagaggtctatctattttgttgatcttttcaaaaaacgagctcctggattcattgatttttttgatgggtttttcttgtctctgtattcttcagttctgatttgatcctagttatttcttgccttctgctagattttgaatttgtttgcttctgcttctctatttcttttaaatgtgatattaggttgttgattttagatctctcctgctttctcttgtgggcatttagtgctataagtttccctctccacactgctttaaacgcatccctgagattctggtacgttgtgtctttgttctcattcattcaaggaacatatttatttctgcctttatttcgttatttacgcagtagtcattcagatgcaggctgttcagttttcatgtagctgtgcggttttgagtgagattcttaatcctgagttgtaatttgattgcactgtggtcttagagactgttataatttccgttcttttgcatttgctgaggagtgttttacttccaattatttggtcagttttagaataagtgcaatgtgctgctgagaagaatgtatattttgttgatttggggtggagagttctgtagatgtctattaggttcacttggtccagagctgagttcaagtcctggatatccttgttaattttctttctcgttgatctatctaatattgacagtggggtgttaaagtctcccactgtttttgtgtgggaatgtaagtctctttgtaggtctctaagaacttgctttatgaatctgtgtgctcctgtattgagtgcatatatattgaggatagttagctcttcttgttgcattgatttatttaccat

SEQ ID NO: 49494 - DNA, 1047 bp, Homo sapiens
agggagactccgtgggcgtaggaccctctgagccaggtgcgagatataatctcgtggtgcgccgttttttaagcccgtcagaaaagcacagtattcaggtgggagtgacccgattttccaggtgctgtccatcacccctttctttgacttggaaagggaactccctgaccccttgcacttctcaagtgaggcaatgcctcgccctgcttcggctcgcacacgatgcgtgcacccactgacctgcgcccactgtctggcactacctagtgagatgaacccggtacctcagatggaaatgcagaaatcacccgtcttctgcgttgctcacgctgggagctgtagaccagagctgtttctattcggccatcttggctcctcccttaatatgaatttcttaaccgatgtatggtcaaattaacaaatggaaaacaaaacaaatgctgtggaattctgatgatttcctggtaaatattaggtataataactatctgagcctgaaacttgtaggcaataggggctcaaaggacggtaatggcaagatgtgattgtcaatttaaggctaaataaggccagaagaaaacagaatctgaacaatatacctgactttaaaatctttaggatttggagaaggcacaaggttggatcagtaaaaacagttgggaaaaatagtccctcagtgatcagtgttttagggacatactgtgggtactgcatagtttctagatgtcatggtatgaggagataaactttgtaagacaacattaaagtccttcctgtaggtgcccaatgggcctattataaaattctttctgcatcaccttaattcccaaaaaaggtacatagattaggactccagattccaggtggagacagtgaccctcaacaaaatgcattcataaagctgttttagtagagaagatctctgtgggtttataagtacaatacgaactttgatgtgagggacatttaatgtgctagtatagccctggtagtcaccattatgggatgagaccatttaaaattgtgaatatgaaatgataagtgtaa

SEQ ID NO: 49495 - DNA, 1050 bp, Homo sapiens
agactgctagctggactcataaaaaggaagcagagaagattcaaatgaactaaattagaaatgactaaagaagtattaccaataaacactcagaaatattatggttatacaaataacaatcatattattatgaacacctctatgcacacaactaaaaaatcaagaagaaatggaagaattcctggacacatgcaatctcccaaggcaaaagcagaaataaattgaatccatgaacagaacaataaagagctccaaaattgaatcagtaataaatagcctgccaaccaaacaacaacaacaacaacagaaagcccaggatcagaagaatgcacagctgaattccaccagaggtaaaaagaagagctggtaccatttctactgaaaatcttccaaaatattaataaggaaggtctcctccccactgcattctatgaggccagcattatcctgacatcaaaacctagcagaaatacaataacaacaaaagagacaacttcaggccaatatccttcatgaacatcgttgcaaaaatcctgaataaaacaccgataaactaaatcctgcaacacatcaaaaaaatgaatctgccatgatcaagtcagctttttcaagattgcttcaacatatgcaagtcaataaacatgatttatcttataaacagaactaaagacaaaaaccagataatcatctcaatagatacagaaaaggtttttgataaaatttaatatccttcatgttaaaagctctcaacaaactagattttgaaggaacatacctcaaaataatgagagtcacgtatgaaaaactcactaccaacatcatactgaatggggaaaagctagaagcgttcaccttgaaaacccaaatatattggaagtcctggccagagcaatcaggcaagagaaagaaataaacagcatcaaaataagagaaaaggaagtgaaagtatttctgtttgcagaccacatgattctatatctagaaaaccctgtattccctgcccaaaagtttcataattgaaaacaacttcaacaaagctttagaatttga

SEQ ID NO: 49496 - DNA, 1049 bp, Homo sapiens
agtatctgggctggatagtgcagttcctcatggcttcctttggctgggaaagggaagcccctccacccgctccttgcactcccgggtgaggtaattctccaccctgcttctgctcaccctccttgggatgcatccattgcctaacctctctgaatgagataaacagtatacctttgttgggaatgcagaaatcacccaccttctatgttggtctcgctgggagctgcagacccgagctgttaatgttcggccatcctgcaatatcccccccacattttctttatacattcatttattgatggatatttaggttgcttccacattttggctgttgtgaacaatgctgcagtaaacatgggaatgcagatatctttttagtatactgatgtcctttctttggggatataaacccagccatgagattactggtttgtatggtaacctatttttagtattttaagaaatctccaaactgttctccatagtggttttactggtttacattcctatcaacagtgtatgagttctctcttctctccacattctcaccagcatttgttattgcctgtcttttgtatataagccattttaagtggagtgagatagtatctcattgtagttttgacttgcatttctctgaagattaatgatgcttgacatcttttcatatgcctgtttgccatttgtgtgtcttcttttgagaaatgtctattcaaatattttgctcatttaaaaattatattattatattctttcctatatgattgtttgagctccttatatattgtgattattaatcccttgtcagatgtgtaatttgcaaatattttccaccactctcagggttgtctcttcaattttttattttttttcgctgctgtgcagaagctttttaacttgatgtgatcccatttgtccatttttgttctggttggctatgcttgtagggtattacacaaatattttcatgcagaccaatgtcctggagaatttccccaaagttttcttctagtagttttatagtttgaggtctcattgaagtctttagt

SEQ ID NO: 49497 - DNA, 1053 bp, Homo sapiens
gttttccaagctttcagagttgttttcttcctcaggaataccgattattcttaggtttggttgtttaacataatccaaaacttcttggaggctttgtttatattttcttattcttttttctttgtctttgttggattgggttaattcaaagactttgtcttcaagctctgaatttctttcttctacttgttcaattctattgctgagactttccagagcatcacacatttctaaaagtgtgtccaatgtttcctgaatttttaattttttttttctttaagctatctatttcattggatatttctcccttcactttttgtattattttttggacttacttgcattgggctttgccttactttgatctctccctgattagcttaataactgacctcctgctttctttttcaggtaaatcagagatttcttcttggtttggatccattgctggtgaactcgggtcggggggtgttgaggagccttgttttgtcatattaccagggttggttttctgcttccttctcatttgggtagactctgtcagagggaaggtctagggctgaaggctgttgttcatattatattttcccacaggctgttccctttatgtagtactctcccccttttcgtgtggatgtggcttcctgtgaactgaactgcagtgattgttgtctctcttctgggtctagccacccagtgagtctacctggctctgggctggtactgggggttatctgcacagagtcctgtgatattaactgtctatgggtctctcagtcatggataccagtgcctgttccagtggaggtgacacaaggggcaatggactccatgggggtcctcagttttggtggtataatggcctatttttgtgctggttggcctcctaccaggaggtggcactttccagaaaacatcagctgtagtagtgtggagagggactggtggtggatagggccctacaactcccaaggttatatgtcctttgtctcctgccaccagggtgggtagggaaggaccattgggtgggggcagggccgtgtctgagctcag

SEQ ID NO: 49498 - DNA, 1045 bp, Homo sapiens
gatgtacaaattgttcacccaactattgagtatagtacctgatatgcatttttttaatcctcatcctccttccacccctcaccctcacgtaaactatggtgtctattgtttccttttttgtgtacacgtgtattcaatatttagttcccatttatatgcagtgttaggttttctgtttctgtgttaatttgtttaagataataacctccagttgtatccatttcactgaaaataaggttatttcattttctaaaaaaattacttccaaccatggtgatgggattattttgtttttctttatgcctgcatagtattccatggtgtataagtacaacattttctttatctagtacaccattgataggcatttaggttgattccatgtctttgctattgcaaatagtgctctattttttggaatagtttcagtggcaatggtaccaggtcttctttatattttggtagaattcggatgtgaatccatctgcaggaaagtctggtccagggctctttctggttggtaggtttttcattattgatttattactgatgttcattattgatcatatttctcatttgtttatgaagattagtttggccggatataaaattcttggttgaaattatctttaagaatgatgaatatgggctccaatctcttctgacttgtacagattctcctgaagaatttgcaagtttcttgatggggttttcttttgtgagcaacctgtcccttctctgcagctcttttatatatatatatatttcattgaccttggggaatctgatttctatgtgtcttggaaatggtcatcttgcaggggttctttgtattttctcaatttgaatgtgaacttttctagtatgcttcagaaaattttcatagacaatatgcttaaatatgttttccaagttgctttttgtctctgtgtctctttcaggaatgccaattctttgtaggtctggtctctacataattctatatttcttggaggtattgtttattttaaaaagaattaaaatttctttctgatagagttgattt

SEQ ID NO: 49499 - DNA, 1096 bp, Homo sapiens
atatatttgaaacaaaaatggaaatgcaatgtagtaaaacttgttggttacagcaaaaggagtgttaagagagaagtatatggtaataaaggcttacgtccaaaaaaagtacaaagattacaaagtaacaatttaatgatgcatattaagcaactagaaaagcctgaactaatcaagattacatttagcagaagaaaagaaatagcaaatattaaaacagagctaaatgaagttgaggctaaaaacataatacaaagaatcaatgaaatttgaagttggacagataaagaaaattgatcaactgtgagctaagctaacaaaaaaggaagaagacccaaataaacactgaaatgacaaaggaaacattgaaatttataccacagatataaaaaaagattattggagactattatgaaaactgtatgcttagaatctagaaaacctatcagaaacagatacatttctggaaacataaaatctattgagattgattcaggaagaaatagaaaatctgagcagacaacgaatgagtaatgagcctgaggctgctatagagtctcaaaacaaaaacaagccaagaatggattattcacagctgaattctaccaaataaataaagaactataccaatcatactgatattattccaaaaacttgaaaaggagtgaattaattccaacttcatcaaggccaggatcactctgataccaaaacaaaataaggaagcaaatatatgtgtgtgtgtatatatatatatatacatatatatatgtgtatatatatatatatacacatatatatatgtgtatatatatgcacatatatatatatgtgtatatatatgcacatatatatatatgtgtatatatatgcacatatatatacacatatatatatatgccaatatttttaatatagctagacacaaatatcttcaacaaaatactagcaaagttgaatctaacaacatgtcaaatagaccacatactatgattaagtgggtgttataccagggatgtaaaaatggttcgacataggcaaataagtaaatgtgatatatcacatcaacagaatcaagaacaaaaaccttgttatc

SEQ ID NO: 49500 - DNA, 1029 bp, Homo sapiens
agttattaagcttcagttttctagcttttaactgattataacaatgcacacacatacctgacacactgttaaattttcttctcttcctgtttcttatgttaaggaaagatactctgtgttttggcatatgttggtgaatttgtaccatttttatcctctcagtccttccttttataagacaataattggagtagtttaatcttattcatgtgcagataaaagaggtttatgaagtttagggtgaagtaggcaagggaatctgtttactccctcttccctctactgaataattttccctctactgaataattttccctctaagaattgctgtgggtaataccaggagtggggacattgcccacatgcataagagcgtatctctccattcgatcagtttgtcaccatctttgctctgttttgaaagtcaggcttctctgtgactgtgaagcctgctgttccctgaaaatctgataatggagcagtggaggtttttttctttctgtgctctgtagatctcattgtttgcacttgtaatttcccagagttgaaaggaaagattgaactggaatattgtgtaaactatctgtcttacattagtgtagcattttgcaatttggggaacatcttcacaatttgtgtctcgttgttcagaacaaccctgtgaagtagttttggcaatgtctgtgttacatttcatgtaatttagccaactcccattccaactaggctttggctaaatctgacaattttatatatagcttaaaacaaagaatatacattcttttcacccctcccagtctacccatccagccttcatgattcattcctgtgtcaaggttagtcgctgttttccatttgaattggtttcttttatggtcagtttactttcttccctctcccctccctttcctgcacatccccatccttgctatgcctttctgtcctcttttataatggatatatctttttcctgccattatccctcagacattctcctcatggcacattttcttcaaatgctaacattta

SEQ ID NO: 49501 - DNA, 1023 bp, Homo sapiens
agaggaagagagactgagtattcatgtaacagttttctcacagctgaacactgaatgcagaataggaattagtgaaatctatttgattcttagtaatctgtgctaacaggggagtataagcttagaaaaaaataaaaacttttgattttgaaagataattttatatttacatttgaatacaaatgtttctaatctagatagccctgaaactcagttaactaaaggctatggaatacaataacttggctcctgaattttctaattactaaggattaatttaagtatgtaatgaaactgaagcagaaatgctttgtgtaagatgtccaaaattttaggttgtactttacacataatttgtttgtgaaccactgacccagttgtgtgtgtcttgattaaggatttttggttgtacataataaaggtgtacttcaaactagcttaaagaaaaaaagagtttattttaagtataagaggaaaaagaaagtgcagaaagtgtagtctaggtgcatgagagacttcaactaggttgaccagctgtccatagctaagggaattttcctccctctttctcttctccttcaacacccctggggctatagggtcttctgtttatctttgtttctttcagtgtatctacttcattattctcacttaatcagcacacagccaaacctggtttattcaagagatcccaagtttacatattctaaattcaggcaatcagaagagactcaatatctacgaattccaattctcaattctgattgacataggttgggctatatgtccagccaggatctgattatccatggctagaggggcaagatcatgtcatataaatatggttattaggccccaaccctaagtgaagggacatacaattcccagagaagggaagattgtgggctaaacagaatctcaagtagtgtctaccacgaagtataaactgtggtgcatggaataaactatatgaagacacatgtatgtttcttaaaaaaaagcaaagtagagcacatttgccat

SEQ ID NO: 49502 - DNA, 1559 bp, Homo sapiens
aacagctgccccattttgtgcttgaaacccaggtttctggtggtgtaggcacccaaaggaatctcctggtctgcaggttgcaaaaaccgtgggaaaagtgtagtatctgggctggatagccccattcctcacagcacagtctcgcacagcttccgtttcctaggggagggagttcaccggcaccttgagcttcctgggtgatgtgagtccctactctacttccgcttgccctctgtgggctgcacccactgtctaaccagtcccagtgagatgaaccgtgtacctcagttggaaatgaagaaatcaccctccttctgtgttggtctcgctgggagctgcagactgcagctgttcctattcagccatcttgccagatcccatttctgattttatttatttgtattttcactctttctcttagtctggctaaaggtttttaaattttgtttaatttttcaaaaaaccaactttttgtttcattgatcttttttttttatttcaattgcattcatttctgctctgatcttcattatttcttttcttctactaatttgcatttggtttgcgcttgcttttgtagttctttatgatgcatcattggaatgttcatttgaagtttattctcttttttgatgtaggcattggaactatgaacttccctcttggtattgcttttgctgtatcccttgagttttggtatgttatattctattatcatttgtttcaagacatttttcaattttttttcttaatttcttcattgaccactggtcattcagtggccttgtttaatttccatctatttgtgtaatttccaaaatttctcttgttattgatttctagttttccattgtggtcagagaagatacttgatgttacttttttttttttttttttttagtgttttaaaacttgttttgtgaacagatcagtgtgtcttgcttttttcttttttattcattcagctaggttattttcattggagagttttgtccctttacattcaatgttattactgataagtaagaactcctgccattttgttgttttctggtcttctcttgcttctttgcttcctgtcttcgtttagtgaaggttcttttctctggtgatatgatttactttgttgctttttattttttgtgtatcctttgtgtgatttttggtttgaggttacaatgaggcttggaaatattgtcttataattcattattttaaccttataacttaacactctgcataaaaaaacaaacaagcaaaaaggaaactaacaaaaactctatgccttaactttgtccctctgctttttaactttatgctgcttctattgatatcttattgtactgtccgtgtcttaaaagttgttggagttattattttcgatttgttcatcgttcattctttctacttaatataagagtagtttacatatcactgtgacagtgttataatattctgtgtttttctgtgtacttaatattaccagcaaattttgtaccttcagttgattatgtattgctaattagcatctttttctttctggttgaagtgtgccgttt

SEQ ID NO: 49503 - DNA, 1035 bp, Homo sapiens
agaataaaaacagacacacagaccgatggaacagaatagagaacccagaattaaatccacaatcttacactgaactcattttcaacaaagatgctaagaacatacactggggaaaagacagtctcttccattaatggtgctgggaaaaccggatatccatatgcagaagaatgaaactagacccctactcttgccatatacaaaaatcaaattgaaatggatgaaagacttaaatctaagacctcaaaatatgaaattattacaagaaaacattggagaaaatctgcaggacattggtctgggcaaagattttttgagcagtactccacaagcacaggcagccaaagcgaaaacaaacaaatgatcacatcaaattaaaaagcttctgcactgcaaaggatacaaccaacaaagtgaagagacaatccacaggatgggagaaaatattttcaatgtatgaatctgacaagggattaataagcagaatatataaggagctcaaacaactctacagaaaaaaatataataatctgatcaaaaaatgggcaaaatattttaataggcatttcttaaaagaagacatacaaatggcaaagaggcatatgataagttgctcaacgtcattgatcatcagagaaatacaaataaaaactacaatgagatatcatctcaccccagttaaaatggcttatatttaaatgacagagaataactaatggtcgtgagggtgtgaagaaaaggcaacccttgtacactgttggtgggaacataagttattacaaccactatgcagaatagtttggaggctcctcacaaaactgaaaattgagctactatgcgatccagcagccccattgctgggtatatacccaaataatggaagtctgtatatttaagtgatagttgcactctcgtgtttcttgcagcattttgcacaataactaagagttggaagcaacctaagtgtccatcaatagatgaagggataaagaaaacatggtacttagatacaacggagtattattcagccataaa

SEQ ID NO: 49504 - DNA, 1101 bp, Homo sapiens
aataataacttaagtgtacatttaaaaataactaaaagagagtaattggactgtttgtaacacaaagaataaatacttgaggagatggatgccctattctctttgatgtgattacttgacattgcatgcctgtttcaaaacatctcatttatcccataaacatatatacctactatgtactcacaaaaattaaaaataaaaaaaaattcaaaaatgtgaaaccaaatcaccatggttttgtggtattttgtttttattcttaagatttagaggctgggtgtaatggctcacacctatattaccccagtttgtgtggccgaggctgaaggattacttgaggccaggggttgaagaccagcctgggcaacatggtaagaccccatctctacaaaaaataaaaaattagccaggcctggtttgaagcactggtaatcccagctactcggaagtataagatgggaggatctctagagcccaggtgttcaaagttacagtgagctatgattgtgccatttcacttcagtatgggctataccctgtctcgaaaaaagaaaaaaaaaaaagattttgaaagaatcacatatttagggatacgttggacatgtagtacaaagaactttttaaaactaccatttgagagtcagttgctgacctgattcattatcacccttgaatattttaatacatatttcccacaaacaaggacattctcctacatgatcacagagcatacagcaaagtaacaatgatatcagatattagatattagataacaatctaatcctcagatcttaattcacattctaccaattgtgctaataatgtcttttttttttttttttggaacacggatcacttcaaaatcatgtgttacatttatctgtcatgtctttttggtatccttcagttggtacagtttcctgctctttctttgccttctatgaccttggcacttttgaagattacacacacagtatttacatctatatttatttttatctataaatattaaaaaccatgaattctaaagccagtcctatatcacaggatttgttcttgttttctctttttctttgtaacaataagaaacctgacttctat

SEQ ID NO: 49505 - DNA, 1086 bp, Homo sapiens
taaagcatgtctgcagcatgaagacatatggtggttgccttgaggaaaaaacacttgtgtgtttgagttgcaagccaatgtagccattttacttatggaattgaacctaaaggaacaattaacagataaactagttatgcagacttaggcattttgcaggcatttttttctcaaaaatgaatgaagtgagcttttcatgtcaagacaaactgagaatatttattaccagtgataaaatttgagcttttaaatgaaaattacaattttgggaaactttaatctatcactatgagcttgacagcttctaaatacttaaaagctgttctgatgaaatcaatggtgatgttaagtcaaatgtttttattttgttagattacaaaatggatctgtattaggaaaatctgcatagctcagtggatcaatacagatgaccaaaccatgatgttacagaatcatgagtttaaaagatgcattcaaagtgtaagacaaacacttctgatttatggtctggcatgtaaagagcttggaagttgtaatttgatcctgacaatagataaaaagctgaacagactgaaaaacaacaactcttcatagatctgtcagataattgaggtcttgaggcaaattactggccccaaattggaaagagagagaggcaaattcagaggatcatgtcttaccagtacagaaacccacaagcagaaacctctgtaggaaccagtactgggtgaggaaaacctgaacaaagaactctgcttggttcttacaatgaagatcaaagagaaatacctgtgtgcttctagcagtgggaggagaaaagtaggtagccctttggaaatatgtcagagcattctgttattcttaacaagtgttctgaagagcaactgttttaccagagcctaacttattggggttttatgagtttaactggagggaaggacattacccaattccagtgccttctagccatcctgtttcacctaaggggaggatgaaattgtgcagcatttgcaaagttcacagtgcagggggccatgctcattaaaagactgagctctaaatcataggactgtagaattcttcccc

SEQ ID NO: 49506 - DNA, 1074 bp, Homo sapiens
ttgaagagacaaagcaagcatcagcaccatagttagatatggcagaaatattataattatcagaccagcaattaaaaataactgtgattgtgaatagtgttgcaataaacatacacgtgcatgtatctttgtaatcgaattatatatattacttgggcacagggagggaaacaacacacactggggcctgtcgggagatggggtggggggagggagagcattagaaaaatagctaatgcatgctgggcttaatacttaggtgatgggttaatgatgcagctaaccactatggcacacgtttacctatgtaacaaacctgcacgtcctgcacatgtaccccagaactaaaaataaaaacaaattaaaaaacgatgattaatatgctaaggattctaatggaaaaatagacaacatgtaagaatagattagtaatgtaagcagagacatggaaattctaagaatcaaaaagaaaggctggatagaaatgaagaatgcttttaatgggcctgttaatagactgggtattgttgagaaaagacattctgagcttgaggatatatcagtagaaaactgcaaaactgaaaagcaaaaagaagaaacattgaagaaaatggggcagagaatcattttttggccttttggctaagaaagatcaagttaaaatggaatagagtatccaagaattttgccacaactacacaagtgagacattgaagagatttgtaaaagtgtaaaacagtaccacttttctctctaaattttttttgtaaaaaataatcgtttttatattaacatgtaaagggcttattgttattgaaaatatattaataactaaaaattgatccattataatatggttactattggtagaattcacataaacaaaagttctgtggagtcctataaacttttcaagagtgtaaggggatcctgagaccaaaaagattgagaactattatactataccatgttgccttatgcatcctactagccatccaacccagatttggcaatcatgcctcctttgtccataagttgttaaaattttttagaagaaaaggacaaaagtggagc

SEQ ID NO: 49507 - DNA, 1050 bp, Homo sapiens
ttatgttatttcctgattttggcattagggtgatactggcttcctagaatgatttagggaggattccctctttctctgtgttttggaatagtgtcaataagattgttatcagttctccattgaatatctcatagaattcagctctgaatttgtctggtcctggacttttttttcttggcaatttttaaattaccatttcaatcttgctgcttgttattggcttgtttagagattctataccttcttagtttaatctaggagggttgtgtattttcagaaatttatccatatcctctggattttctagtatttgcatgtaaaggtgttaatagtagccttcaaaaatcttttatatttctgttgtatcagttttaatatctcccatttcatatcttattgaccttatttggattttctctcctcttttcttggttaatctcattaatggtctatcaatttttttatcttatcaaagaaccagctttttgtttcatttatcttttgtaatttttttgttttaatttcatttatttctgctctgatcttcattatttcttttcttctgctggctttgggtttggatttttcttgtttctccaattttttgaggtgtgaccttagattgtttgtttgtgctctttcagactttttgatgtaggcatttaatgctatgaactttcctcatagcaccacttttgctgtaacccagaggttttggtaagttgtgacactattatcattcagttcaaagaattttaaaatttttgtcttgatttcattgttaaaccaatgattgttcagaagcaggttatttaatttccatgtatttgctttatttgcatggttttggaagttccttttggagttgattttcaattttattccactgtgttctaagagagttcttgatattactttgattttcttaatgtactgagacttgtttatggactatcttatatcttgaagaatgttccatgtgctgatgaatagaatgtatatttgggtagaatgttctgtaattatctgttaagtccatttgttgtagag

SEQ ID NO: 49508 - DNA, 1023 bp, Homo sapiens
aaggaggctttgaactggggaaaaagggcagcaatgaggtgtggctgtagcctaggaatagtcagggaagcagataatttagttaaaatgtctctacctaataagggagctggacaggtggggataactaagaaggagtgcataaaacaatgttgtccaagttcgcatcagagttggggaggtttagaagcctggctgtcaatacccacaacagttatggaggcaagggaaacaggcccttgaaaagaaggtaatgtggagtggatagcctccgtagtgattaagaaggggacggacttaccctccactgtaagagttacccaaagtgtctgtgatggtctaggaggcttccgaggtgattgggcagcgtcagtcttcagccgttaagctgagaagatctgggaaggagtcagagagccttgggccagagttccaggggctctgggagtggctgccgggtgagttggacagtccgatttccagtggggtcctgtacagatgggacatggcttaggaagaattccaggctgtaggcattccttgtcccagtgccagatttctggcacttgaagcaagatcctcgggcaggcagtcctggaggaatgcgtggccactgtggttcaggcgtttggaagttcttgtgtgctggagatgtggctggggtttgtctcacagtggaggcaaggaattgcaactcagaaatacattgctacttggctgcctctactctattattgtacaccttgaaggtgaggctaattaagtcctgttgtggggtttgagggccggaatttaatttttggagctttttctaatgtcgggagtggattgggtaataaaatgcacaccgagaataagatggccttctggcccttctgggtctagggtggtaaagcgtctaagggttgttgccaaatgggccatgaactgggttgagtttttatatttgatgaaaaagagcctgaacactatctgatttgggagaggtcggataaagaaaaagggacatcgaccttggctatg

SEQ ID NO: 49509 - DNA, 1049 bp, Homo sapiens
agatgtagaaaaagcgtttgataaatttcaacatctctttatgctaaaaactctcaataaactaggtattgatggaacatatctcaaaataataagaggtatttatgtcaaatccatagccaatatcatactgaatggacaaaacctggaagcatttcttttgaaaactggcacaagacaataggaagagaggaattcaaattgtctctgtttgaagatgacatgattgtatatttagaaaaccccatcatctcagccgaaaatctccttaagctgataagaaacttcagcaaagtctcaggatacagaatcaatgtgcaaaaatcacaagcatttctatacaccaataatagacaaacagagagccaaatcatgagtaaactgccattcagaattgctacaaacagcataaaatactaggaatacaacttagaagttacgtgtaggacctcttcaagcagaactacaaaacactgctcaaggaaataagagaggacccaaagaagttgaaaaaaaatttaggaagaatcaagatcatgaaaatggacatagtaatcaaagtaatttatagattcaatgctgtttccatcaagctaccattgactttcttcacagaattaccagaaactacttcaaatttcatatggaaccaaaaaacgagtccatggagccaagacaatctcaagctaaaagaacaaaactggaggcaccacgctacctgacttcaaactatactacaaacctacagtaaccaaaacagcatggtactggtaccaaaacagacacataggccaatggaacataacagaggcctcagaaataacaccacacatctacaatgatttggtcttcgaaaaacctgacaaaaacaagcaatgggaaaaggattttctatttaattaatggtgctgggaaaactggctagctatatgcagaaaactgaaactggaccccctttttataccttatgcaaaaaattaactcaagatgatttaaatagttaaatataaatcctaaaattataaaatccctagaagaaaacctaggca

SEQ ID NO: 49510 - DNA, 1075 bp, Homo sapiens
gaaaaaaagctcaccatcactggtcattagagaaatgcaaatcaaaaccacaatgagataccatctcagaccagttagaatggtgatcattcaaaagttaggaaacaacagatgctggagaggatgtgaagaaatagtaatgcttttacactgttagtgggagtgtaaattacttcaaccattgtggaagacagtgtggcgattcctcaaggatctagaaccagaaataccatatgacccagcaatctcattactgtgtatatacccaaaggattataaatcgttctactataatgaaatatgtgcacgtatgtctattgcagcactgtgtacaatagcaaagacttggaaccaacccaaatgcccatctatgatagactggataaagaaaatgtggcacatgtaaaccatggaatactgtgcaaccatcaaaaagaatgagttcatgtcttttgcctggacatggatgaagctggaagtcattattctcaacaaagtaaaacaggaacagaaagccaaacactgctcagtctcactcattagtgggagttgaacaatgagaacacatggacacagggagggaaacatcacacactagtgcctgttgggaggtgggggcaaggggagggagagcattaggacaaatacctaatgcatgcgtggcttaaaacctagatgatgggttgataggtgtagcaaaccaccatagcacatgtttacctatgtaacaaacctgcacgttctgcacatgtatcccagaacttaaagtgaattaattaaaaaataaataaataaataaaaataaaatggcggtgcttgtccaaggtcatgatgctcctgctctgtcagtaccattctgtacataggccatggcaaagatttcatgatgaagacaccaaaagcaattgtaacaaaaaaattaagaaatatgatccaattaaactaaagagcttctgcacagcaaagaagctatcaatagatagacaacctacagaattgaagaaaatatttgcaatgtgtgcattcacaagggtctaatatccagaatctttaaggaactttgtcagtttcacaa

SEQ ID NO: 49511 - DNA, 1026 bp, Homo sapiens
ctctgtctttttaatggagagtttaatcaagttccatttgatgttattattgatgagtaagggtttacttctgctattttgttatttgttttctggttgatttgtggtcttctttcttttctttcttcctacctgtctccttttcagtggaggtgattttctgtggtgttatgctttaatttcttactttttacattttgcatatctttgtgggttttttgatttgaggtaaccatgaagcttgcaaatacctgtaacccattattttaaattgatgacaaattggcactgattgtataaaccaacaaacaagcgaagagaacactaataaaaactctacactttaacttcataccctgctttttaactttttgttgtttctatgtatatcttattgtactatctatgtatatcttattgtactatctatgtcttgaaaagatattgtattttgttaggattccatcaggctggtggaaaaaatattaaagatagttatagtaatagtcaaaagctctcttggaatgcctgagagtttgcatagcttcagattgcttggctgaaagcagccagggtctgtttgcaggagccagaaagattaggttgcaagtacaaaggaatgtgggaagtctaccttactaacatgtttacttatatgggcttaagactaacacctttgtcctactgagttactttactgcctcctactcagggagttggcagaagtttattgcccccaaatgctgtttgctttaggcctggaacctggcctttaatctttactctctagtggtgtttactcacaacttttgttaattagtcttactgaataaatgcaagcctcactttttgatgagggccaagtcgaactgtttacagaactcagcttggagcctgtaagtggctcagaccctcagctagactggcagagcagaatatctgtgtgtcagcggactttactcatccgtcgctgaatcaagggcctgcaggaacagccccttccccccaccccccgcagctagtgcc

SEQ ID NO: 49512 - DNA, 1125 bp, Homo sapiens
cccgcatagccaaagcaagactaagtaaaaagaacaaatctggaggtatcacagtacctgactttaagctgtagtataaggtcatagtcaccaaaacagcaaggtactggcataaaaataggcacataaaacaatggaacagaatagagaacacagaaataaagccaaacacttacagccaactgatctttgacaaagcaacaaaaacataaagtagggaaaggacaccctattcaacaaatggtgcttggataattggcaagccacatgtagaagaatgaaacggatcctcatctctcaccttatacaaaaaatcaattcaagatggattaaggatttaaatgtaagacctgaaactataaagattctagaaggtaacatcagaaaaatccttctggacattggcttaggcaaagacttcatgaccaagaacccaaaatcaaacacaacaaaaataaaataaatagataggacttaattaaactaaaaagcttctgcacagcaacagaaacaatcagcagagttaacagacaacccgcagagtgggaaaaaatctttgcaatctgtacatctgacaaaggactaatatctacaatctacaaggaactcaaagaaattaacaagaaaaacaatcccatcaaaaagtgggctaaggacatgaagagacaatttgcaaaagaagatatagcagtggccaacaaatacatgaagaaatactcaacaacactaattatcagggaaatgcaaatcaaaaccacagtatgataccaccttactcccgcaagaatggccataatcaaaaaatcaaaaaaaaaaataatattggtgtggatgtggtgaaaagggaacacttttacactgctggtgggaatgagaactaatacagccattatggaaatcagtatggggattccttcaagaactaaaagtagaactatcatttgatccagcaatctcactactgggtttctacttagaaaaaaagaagtcattatacaaaaaaggtacttgcacacacatgtttataggagcacatatatgtgtgtgtgtgtgtatatatacacacacacacacacacacacatacacacaccgtggtctactactcacccataaaaaggaataa

SEQ ID NO: 49513 - DNA, 1047 bp, Homo sapiens
ttttgtatccagcaaaactaaacttcataaatgaaggaaagatacagtccttttcaaaaaatgctgacagaattcaccattatgaagccagcactgcagaacctgctaaaaggagctctaaatttggaaacaaatcatcaaaatacaccaaaacagaatttccctaaagcataaatttcacagtacctataaaacaactacacaatgaaaaaaacccaaggtgctgagacagcaaatagcataatgaatagaataagacctcacatctcaatactaacattgaatgtaaatggcctaaatgcttcacttaaaagatacagaatggccgaatggataagaacccacaaaccaaatatctgctgtcttcaagagactcacctgacacataaggactcacataaatttaaagaggtggaaaagatattttatgcaaatggacaccaaaagggagcaggagtagctattcttatatcagacaaaacaaagttttaagcaacagcagataaaaaagacatagagggacattatgtattgataaaaggactagttcagcaggaaactatcacaatcctaaatatatatgcacctaacgctggaactcccaagtttataaaacaattactactagacataagaaatgtgatagacaacaacaaaataatagtgtgggtcttcagtatgccactgatagcagtagacaggttatcaagacagaaagtaaacaaaggaacaatagacttaaattataccctagaaaaaatggactaaacagatagtgcagaacattctacccaacaactgcagaatatacattctaatcatcagcacatggaacattctccaagacagaccatatgataggccacaaaacaagtttcagtacatttaaggaaaatgaaattatatcaagtactctttcagaccacagtggaataaaattgaaaatcaattccaaaaggaaccctcaataccatgcaaatacatggaaattaaataacctacccttgaatgatccttgggtcaacaataaaatcaagatggaaattt

SEQ ID NO: 49514 - DNA, 1667 bp, Homo sapiens
atcacattacctgacttcaaactatagtataaggttatagtcaccaaaacagcatggtactggtataaaaataggcacatagaccaatggaacagaatagagaacccagaaataaagccaaatacttacagccaactgatctttgacaaagcaaacataaacataaagtagggaaaggacaccctattcaacaaatggtattgggtaattggcaagccacaggtagaagaatgaaactgaatcctaatctctcaatttatacaaaaatcaacttggccaggcattatggatcactgcagatcactgcactccagcctatgtgatagagggagacgccgtcttaaaaaaaaaaaaaatcaactcaacacggctgaaggaattaaatctaagatctgaaactgtaaaaattctgggagataacatcagaaaaaccattttaggcattggcttaggcaaagacttcatgaccaagaacccaaaagtaaatgcaacaaagacagataaatagatgggacttaattaaattgaaaagcttcagcacagcaaaagaaataatcagcaaagttaatagacaacccacagagtgggagaaagtttttgtagtctatacatctaacaatcaatgctcagactctacaaagaactcaaacaaattagcaagaagtaaacaaacaatactatcaaaaagtgggctaaagacatgaagagacagttttcaaaagaagatatagaaatggccaacaaacatatgaagaaatgctcaacatcactaatgatcagggaaatgcaaatcaaaaccacaatgtgataccatcctattccttcaagatcggccataatcacaaaatcaaaaagtactagatgttattgtgacatggatatgatgatgagggaatgtaaactcatacaaccactatggaaaacagagtggaaattccttaaagaactaaaagtagatctaccatttgatccagcaatcccactcctgggtatcgaccgagaggaaaagaagtcattatatgaaaaagatatttgcacatgcatatttatagcagcacaattcacaattgcaaaaatatggaaccagaccaaatgcccatcagtcaatgaaggtgtaaagaaactgtggtatttatatacaatggaatattactctgccataaaaaggaatgaaagagtggaattcacagcatcctggatggaattgcagattattattttaagtgaagtaaatcaagaatggaaaaccaaacatcatatgttctcataagggagagctaagctatgaggatgcaaagacataggaatgatacaattgcctttgagtactcgggaaagggtctgaagatagggataaaaaactatgagttgggtacagtctacactgcttgggtgatgggttccccaaaatctctgaaatcgggggagggagccaagatggccgaataggaacaggtctggtctacagctcccagcatgagcaacgcagaagatgtgtgacttctgcatttccatctgaagtaccgggttcatctcactagggagtgccagacagtgggcgcaggacagtgggtgcagtgcaccgtgcatgagccaaagcagggcgaggcattgcctcactcgggaagcacaaggggtcggggagttccctttcctagtcaaagaaa

SEQ ID NO: 49515 - DNA, 1046 bp, Homo sapiens
catcatcaaagaccaacagtagataaaaccacaaagacggggaaaaaacagagcagaaaaactggaaactctaaaaagcagagcgtctctcctcctccaaaggaacgcagttcctcaccagcaatggagcaaagctggacggagaatgactttgacgagttgagagaagaaggcttcagacgatcaaactactccaagctacagaaggaaattcaaaccaaaggcaaagaagttaaaaactttgaaaaaaatttagacaaatgtataactagaataaccaatacagagaagtccttaaaggaggtgatggagctgaaagccaaggctcgagaactacatgaagaatgcagaagcctcaggagccgatgtgatcaactggaagaaagggtatcagtcatggaagatgaaatgaatgaaatgaagtgagaagggaagtttagagaaaaaagaacaaaaagaaacgaacaaagcctccaagaaatatgggactttgtgaaaagaccaaatctacgtctgattggtgtaactgaaagtgacgggtagaatggaaccaagttggaaaacactctgcaggatattatccaggagaacttccccaatctagcaaggaaggccaacattcagattcaggaaatacagagaacgccacaaagatgctcctcaagaagagcaactccaagacacataattgtcagattcaccaaagatgaaatgaaggaaaaaatgttaagggcagccagagagaaaggtcgggttacccacaaagggaagcccatcagactaagaggagatctctcggcagaaaatctacaagccagaagagagtgggggccaatattcaacattcttaaaagaattttcaacccagaatttcatatccagccaaactaagcttcataagtgaaggagaaataaaatcctttacagacaagcaaatgctgagagattttgtcaccaccaggcctgccctaaaagagcgcctgaaggaagcaataaacatggaaaggaacaaccggtaccagccactgcaaaatcatgccaaattg

SEQ ID NO: 49516 - DNA, 1048 bp, Homo sapiens
cagagcagaattttattgagcaacagaaggaaagctctcagctctgagagtggacctgaaagcatgcagtagtctttgaaggtgagtctagcatttttatgggtttagaatggaggaatgcctgctgattggtttatggttggactttggaaaaaacaccattttattttgtaaaaggtatctatcagaaggaaataaacaagagagagaggctaagacagggatagaagttttcactctgattgtgggctctatctggaacaggcagctcagatttcaggctttcaactctctttgatttgaaggtcaagtttcacgagggacctgttcctgtctgcctcagaatttctctgtttcctgtggctatcagtcactgatgtttagcttttttttcatatgtttcttagccacatgaatgttttattttgagaagggtttgtccatgttttttacccacttttaaatggggttgtttttttcttttatatttgtttaaattccttttagaatctagatattagactgttgtcagatggacagatagcaaaaattttctctttctctgtaggttgtctattcactctgatgatagtttcttttgctgtgcagaagctctttcacttaactaggtcccatttgtcaatttttgcttttattgcaattgcttttggcatttttataatgaaatctttgcccatgcctatttcctgaatggtatttcctagattttcttctggatttttatagttttgggttttacatttaagtctttactccatcttgagttaatttttgtataagatgttaggaaggcttacaatttcaattttctgcatatggctagccaattctcccaacactatttattaaataggggattgtcttcccattgctcattttcgtcaggtttgtcatagatcagatggttgtaggtgtgttgttttatttctgagttctctattatcttccattagtctatgtgtctgtttttgtaccagtaccatgttgttttgcttactgtagccttggagtatagtttgattttggg

SEQ ID NO: 49517 - DNA, 1039 bp, Homo sapiens
tatgatattggctgtgggtttgtcataaatagatcttattattttgagatacttcccatcagttcctaatttattgagagttgttagcatgaagggctgttgaattttgtcaaaggccttttctgcatctattgagataatcatgtggtttttgtctttggttctgtttatatgctggattacatttattgatttgtgtatgttgaaccagccttgcatcccagggatgaagcccacttgatcatggtggataagctttttgatgtgctgctggatttggtttgccagtattttattgaggatttttgcatcaatgttcatcagggatattgttctaaaattctctctttttgttgtgtctctgccagggccaggcactattctaagcattttatctgtattaaaaaattaatacacacaaaatccctgtgatgtaaatactattattaccccctttttacagatgaggaaaccaaagcacagaaaacttaagggaatttccaaaggtcaaacatcaagcaagtggtagggctgcatagtgaactcagactgtttctggagtttgcccttgtctctattgtagcctttcacctctccatttagcctctcaatataataccagtcaatttttaaattggccatttacattgatctaatacagatctttttggtcgctgtcttctcattattatacgttgtcagtgatttaaagtaccctgtagcattatgtgtttgtgttttaggagaaagttcagaaaagtactgtgagtatatgatcatttacataaattcccatgataaatttcctcaagaataaataaaattatattgtggttgacattattcttccattagaccttatttgctttgcctttaaattatacgttttttgggattatgttagaagttaggtgaacatgtagagcagcaataaattagtaaattgatttggaaattttaatttttgtagcaagaaactaatgaagtatttattatagccaatttatcccctcacataaaagtaaaattcattcttgag

SEQ ID NO: 49518 - DNA, 1045 bp, Homo sapiens
gttttttgaaaacatcaacagaattcgtagacagcaagactaataaagaaaaaaagagagaagaatcaaatagaggcaataaacaatgataaaggggatatcaccaccgatcccagagaaatacaaactaccatcagagaatgctataaacacctctacaaaaataaactagaaaatgtataagaaatggataaattctgggacacctacaccctcccaagactaaaccaggaagaagttgatttgcagaatagaccaatatcaggctctgaaattgaggcaataactaatagcctgccaacaaaaacaagtccaggacctgacggattcacagccgaattctaccagaggtacaaagaggagctgatactattccttctgaaactattccaatcaatagaaaaagagggaatcctccctaactcattttatgaggccagcatcatcctgataccaaagcctgacagagacacaacaaaaaaagagaattttagaccaatatcactgatgaacatcgatgcaaaaatcctcaataaaattctcgcaaaccgaatccagcatcacatcgaaaagcttatccaccaagatcaagctggcttcatccctgggatgcgaggctggttcaacatatgaaaatcaataaacgtaatccatcacataaacagaaccaaagacaaaaaccacgggattatctcaatagatgcagaaaaggccttcgacaaaattcaacagcccttcatgctgaaaactctcagtaaactaggtattgatggaacatatctcaaaataataagagctatttatgacaaacccacagccattatcatactgaatgggcaaaaactggaagcattctctttgaaaactggcacaagacagggatgccctctctcaccactcctattcaacatagtgttggaagttctggccagggcaatcaggcaagagaaagaaataaagggtaataaattaggaaaagaggaagtcaaattgttcctctttgcagatgacatgattatatatttagaaaaccccatcatctcag

SEQ ID NO: 49519 - DNA, 1421 bp, Homo sapiens
ttatcagcacatggaacattctttagggtagataatatttggggcacaaaacaagtctcaacatattttaaaaatttgaaattacatcaaatatcttttcagaccacaatggaataaaactggaaattcataccaagagaaattgggaagctatacaagcacagggaaattaaatgtgcttgagtataactattgagaaagaaatgaagatagaaattaagaaattccttgaggccaggtgtggtggctcacacctgtaatcccagcactttggggggccgaggcaggtctaggatgttgcttgtgtctaggagtttgagatcagcctgctcaacatagtgagaccccatctttacaaaaagaaattccttgaaacaaatgaaaatggaaatatttcaaaatctgtgagatacatcgaaagcagtggcaagaggaaagttaatagaaataaatgcctacatttaaaaactgcaaaaaaatgcaaattaacaatgtaacaatgcacctcaaggaactagacaaaacctaaccaagattagtagaagaaaagagataataagtatcagagcagaattaatgatggctaaaaaatacaaagtagcaatgaagcaaagagttggttcttcaaaaagataaacaaaattgacaatccactagctagactaaccaagatgagagaggaccctaataagcaaaatcagaagtgaaaaagagacattacagctgataccactgaaattttatatacatatatatatatatatatatcaccagagactattatgaacagctacatgctgacaactttgcacaccttgaggaaatggataaattcctggaaacatacaacctcccaatatttaacgaggaagataccgaaaatatgaacagaccaataacaagtagtgagatttacttaataataaaatgtcttccaacaaagaaaagccaagtaccaggtggattcacttaattctaccaaaatgtacaaagaacttataccaatcctcctgaagctatttcaaaaaagtgaagagaagggaattctccataactcattcaataaggccagcaattaccctgaggcaaaaaccagacaaggacacaagaaaaaaagaaaactgcaggccaatatccctgatgaataaagatgctaaaattctgagtaaagtactagcagaccaaataaaacagtgcatgaaaaagtaatacaccaaaatcagattggatttatgcaagggatgcagttatggtttaacgtgtataaaagaataaatgtgatacgtcacatgacagaataaaggacaaaaacaatatgactgtctcaatagatgcagaaaaagcacttaataaatttcaacaaaaagccatatatgataaatccacagctaatgtgatactgagtggggaaaagttgaaag

SEQ ID NO: 49520 - DNA, 1048 bp, Homo sapiens
catacttaatagtataatattgaaaattttaagaatacaacccaaaattactttgcatagaaagaaccagtaaaatttgacagattctcaagtgaaacaacaatcaacagatgccaactctgaaatgactcagatgatggaattaaaagacaaagactttaaatcagatattataaccatgctctgtgaggccaaggtgaatactcttgaaatgaattgaaacagcagtcctaagctaagaaatacaaactatttttgaaagatgagaatcttagaatttaagaaatacagaatctgatattttagaaaaactactggatgaaatcaatagcagaattgggatgatagaaggaactaccttggattttgaaaatagagcagtagaactaatgcattcagaagaacacagagaaaaaaaaattaaatctagatactcagggacatgtggaacaatatcacaaggtctaatgttggtattaattgagttcctggcagagagaagaaagagaggagtacaaaaaaaaatttgaagaaataaaagctgaaatttaccccaaattggtgaaatatgtaaatttacacatttaagaagcttaggagaaatacaaagaaaatcacacccggacacattacaatgaaaatgctgcaaaatcaaagataaatgaaacatgttgaaggcagaccgagaaaaatgacacattaagtacagcggacagtgatttaaattactactgatttttcaccagaaatcatgaagatcagaagatggaaacaacattgttaaagtgctgaataaatgaactatccatccagaattttatatccagagaaaatattcttcaggaatgaaagtgaaacagaaaacattctcagagaaaggaaatctaaaagaatttgcttccagcacaccttccataaaagatatgtcaaaaataatttttttaggttgaagggaaatgataccagaagaaaactgataattcagaaatgaagagcaacagaaatggtacatttctgggaaaaccttgtagagtaatttccttagtgt

SEQ ID NO: 49521 - DNA, 1556 bp, Homo sapiens
ctgaaatgacagaaatggaattctgaatatagataggagtgaagatcatccacatccagtaaaaagtcaaaacccaatccaatgaacttaaggagtaaaataagatcatacaggagctgaaaaatggtatggtcatttttaagaaagaaccaaactgatctgatagagctgaaaaactggcttcaagaatttaataatataattgcaagtaataacagcagaattgaccaagctgagtaaagaatctcagagctttaagaccaatactctgaaactactcagtcagacaaaaataaaaaaaggaaaagcaataaagaagaatggacaagacctccaaaaaagatgggattatgtaaacagaccaaagctacaacatatcagcattgaaatagagagagataaatcaagcaacttggaaaacatgtttgaggatagtgtacatgaaaactttcccaatctcactaaagaggccagcatttaaagtcaggaaaggaagagaacctctgtgaggtactataaaatagtcatcggattctgcaaagttgaaatgaaagcaaaattttaaaggcacctagagggttgagaaaggtgacctaaaagtttacagcattaggctaacagtggacctttcaacagaaacctaataagccagaagagattggggcctatattaagcatttgtaacaaaaaatttcaactaagaatttcatatccagccaaactaagcttcataagtgaaggaaaaaaaggttattttgagagaagtatatactaatgaaattcataaccaccaggactgccttaaataaagtccttgagagtgctaaacatggaaattaaagactgttaccaaccaccacaaaaatacacttaattacatagaccattgatgctataaagcaagtacacaataaaatctgcatgacaatcaggtaacaacacaatgacagaatcaaatccacatatatcaataataactttgaaagtaaaagggctaaataactgaattaaaaggcacagtgtggaaagtaggataaagaatcaagacccaaggttatactgtcttcaagagatccatctcacatgcaatgaaacccacaggctcaaagtaatgggatggagaaaaatctacagagcaaatggaaaacagaaaattgcaggggttgctattctaagttcagacaaagccgactttaaaccaacaacaatcaaaaaagacaaagaatggcattatataatggtaagggggtaaattaaacaagaaaaccgaactatcctaaatatatgtacccatcacaggagcacccagatttatatagcaagcttttagagacatacgaagagacttagccacaaaatagtagtagagcacatggcatatactctaaaattgaccaaaaaatcagacatcaaacaatcctcaaccaattaaaaaaaaaaaacaaatcatagcaaccacggtcttgggcaggagtgcaataaaaatttaaatcaatactaagataattgctgaactgcatacaattacatggaaattacacaacctactcttttaa

SEQ ID NO: 49522 - DNA, 1071 bp, Homo sapiens
attccatcttgagttgatttttgtatatggtgtaaggagagggtcctgtttcaattttctgcatatggctagccagttctcccagaacaattttttgtatagggaatcctttccccattgctttttttgtcaggtttgtcaaagatcagatggttgtacgtgtgtggtcttatttctgggttctctattctgtttcattgatctatgtgtcattgttgtaccagtaccatgctgttttggttactgtagccttgtagtatagtttgaagttgggtagtgtgatgaccccagctttgttcttttttcttatgattgtcttgtttttttgggctctattttggttccatatgaattttaacatagttgtttctaattcagtgaagaatgtcaatggtagtttaatgggaatagcattgactctataaaatgctttgggcagtattgccattttcatgatattgattctttctattcatgagcatagaatgttttttccatttgtttctgtcatctctgatttctttgagcagtggtttctagctctccttgaagagatccttcacttcctttgttagctctattcctaggtattttattcattttgtggcatttgtgaatgggaattcattcatgatttcgctctctgcttgcctgttgttgatgtatatgaatgctagtgatttttgcacatttattttgtatcctgaaactttgctgaagtttcttctcagcttaagaagcttttgggctgtgactatggggttttctagatatagggttatgtcatctgcaaacaaagacaatttgataccctctattcctttttgaatactctttatttttttttctcttgccctggccagaacttccaatactatattgaataggaatagtgaaagaggacatccttgtcttgtgcaagttttcaaggagaatgcttccagcttttgcccattccgtatgatattggctgtgggtttgtcatatatagctcttattattttgatgtatgttccttcaatacctagtttattgagagtttttaacacgaagggatgttgaattttatca

SEQ ID NO: 49523 - DNA, 1076 bp, Homo sapiens
ttgtggagacaattactgggggttctattcagccattttactctgtcttctgcctctcacttttgacaatttgattataatgcttttcagtatggacttccttaggacaacttttgttggagtactttgggcttcttaatttagatgtctatttggttcttcagaaccaattcttcagatttgggctgtttcagcaatcatttcttcaaataagcccccttcccaatctaatctccctcttctccttcttgcacttctataatatgtatattaacccacttgatggtggttcacaaattctgtagactgtcttcactctttttcttttctttttcctttttatctgactagataatgtcaaatgacctgtcttttaaatttgccattatttttctgtttgatcaagtctgttgtttgtctttgtgatttttttaatttaaaaattcaaggacatcccattttataaataatgctggcaaaactggatagagacatgtagaagaatgaaaccagatctctatctctgaacatctacaaaaatcaactcaagataaatccaagacttaaatctaagatctgaaactataaaaattctagaagaaaacctaggaaaaactcttctgaatgttggtgtaagcaaagaagttatgactaagaccccaaaagcaaatccaactataacaaaaatgaataaatgaaacctaattaaactaaaaagcttcttcacagcaaaagaaagaatcatcagagtaaacaaacaactcacagaatgggagaaaatatttgcaaactatgcatctgatgaaggactaatatccagaactacaaggaactcacacaaatcagcaagaaaaaataataataattccatcaaaaagtggacaaatgacatgaatagacatttctcaaaagaaaatgtacaaatggccaaaaaacatatgaaaagtgctcaacatcactaatcatgagggaaatgcaaattaaaaccacaatgagataccacacaatgagataccaccttatcccagccagaataaccattattgaaaagttaaaagggccgggcacggtggctc

SEQ ID NO: 49524 - DNA, 1041 bp, Homo sapiens
ggtacatgccaccacacccagctaatttttttgtatttttagtagagacagggtttcaccatgttggccaggctggtcttgaacttctgacctcaggtgatccacccacctcggcctcccaaagtgctgggatcacaggcatgagccaccacacccagcatgtaatatatttttaaatcaagatgtgtgatacctccatcgtagttcctcttgcccaaaatttctttggctattcagggtcttttatggtttcatatgatttatggagtgtattccatttctgtaaagaatgtcaatggattttgatagagattacgtttactctatagctcactttgggtagtatggacattttaacatttaacaatattaattctttcaatccaaaaatatgggatgtcttttcatttgtgtcttatttaattttcttcatcaatgttttataatttacagtgtataagtctttcacctacagagattatttaacttcttcctttctgactgggatgcctcttctttctttctgttgcctaattattctggctaggacttccagtaccatgttgagtagaagtgatgataatcttcatcctttccttgttatccttttcttgtttcccatagcatatatattgcagttattgctttctagtttttttcattatagtcagaaaatatacctggaatgacattgatcttattaaatttgttaaggcttgttttgtgacctaacatgtgatctatctggagaatgttccctgtgtactggagaaaaatgtgtattcttctgctgttgggtagaaagttccatatatgtctattagtttcatttgttttgtaatgtttttcaagccagatgtttcttcatttattttctgtctgaatgctgtatctgatattgtgaatggggtattgaagtcctctactattattgtattgtcaatgtctgtcttcagatctgttgatatttgctttatatatttaggttctcagatgttgggtgtgtatatatttataattgttttatcttcttgctgaatt

SEQ ID NO: 49525 - DNA, 1050 bp, Homo sapiens
ttagccaggatggtctcgatctcctgaccttgtgatccgcccgcctcggcctcccaaagtgctgggattacaggcatgagccactgtgcccggcccgcatgtgcttttcaggagtggattttagccttagcaagaaggatatggtgtgggatctggaaacacttcctggcagaaaggaagaaagagagtctttccatggaaatatatgtatgtatatatacatattcttgcaccttgttgaaatgtgatgtttcttgttctccaaattgttgtgataagcagataactttagctgttattttgtgtccatgtcgcagggtggggtacgggggcgacaggagcgggtggggggcgggaattacagcattattaccaccactgaaatttttatgtctagaattattatagaattagggactctttatctttaatgtaagttgagtgtaatcattgtaagaagaaaaaccaaatgccaaaaatcctgtagtttcttaagaagaaacctctgtattctaaaatgcttttcctaaagtttactaaatatgatgtggtatgtgtgtttatttgtagggactgataacatctgaacataccaaaccacacagtcaaactcttgcaccatcgctaccacgacattttactacaaaagaatgccactgcatgtggattccaagcaggctaaaaagaaaaagaactgattagacctcagacgacccactaaacgggatgacggccacagctgaggtagagacaccaaaaatggagaagagtgcctccaaggaagagaagcagcagcctaagcaggacagcacagagcagggcaatgctgattctgaagagtggatgagctctgagagtgaccctgaacagataagccttaagagtagcgacaacagcaagagctgccaacctagggatggtcagttgaagaaaaaggagatgcactccaagccacaccgccagctctgtcgatcaccctgcctagatcgtccaagtttctcccagagcagcattttacaggatggtaaacttgacttggagaaggaatac

SEQ ID NO: 49526 - DNA, 1088 bp, Homo sapiens
tcaagccagggctggactggtgccctttttctcaagtttgtcatggagcactttggccatgatgtgaatctggctaatctttggcctttttctaatcttcatccctcttaccacatcctggcctctttcccggcctcctgaataagtctatatttgcacctcaggattatatctgtctttttgtttttctcaaactcttctcagcctttctgcttctcttggaatatcctccactttcctttactgcctccttctcttcaacttgctgagtttgattaggatggaggtgccttacatggtctggttcatgatcctttgcaaagtgccttctgccttctgtctgacagttttcagggaaggtaactagtgccaaataccaaactaatcccagaagcaagtttgcttttcctctttctttcctcttctatccctcttctttccatcctttcaaactgagccacttctacttgccaggttttgtgttgggaactaagaaaacaaagaaatcagatggaatccctgccctcaatgagataagcacctccccaacctaggtctttgcctcttactaacaatgaattctttggcaatttgtttagcatttctgggctttgctccttaaataagtagaaatcggggctgaatatgagtactgtaagagaagccagagggaatgcaaaagagggagtgatcggttccatctctgaacaacagtgaaggcgccctagttcatttctgcttctataacaaaataccgcaggccaagataatttataaacaacatacatttatttttcatagttctagaggctaagaagttcaagatcaaggcactggcagattcagtgtctggtgaggactgctgtctgcatctgagatggctccttcttgcttcatcctcacatggtagaagagcaaaagggatgaacacagtgttctcacatggcagatgagataaaagtgccaggcagctatctgaagcctattttataaggacattaatctcattcacaagggcagagccctcatgacttaatcatttctcaaaagttcccaccttttaataccatcaccttggggtttaaggt

SEQ ID NO: 49527 - DNA, 1033 bp, Homo sapiens
ttggagactatttagtacaactctcttaaaaaaaaaaactaaaactaaaacaaaaatctaatgaggctattgagacctacagggaaagacctacctaagggcacatggtgactgagccaagattggggtccaggctttctgatgctcatctcattgaccctttattctgacccaatgattgagttcttgacatttgagttccctttcttgctccaaacaaattgcccactgttctcagacctttatggtcctcagataaaaggaaatgagtaatttgagcaaagtggccaaggttgacatttgtgtggtctcctggtaaggttcggtagtgtcaccaggtgccttctgttacttttcttattcctcataccaaggccaaggtgttcaggggcacaccctagttcactgaataccaaccagtaattttaattaaaaggggaaaaaatttccctttctctgctccattttcatttatgtgctttaggctatttctagcgtgtgacagatggagaaaggtagtggaaaatcaaactcgttcattcatattgcagcatgtctacaacctatctagggtcggtttcacttttatagctaattgtccctcctagtcagcccaacctcccctacatttgttaaaacacgccagccgggcgtggtggctccagccagtaatcccagcactttgggaggccgaggcaggcagatcatgaagtcaggagttcgagaccagcctgaccaacatggtgaaaccctgtctctactaaaattacaaaaattagctgggcgtggtggtgtgcgcctgtaatcccagctactcgggaagctgaggcaggagaatcgcttgaacctgggaggcggaggttgcagtgagccgagatcacgccactgcactccagcctgggtgacagagtgagactccatctcaaaaacaaaaaaagcaaaaaaacaaaaaaacatgcctcactacccaccgccacccttgccttcttgccattccttggactctgcttctggttgccagtttcctgagtct

SEQ ID NO: 49528 - DNA, 1046 bp, Homo sapiens
gtgctgggattacaagcgtgaggcactgcgcctggctgatccatttattttttcagattctcagcctggatgtttgatgaagctcaccaagagcctcttttatctgttgtaatttttaactgaggttgactaatctatggtatagagttggagggtgagggtcaaggtaacagtcaatctgggcatcattagttaagtcgtacaaatctttgctattttcaagggttttaagtgagctaaactcctctccaaacatccttgtagatacttgtgggagactgactaattcctttacaaagaagaaaagtcacataacttctttgccttttaattttctttttctccaacatgaaaatatcagcaatattagaaagaggcacatggagtttgcgtgtggtggctcatgcctgtaatcccagcactttgagaggctgaggcaggtggatcatttgaggtcaggaatttgagaccagcctggccaatatggtgaaaccttgtctctactaaaaatagaaaaaatagccgggcgtgttggcgggagcctgtaatcccagctacttgggaggctgaggcaggagaatcacttgaacctgggaggtggaggttacagtgagctgagatcacgccattgcactccagcctgggtgacaaagcaagactctgtctaaaaaaaaagaaaaaaaaaaagaaatatgtaaatggaaaagaacaaacccccctcccaggttccttattccccttggtgcctgggccattgtagatctagcatatgcttggtggggacatctgccatttgctttagggttacactacatctttctactttgagtgcttgaagagttgctccagcagggcctgatgtgggcctggtgaaaatctagcctagttgcctttctgtctgccatagcctgggcattttcctaaggttgggagtttttttccttctggtcttaggccagttgccagaggaaaccgatgactaaaggcttcctccctgcaacgtcaacttctggaacctttcctgatgattcctaccagtcaagtct

SEQ ID NO: 49529 - DNA, 1054 bp, Homo sapiens
caccatcccaggccaggcgtggtggctcacgcctgtaatcgcagcactttgggaggcaaaggcggtcgaatcacttaaggccaggagttcaagaccagcctggacaacagggtgaaaccccttctctactaaaaatacaaaaattagccagacatagtggtgggtgcctgtaattgcagctacttgggaggctgaagcaggggaattgcttgaacccgggagacgggggttgcagtgagccaagatcacgccattgcactccagcctgggtgacagagtgagactctgtctaaaacaaaacaaaacaaaacaaaacaaaaacagtttgtgatcttctggataccatctgagggagtttggaggtcccagtgggttgtgttgagggttgcagacttgtgtgtgttaatgggacataactggagaaaatggcaaggcagagtccagaataaggaaggaagatcaggcagcctttgaaaataataaggcagcataggtgctgtgttgtgctctgcctttccataggattctgcttcttggggaggaaatccccatctctctcaagagataaaatatttaaaataatgctggaatacatgtgtatttaactgttgtgcatggtttcacattgtcttgccaactagaaatgtaatcaccttttagttttccctgaaagtgagagtcctttatgctagaagggctctttagaggtcttcttgggcagcccctagccctctgtagtgaaacaggtttttgttttaaattattcctgacaggtaggatattcgtcataatatggctaaaaggggagggattagtaatcatcacattctacttatgatgtgtcaagtactttcatgtctattattattattatttttatttttattactgttcaattattttcttcctccagtgtcaaacatgtctgttatgttaacttaaatctcccaataaccctgtactgaggtcgatattattagacccgttttatagattaggaaactgaattttagaaagaggaaggtcaaaaaggctccaaagctcaaaatgctga

SEQ ID NO: 49530 - DNA, 1069 bp, Homo sapiens
atagtcccagctactcaggagattgtgccaggagggttgctcaagcccaggagttcaaggttacagtgagctatgatcacgccactgtactccagcctaggtgacagagcaagactctgtctctaaaaaaaaaaaaaaaaagtaaagaaaaataatctagaattgggagaattgggagatgggcttaatgatcctcagaatatctaacttcagatttaggtggaacttacttctctggagtttgttttgtgtttgttttactttgaatggcaaagtgtaatcattgatacttaattggtgaaaatacaaattagtctgaggaatatttaaatacaagtttactacaattaaagtgatgtgcttacattcacatagctcacaagtgattatggtgctagtctggaatgactaaatgcattctaattataattgtgctttgcattctctcttcacatggaggttatattggagaacttttaaagggacagcctagtgaagtcaaaagggcctggatagaaagtcatgaatcttgggctgtagggttggctctatcactaattcgctgtgatacaaacgtttcccttatttgggcctcagtttctcatctgtacaatgcctaacttgtttctcaaatctggttatctctcagaaaatttatctctggcatttatttgtgcattccatctctctttctctcccatttctgttcctagtattgggatttcagacaatccttttctgtaaaaaggagagaaatgcctcacctgagtatgatcagctgctggcatatgtgaggaggtagggctagctggcagggggatcatctcttccttgacaggctttttactgtctctaagacaaaagggaggaagtgtccatagaacacataggcttttgggccctttgctttagacagcagtatcattctgggtagcagctattagagagggaagcggttagtcagtgcagattttacagaccagctgggagccagaggctcctttgacatttacctatactccttccaagagccctgattctactaattccccatcccaaaccagatgac

SEQ ID NO: 49531 - DNA, 1050 bp, Homo sapiens
gaatttggggatagttggatatagtcagataaaagtggtttgaagatttctgatcatcagtcggtattaaggtaatttcaggaagaaattcccaacagaaagtgattacagacatgggattcagtccccagtgaaagtaatgtattatttttcttaattaccaggggagttgccacccagctgtctaagattatgcaaattgatgatctttcagtgttttctccccaccctacagccactccattacccttaaaacctattttttgagagtccataacccttactcttcccaggtgactgcccaggatgtgcggaaggaaagccccctgctctttaagttccgtgccaagttctaccctgaggatgtgtccgaggaattgattcaggacatcactcagcgcctgttctttctgcaagtgaaagagggcattctcaatgatgatatttactgcccgcctgagaccgctgtgctgctggcctcgtatgctgtccagtctaagtatggcgacttcaataaggaagtgcataagtctggctacctggccggagacaagttgctcccgcagaggtgaggtggttccctgccctcctttgccttggccataaggggctgcagcccacagctgaccaatccctgcctcacagggatgccagatctgttcttctccattggggtctgtctgaagactgtgttatgctgctcaagagacatttgcatatagtgtcagactctgttgttgtttttctggctttccaaataaaaagcctttttgttttccctctgtctacctggttacagaactttattaccctggaggcaggtgcttatatagaaccagagattgagtaatttctttcacccatccctggttccattttctcagttctttttactgatttagatctcttatatcagaagttcacaggggagagagagaaataagcaaaccgaggacatggggagctcaaatagtcttttaatattgacagctagtgtacagagctttccccttttgtaaacttcaaagtcaaaagctctaaaacactcat

SEQ ID NO: 49532 - DNA, 1032 bp, Homo sapiens
aggggaaattctacacttgttgcaaaaaaaaaaaaaaaaaaagcaaagggcctctaaagaatcagcctctttggtccctttgtgctgtcacctttttgccatgtttaacagcatcttggttggcactctagtcttaatcttgctccttaactttgaatatgcagtctaaaatgtcagtagtcaacatgtaattttcctttgaaattctgaatattccagtgctggaacttatccaaaaagaagacctcagaaacttagattggtagatctctagtgcatattatcatgtgggcaccttctcttagggtggaatgaggcagtctggatgcagcatagttaaaaggagctgtttaatattctctgtagtctggcctcttaactagaaagtaaagctaaatcagaagcctgtatttaaccatgtgaacagggagggatttagtgttctgatggctgattaatagaacagctagatacttagagcatgacgtgggatgggatgagtttacagctgctgccttttcatggtgagcttagcagttttctcattagatgtgtttttttgggttggggaatagcaatttattttattgattttagactttatcaagctaattagctcccctttagataagtacatgttgcacatgtgcacctacttgtaatctcagatatttatgcacacaagtgtgaaggtttttcagggagcagagcatctgggacaggctgattctgagctaaacagggctcctttaaggcaatatgaactgttgccttctataaattgcacattgaggaactctaatagacaaagattaggtgtcaggcagaaaacactcattgtaaatatactattagttgataaacataggactttcttattccccagtttttctttatcatataatttaaatatttattcattttgtatttaaagactacctacacatagatatatgattccaaagtcatactttctccatccccacattagccaagtgaatacagggccaaatgggttcttggaatgataat

SEQ ID NO: 49533 - DNA, 1032 bp, Homo sapiens
tccctccttgaacctcttttctctcccgcttccaccaccaccacacatatatacccctttttctcagtcttaagcatcaaacaatttctgcctctttctttttaattctcccagagggatggttaatgcatcacaatttaacttgtctattcaggtattaatagtcaagggatgcatctgtttgcttatagtaccagttatattcctaggaccttagagagcagtagtgtgagaatagaatgcctttctatttgggttaaactatgtgggaggaaaaagtaacagagtaaaggctttgccttaatgaagtcaagtgttctgcctggtgggaagtggccacacgctgcactgcgctgctcttgtttactctgttctttcagagcctttgtactttgccatcactgctagtaatttcttggtccttttcaatactccattttaatcttgatttttttctataaataataaatctgtgaaaaatctgtaaaaagatttgtgactattaaatgtgcaactaaaaacactggaaaaagaatttgtgtgtgcctattcttgtactgaaggcacagagatttgctacatactgatttcagatatattgtcatccgacaatattgaatgctttgtaaattgggcagggagcaagtaagaaagggaagtcacatttattgagcaaatgctgtataccatgccaggcactttattagttgctttacaaacagtatctctgattgacagcagccttttgagatcagaggcattatccttaaagttggatctggctgggtttcgaggctcacacctataatcccagtgctttgggagcccgaggaggcaggatctcttgagcctaggagttcaagaccagcctgggcaacatagggagactctttctttaaaaaaaaaaaaaaaagccagacttggtcttgtgtgcctgtagtcccagctactcgggaggctggggcgggaagattgcttgagctcaggagttcgaagatgctgtgaggtacaatggtgcaactccagcctggg

SEQ ID NO: 49534 - DNA, 1024 bp, Homo sapiens
tggagggtagtattatagaagtcattgctataaatgtaaatttgagcttacagatgtgatgaatattgagagaacactgtcccaggcacagtcttgatgacaaccacagtgctggatgatagacctatgaaaaggagccagaaagatgaggaggaagttatgaagctaacacttacctaccatggattttcacattgctatcttcatctaacactaaccctgtgagatcattccctccatttttttcagaagaggaagaagtttggattcaataccttgcccacagtaagtggctgaggtggaatgtgaatacaggtctgtctgaactccaaagccttggtgctttctgctctgctgttaccaccatgcccgattaatttttgtattttttgtagagatggggtttcgccatgttgcccatgccaatcttggactcctgagctcaagcgatccacccatctcagcctcccaaagtgctgggattacaggcatgagccaccacacagccaaatgttttatttatttaagtaaaaacatggaagtgttgatgaatgtgtgtgtcgtccttctgcaggggccatgctaatattctccctatcgttccaattttagtatatatgctgcctaagtaagcactccaaaagtattgataggtaggagatggaggctcctggtatttgttccttatttgtagattcagatcaggcacagaacattagagattaaaagaatgttatcgataattggttcaatttgctcattttaccaatgaaaaactgaggctcagagagggaaagtcatttacccaatgttgttcaaaggaaccagactaaaacttagtttttttcatttctggttcactgctttttctactatgtgagagtacagtagctaaaagggtgacaacctcatgcaggttaaaaaaacaaacaacaaacaaaaaaaaacaaatccacaattttttttttttttttgagatggagtcagaaatacaatccagggtagtggggctggtgctatagct

SEQ ID NO: 49535 - DNA, 1046 bp, Homo sapiens
tctgcatatgagatgggtttcctgaatacagcacactgatgtgtcttgactctttttccaatttgccagtctgtgtcttttaattggagcatttagtccatttacatttaaagttaatagtgttatgtgtgaatttgatcctgtcattatgatgttagctggttctttcgctggttagttgatgcagtttcttcctaatctcgatggtctttacattttggcatgattttgcagcggctggtactggttgttcctttccatgtttagcgcttccttcaggagctcttttagggcaggcctggtggtgacaaaatctctcagcatttccttgtctgtaaagtattttatttctccttcacttatgaagcttagtttggctggatatgaaattctgcattgaaaattcttttctttaagaatgttgaatattggcccccactctcttctggcttatagagtttctgctgagagatctgctgttagtctgatgggcttccctttgtgggtaacccgacctttctctctggctgtcttcaacattttttccttcatttcaactttggtgaatctgacaattatgtgtcttggtgttgctcttctcgaggagtatctttgtggctttctctgtatttcctgaatctgaatgttggcctgccttgctagattggggaagttctcctggataatatcctgcagagtgttttccaacttggttccattctccccgtcagtttcagggacaccaatcagacatagatttggtcttttcacatagtcccatgtttcttggaggctttgctcgtttctttttattcttttttctctaaacttcccttctcgcttaatttcattcatttcatcttccatcgctgataccctttcttccagttgatcacatcggctcctgaggcttctgcattcttcacgtagttctcgagccttggttttcagctccatcagctcctttaagcacttctctgtattggttattctagttatacattcttctaaatttttttcaaagttttcaacttctttgcctttgg

SEQ ID NO: 49536 - DNA, 1022 bp, Homo sapiens
taaggaataaacaataccaattcaacactaactcttccagaaaattgaggaagagagaatatttcccaactaattgttctgataccaagatattttctatggccagcactaccctgatacaaaaattttctgaacaaaatttcagcaaacagaattcaatattatataaaaaggatgataatgcactatgatgacatagggtttatcccaaaaatgcagggttgattttatatttgaaaattagtcaatgtaactcactatattaacaaactggaaagaaaaaattacatgatcatcttaaccagtgcaaaaaaagtacatgacaaaatttaacatctgtttctcatataaattctcagcaaagtaggaatcactggggacttcctcaacctgatgaaaaacagttacaaagaacctatagctagtatgatacttattagtgaaggatcaggaatagggaaaggaatgtccacttttactcttctattcaacattgcattggacattctagccagtgcaatcaggcaagacaaataaataaaagatatccagatcggaacggaagaagtaaaactgtatttattcacaaacatgataatttatctagaagtctgatggaatttttagaaaatctctttaaactattaagtgtgtttggcaagattgcaggatacaagatcagtacacaaaaattaattgtgtttctgtatactagcaatgaaaaatcaataattgaaataaataaaacaataccatttacaatagcaacaaaatacttagggatcttaatccaatacctaatccaaaatacttaaggatacacctgacaaaagatgtgaaagatctgtacagtgaaaactacagaaaattgctgggagaaactgaagaaaacccaaaatgattggggagatatattatatttgtgggtcagaagattcaacattattaaagtgtcaattctccccagattgatctatggatttaaatgcaatcccaatcaaaatccctgaaggcttgtagaa

SEQ ID NO: 49537 - DNA, 1096 bp, Homo sapiens
aactttgagagagatggagaaccattggaggagatggagcataagagtgatagactctgacttaatattttcacagaatgtctctgactacagggtagggaatagactgtaggatggccaggacaaaagcatggagaccctgtatacatttatagtaatccaggtgagagagcactggggtttggactaggatgatgacaggaaggtggtgagaagtggtcaggttctagatacattttaaaggcagaactgacagaacccactaacatatttgatgtggagtgttcaagaaatcgttcaaggatgatctcatagttttgggcttgtccgatgggaggttggcgttgccatttactgagatgcagaagaccaagggataagtacatttcgggggagaagaggtttgtttttggtcatgttaggtttgagatgtctattagacagttaagtgaaaatggagaggatcaagttgaatacaaaagcaacaagtcaggggaagttggtgagaacatataggtcctatctcaaactttaagtatgcagaagcagggccagggacttagtgaaggcaaattatgtagatgcttttctacatttctgccatgtccttgagtactgctacatgtttttcctctcatccttttttgatggaagtctcctacataacagggactaacatttactatgcatttattatatgccacacagtgatagcatctcaaggagttgagaaagtgccaccccataatatgccactttggacttcaaactgagggcatttggggaacagcaaattcagggagggatttctgaactttccttttctgtctaaagacagatcctccaaaaggaactcaattgttatgaatcccctccctggaaatctcatcaaccagggaagattaaacccgtattacaagagaggagactggaggttgacatcatgcccagataagctttatcacagggtgtcacctattcttctgaggtcccatttatctttccccaaaatcatttattcctcctagaggcctacttcccccctcccctcttccctatgaaaagggtctataagcttctagatctcactgggttg

SEQ ID NO: 49538 - DNA, 1033 bp, Homo sapiens
gcccggctggaacggcacggggcggggcgccaaggcttggcggccccgtggttgggcgtcccggcagccgcttgagggatggggcggggtcggccgggacctcctccttcattccctcggcgggccgagcctcccctctctcccgcccctcctcctccctttcccacccctcggagtagagctgcacatgcggctgctccctgctccgtcccgcccagccactgtcgcgcaggaacgggtccctgcagcccccagccgatggcaggacagtagccgcctgtcagaggtcgtgaacggctgaggcagacgcagcggctcccgggcctcaagagagtgggtgtctccggaggccatgggctacccggaggtggagcgcagggaactcctgcctgcagcagcgccgcgggagcgagggagccagggctgcgggtgtggcggggcccctgcccgggcgggcgaagggaacagctgcctgctcttcctgggtttctttggcctctcgctggccctccacctgctgacgttgtgctgctacctagagttgcgctcggagttgcggcgggaacgtggagccgagtcccgccttggcggctcgggcacccctggcacctctggcaccctaagcagcctcggtggcctcgaccctgacagccccatcaccagtcaccttgggcagccgtcacctaagcagcagccattggaaccgggagaagccgcactccactctgactcccaggacgggcaccaggtgagtcacctagtaggggcggcggcggccccctcccctcgcgggtagggcgagggccctccgccacaggggcctgggagcactcagcaacctcgagccaatttagagggcaggaccagggagggaccaggcgagcaagggagaagttgcccagggcaggttgtcttcggtccctggcccagctaatccagactccctggggaccccttgacttggaaagtctcgcgcgcgcccgcggcccctggctgcgggctgcctcgagaaaagttggcgacgctcccgtcg

SEQ ID NO: 49539 - DNA, 1029 bp, Homo sapiens
agagtagctttcaggagttctttcgactcaacccccactccattgagtccctatttggtatgagataatgctagtagggggattgtatcctcaagacagattcagctaacagaaccaatgaaggagcacaaacctacttcatccttaatgacattagacaaatcctttggtgcagcttgtttctgtttggattcccagctgacatctcaaatttagtaagctaaactgaacttatcttcattcttccccttcccaccacacacaccaaattttataaaagtaaaccctggtttcatgctctcaatcacttatgcataaaacttggaaggccttatatttttacttctcccttgtccttgctacctatatatagcaatcaattgttaagttgactcctactttgtgatgttgatttatattgttcatgatgtctcttgcatgactccctttctttctagtctcactgctatcactctggctgtatttggcttagatgatcttcaaggtgcctcccaacaatgaaaatctgtgactctttctcagctccttattacctcactcctacagtggttgtgtagctgagagttgctttgttctctgttccatatatatacctcagctagattatttttcttccagagttattttgttatgtcacttcctcctcagaaaccttgacatctccctactgcccgtagaataaagttcagacttcttaaactggcattctaagcccctttgcaattgggtttgaactactctgtcactcttctttttattctctgtttgaatcttgttttatccagactggtccactgacaggccgcgttctggcctttgtttgtttacctgttcccccgaagaagaatgttctttcctccaacctgtctcttggacccctccaggtccttcaaagctcaacttaaaccttaactcttgtgtgcattcttccttgcccatctatccatcccagcaccctaaattcctcattcagcactgtgctgtgttgtaggtgttcttgtttcctta

SEQ ID NO: 49540 - DNA, 1030 bp, Homo sapiens
ttccttcctcagttcctttccctccttcagatctttaaaagccttccacataacaagtattcatattccactttgacctgctgtatacctcttgatttcctcaatacagcaagtccttaccttcaaaatgctttcggaattcatttctccctgaatactgaaggtacctcaacttcttggctttcagattctaactcacgtgccaggtcacgagaggctccatacccaagtttcttttcaagtcacaaaccccatacacccccatcgtatatcaaagttccctaaccctcttgtttgtatttttaacagtaactcatttaaacgtgtaaatgtgggaaagcccttaaggtcaggactctctctgtttgtcttgtatagtgcaaaatatgccggtgttccaaataataaaggtttagggaaaagcccaggttgtggttatgtacgtgtctgtgtttgtctgtgtgagggagtcaaggaaggggagggggagaaaatggagggactgacttgtgtttctttgtgtttgcgtataagtattaaatgctagaattctagcatttaatttctaggagaaatgtgattcatagttcaggacataagaccaagtagtactactgtttcataaactacactcttacatttccagttaacccattttcttctcagcccctgactttacctattcattcagaaagtctggctcccacctgctaaaccagagtgcctcatgcttattttggtctgttttggatatctttcttatcctggaggttgtagaaagagtactggaataagttctggctcttaaccaactagcatatttcagtgtccttatttgtaaaatgggaaagacagtaccttccctgtctccttcgcactgtctttttgaggatcaaacacaaatatgtgtgaaaaatataaagtcttgtggttatttcttagaggactatttgataaatctgtctctttgtctcgttaattatgtaaaactttttttctaattactaccttatattttccatatagttgc

SEQ ID NO: 49541 - DNA, 1111 bp, Homo sapiens
acaagattaattgtgctctgtctgtcagacatcccacctcactttctccatcatgctccagtggggtgtggcaaggttgtagcattgtcacaagtgggacaaggattggaagggcaggacaagcaaaattttcaaccgcaatttttttagcattgccctgggaaatcacacaatagtagagctgaaaagaatttcaagagactgtcttatccaggccctctgccttcaagcaagtgaattttaaagcattcatgacaaatggtcactcaggagcccctaataatctcactaagaagaatattcaatggagatgggaagaaatacaaaagtgcaaaagttatgtatgccaagtagtccacaggtatacttcaatatagagaaggatatattaggaaatgactccggtgcaaatctatatatagatctgtgttttctcattgccttttattaacaaatgggaagtgtcattccccagagaactgagcacgttatctggtgtggagtcaaaaaaaagaaggaattagagatcaaagaaggactctgaaattgttcctggaatctgggctaatggaatgagccagctgccttgggaaagacctgtatcagatagatgagttatgctgcttcaggctgtttaattaatgagattgggttctgtaactgacctgtggatatgaaatctgcagactgaggacagaacatactattgtgaagaaattttgcattctaagtggaggattgtggagtggtactctacatggcagttagatacatggacttcatagcctgaagtcaggatttgaatcccagccctgccatttactacaagtctcccactagtcttctccatttcttcgtctataataaagataatatcgactctataaagttgttatgagaatcaaagaggcaatggatatgaaccttatagcaatagtgcttggcatatagtaagtcctcactaaatgttaactactactactactactgcttagtagtagtagtgttctaatcattactgtgctgtactaaagagacaatgagcaagcaaagggggaaatgcttggttagtcttagcaggaaattcatggttatttggtggtggtggtgg

SEQ ID NO: 49542 - DNA, 1044 bp, Homo sapiens
ctaaattatatgcctgtgcatttttataatttgcagtggcaaattataaaacgcaatagcaattatgctatttgtagtttgttacatttggcaagatatgtggtggggtgagtggttgggagagatgtgagggtgtgtatgtgtgtgtgcatatatacatatataatttgtgtatatacatacacacatgaaaatagtgggaaacacccaagtcagtaaaatggacaaacacattgaggaaaatggctttaaaggtttctaacaaaaataatgtaattcttgtgctaagtattagactagtatatttcactctacttctaagccatgccagtcatttttataaactcatactgttgtttgcaacataataaaggcagaaaatgcagttggttcatcaaagtcactccctttgtcataactttatatggagggatattacactattggtgccaactttatagaaggacaggctgttgcttggatgtttgcatgtatatgtataatggtgcagcaagaattatgttaggactctcatgggtacattctatttagactatgagaagacaagagctcggattatagagctaaactgcatggctttgaattgttgttctcacagtagctttgtgaccttgaataaactacatagggaaactgaggctcacagttgatgtgaaaagtggaaaaaataacaagctgtgtaattcatagggtggttatgagaataaaatacttgcgaagtatttagaaaagttcctggcttacagaaagtgttcaataagtgttagctgctgtgtttgttattgttgattactgttgttatttttactgccagaaataatagtagtagtagttggaggaggaggaggaagaggaggaggaggaggattataggtgtgtcacagactgaaaatgagtggggaggcaatgtcctatagtgcaaaattttagctttagaggctgaaaggcctgggtttgattactgcttttattatttatcagctgtgtgacttaaaacttaacctagttgttctttcatgagta

SEQ ID NO: 49543 - DNA, 1035 bp, Homo sapiens
gggctgtaccctgcaaagccacaggggtggagctgcccaaggccatgggagcccacctcttgcatcagcgttacctggatgtgagacatggaattcaaaggagataattttggagctctaagatttaactgccctgctagattttggacttgcatgaggcctgaagccccttcgttttggccatttcttctatttggaatgagtatatttacccaatgcctgtacccccactgtatctgggaagtaactaacttgcttttgattttacaggctcatatgcaaaagggacttgccttgtgtcaaatgagactttgatctgtggacttttgagttaatgctgaaatgagttaagactttaggggactgttgggaaagcatgattggttttgaaatgtgaggacatgagatttgggaagggccaacggtggaatgatatggtttggctgtgtcgccacccaaatctcatcttgaattgtagctcttataattcccacgtgtcatgggagggaccctgtaggaggtatttgaatcaaggggcgtgtcttttccacgctgttctcttgatagtaagtgagttttcgtgagatctgatgattttataaaggggagatcccctgcacatgccctctcttgcctgctgccatgtaagacatgtcttgcttgccctttgccttccaccatgattgtgaggcctcccctgccatgtggaactatgagtcaattaaacccttttcctttataaattactcgtccttatgtctttattagcagcatgagaacacctaatacatcatgcaatatttttctttctgtgtctggcttatttcacttagcataatgtcctccaggcttatccatgttgtggcaaatggcaagatctcatttctttttaggccaaataatatttcattgtgtgtgtgtgtgtgtgtgtgttacacactatagtttctttatccatttgtccattgatgaacatttaagttgtttccatatcttggctattgtgaacaatgctgcagcgaacatgagagtgca

SEQ ID NO: 49544 - DNA, 1060 bp, Homo sapiens
atgtattctttaaagaaatgtctattcaggtcttctgaccattttgtagttaggtgtttgtttttctgctattgagttgtatgagttctttatacattttggatgttaatctcttgtcagatatatgatttgcaaatattttctcccaatacatagactgccatttcattttgttgattgtttccttttctgtgcagaagctttttagtttgttgtagtctcatttatttaattttccttttgtggcttgagcttttagtgtgatatgtaaaaaatcattgtcaaggccaacatccaggagcttttctcttatattcccttcaaaaagttttataatctctggtcttacatttaggtcttttatccatttgaatttattatggtataagctaaagattcaattttattcttttgcacgtggaaatccagtttttctagcaccatttattgaagagactaccctttccccattgtgttctcttggtgccgttgtcacaaagtaattgactgtatatgtttggattttttcctgggcgctctattctgtttcactggtctatgtgtctgtttttatgccagaacaataccattttgattactataggtttgtaatataataaattatataatataatcaggaagtatgatgcctccaattttgttttcctttctcagaattgttttgtttattcaaggtcttttatgtttccatacaaattttaggatagtttttgctatttctgtgaacaatgccattgggattttgattgggattgcactgaatcagtatattattttggatagtatggacatttcatcaatattaatttttccaatcgatgagcatgggatatctttccatttattggtatctttttcagtttatttcatcagtgttttgcagttttgggtatacatatctttcacctcattggttaaatttattaagtatgttttcgatgctatcataaatgggattgtttatttctttttcagttaggtaattatttttgtataaaaatgttactttttttgtatgttgattttgtatcctgcaact

SEQ ID NO: 49545 - DNA, 1553 bp, Homo sapiens
attcatatttactttatgtatttaggtgctccaatgttagattcctatatatttataattgttatgttttcttgatgaattgacttctttatcattaaacaatgaccttctgtgtttcttgtaaaaatttttgactggaagtctgttttgtcagatataaagatataagcacagccactttgctctcttttggttaccatttgtgtagaatagcttttcccattcctttgctttcagcctatggccttaaagcttaagtgggtaccccatagacaccatatagttggaccttttttttttttaatccattcgactactctatgtcttttgattggagaagttaattcacttacattcaaggttattattaataggtaaagacttactactgccattttgtttattatttatggttgttttttagcttctttgttcctttctttctctgttgtctatctttgtgatttgatacttttcttagtgctgaactttgagtcctctctgtttatcatttgtatatctgctgtaggtttttgttttatgtttaccgtgatgcttacataaaacatcttatagttataataaactattttaagctaatttcaacttctatcacatgcagaaactagacttttaccttcgttttccacaatttatatttttgatgtaacaatttacatctttttatattgggtatttttaacaacattataattttagttattgttaaccatctttttttctttttctttttcttttcaacttttattttagattcacatggtacatgtgtaggtttgttaactgggaatattgcatgatgctgaggtttggggtatgaatgattctatcacccaagcactgagcatagtacctaatagttaatttttcaacccttgccccctaccccattcccttctctaattgttcccagtttctattgttgctatctttatgtctatgagttgttcactgttttgacttataaccatactagagttatgtatgatttacacaccattacaacagtattggaatattctggatttgagtatgtatttacctctaccagtaagttttagattttcatatgtgttcataatagtaattatcttctttatgtttcaacttgaagaacttccttaagcatttcttgtagggcaggtccagtggtgatgaattccttaaattttttcttgtctgggaaaaactgtctccttcatttctgaatgacagacttgctgggtatagtattcttggctgactgtttttttttttttttttttctttcaggactttgactacatcatttcattctcttatggcctacaaggtttctgctgagaaatccactgatattctaatggatattcctttgtatgtgacttgacatttttctcttgctggttttaaagttttctctttgacttttgacagtttgatgatagtgtaccttagagagggcccctttgggtagtaactgtttgcgaacttttgagctttgtgaatctggatgttgatatctctcccaagacttcggaagttgtcagcaa

SEQ ID NO: 49546 - DNA, 1031 bp, Homo sapiens
taaagtaataaaccctgaactagcaggacaactcgactaactccttcctgagttacaatcaagattttccttcattcaatatatacctttctgttcaagcctctctaactagaattgaaatgcaatggtaaggcaacatgaggcagtaaatctatgaaaatgaattgttcattcacactacatttataaaacaggaaatacgattataaaacagatgttgactgattgaaatgctgtatgctcaatcatgttagtgtttatttgataaggaatgccatttgtttagctttgcttatttattcagtgactgtggcctggaattttattagatgctgtatagctgtatatctctgcccaccagaatgctgagagaatcttagcttgaatgaaactggataagaagttggagctgtttagctttggtagtgaagatgagaagactttagttttgaaggttttccattttaaatgtctttgttttgttttatttcatttatatatgggtgccagaacatagaagtgactaatagtctggaagtattcattacttgtttaactttattctgaaaactttcatcttcctaaaagtctttcaatggctacccagggagagatcgagagccaagaaaatttcctgaaatggaatcatttataactgatatgtttctgaataatggagaaaacttaaatttaattttaaaagtactgtaatactaaacagctcttatatttgaaataaattattcaactaattttttgttctcccttggagccagttagcaaatatcttttgtgttgcagtgagattacagcaaatgatttcatgggaacatttatttagattttgtattttattttattagctgataatatctgggcctttatgatatagaaactagtacaataaatatttgaatgaatagatttaggaaccagataatttggaaggataatttcaaaacttgagtgaactatgacatttaaaaccagcatcttggatcatcatgtaacatattgtgtaatatacatta

SEQ ID NO: 49547 - DNA, 1909 bp, Homo sapiens
cttgcccttgttgcccaggctggagtgcagaggcacgaactcggctcactgcaacctccgcctcccaggttcaagcgattctcctacctcagcctcccgagtagctgggattacaggcatccgccaccatgcttggctaatttttatatttttaattgagacagggtttcaccatgttggccaaatcctgagctcaggtaatccgcccaccttggcctcccaaagtgttgggattataggcatgagccaccgcgcccagcctgaaatggcatttctttctctgaaaatgcatgatggtaaagaatacaatggccactaatataggttggtgtccctgccttaatccatgcaaggcaccaacagtttttgcaccactattttttaagataacagctttattaagatatagtttagataccatatacttcacccatttcaagtgctaattcattggtttttagtacattcacagagttgtgcaactattatcataatcaattttagagacacaaaaggaaaccctgtacctataagtagtcactacccatttttcctgaaccctctcctcttccagcccctaggaatcatatatctactttctgtctctatagatttgaccattctggacatttcatttaagtggaatcatataatgtataatcttttatgactggctttttcacttagcataatattttcaggattcatccatatgaatcctgtatttcattctttttatggttgaatgatattctattatatagttatattacatttatctattcatcaatggatggacattaggttgtttccattttttgcctgttgtgaataatgctgctctcaatatttgtgtacatgtttttgtgtaaacatttgttttcaattctcttgagtatatacctacaagtggaattgctgggtcatatggtaactctctgttgaactttttgaggaacttccagactgttttccaaagtggctgcaccatattacatttccacaagcaacatatgagggttccaattactcttcatccttgtctacacttgttattgtctattttttattatattcttcctagtgaatttgaagtgatatttcagttgtggttttgatttgtattttcctgaagactaatgattttttcatgtgctcattggctacttatacgtatcctttggagaaatgtatattcagatcctttgcccatttttcaattgagtagtttttttttttttttagttgtaagtgttctttatatattctggatatgagtctcttatcagatatttaacttgcaaatattgtctttcattctatgagttgtttcttcactcttatttgtgtgaaggaaaagaaagggagtattgccatcttaacaatattaagccctccagtctatgaacatgagatgtcttttcatttacttagatcttctttactttctttcaacagtgttttgtagttttcagcataagttctacccatcttttgttaagtttattcttaaacttttatgctgcaaagtttaatgtccaatttatctaattttccttttgtggcttctcctttaggtatcattttaaagaaagtattgcctaacccaaggtcacaaggatatacattaatgttttcttctaagagttttatagttttagcctttacatttaggtctgtgatccattttttattttattttatttttattttggcaagcctgtacaacctgcactgagggatgcattgatgcagtcaatatctgaagatgaactattaaaaagtaagtgtaaaacagtgtcttaggttagggtccctgagaaatacactctaagatggagttagaatataagcagtttgttggggaatgcactccgatcaactcctgtggggaagtgaaggaaagcat

SEQ ID NO: 49548 - DNA, 1033 bp, Homo sapiens
agactgcttccacagtgtaccaagtgtctggaatgccctctcctttgtctgccaaaccatttctctgctgtaagcttgagagtgctagaaatctcacctccttcgttaaactctgttgacctaagtgtcatagaagtgacagttccctgaggctcagatcatgtaaacacttctccctgtcagtttatgtagatgttcagtgttttatactcctattttaggtatctttgtgggatggttatctgtgttgtctggtatcttagatttttaaatccacaaaggggagaaatcctatcagacttactgagtattcagtcacgcaagtaactaggcatttaatgtactgttctttgatggcagtgtcattgaggaaaaaagtgaacaaattacttctgtgaaaaattaaaactcttgctgcttgttgaactttctaataaataactgagcttataggcttaggaaatgggattgggatgttcaacgtttcaattcttggccacatagtatctactataatgttttagaagttttatttctctttcctccatactagtcagataactcaaatatttgacttcatcgcttagtaatctttgtatgcattataatgctgcctttcagtttacatgccattaactagagaagtcttaaatttctattgttaaattctccacagatctgactgaacgtgtggtggatttctacctctgggaatgcgattatttattaactgccttgacaaaaacttttagacagagacaaaacccttcacaattagaactctgcctgtatttcctcctttatgtcctgccataccctatcactcatctagctccaacagtaccaaagtaatagtaatttcccatgcccacagccatacctttgtacacataatgttatcttctcctgaagtgcatttttctttctctaaccccttattcatctggcatattcttgacttatctaaaatttcttctattctgtgagcattttttgacacttgtactagacaaagttagttctattttcattc

SEQ ID NO: 49549 - DNA, 1895 bp, Homo sapiens
attttccagtgtaagtgatatgggtaaagagactgagaagccaaactgaaagtggtaactaagagacagataagatgagcaggggtttcagcggtctcacagggctgtagagataaaaagtgaagttcagctatatcctgacagtcagaacttgagggtctaagatgccagagaaaaggaaagtacagtgagtttagttcagtattttacactattttttcctttgaggaattggctgatttataagtggtacaaggcaaaaaagttgagaagttaagcagagagtggcagatacaatgcttagtagttaagcagagctttcatcaatttcacaatgctgaagagacagaaattagagttcagagcctgccaaagaggagggaccctggtaattattccaggttttcagtttggatccccaaagggctaaactctaggagtaaggatgaactagaaaataccatttttcacaaagactgaagtggagctttgaatcagctcaaccttagcaggattaatgtgatctgtccttcaccacctgccaaaagcaaaagtaaatctttggaggaagataatatcatccagtgctcctctaacttttaatatataatgtctggcattcaataaaaatattacttggcttaccaggtatgttagtttgctaaggctgttgtaacaaagtaccatagattgggtggcttaaacaatagaactttattgttttacagttctagaggctggaaagtccaagatcaaggttctagaagatttggagtctggtgaaggtgaaacgggagagttccctgactcccttgcaggacttgtgatgggtgtggctcacttgccacacgttcaaaccccttacaggagcgggagcacacggacaggcaggtgcacaagcctgggcgagtgcttttgggctctggccccatggtagcatccacgggtgtgttacaattaatgctcttttagcagttgccatctgcagacggctacgtgttaaaccagctcagtggagagtcagaatggcagtgttttacactctgtgctcttggtacctgggctcttttctggcgttcaagaagaatcaggtcacactgacttgatgaatggtgaatgcgggtattttattgagtggtggagtggctctcagcaggatggatggggagctgaaaaaggggtggggttagaagatgaacttcccccagagttcggctgtccgcagtgaactcctctcgacgactttcagatgctctttctcttttctccttctctgctgcactctgctgctcatctgctcatctgctcgtggagcctgaggtttggggtttatatgggtacaggatgggggttgtggagggccaaacggcaacatttgagcatgaaaacaggactacctattcccatttagggctgtggatttccaggcttgaggatggggcctttgccagggaactgccctctactacccagtatttccctgcctcctgtttggatcaaaggcataatttctttgatttatggttggccattctcctgctgtgttctcacatggcagaagggagaatggaaatctctggggtctctttataagggaactaattccatttatgagggctctgccctcatgacctaatcaccttccaaaggccctaacttcctaataccattgcattaggggttaggatttcaacatgtgaattttgaggggcacttgctgtactgtaccatctcctttcaggcctcatttcaccatccttgtctaaacttaaatctgcatctttaagattgctgaggttttctgttttgtgttgcttgttttttcctattcctaaagcatttaatagaaatagatcttgtttgggtgtgttaaagaatttgtattttgtgctttt

SEQ ID NO: 49550 - DNA, 1050 bp, Homo sapiens
aaatattcttggttgatggtgtttttttttgtttgtttcctttcattaccttgaaaatatcactctgttgccttttagcctccattgtctctaatgggaagtcagctgttaaacctattgggttcccttgtatgtgatgagttgtttttctctagttactttcaagattttaactttgtctttcagcatttctgctatgatgtgtttgggtgtagatctcattgcttttatcttacttggagtttgttgagctttttgtatttgtaggttaatatttttcaccaaatttaggatgttttttaacattattttttctaatagtttttctgcctctttctctcttgtctccctctagtactccattacatttattcagtgtatttaatggagtcctgcattgctctgaggctcttttaattattcttcattctttcttttctttcttatcttggattgcataatctgttgatctttcttcagattcactgattctttcctctgcctgtcaaatctactgttgaacccctctcatgaatttttcattttagttattatacttttcaactctacaacttccatatatatttttttctatttcatatatatagaaaatatatatgtaatatattatatgcaatttctgtgtattattgggattctgtatttgatgcggcattgttatcatagcttcctttacttctttagccatggtttcctttagttttttgaacatatttataatacttgccttgaagactttgtctaccaagtctaacacctgagcttccctaagacagtttctcttgcctactttttaaaaagctgtgtgtgagtcacactttacccattctttgcatgttttgtaattttttgttgaaaactgggaatttttgataatatagcaatctggataatatttaccaccaacacccccttccccagttcaagatttgttgttattgtttgctagttgtttagtgatttggatgtagtagttcagtgaagtctactttccctacactatgaagtctctgatgtcacctcagaagg

SEQ ID NO: 49551 - DNA, 1039 bp, Homo sapiens
gtatccctagatctctaacaacactaaactacatacaaataacacagataactttccgttgacataggactaataggattttagttccagaaaaatcactgtttttccgaagttcattatgaatcccaatgtgtcttttagaaactttttagaaacttcctctcactaaggttctttttttttttttttttttttttttttggttggggagagggggccatcgcttctgtcagaagaatagacaaaataaaacaagttagttttctttttcttttttttatgattatactttaagttctagggtacatgtgtacaacgtgcaggtttgttacatatgtatacatgtgccatgttggtgtgctgcacctgttaacttgtcatttacattaggtatatctcctaatgctatccctccccctccccctccccccaccccatgacaggccccggtgtatgatgttcccctccctatgtacaagtgttctcattgttcaattctcacctgtgagtgagaacatgcggtgtttggttttctgtcctcgcgatagtttgcccagaatgatggtttccagcttcatccatgtccctacaaagggcaggaactcatccttttttatggctgcatagtattccatggtgtatatgtgccacattttcttaatccagtctatcattgttggacatttgtgttggttccaagtctttgctattgtgaatagtgccgcagtaaacatacgtgtgcgtgtgtctttatagcagcatgatttataatcctttgggtgtatgcccagtagtgggacggctgggtcaaatggcatttctagttctagatccttgaggaatctccacactgtcttccacaatggttgaactagtttacagtcctaccaacagtgtaagagtgttcctatttctccacatcctctccagcacctgttgtttcctgactttttaatgatcgccattctaactagtgtgagatggtatctcattgtgattttgactcgcatttctctaatggccagtgatgatgagcatt

SEQ ID NO: 49552 - DNA, 1089 bp, Homo sapiens
tcatttagtgctatgaatttccctctacacactgctttaaatgtgtcccagagattctggtatgttgtgtctttgttcgcattggtttcaaagaacatctttatttctgtcttcatttcgttatgtacccagcagtcattcaggagcaggttgttcagtttccatgtagttgagcagttttgagtgagtttcttaatcctgagttctagtttgattgcactgtgatcagagagacagtttgttataatttctgttcttttacatttgctgaggagtgctttacttcccactatgtggtcaattttggaataagtgcaatgtggtgctgagaagaatgtatattctgttgatatggggtggagagttctatatatgtctattaggtctgcttggtgcagagctgaattcaattcctggatatccttgttaactttctgtctcgatctgtttaatgttgacagtgggatgttaaagtctcccattattattgtctgggtgtctaagtctctttgtaggtctctaaggtcttgctttatgaatctgggtgctcctgtcttgggtgcatatatatttaggatagttggctcttcttgttgaattaaaccctttaccattatataatagccttctttgtcttttttcatctttgttggtttaaagtctgttttatcagagactaggattgcaatccctgcttttttttttccatttgcttggtatatcttcctccatccctttattttgagcctatgtgtgtttctgcacgtgagatggatctcctgaatacagcacatggatgggtcttgactctttatccaatttgcgtctgtgtcttttaattggagcatttatcccatttacatctaaggttaatattgttatgtgtgaatttgatcctgtcattatgatgttagctggttattttgcttgttagttgatgcactttcttcctagcattgatggtctttacaatttgacatgcttttgcagtggctggtactggttgttcctttccatgtttagtgcttccttcaggagctcttgtaaggcaggcctggtggtgacaaaatcagcatttgtttgtctgta

SEQ ID NO: 49553 - DNA, 1052 bp, Homo sapiens
tatattgcccaggctgatctcaaactcctgggctgaagcaatcctctcaccttggcctcccaaagtgctgggattacagacgtgagctactgtacccagcctatcaagtacattttatgtgtcagttaatattatcatgatgttcttatttatcctgttgatatagtggattacattaaatgattttctaatgttgaaccagccttgcatacctggaataagacccatttataatgaatcattttatacaatgttagcttcaatttgttaaatttttattaaggtaaaatctacataatgtaaaattcaacattttattttatttttaataatttcaattttcattttagattcaggggtacatgtgcaggtttgttttacaggtatattgcatgtcgctgaggactggggtatgattgatcctatcctcattagtgagcaaagtatccaatagttattcaactcctgtgcccctccctccctccatttggtagtcaccagtgtctattattgctgtctttatgtccatgtgtacccaatgtttagctcccacttatgagtgagaaaatgtggtatttggtgttctgttcctccattaatttgcttaggataatggtctccagctgcatccatgctgctgcagagggcatgatttcattcttttttatggctgtgtattattccatagtgtatattgactacgttgtctttatccggtcccatagataggcatctaggttgattaaatttgccactttagactgtaccattcagtgattcctagtatattcacagtgctctgcaaccattgctactaattccagaatattttcatcacccccaaaaaaccctctatccattaagcagtcattccacacttcttccgttacacattaagccgtcatttcacacctattccatccctagcccctgataactactaatctacttcctatttcaataaatttgtcaatgatagacatttcatattaatggaatcatgatacacacctttacgattagcttctttcagttagcatgttttcaaggtt

SEQ ID NO: 49554 - DNA, 1067 bp, Homo sapiens
caagaagagtggttgaaagaaaaaaaaaaaccttgctttgagatataggcagagctcagactctgtaggacattgtaggccatagtagtagtaaagttttcggcctttagccactgaagggctttaagtaagggatattgtgatcagcttcacattaaaacaattttaaacattttatttggaaataatttagacccacgagaagtttcaaaattagtaaggaagttccagtgtacccttcactcatattcccccagtaataatatctgaaataatgttaggacaattattaaaaccaggaaacagacactgatacaacactattaactgaatgacagacactttttgtattttatcagttagctatgaatttctaaaagactcctctagctacaatataaacaatgttttggaggactagagtgaatgcgtggagaccagtgaagaggctattgcagtagataaggtgagatgttggtggctcagactaggatgttggcagtgaagattctgaatattagattcaatagatatttgggaggtaaaataaagtgaactaggtaattcattggatgggatgttgaaagagagaaagtcattatttctaggtttctggcttggataactgaatagaaggtgatgctatttactgaaataaggactaggtttgtgtgtatggaggggcagagatgagtagctcacccttggatggacaggtagatctgttgagtatgcaaatgaatttgaaactctggagctcaaaagaggggctacatagtattctatagcatgatgtacaatgacatatttatttattttttatttttaaattctttgtagagttggggtcttgctccgtcacccaggctgcagtgcagtggcacaatcatagctcactacaaaagcttgaactctcgggctcaagcaatctccctgcctcagcctcccaagtagcttaatgggaggctaatccaccccaccacacccagctaattttattttttgtagagacagagtctcgctatgttgcccaggctggcatcaaactcctggcctcaactgatcct

SEQ ID NO: 49555 - DNA, 1053 bp, Homo sapiens
ttactagatctaaacagagagataggcttaaatgcaataatagtgggggacctcaacattccactctcggtattagacagattatctaaatagaaaatcgacaaaaaaacattggatttaaactgaactctagaccaaatggacctaacagacatttacagaacagtttatctaacacctacagactatacattcttctcatcagcatgtggaacattctccaggatagaccatatgttaagccacaaaacaagtctcaacaaatttttaaaaattggaatcatacaaagtatcttctcagaccacaagagaataaaactagaaatcaataccaagaggaactttggaaactctacaaatacctggaaattaaacaacatgctcctggatgaccactgagccaatgaagaaattaaaatggaaatcaaaaaatttcttgaagaaaatgaaaacggaaacacaatataccaaaacctgtgggatacagcagaagcagtgccaagagggaagtttatggcagcaaatgcctacttcaaaaaagtagaacagaactagaaaaggaagaacaaaccaagccaaaattagcataaggaaagaaataaagaccagagcacacctacagaaaatagagactaaaaaaatacaaaggatcaataaataaaaagatggaaaataatcctaaaatttatatggaaccacaaaagacccagaatagccaaagctagcctgagcaaaaagagcaaaactggaagaatcacattacctgacttaaaattataccacagacctatagtaaccaaaacaacatggtactggcattaaaacagacacatagaccaagggaacagaatagagaacccagaaacaaatctatacagtaaattaattttcaacaagtgtgccaagaatatacattggggaaaggatggtcttcaatgaatgacactgggaaatctggataaatatatatgcagaatgaaactagaccccaatctctcatcatacacaaaaatcaaaatggattaaagacttaaatctaagacctcaaactat

SEQ ID NO: 49556 - DNA, 1347 bp, Homo sapiens
catatccagccaaaataagcttcataagcgaaggagaaataagatccttttcagacaggcgaatgctgggggaatttgttaccatcaggcctaccttgcaagagctcctgaagaaagcacagaatatggaaaggaaaaaccattaccagccactacaaaaacacactgaagtacacagaccagtgacactatgaagcaaccacataaacaagtctgcagaataaccagctagcatcataatgacaggattaaactcacacataacaataataaccttaaatgtaaatggactgaattccccaattaaaagacacagaaaggcaagctagataaaaagccaagacccattagtatgctgtcttcagcagacccatctcatgtgcaaagacacacataggctcaaaataaatggatggaagaaaatttaccaagcaaatggaaaacagaaaaaagcaaaggttgcaatactagtttctaacaaaacagattttaaaccaaccaagattttaaaaaagacaagggcattacataatagtaaaggattcaatgcaacaagaagagctatttaggtatcttaaatgtatatgtgcctaatacaggagcaatcagattcataaaacaagttcttagagacctacaaagagacttagactcctgcacaataatagtgggaagctttgacaccccactgacaatattagacaggtcattgagacagaaaatttcaaaaaaatattcaggacctgaaagtcagctctagatcaagtggacctgatagatatctacagaactctccacctcaaaacaacagagtatacattcttctcattgccacattgtacttactctaaaattgatcacataatcggaagtaaaacactcctcagcaaatgcaaaagaactaaaatcataacagtctcttagaccacagcactatcaaattagaactcaagattaagaatttcactcaaaaccacacaaccacctggaaattgaacaacctgctgctgaatgactcttgggtaaataatgaaattaaagcagaagtcaagaagttctttgaaactaatgagaacaaagagacagtgaacctgattctctgggatgcagctaaagcagtgttaagagggaaatttataccactaaatgcccacatcagaaattcagaaagatctcaagttagcaacctaacatctcaactaaaagaactagagaaccaagagcaatccaaccccaaacctagcagaagacaagaaataacgaagatcagagctgaactaaaggagatagagacatgaaaaaccctttgaaagctcaacaaatccaggagctggttttttgaaaata

SEQ ID NO: 49557 - DNA, 1028 bp, Homo sapiens
gcctgtaatcccagctactcaggaggctgaggcaggagaatcacgtgaacccgggaggcagaggttgtggtgacctgagattgtgccattgcactccagcctgggcaaaaagagcgaaactctgcctcaagaagaaaaaaaaaggaaaagaaaaaaaagtaagtcaattaatgtgatacaccacataaacagaattaaaaacaaaaatcacacgatcatctcaatagatgcagaaaaagcatttgacaaaatccatcatccctttatgtttaaaaccctcagcaaaatcagcatacaagggacataccttaagataataaaggctatctatgacatacccacagccaacattatactgaatggggaaaagttgaaagtgttcttcctgagaactgaaacaagacgaggatgcccactttcaccatttctattcaacatagtactggaagtcctagccagagcaatcagacaagagaaagaaagaaagggcatccagattcgtagagaggatgtcactgtttactgattatatggtcatatacctagaaaaccctaaagactcatccaaaaacctcctagaactggtaaattaattcagcaaagtttcagaatacaaaattaatgtacacaaatcagtaggtctgctatacaccaacagcagccaagctgagaatctaatcaagaactcaacccctttcacaatagctgcaaaaaaataaaatacttaggaatataactaaccaagcaaatgaaagacctctatgaggaaaactacaaaacactgctgaatgaaacaataaatggcacaaacaaatggtaacacattccatgctcatggatgggtagaattaatattacgaaaataaccatactgccaaaagcaatctacaagttcaattctcatcacaataccatcatcattcttcatataactagaaaaaacaatcctaaaattcatatggaagcaaaaaagagcccacacagccaaagcaagatgaagcaaaaagaacaaatctggaggcctcaca

SEQ ID NO: 49558 - DNA, 1091 bp, Homo sapiens
ggcagaagctaagaggagtatggttgcagctctgcatgaagaagtgatgtgtatataaaatactgaaaaagaagagaggcagagggagaaatacaagttagcatgttataatagtactttaaataggaagaagtgataaaaaatgaagttatagctatcagagatactacttttgcaagaatagtttacatggttagaaaacaaattactcagatccttatttactttccagaagtcccccaacccatgcctttagatactgaggccatcttacataaaacagctgaatggtatgtcctctgtctcaaaacctgtttcttcatgtatgtcctctatttcccatatttgaggagtatgagtctgcttgagtaacagcacctccatccttttgagagaaatagagaagtggacgctgggtaagtaatgagtctagttttggatttactgaatttaggtcctaaagtgacaactggatagtcatttccatagacacatttacttgaaatgtgcaagtaaaatttatgagactgttttgtgactgatgtgaaaaatttaggaggcctgtgctttcgttggtgtagatgagtttgccaaggaaaaacatgtagacagaaaaaaagtcaaggataaaactttggggcaagttaagggagaaggaagaggaaggaaagagcaatcagaaactcagtaaggtggctgggtgcggtctctcacacctgtaatcccagcactttgggagactgaggtgggtagatcacaaggtcaggagttcaagaccagcctggccaaggtggcgaaaccccgtctgtactaaaaatacaaaaaaatttagctgggcctggtggtaggcacctgtaatcccagctactcgggaggctgtggcaggagaatcgcttgaacccgggaggtggaggttgccatgagccaagattgcgccactgcactctagcctgggcgacagagcaagaccctgttgcaaaaaaaaaaaagaaactcagtaaggtacaggtacttaaaggagcctggaaaagagaaaacaaatgttatgtcctccttgaagcctttccctaattatcttccctcccagatac

SEQ ID NO: 49559 - DNA, 1094 bp, Homo sapiens
tgaatgtgaaaaaacccatggacaatatttataatgaaaataggtggcagtgtatccccatgaacctcacaataaaaacaggtaagggcaaattacccatagccacaagatccagcagttattggcatctgtgcaggagaaaaccagagttgacaggccatctgaaaaacttgacaaacagaattccaaaacagtgtattccctagaaagaatggcagtccaatttaagaactgcagttgaaactgggagggatgagtatgagggtccaatagtcagaaggtctgaaagcgatagagtagtctagtccttagtgaactcttgaagttgatccaccggtctcccttccaggacagggactcacactgaggagaaattgctgagagtagaattgaaattaagcaggacaggaatagaaaaagaaagaaaaggtccagatgaaattaggagagaggaccagaaccaggaactccaatcaagcaagtaatcatatttctttaattcacatgaaaacagcagaaagggagcccttatgaagttagaaaagctactctgaaccatgcttctttctacaagtttaggaaaacatttcacgtaaaaatgaacaacagattgtggtgatggttgcacaactctgaatataaaacactgaactgttggctcacacctgtaatcccagcactttgggaggcggatcacaaggtcaggagtttgagaccagcctggccaagatggtgaaaccccgtctctactaaaaatacaaaaaaaaaagaaaaattagccgggcatggtggtacgtgcctgtagtcccagctacttgggaggctgaggcaggagaattggcttgaacctgggaggcagaggttgcagtgagtcgagatcgtgccactgcactccagcctggcaacagagtgagactttgtctcaaaaaataaaaaaacaaaaagaaacactgaaatgtatacttttaagtgggtagattttatggattgtgaaatacagcacaaagctgagaaaaagggaacagaaaattatcaaagtcaaaccctacacaaagttattagaagagaaaaacactacagaaagacacgctcaa

SEQ ID NO: 49560 - DNA, 1080 bp, Homo sapiens
atagtggtgactctggaccctggaagctctatgaggccgggtgcagtggcaacacagccccaggaatggtagggcatagctgtggcttgggctccagggggtgggatgcagtgcaatgttggctttgctccccaggaaggtgggacacctcagtggctcagaccccggagggctggtccagatccagggaggtgggggtgctattgccgtttggcccagagagcagtgtgtacagattagccaaggctgtgtttccctggggggtccagggacctggtgccatgcaggctaaggcaccagggtcccagctgcccccctgggccaaagctccagttccctggggctgagacactgcaccaaagaggcacaactgctgcccggcaccaggcccagcttctccatggggcctaagctcctggtcctggagggctcgagcgccacggtcacttgataggaaaaatcacaccatgttcctgggaaaggacccagaatgaccaacaagacatagtctaataaaatttccgaactttaaagaaaaaaaagccacagacatctcagtaaaaatagtaagtgatttataaaggaaagcaacttaggttaccctcagattttttgagatctatactttatgccagaagaaagaagaaaatggaatagcaggtatttaagaaactcagagggaaaaaaatgtgagccaaggaacattatacctggtaaaactgactttcaagtataaagagtacagatatttatcaacatgcaggaattcaagaaatattgttccaccatcccatgaatttgctagagaatgagcttcagacagccaaagtgttgagagacattgaaataaggacaggtagcaagcgttaaatgtacagttacttgtagaattaagatgaaatgaggattaaaagggagatagagtatgtaatgcctatgtgcccagataatgtagataactttttaaaaatggagaaatggggaaatcatgcaaaattttaacagttctcagtaattatattggtggagtgtcaaagttagtgttattattccaagactatgtataatgtgagataatat

SEQ ID NO: 49561 - DNA, 1053 bp, Homo sapiens
ggtatgcatcaagctgataacagtgcttacttctggagggggactggaattttggcagggttgaggcagtcaaggagacttgacctttacaagtattatctatttttttatataaatatatttatatgttacttctataagtaaaaatatagaatatatttttctataagtatagataaatatagaatatatgtaatatagaatatatgatatactatatatagaatatatgtaatatagaatatatcatatatattctgtatgtatagaatatagaataaatgtagaatatatcaaataaagaatatatgaatatacacatacatacatacacacccatgttattagtggttttaaatatgcagggtagtttgggcgtggtggctcatgcctataatcccaatactttgggaggccaagggaggtggatcacttaagctcaggagttcgagaccagcctggccaacatggtgaaaccctgtctctactaaaaatacaaaaattagccaagtgtggtggcaggtgcctgtaatctcagctacttgggagactggggcacaagaatcttttgaacctgggagacagaggttgcagtaagccgagatcacaccactgcactccagcctatgtgacagagcaagactctgtctcaaaaaaaaaaaaaaaaaagcaaggtaactataaagattgattttcattggttatactgaagtgactgagtacattgcttggaaaacagctctaggctatttagaaagcttctctgatatagccccacctaatctgcctctgcttattcgtgtcagtctaatactggtctagggcgtgcatataatcttcttggctgccaactactcatccagtcagttttcgccaatcttttttggttatgagaataggatggaatttgggttttccactgtcaaacttcagtttctagacttcgttttctttttttttttttccatttaaccctgagtggacacagcacatgtttcagagagcacagggttgggggtaaggtcacagatcaacaggataagaatttttctt

SEQ ID NO: 49562 - DNA, 1035 bp, Homo sapiens
ttagcagtttatcaaaaggctaaataaaaacgtagaggtaccatatgatccagcaattccactcttagttttgtctacccaggagatacgaaaacatgtcatatatgcaaaaccttgtacccagatgttcatgcagcagtagtcataatagccaaaaagtggaaaaacccaacatgtccatcaactgatgaatgggtaaataaaatgtggtctatccatacagtggagtattattcagccatacaaaggaatgaagtactgatacatgctacaacatggatgaggcttgaaagcattttgcttagtgaaagaagccaatcacaaaagaccatgtatgataggattccatttatatgaaatatccagagtaggacattaaaatctgtagagacaaaaagtagattagtggttctctagggctttggggtggggtgatggggttgtagggtgatcactaaacagtatatttctttttgtggtaatgaaaatgttctaaaattaagtgtggtgatgtttacatcaactgtgtgaatgtgccaaaagccattgaatcatgtactttaaatgagtgaattgtatggtatgtgaattatatctcaataaaactgttaagaaaaacaaaagaagaaaggagacatctctataaagtgatgacaactttacattctacaggaatatatattccacattgacaaggatctttgttttgctcacttctgcatttccaatggctagaacagtggctggcaagtagtgggcactcaataatgtttagtgaatgattttaatcataattaatgcaaaatatacctttcaaaaaatgaaggaagtagggcaacaaaaagtaccgcgggcttttcagtgactgtaaagtcagaggaaacagctagtttgaagagacaaagttggttttaggagaataatctttgggatggagagacctagaaaatattggataatgttggcctagagttcaagggagaagttgggctggactttgcaattaagagttgtctttgtgaggccaaggtgggt

SEQ ID NO: 49563 - DNA, 1050 bp, Homo sapiens
gtgtgagccaccatgcccagcctaatttttgtatttttagtagagataggggtttgccatgttgcctaggctggtcttgaactcctgagctcaagcagtccacccaccttggcctctcaaagtgctgggatcaccgctcccggcctagaacattttccttacccctcttcttttaatacataaaaggtgtgcaagcattagaaagatgatgggtttaggacaattgcttcctaatgttcctcctctggatacttagaggctggtggcaacttgagaatgctctaactgtgagattctttttttatttgttaatttatttgtagaaacagggtctcactatattgcccaggctggcctcgaactcctggcccaagtgatcctcccacctcgacctcccaaagcactgggattacaggcgtgagccataatgcccagccaagattctttcaaatacctggtttgcttaatgtgggtttaacccataatgaagtataggaactgtgtctttctatttgaactttgtattgtgcccagcatgggtgctttacaggtgtttttatgatgaggctttggaaaatattaaaatagaaatagaaatgctaaatgataagataccacagtaagagatactatttagtggtttcactcctgattgctctaaacggttatggacacagcaatcctacctattagctaaaaatagcatgatgttcttggacatgtataatactgcttaaaattcaattgaaaatttaaacaactggctcttggcaaaggctctcttaaaatctattctaaaatgaaaaatatttttctgtgacttgtggaattgtcccaccaagggaaggatgggttatgtgttagaacattttgagatctcctacattttccccgtagtgactttatatcagcctctgtttataaactgatctagtatttttcttgaaagcccttttgtttttagagtagaaactgatctcaaaaacaggaggtgagccagaaattggtcattaaggtagcttaactgggaaatgatcctttatgaccagt

SEQ ID NO: 49564 - DNA, 1035 bp, Homo sapiens
caagtgaaatggagttgtatttgtcattcattttttatgaccttacgattcattcatttaagagtatacttaagcggtttttagaatgttcacagagttgtgcagccatcaccacaattgattttagaattttaatcacccctgtacgctttagctgtcacccttcatctccccatccccctcatgtctaagcaaccactaatctattatactttttgtctctatggatttgcccaatctggacattgcatataactagattcatataatatgtgactggcttctctcacttagcataatattgtcaaggttcatctgtgttgtacatgtatcaatacttcattcctttttatagctgaatatatatcattatatggatataccacgtattgtttatcggttgatggacatttgggttgttttcacttttttgctattatgaataatgctctgtgaacatctgtgtgcaagtttttgcatggacatgtttatatttctcttgagtatacatacctgtgagtggaactgctggatcatttgacaactctgacctttggtggaatggccaggctgctttccacatttaggctgcaacattttacattcccaccagtagtatgtaagggttccaatttctccacatcatccccaacacttgttattgtaagtccttttgattctagccatcctggtaggtgtgaagtggtatctaattgcggttttgatttgaattttcccccatggctaatgttgcacatttttcatgtgcttattgtttgctattcacttttgttttgcttcgtcccctgatttgattctcttgattctctctctgtttccaaattgacttgagaccagagcaagccaactatgttattaggcaactagaaagaaccaggaagataactacttctcactgctttgtgtgctcggggggtttaaggctttgggcgtagataattttagcttaggaatgctgatctgataaaaatgatagggcccccccttttttttttttttgagacagagtctcac

SEQ ID NO: 49565 - DNA, 1052 bp, Homo sapiens
gtgtacccaccacctggagaacagggaaaaggtacaaatctgtctttattctcatgttttttggatgaggtattttgttttggtggtctttatgtatactttggcttatgggttgcaagagccaaagactctgttaatctttcatttgaatatgctatatgaaattgctttaagatatagagaaggccctattgaggcttttaccctgagctgctgggtgatccggaataggtgagaaggcaagatcctgtgaatactttttcttagtttgatgtgagatcaaggcatttttcattccagtcattttagaccaggtagatttttttttgtttgtttgtttcatttttgtttatgagatggagtctcactctgtcgcccaggctggagtgcagcggcgcgatctcggctcactgcaacctctgcctcctgagttcaagcgattcttgtgcttcagcctcctgagtagctgggattacaggtgcccgccaccatgcccaactaatttttgtatttctagtagagatgggttttcaccatgttggccagactggtctcaaactcctgacctccggtgatccgcccgcttcggcctcccaaagtgctgggattacaggagtgagccacgcggcacctggcctagtatagcattttcactcagtagctcttcttgcatcctcactaagctctttgggggacaaaaacatccagtcaatagggataaactggaaatttttatggcatgctgatccggcatgttttgttttctgttttcttctcagtatccttcaggatggtatccagaaccctggctatgtgtgtgtatggccgaggaagcatacacagtgacagtgcagggaccagaataaggacacccagctttctgggttagtcatagttccaaaattattctaaaagtagaactgaaattatttttcctcaagcaatatttgcccattgaagcctatttgccatatttctgccctctcacatagccttgagaaatatttttggtaatttatgtttattgatttggtattgtttttacccaaaga

SEQ ID NO: 49566 - DNA, 1081 bp, Homo sapiens
ctcaaacaaatatacagtgcaggccgggcatggtggctcatgcctgtaatcctagcactttgggaggctgaggcaggtggattccttgaggtcaggagttcgagaccagcctggcaacatagtgagacccccatctctacaaaaaataaaatataaaaaacaaaaaaaaacccacaaatacacaatgcagcattgattgtaatattaagaattgtaaacaacttaaatgtgtatcaattgaaatatgactgaataaattatggtctgtccatagtatggaatcctatgcagctattaaaatgaagtctgtgtactgacatggatgattttttgtttgtttgtttgtttgagacagagtcttgctctgtcacccaggctggagtgcagtggcgcgatctcggctcactgcaaccctcgcctcccaggttcaagcgattctcctgcctcagcctcactagtagctgggactacaggcgtgtggccaccacacctggctgatttttgtagagacggggtttcaccatgttggccacactggtcttgaactcctgacctcagatgagtcaccatgcctggccaacatggatgagttttcatgatgtatcagaaaatgaaaaaagcttgcgtgtgaattgtgagtacatgtatataagccatatatgcatggaagtaagtctggaaggacacatactaaaaataccaacagtggtatcttctggggagtgggatggagaagtgatacagaatttttaaaaagtgtaaactcagcagctttctttgcaggcacataagactgtggcatctttagggctttcctttcctgaaggatttgcaattgtattaccaagttttatttttgagagcttatccactctctggccccacctttcttttcagagacactgcaggatccaattctgtaagttaagaccagcagctccaaactttatcagaatcacactgatgcttgttaaaatgcagattcctgggcccctgctcagtagattctgattctgtgtatctgggatggggtgccaaatcctgatcttttagaggcaccccaacttgtcagtgactgggg

SEQ ID NO: 49567 - DNA, 1050 bp, Homo sapiens
ttgccttgcccactggaagagtccacagaaataaacctctcttgaacttcttgcttagggttgggatgggtaggtgtttaactcagaccattctgatgtgaaggcagtacaaagacactgagtaagttagagttccagggatgaccttgttctatacttgtatttaatttaatttaatttaatttaatttattgaatgagtaaagcaaagacccttgtgctccaaaggttgccaagaggctcaagagtacagttgtagaaatagcttttgaaagtccgttcgggctagcctggctgcattctttgcagccataggatggcattcaggtagtttgggagtcctggcctcctgactggccatctgccatctcagtcgtcttaggaaggaaatcatgttagagcatctgtagtcttgattcaagaaacaatgtcagacatattggcttgttcattaaagaaggctggagaatgctcattcctgtcaacaagcagacattaattgtgcaactactctgctttgcccagggtggtgcttggtggagcctgacttggtcttgcttgttaatgagtttcaatagtgtattaagatgccaatggggaaatattggcaggcttcactagctgatagaatttgggggtggggataatatgtattttaaaaagcaacaataatgtatgtaagtgttcagggctaccagagggtggggcagagcttcctgcatcagtgatttctagaactacctattcccaaacactagtcctgggcttgcactcataatccctcagctcatcctatcatctgcaagtgctgtgagccccaaacagtcgctcattgcgggctaattggtccttgaatgcctctccaacatcataattgccataaggcctgacactttgagacagacaaaggaggaaggtgctcttaacctgctctccatgcacctttcttcaagatacaccagggaggcccgatcactccttttgtgttgacccacactgtgcctgtctgagtgctcgggtttgtgctgttaggctgctcttcagaggctgc

SEQ ID NO: 49568 - DNA, 1030 bp, Homo sapiens
actaaatgaatgtcaaactccttagctggacagtgcaggctgtccacagtcaggccccaacctgccattctctgaggcccagccagacttggatgcacggctgatccctgaaaataaccctgtgcttcttgcctccagacctttgcttacactgttctctttagctggaaggacctctccccagctctaccttttgaaatcctaaatcttcattgagaaccaattcaaaaagcagtatctccttgtagcttccccaaactagatgtgatctgtactccctgtgaatccttctaggccttggtttgtcctccttttgggcttcttgctacaacatccttagtatactacaccctctgtcacctagtaagctccacaagacaataaactttgttcttgtatctcccatgtatctaacacatactccgtataaagaagactaagtagtttttctttgagacagagttttgctcttgtcgcccaggctggagtgcaatggcgcgatctcggtttaccgcaacctctgcctcctgggttcaagcgattctcctgcctcagcctcccgagtagctgggattacaggcatgcaccaccatacccagctaatttgtattttttagtagagacagggtttctccatgttgatcaggctggtctcgaactcccaacctcaggtgatccgcccgcctcagcctcccaaagtgctaagattacaggtgtgaaccaccgcacccaaccagactaagtatttaaatagtggaagaatggtatttttccacatgtagctgagtgaagaattagcttttttttctttttctgagatggagtctcgctctgtcaccaggctggagtgcagtggtgtgatctcggctcactgcaccctctgcctcctgggttcaagcgattctcctgcctcagcctcccgagtaactgggactacaggcatgcaccaccacgcccagctaatttttgtatttgtaacagagatggggtttcaccatgttgaccaggatggtctccatctcctgacctt

SEQ ID NO: 49569 - DNA, 1450 bp, Homo sapiens
cccaacagtgctgctgaccaaagccatagcacatctgcatactcccagcgccttgacgaagctatctgtctccttcatacaactcaccccagagcattacccaacagggaatagggggccctggacagatgtggccttttctgggtaataggagcaaaaagtagggcctgtctacttcagagatcgaatttcttaggccactttgggtggccctcgtgcccctcccctcacccccacccccggccaaggtggatgtttagaatgtcactggatttctgcttgggacttggtgaatagggagtggctgggctgttacaatctctgctttttcagggcaagcactgcatcttagatgtttccggcaatgctatcaagagactgcagcaagcacaactttaccccattgccattttcatcaagcccaagtccattgaagcccttatgtaagtgttgaactgagaactcagacacaccaagctaagatcgggtctggaagggaaatggagaagaaagtgatttgctgggcagaaacttgaaagaaactctgtgccccagctctggtcactgggcgctcctgttttgagggcttgtgcatatgttcatggttggacttttgaacgcaggtttgaggagttagctacgggccactgctgctctgagagggcagcttagcagatttttagggatcctggaataatcctttatggttaatcagaacataagatctggttcagaactatttttcttctgtctttggcagggaaatgaaccgaaggcagacatatgaacaagcaaataagatctatgacaaagccatgaaactggagcaggaatttggagagtactttacaggtaagactcctgctgccctgcggggggttctggggaactagccaggtacctgtttctataagtgtctcaaagaggtgtagacagaatgtagaaaccttgcacggagtttccagttgcttttaagtttttgagcacaaacctttccaaagcacacaagttccccgtgtccagccatagcagttcagccagtttatagcataaaccactcaccaaatgcttccttgaattgttggtttgttcattttgtcttgtccttactagattgtaggctccctgtattactctgtctccctccgtttcagctccactccccctcccccagtactttgctttgcatgtttaggtgctgaataaacgtttgttgatgatgatgattcctcggtgtgctgttcaagttgtctgttggggtgtctgtctgtctgtctgtgtgtgtgtgtgtgtgtgtgtgtgtgtaaggtcagttcctgaaacattgggaaggtttctatgtaatacgttcttcaccttttgaagtacagtgacatatatatacataaatatatgcaaggcagtgccgaatccattctagctggtggtgacactaggttaactgtgtaaa

SEQ ID NO: 49570 - DNA, 1191 bp, Homo sapiens
gagttctaaatgaagatgtctgattgaagatgtctgattaaagatatgtgcttatctccctcccttttgacatcccattaaaatggtaataaaagaataagcccttaagagtgaagaaaatgggcttaacaaatttttggaagattggaagtgtgtcaactgatgaaacagaatggaacaagccaacgtgcctggcagaatcccagagaggttcctgtttcagagctaggaagtgctcaaggtcaaaataagaagggagtccgaaaactagggggtgaactgaaaacctgtgaaagaagtgccccccagccctaaaggccaacccttttggaggtgcttatcatgcaaaaggaatcgtgctggaaaaagtaggagttgaagccaaacagccaaattctgccattaggaagtgtgtaagggtccagctgatcaagaatggcaagaaaatcacagcctttgtacccaacgacggttgcttaaactttattgaggaaaatgatgaagttctggttgctggatttggtcgcaaaggtcatgctgttggtgatattcctggagtccgctttaaggttgtcaaagtagccaatgtttctcttttggccctatacaaaggcaagaaggaaagaccaagatcataaatattaatggtgaaaaccctgtagtaataaattttcatatgccaaaaaaaaaaaaaaaagaagtgcccccattggctccttatgatccccccacccatcatccccatatttagcatagttagcccaatctttatctcctagccaaaaaaaaaggagggaagggaagggaagggaagggagaaaagaaaaggaaagaagagaaaagaaagaaaagaaaaggaaagaaaggaaaggaaaggaaactggaggactcaacagaaatagaataagctgcctaaagaaaactaaggatcatgtaggtgctagtgccacagagcaaaataaaattcttcctaatttggcatttgagggcctccagcctaaaggcagcttccctaacctaagtctaaaagagaaagtcatatgtagaaagctgaaactggatcccttccttacaccttatacaaaaattaattcaagatggatcaaagacttacatgttagacctaaaaccataaaaaccctagaagaaaacctaggcattaccattcaggacataggcatgggcaaggac

SEQ ID NO: 49571 - DNA, 1051 bp, Homo sapiens
cttgtgctgctcctctaacaatggcacttgtggtttcaacgatctcctctgcaatgttgatgtgagacttggggtggggttttgctagtggggcagtgaccagggcagggggctggttgtgatcctctgaccagggacagagttccgtagagtggaggcacaccgctttgagtgggcctccacactgagtcatggtgtctgtctgttttttcctccaggtcagtgacctatcttttcatgactcgctggctacttttgttgccatcctcatcgctcggcagtgtttgctcctggaagatctgattcgctgtgctgccatcccttcactccttaatgctggtgaactaccaatctgtaacccctagcatttctagacctcaaatttcaatacacactggacggccatcctctcattgttcactgtgggagaccttgctgcggctccctggccttcctcagaaggccagtcctttggtatgctgaaggctagaagaaacctgttttttagccctggatttgcagccctgacctttccaatttctgacccttcaactgcgtaacagttctctgctctacctcgctttcaatattatcttgctttttctcctttcactttacctcatcttctctcccatgcccctgccatacacttgcatgcatgcaggcacgcacacacataaacccacatacagtttaacttcatcccttccagatctgttttgtcttccttttagcttgtagtgaacaggactctgagccaggggcccggcttacctgccgcatcctccttcaccttttcaagacaccgcagctcaatccttgccagtctgatggaagtaagtgaccctgatctgaaccagccaacagtagaaagtgtggttcccctgcctccgtggattctacttttgcttcccctgacttcatcgccttccccagacaagcctacagtaggaatccgctcctcctgcgaccgccacctgctggctgcctcccagaaccgcatcgtggatggagccgtgtttgctgttctcaaggctgtgtttgtacttgg

SEQ ID NO: 49572 - DNA, 1077 bp, Homo sapiens
tcactctctccccgcataactctcttccgcatgtatatgtgtatccatgtctgtctgtctgcttcttaccatctctcctgaatctgcctatgactttctttctacccattcctacaaatgcttgcagtcttctgttttctaagtcccaacagcttattgtttttcattttctggagcagggtctacaggtttccaccaaacagaagatctcgccctgggatctttttgaggggttgaagccgtcagcaccactctcttggggctggtttggaacagtccgagtggaccggcgagtggctcgaggagaggagcagcagcggttgctgctctaccacacacacctgaggccccggccccgcgcctattacctggagccactgccactgcccccagaagatgaggagccgcctgctcctaccctgctagagcctgagaaaaaggctccagagccccccaaaactgacaaaccgggggctgctccacccagtactgaggaacgcaagaagaagtccaccaagggcaagaaacgcagccagccagctaccaagacagaggtgagcgcctcccccgtgacagttctcccacagcctctcacttcatgacgctccggtttctggtttgtgggaggggtgggggcgcataaggaaggggtgccattagaatcataataaaaattaaccatatacgaattcagctcctctttacctcattctcccccagctccccgaccccattcagctacaacccactcaccctcttcctctgccactcacacaggactatggaatgggcccgggtcggagcggcccttatggtgtgacagtgcctccggacctcctgcaccacccaaaccctggttctataacacaccttaactacaggcaaggctccataggcctgtacacccagaaccagccactacctgcaggtgagtgccagccactaggaatgctggagggacctacctgtacactccccctgcccaaaggatgatgccattcccctgaggagctatggatgtcaaggacactgagcaagagacagagggatgaggagcctagaggtcagcccactctc

SEQ ID NO: 49573 - DNA, 1048 bp, Homo sapiens
tatgaaattgatgatcacctaagtgttattgacttctagaactacatgtgatttattgcaaggccatcagaagcaaactagggtggccaaagagctgaagcacacagttaagttctttcacttctgtttctttgtatggttgtttagtttttccggggagatattgaactatactgctttagactgttgatggctgctaaggtgttctttgtcaaactgagttattctgattttcctctgcttcctaggaaacccgaaccctagcggagattgccaaagtggagctggacaatatgccactccgtggaaagcagctgcgtgtgcgctttgcctgccatagtgcatcccttacagttcgaaaccttcctcagtatgtgtccaacgaactgctggaagaagccttttctgtgtttggccaggtagagagggctgtagtcattgtggatgatcgaggaaggccctcaggaaaaggcattgttgagttctcagggaagccagctgctcggaaagctctggacagatgcagtgaaggctccttcctgctaaccacgtaagtgagggtcattttcagacgtagaccttagattgctaattccttccatggtctggagagttagcctctagtaaccacttttctatgtttaaagacttttggtcagcctggcatggtggctgactcctgtaatcccagcactttgggaggccggggcaggcggatcacctgaggtcaggagttggagaccagcctgaccaacatggtgaaaccctgtctctactaaaaatacaaaaaattagccaaacatggtggcgtgtgcctgtattcccagctacttgggaggctgaggcaggagaatcgcttgaacccaggaggcagaggttgcagcgagctgagatcacgccactgcactccagcctgggcaacagagtgaaactgcctcaaaaaaataaataaaagactgggcaaaacagcggctcacgcctgtaatcccagcaatttgggaggccgaggcgggcagatcatgagttgaggagatcaagaccatcctgg

SEQ ID NO: 49574 - DNA, 1923 bp, Homo sapiens
ccctagctaattcattgtgccagtgacatgtgtagagaagaagcctggtggggtatgatttgattaacactgaactttgttctttcttccagatttcctcgtcctgtgactgtggagcccatggaccagttagatgatgaagagggacttccagagaagctggttataaaaaaccagcaatttcacaagtatgcagtcttgatagatttccctattaggtgtttccttcttaagaaagcttataaagggatatgtaaaagaggcaggtctttgctgcacatgttcactggcagccattatcttggtcctcacaaggaatgcaattcttagctggggtaattctggacaaagttagtaacctaggaaccttgcctatagggaacgagagcagccacccagatttgcacagcctggctcctttgagtatgaatatgccatgcgctggaaggcactcattgagatggagaagcagcagcaggaccaagtggaccgcaacatcaaggaggctcgtgagaagctggagatggagatggaagctgcacgccatgagcaccaggtcatgctaatgagacagggtgagtctaggcctgtaagtcttaaagctgaaaggacaaaatgacatttttaaatgggtttctttgtatcaattaacagaagggcctacatctctgcttttatacttagtttgcgttgattttggtagataaataggcttggagatgtggcagagatactggattctgtggagaaggaaatgataggtataacttcattttggaatctggacaccacaggtggttccaaaggaattagatcctctttgctttctggatctttatttgaagaaagtcattagatctatatgaagacaatgaggaatattcttagtctgttgtttttttagatttgatgaggcgccaagaagaacttcggaggatggaagagctgcacaaccaagaggtgcaaaaacgaaagcaactggagctcaggtaacttttctcgaacactttttccctaacaactctaaaaggtaatgtctcactcctctttcctactgccatgctacctcgtgtatttataaatgtgttggcaaatatttcctggctgcttctcaggttctttctttggattggagatgttttagctgcccatggtcctagaagttacctgctaaaaagaaagcagctgaatgctggtctcatgaggtttctttgggggttgcctcagggctgggcacacttaacagtgagtttcctggtgaactgatagttttcagtaggccagtctccttggttgagtctcctgttaatctgctcaagttctgaaatgcctctgtcttaaatacattggtgactctctgtaggcaggaggaagagcgcaggcgccgtgaagaagagatgcggcggcagcaagaagaaatgatgcggcgacagcaggaaggattcaagggaaccttccctgatgcggtatatctcccatgtgcccgtgatgtaccagaccagtcctgataaactcaccatgaattgtctgctaggttaccggttatgaccaattttcccgtgttgtgaaataaccctttagaaaaaagaattcataagaaggagaggtaaggtttgaagaggagatcttgcctcacaagcaatataggatgaaaaactgggtctgctgtattctgtttagactcagtgactataggaagagatatgcaaccttggctagtcctctgctgtccttgcaattgtacaagttggagcttcagaagcaatctcttccccctttcacctctctgttgctaataggaggctctggcttacgtcctagtagctctgtgaccttgaatttgttgcacaactagcaagggttgtgctcctcagctttctcagtgctgtttggacgtgttatcactctatctacttcccttag

SEQ ID NO: 49575 - DNA, 1222 bp, Homo sapiens
tagcctccagtggagggactacagatgggtgggaagcttccaacaatggctctgttacagtgttgctctctttttctctttaagaccccaccaacaactgaacgctttggtcaggctgctacaatggaaggaattggggcaattggtggaactcctcctgcattcaaccgtgcagctcctggagctgaatttgccccaaacaaacgtcgccgatactaataagttgcagtgtctagtttctcaaaacccttaaaagaaggaccctttttggactagccagaattctaccctggaaaagtgttagggattccttccaatagttagatctaccctgcctgtactactctagggagtatgctggaggcagagggcaagggaggggtggtattaaacaagtcaattctgtgtggtatattgtttaatcagttctgtgtggtgcattcctgaagtctctaatgtgactgttgagggcctggggaaaccatggcaaagtggatccagttagagcccattaatcttgatcattccggttttttttttttttgtccatcttgtttcatttgcttgccccgcccccgagacggagtcttactctgtcgcccaggctggagtgtagtggcatgatctcggctcactgcaatctctgcctcccgggttcaagcttgtccaggttgatcttgaactcctgacctcgtgatctacccacctcggcctcccaaaatgctgggattacaggggtgagccaccgtgcccaacctcacttgcttcttatccttacactcccccagccccagagaaactgccacatacaccacaaaaaccaaacatcccccaatgaccttagccccattgctccattcactcccaggtgagaattcaggcaaacgtccacaaaggtcacaggcagcgtacatacggttctgttataccccatatattaccccttcatgtcctaaagaagacattttctcttagagattttcattttagtgtatctttaaaaaaaaatcttgtgttaacttgcctccatctttttcttgggtgaggacacccaggaatgacccttttgtgtctatgatgttgctgttcacagcttttcttgataggcctagtacaatcttgggaacagggttactgtatactgaaggtctgacagtagctcttagactcgcctatcttaggtagtcatgctgtgcattttttttttcattggtgtactgtg

SEQ ID NO: 49576 - DNA, 1032 bp, Homo sapiens
acatgaacctgtgataaaatctagaatgatagaggtgagcaacactggtatgtaagaaaggaatcaatgtactcaggtcctattacttttactaactttactctttaattggggagatactgggtggtagggtttctttggtgggagattgaggtgtctcagccttttatttggtatggtgtatcaccctggtagctaggtcctattctaaggattctgtttgtgaaatgaatgctgtgccagactaggagtgggaagaggcaaatattcctccgttatcaggtggttgtttcaagtaaaggaccacttacaatgtgtctgatgtatctttaatgtggaatttggagtggaaaccttgaccagtgaccaatcaaggatgtgttttttcttccctacttacacaggaatttaggaaacttgaggaaaacaatggcactgatcttctggctgatgaaaacttcctgatggtgacacagctgcattgggaggatgatatcatctgggatggggaggatgtcaaacacaaagggacaaaacctcagcgtgcaagcctggcaggctggcttccttctagcatgactaggaatgcgatggcttacaatgttcagcaaggtgtgcttctgtgccagctgtgtctagcagatactgcccttaatcttagtcaccataagtgggctcagctgtgatttttttttttttttttttttttcggtgagacagagtttcgctcttgttgcccaggatggagtgcaatggtgcagtctcggctcactgcaacctccgcctccccagttcaagcggttcttctgcctcagcctctggagtggctaggattacaggcgtgcaccacgatgtctgactaatttttgtatttttagtagagatggggtttctccatgttggtcaggcaggtctcgaactcccgacctcaggtgatcacccgcctcagcctcccaaagtgctgggattacaggtgtgagccaccacgcccggctggctgtgatgttctgagctgccaagagatagtgaaat

SEQ ID NO: 49577 - DNA, 1114 bp, Homo sapiens
atcgcaccactgcactccagcctgggcaacaagagtgaaactcagtctcaaaaaaaaaaaaaaaatttagccaggcatggtggcgcacgcctatggtcccagctactctggaggctgaggcaggaaaatcactggagcccgggaggcagaggttgcagtgagctgagatcaaggcactgcactctactctgggtgacagagcgagactccgtctcagaaaaagtaggctgtgtgggtttgggagcacatcgggaaagatgaaaatacattagagcttagcaaaggaagaggccctagtgaggacttttatccttttctttgccaaataaaatacacttggtttgttgggcaggtttttatttaccgccttttctggaaaagtaaagatcggccacggaggatacgaatggaagatataaaaaaagcctttccttcccattcagaaagcagcatccggaagaggctaaagctctgcgctgacttcaaacgcacaggtcgtctgttgtgactagttatttgtctgcctttttccaagaaaagaattttgatggctttgagttaaaggataagcatatagttaataaaatagaaattgatggctgttgaaaggaggtagcagatcttctaacactctggttgcttttttgaatttggctgccaggaagtttaatgtgattgttggatatcttctatgagttgtaggaaacttagcagctggggttttcttggccagtcatgccaactgtggctaggcctgttacagttttggtttgctgtccctgttgctgtcaataaatatcagggcctttggaattcagaatggtctcattctctatgtatatgtcttttccagggatggactcaaactggtgggtgcttaagtctgattttcgtttaccaacggaagaagagatcagagctatggtgtcaccagagcagtgctgtgcttattatagcatgatagctgcagagcaacgactgaaggtgaacaccttcctcttagacaccacttatgcctgtggttttttgtttttttttttcttccccccagagagatgagagagaagattctttctctgactggcttagggaggatggtttactagattattac

SEQ ID NO: 49578 - DNA, 1047 bp, Homo sapiens
aacagcttgtctcctgcatatttaatattttcatagtttacaacttaaattgggagtggaaatcttctctttattcttcttacctgatttttaaagcaatgtttagtctctggatttcattttttttctatgtgtcatttccatacatgcagatttgtctagtggcttctggttgatcagtgcataacaattctattagagcaaaagttctgaagctgactttgtttttcccatcttgtatgtacagttgagctttgaacaacataggtttgaactgcatggttccacttatgcgtggatcgtggtacgtggagcctgtgtatatggagggctggctttttgtatatatgggcttcactatgtgtggattttggtatacttgggggtcctggaaccaatcccctgcatatactgagggatgactttatttcttacctgcttatctctgatatgtgtttcagcctacttacctctgacgtgtttgatacttttccttttgcagctgaaatgtggggcatgtggtgccattggacacatgaggactaacaaattctgccccctctattatcaaacaaatgcgccaccttccaaccctgttgccatgacagaagaacaggaggaggagttggaaaagacagtcattcataatgataatgaagaacttatcaaggttgaagggaccaaaattgtcttggggaaacagctaattgagaggtaagagataccaggcaggaagtgctatgggacagatttatttgaggttggttatattggtggctggcaggggtagatgtgatgtgttctctgaagtggaactgaaggaacaggaattttgatggcgtttcctcagttattgttgccagtaatgaaaattatagcgctgattaggttgtaccacttgttttggagcatgctgcctaacttctgagtctgtttccttagttacaaaataaaaccacctttaccaggatagttaagaagataaaatgagacagactacaaagcatacagtacagtgcctgacatatagtagatgtcagttatctc

SEQ ID NO: 49579 - DNA, 1044 bp, Homo sapiens
aaccaagcagcaagtgctagaagttttaatttttaaatgataatctatctatattccctcttcttactgaaaacaattaatggtactttataaacctacaaaagtgtaagtatgaagtagacatttcacaaaagaggacaactagccagtaaacacggaaagattctcaacttgattgattattgaggagatgcaaatttaaaccacgatgtcactacatacccactgcaaaggctaaaattaaaaagactgacaatactaaatgttgatgaggatttggagcaataggaatacaaactttttcctactagagtctaaaatgaatttattgggttaggtcccattacgcaaaagtcactaatcagtaataatgtttagtgtttccagcagtagttttacagcaaaaacagagagcatgatcttaaagcctaaattgctaaagatgtttttttgtgtgtgtggggagctatgatgttgacactcagggaagtataaattttggtgaaccagaagaatagaatgtagagtacctaaagaagttgttgacacatcctttttgacccttttactggaattttttttttttttttttgagacagggtctggctctgtcacctgggctggagtgcagtgggatgaccttggctcactgcaacctccgcctcctgggtttaagtgattcttggcctcccgagtagctgggaccacaggcgtgtgccaccacgcccagctaatttttttttttttttgtattcttagtagagatggggttttgccatgttggccaggctggtctcgagttcctggcctcatatgatccacctgctcggcctcccagattgctgggattacaggtgtgagccactgtgcccagcctggaatatcatttatcttgactttttgtcattccataggcaattcaaagttacactttctggggcaagggtaatagatagctagctgaacttaaattatccttaatttattttttatttatttattttttttgagatagagcttcgctctgtccacccaggctggagt

SEQ ID NO: 49580 - DNA, 1034 bp, Homo sapiens
atgatggcagttccagatgtaagctgtctctgtgccaaatactgtgaggatcgtgcaggggaaaggaaaaatgtttagggtgtacacgtgtgtgtattttggagagtctgagtggtggtgtatgtcagttgtgactggtatgtgattttaaatattgacctttttgctatatgggtacattatcttttttttttaagagtacattatcattgaaatcaaagaggccaggaatctttggatgtagggaggtttttgcttcctgttgttgacattcagtatatgaatgctcctgaatagccctgtagagagaggatgctagcgaatgtgaggcttttgatttagaggtgcttctaagcaaatgatgctttgataattagacaccattggttgtcttttatttcatttttatattgttacagtgatcctccccaggaattctcaacagagtttccttttgtactataggaatgtgttctatatgtgtaatgctataaaacttctcgttgggactagggaataaggaattttaattatgactatacagcaagtgtttttatcctatcatggcatagaaatccttaaaggaatctatgaaccccttacattataaacagaagttttgtatgattatgtgtttttctaggaaaagagtccatagctttttttaggaatatttgtaacccaacaaaggtggtgaaattctcgtatgaagagtggtttccatttaatttcttatgctttctatttactagtcttggccatttcatcacccagttaataagaaatttgttccagattattacaaagtgattgtcaatccaatggatttagagaccatacgtaaggtgagtgagtgatttgatctaaatgcctttttgtaatcaagtgactgtgtgtgtgtgtatctgagtgcctgattcttttcatcacagaacatctccaagcacaagtatcagagtcgggagagctttctggatgatgtaaaccttattctggccaacagtgttaagtataatggtgggtatttctcatta

SEQ ID NO: 49581 - DNA, 1023 bp, Homo sapiens
gataagtgtttgcaagttaattgattttcaaggaatggtggataatgggtcttaatctgtaaaatctgtaatataaaatagtttgaaacaagatgccactatatggaatgatgtgaaaattaggctacaaaatttcttcctcaatatcctattctcttctctttcaatgtaattagaagtcatagaatttagatgatactacttatactgggcttttgattagtttaaaaattttttttgtctaagttgcagatgtgttctgggaacaagtaaggctcagctggcagaccttaaattcatactgtgtttaggatctccgaaagatacaaaaacataagactttccctcagaacttatgatgtagttagagaaagtagatgtaaacttaagaggtaaatgatagtggggttatagaaatctagaaaaagttcccaagttacattgtcaacattcagttttgtaaccaacctggaaatggctaatagtttattttagctaccgtttactgaaagtctgtgtggtcagacactctactgacagctttaaatgattggtcttagttaatcctcacaataattcttcaaaatagatgatattatttctgatttttatcaattaaaaaaaaaccatggactcagggttatgtggctttcatggggacaaagctagtaatgaagtattaatagatattaaaacctgagtctgaatatcctcaaagcaaatgttgaagtgaaaagaaataaaagtgggatgatgtgcccagagggcactcacccatcaaagcagcccttgagcacagttaaaaaaccattgatcatattttgctgtcccttattttttggttaggaaactgaaactaaatttagtagtttgttcaaagatccgaagtcacttctcatgatgatatctattaacaatttttgtagttaattttgagagtttaaacgtgtcctttttagaaaatccattgctttaaaaaacatttttttttaagagatggagtcttgctatgttgcccaggct

SEQ ID NO: 49582 - DNA, 1530 bp, Homo sapiens
aaccctcaaatgagtttttggaactttttgggatttggaattgtggatgaggggttgtggtcctgcactgaagtttgtcaggcagtatctttagttgatagaataaaatggcagggagctagatgcttaaaagtgatttcaagatatttttaattgacaaagcagagtataattaatgacagcgtctctgggtttctaggatttgtactgtgttcgcagtgacctggggaacctgctcaaagccctgggtcgcttggaagaagccaaggtaggtgtttgatagaacacatttaaacatcagtattatgaaaacttgtactttttgccaagtcttcaactcttcattgagctatcttcacaaaacagtcctttgaaactgaggaaaactgacggcacgaatcgcctcagaatagagcagggccaggctttggcatatctgttctaaatctgggggtaaagcaagaacctgaacattttggagcctttctgctgagctagaccatctttataacactgggctccgtcatgatcttatgtgggaataaataacattccttcaaatctgaggcttgcctgctggtgacaagcagagcgcctgtgatttggctcaagactcctatatgatgcaggtgccattgaaaatgctgctcttctaagtcctttgtggcttgtaagtggagaagaatttcatccaaatgttaccctgtaatactggcatttaaaattcttatttaaccttcctcccttcatcttcctcaccctttttacagtggaagaaaggctgttaaaatgattacaaattaataattggaacatcctgtcccttgtccccactcccttcccaagttcctttttcctcttttccaatcctagttgtctaccttcttttcttcctcatttccttcttttattcctccccaccccaaccccttaaaaaaaaggtcagaaggacaaagctggtttgtttgggaaatggactgatcgaaagaaaacttgccaaagtggaaaggtggcttttagcattctgtgtttccaaataatgaatttgaacaccaggttgggttaattaaagcttttggtataatttaaaattaaatttataaatgcagttgtcttgttacaagccaccttacgcaaccgcgctgcaggggtgaggagtggggagaaaccagaatgcttctgaaactcccacctgttgctctgagccccacgcgcatgctaatgcgtggagtgtatgcgcagagtagctgtctgtttgactgcttcatccagggagggagaaggcttttcagcaccatctaatgttttaaaaggcactagttttaagtgcacagctcataaattctgctgacattttggattaaccttatgtaggttgccagctaatgaattgtaattgatttcaatcttagctgataaatctaattggtaatttatagaacaaatatttgataagctcctattaattgtcaccccaccaagcggacagctaacatgaattgcacttcactgcagctttagagatcggtt

SEQ ID NO: 49583 - DNA, 1049 bp, Homo sapiens
atacaactgaggtatatatttaccttttcagtaagagtttgctgcctcttttgccactatttttcagaagagttagactggttaattgtgaataaaatagggccaatcattagaagtgttcagtttaatgaaattggagcaggcccaatatttaatttttctcttcaggacccattttgctcatgagaacatgaggcatgagaagttattttgataatgttgaggtttgtaaaaataatgagaagacactaaataaataattggtttattaaaatgaaatgtaattgaaagtctgcaaggaccttggagtaaaaaaattgtaattgggaagttgatctggtgaaatcctaacttgctctgagtaactaactgtcttgaaatttttaggctgtcacccttgacccaaactttctggatgcttatatcaatttaggaaatgtcttgaaagaggcacgcatttttgacaggtgagagaatgttctgtttaataaattttcttgaatctttgttgtattgacacttgacagtttggaccgaaatgatgacaatagtccattgaagcatatttgccttttctagcacgttgttctctgcccatgtcctgtgttgccttttatttatagatgttgttcgttgcctgactttttgttgttggctttcctcaaagccgttatccttctcattgggagtttagttgaaatttttttattgttaaaatggttgaaatgattctttcttagactaaattattcctttgacctgattttagaaagcaaagtaaatccagacttttaaattttttgttgttgtcaaaggaaagcctattttttatgtgggagtagaaaacttcccagtgtaaagacacattttataaaggtgtgattttggtttgaggttaaaatataatacagcatgaattatgtaattaattacaattacttgatatattttgatatagtacagcttgaatgagttgtaacaaaccatccattaagcatgagttacattttgtgtgtgtgtgtgtgtgtgtgtgtgtgtgtgtgtgtgtg

SEQ ID NO: 49584 - DNA, 1041 bp, Homo sapiens
cgagaccagcctaggcaacatgacgaaaccctgtctctacaagaaatacaaaaattagccgggcatggtggcacacacctgtagtcccagctccttgggaggccgaggtgggaggatcgattgagtcctgggaggttgaggctgcagtgggccatgattgtgccacagcactccagcctgggcaacagagcacgagactctgtctcaaaaaaatcacaaaaaccaaaaaacagcaaaaaaggaaagtcttttgtacaagtattgagatggtatattggtttactttagagttttggttgagggtaagaataccaaaaaatatcaattttctgtagcattaccagccattaggcttaattaaacaattattagaacagtatcagtggaggctttatgattctgtacagtttttgaagactttgttttgttttctaggttgctgaagcagaagattgttataatacagctctccgtctgtgtcccacccatgcagactctctgaataacctagccaatatcaaacgagaacagggaaacattgaagaggcagttcgcttgtatcgtaaagcattagaagtatgtgagggtggtgtagctgggcatttagcatgatagtagagggaaagcagttaagtttaccatcatccacctcttttgtaaaaatagtggttgaatcatttacaagaggattattcattgaagtaacaattgagtacctaaggtatgatgtgaggccctatgtgacattccagaaaatccctgcattcagagttcattattctgtggataagatctgtacaaaaaaattaaacattaacccacagttcaagagaagttacttataagtatataatcttagtgcctgatggctgtatggtagtggttagtagatgtggtaggagtttagcagagagagatttcagtggtgttggagtggtcaggataaactaagaggagaagaggtgtacctcattatgtttgaaacaagaagaggtataaaatagaggaagaggtagaatttgagaatgaatagacttggaa

SEQ ID NO: 49585 - DNA, 1068 bp, Homo sapiens
cgaccagatggtgcataggtctggaaggtctgatctcccttggtcttccatgggatggttagtgtggaggggagatatagattgtccggccgctttgtgattccatggattgattcagtcttctggatttttttttctttatattttgggtactggagcttttaaaaatgtttggtttcaggtatttttattcatgtgaagtgtatatgattctcttgagataaggttttaagctaaaatgttactccctgttttagtttctgaactctgacagattgacagggactttgctggtgtagtctttttataggttttataaaccacttgagcctatatcagtcgttttagtgtctgacctaatatttggagctatcagtgctttgttgatttagatgatgactcaagattttttctggtccatttcccatttccttttcttccctgacccccataccctcacccttaaaattctcctgtaactcaactaacaaaatcaagcctgattcaaaacatcctagggtgttttaaacacaccatctggtgccaaatgaagatttttaggagtgattactaattatcaagggcacagttgtggtactgtcattgataataatatagtttttttttttttcctaattttgacctgtttcaccagtgttttacccttgactgccccttctatgctgcttccaaaagtgatagtgtgtgtaagatttttaccttcctttctaaagttttttttttttttttttaagtgagtcctgttcttcctatttctttcagcagaaatgaaatcccaggtaagtataagtattcaagtatttgatcagtaagtcacagttatctccagtgcattaaataaccttcatcaagaaataggttataggtaaaatctctgaaggatcatctatgtattcaagtaattattttttagataataactgtcttctggacttggtcttgaagtctgtacagattcagcctcagtagtagcgaactgcactgctgtttggtttggagtacaaattagacttatagtcctcctggaacttgagttattaaaatcat

SEQ ID NO: 49586 - DNA, 1091 bp, Homo sapiens
aggcactcctgatagagggtgggctggaggcttggccaggctctgtaccaggcacctcacctatgcactctcacctcaccctcccaactccaggaactcggtgtgattatcccacttgacacacaggagaccagcgctagacaggagggaagccttgtctacagtcaccagcatgtaagtgcggagctgggacacacatccaggtctgtccgaccagagtccattttgtaaccactgcagctctctgtctcctctggaaggtgactgccagcccttaaatggagttccctcaaaaacaaatgacccatttagggcaaaggacacctgagtggaaactaagtgacaccatttttttcagccccagtgcacatttccagacctggggtgtggaatgagggctcttccaggtatgaagggaacgtcttagagcagtactcggtttgatgcttggcagccagggcatagtggttgatggccagctgcatgcctgagttcaaatcccagctatgccacttgctgtttgtgtactcttggacccattgcttaacctcttgatgcctcagtttcctcaatgtaaaatgaagttactgataatatctcctaaggtggtcctgaggattcagtgaagtaatacacataaagcacttggcactgtgccttgagctgtggtgtgaaccagtgccattattttctcctaagagagtaatgcatgaaggagactcagggctcctggaagacctttgacgtctattaaccctttgtcccttccccgtctgttatcagggtctcccctgcccgattccctgatgtatagacagcaggaacctttaaatccaatgttcccatctgtggctgcacattaatatcacctggggagcttttgaaatggcgctgcccaggcctcatcccagactattggaatctgactctagggatggggatggagttggagtattttttctgcagctcctcaggagattctaaagtggagacaaagctgagaaccatggcctcagaaggaaaagggcctgtgtgctgctctttggggacaacaaggaaggaagaagaaactcagagatcatgccctgctc

SEQ ID NO: 49587 - DNA, 1049 bp, Homo sapiens
tggtgatctcaccccagcctctactgcttcagccccctcctgaggctggccaaagcgtagaagccctgctgattaagcctcttccctgaatgttggcagcctaggctctgcactaacttagcacctagtgcagagcctgtcacgtgcatgggagctacccagtagcattctcttggacggataaatgcatgggtgaattaacatgctttggatattgtctttgttgtacctcctcagggctcccaaagccttaaaactagaacttgtcacctcatcactttagaaccttctatttgcaggcatctatgcacctgctgatctctcccactaagaaaaggtgacaagagaaaccagccaggggattcctgagggtagtctaggagtctcgaagccttgcagtggtcttccaggctgaatcatcctacctcgagaaccaagagcatgagagttggcatcagacagacttagttcaagtctcaaccctgctatttcctgtatatataatcttagtcaaaagtcatttcaccactcttaagatttagtactctactctgtaaaatggggctaaaaatacctacccagcattatggtgaggaataaatgagaaaatgtgttaggttgaatcctatgaaactgtccaaagcatttaaatgccagcaaatttgtatggttcaacctaatatataaagtagcctttataaactataaagtataataaatagccctatataagtattcattattcttaacagatataatttgtaagtcacagaatattgtttcttgcagtattagtaatccctttcatcagaatacaggtcaaactaacagaagaagccacttatctgacaatcgtgggctgcaggcatttcctggagcattttggcctgggaaatagggagcaggtatttttaggaaactagactggttcatggaaagcaatggaggtgaacaccagggtgactcgtgacagctcctacctggaaatgattaacccgcaaaagcacagtaggagttggcacattctcttgccccagatgggagtaccc

SEQ ID NO: 49588 - DNA, 1043 bp, Homo sapiens
tcccttgagcctcaccggcccttggtttccttgtctaaggatttcaagacttcagggtagggttgactccggcaggggaccttggaagtaccctatgcctactctgtacccatctatgcttgctcaataacaaagaggcacaatctttacacaccctttatatttttattgaggagagaaagctttagcatacagagcagcttcttatcttcacaacacagtaatgcaacaataacacatgtattccaaaagggtttcctcccgagcctctgggagaccttgggctgccttcatacccctgcatgcatcccctccccccacccctctttcaacccaagaaagctcccaaagcccacagttcctcttacagctcttatggctgttacatcacaacaaatattgaagatctgggaaaggaaggaagagggtcaaagggaagcccaagcccctcctgccccagagggtggaaaccagctcactgctcatctgctctatccctggctgtagctctgagggttcagggtgagaagcaccatgggaacaggcaggacctgtgctgaagggtccctggaagtgtgggtttaaggcacccgtccttcacacttctccacagggacatggggcagcagggccagagtgttgaccatcagcaaacagggtccactgcctcgaagaatagcaggtcccctcgaagaatagcaggtccccttctggaatgcactcttgaggaaatcagataaaatcagctgaaaaacagacaaaattttctttacaaagttgtttactcctgccctggtggggatggggaaaaccagacaattgaaaggtccaacaaattaggagaatgcttaaatgaattattcagtatgcatgactgcacaggtggcagccattttaaatcctgctgatcaagaactggcagggtgatctcagctttgacaagacatagcaagaacacactagaaaggaaagcagcaaagtgttaatagtgcttgcctctgtgtggtgggactctgaatggctggggggtttttgtcctcata

SEQ ID NO: 49589 - DNA, 1132 bp, Homo sapiens
cttattatttataattttctctcaaggtaagaaagcaaagtaaaaatgacaaataataaaataagataaaaattctccatcctccacagaagaaacacagaagtagggatcattcctttgttcaaccattggttgtagcgatattttggtttaaagatctcaaaagcagaaatgtccaacttgtaaatagtagaataagggtcatctatgtcaaaacctatgcatgaccaaacttgcacggctaacttcaaagtccagcagtgttgagagtacttatgtgttcagtctagttagacttcttctacctatttgtccttattgagcctattcctgtattgctcttaggaatatacctcgtaaccttagcaaaatgttgggaaattctctcaagctacagtagaactgttccctcttctgggccacttgatatcacttatcttttgggtttttcagggtgacttgggttggatgaccagagggtccatggtgggaccatttcaagaagcagcatttgccttgcctgtaagtgggatggataagcctgtgtttacagacccaccggttaagacaaaatttggatatcatattattatggtcgaaggaagaaaataaaatcatatgaaagactgaataagttttatacattttgtttctttaaaaggtattacatattcttttgagctggagctgcaaggaaatacaaaaatttttaaaaagaaaagatattggatgctccttgtattctgtgaaagctctaagtatgggtttgtaggtgtaagagagggtggggctaagtgaatgtcaactgtagtaggtattcagtcagtctttctcaaagagaagtcaagcagactccctttaacctgtattctctttcctcccagaactatatctgactctcagtctgtcccataaattaattcagaaaccatcttcaggggaagcagatatcaactcacactattcacacaactgaaaatattgggcatcaaatagattagtgtgtgagaatcataaaataagttcctagacaacatttgttttacatgttagtcaactctgatcttccaggacaggtggtattagctccactgtcttaacatagtacgtggcacgttatgcctttcagtgt

SEQ ID NO: 49590 - DNA, 1225 bp, Homo sapiens
tgacagggtataaaggacctaaaagagcaagaagaaccttgggtctcttttgagccatatagtttggtccaaatagttcttgtctgaggaatccaaagccaataaccagataataaatattacagaaagccttacgcttttttcagtgattgctcttgtaggtgaaatagagtacggagctgacagtgtcaagccccaaaccaaaacttgtgtaggctcctatcctaagaggcccaggccaccattaaattgaatattcatgttttatacattttatttatgcatatattgtgaaatatacatatcttatatttcacaataaaagttttaaagaatgttacttgcccaccctagtggccaggggataagaccattaccagaaggtggacatgaaagcttactgagcagaaaaaaaaataaaaaaaaacacaaaaagaacaaaatacaacagcaaccattattccctacacataagcaagtgcctgaaatatgggcactccatgctgttccaggaaagaacagtgtagaactcttgcttctattccattgatctatatctatacttatgcaagtaccacactgtcttgactactgtagctttgtcgtaagttttgaatttgggaactatgagtcctctaactttgttcctttaaaaattttctttaaataatagagatgggggccgggcgcggtggctcatgcctgtaatcccagcactttggaaggccaaggcaggcggatcaggaggtcaggagatcgagaccatcctgactaacacggtgaaaccctgtctctactaaaaatacaaaaaattagctgggcatggtggtgggcgcctgtagtcccagctactcaggaggctgaggcaggagaatggtgggaacctgggaggcggagcttgcagtgagtcaagatcgcaccactgcactccagcctgggcgacagagcgagactctgtctcaaaaaaaaaaaaaaaattaataatagagatggggtattgccatgttgcccaggctggtctcaaactggccttaagtgatcctcctgtctcagtcacctgagtagctgggattacagatgtgaggcaccacggtcggctaaactactctttttcaagattgttttggctattctgggtcccctgtatttctatatggcttttataatagtttgtcaatttctttctcttttttttttttttggaaacaagagtctcgctctgtca

SEQ ID NO: 49591 - DNA, 1046 bp, Homo sapiens
gtccaagcaaacattaggtcatagcctgttcctcttccttatttgaaggtgtttttacctttctcagcattccacaagttacttcctccttcctttgttctcctctgtctttgcctcttttaaaaagttctaagttgctagccaatcgggacaaatacagaatgtgaggtcccgttccagccaatggaaactggacacagcagtagggtggaagcgtcagtttataaatgaccctgtctcctttgttcggtgtactctcatggcaaaactgctggcgagggtgctctttctgcagaaagtaaaaatggccttgctgaggaaattaattttatgttcaagtgctatttctttatggcaccagggaacaaacatttctaacaaagggaccttaccaaatcattcttaccatacccacagcagcaaaactccagggactccccaactggtttcattatacttctctcaagaaaacagacttccctttgccacatacccaaacaaccaaatccaaaaccccttcagccttctcttgtgtctccacaggacccacttccctttgcctcacccgaatcttggaagaaaaggaagagaaattcacctaaaccacttatgtctctttctctcccaaactttcactgcttcctaatcaaccttgttacagtccttcagcggtacccttacgaaactcccattatatatcctgatcagctctttactgttctatgggacctatggcttcaaggaactttccaggactttactcttacccaaataacctttttcgctttttgcttgtttttttttcaatacaaataccctaagtacatcaacctcaccaatacaaccacttctcactgctctcaagctcgaactataaaccttacacaatccctcttgctgcgaactaactcttcctttgctcctgaatgctggatgtgcttatcgctgtcttcctcagcctacacagcccttcctgcatcccttcatgaccttttagcagggagcataaccctaatttatacactccaaaagggagcttcctttct

SEQ ID NO: 49592 - DNA, 1081 bp, Homo sapiens
atgtgtttcatggagaagtgattaacttcgtcaagtactactggtcgaggtagatgaagattgagaattgactgttggatttagttatatgaatgtcattggtgactttgataaaagcagtttgtgtaaagtgatggggtgaaaacctgattgggacgagttcaacagaagttaggagaaaagaaataggaaatgacaagtgtagacaatgatatgacacctggaattttgctgtaaaggaaagagaagaaatggagcaataactggaaatgaaaataggatcaagagaggatttttttttttaacaatgaaagaattggtgggctgaagtccttataccagtgagtgacaagggatgagatcttttgcacaaatggaggggttgtgccttagctagaagcatggagagttcatccatactaacaggacagaaggcaaagaacacagagggaataatgctgggaagtaggttgatatggaagaagcttctggaaactgtcttctgattgcttctatcaacccagtgaaattggaagcaagagagatgagggtgagatgttgagggtctgaaaagcaagaaggcatgaaacaggcatctagtacaatggatgagtgaatacattagagaaatgtactatgattgccaggcagcatgaagggcctgcttgacatcgatattgatggatttcaagtaagaccagtcacatgattgtttcttcaaccatgttcatctgagagggccagagttggatttagcaaaatgtattagtttcctattgctgccgttacaaatcatcacaaatgttaaaacaacacaaagtattatcttttatcttacaggttatatcttgcaggttatataggttagaagtctgacacaggtctcactgggctaaaattaaggttgcagcaaggctgtgttcctttctggaggctctagggggagaatgtgcttcttgcttttccagcttccagaggccatacacattccttggttcatagccccttcccccatctaccgagccaggtaggataggttgaatccttctcacactgagtcactatgacctcctcttctgcc

SEQ ID NO: 49593 - DNA, 1051 bp, Homo sapiens
taggtacaaaggccctcaggctctggcatgttggaggaatagcaactagtccagggtagctggaacagagcaagggagagaataggaaagagctgggaacagatcatctaggctatataggctgacattaaggacttagactacaaatgaaacaagagtcactgaaggactttgaggtagaaaagtgacatgatagctgggtgttgtggctcacgcctgtaatcccagcactttgggaggccgaggtgggtggatcacgaggtcaggagatcgagaccatcctggctaacacggtgaaaccccgtctctactaaaaatacaaaaaaattagccgggcgtggtggcatgtgcctgtaatcccagctactctggaggctgaggcaggagaatggtttgaatccaggaagcggaggttgcagtgagccgagatcgtgccactgtactccagcctgagtgacagagcgagattctgtctcgaaaaaagaaaagaaaagaaaagaaaagtgacgtgatttgacttgtgttgtaacagaatccctctggcttctgtgtggtgaatagactgtgtggggccggggggagggcgtgatgggcaggggcaaagtcattaggagcactgctaggagcaaaggagcagtagagtaccattgctgtaacccagatgaaagctgattggaacttagaccagggtggcagctagggagatgatgataagtggtggattctggatatattttgaaggtggagccaagagtatttgctgatggattggacatggggtgggaagaaaaacaaaaggagttgaagatgatcaaggaggaaggtgtcttggggcaggcagtgtggtgtgaaacagagagttcaagttcatagggactcgggagttaagttgggctatacccctgcccttcttagctgtatgaccttgggcaagttgctttccatttctgaacctgagattcctcttctgtaggagtacacagggctgttgtgaagatttaatgaggtgattatgtaaaaccccagttccacggctggcacagactaggtg

SEQ ID NO: 49594 - DNA, 1030 bp, Homo sapiens
actccgtctcaaaaaaaacaaaaaaaaacaaaaattcaaaaaaaaaaccccacaaaaaacatatatatgtaagttttgacagagcgagactgtctcaaaaaaaaaaggtaataaatactaaaatctcatcacttcctcattattttactacattttactactctctatgatgcccttgaagttattcacacctgctgtatctgcatggtggaaatgctatgtaatggtgtgctacgttcatctcctcccaactccttgttcagtgacatgttggtagcctcaaatcagccatggaaatgggcaaacactacaaatcagaacttggctaattgttttggtgattgtctagtgttaaggaagtgatggagaaaatgtttaaaaatgcaggttaaacttagaagtgtgctgtcactgtagccattacattgtgaattgtacaaaaaaattgccaagggtgatggcatgtgcctgtagtcccaggggtatcacttaagcccaggagttcaaggctgcagggtgttgtgattgtgcctgtgagtagcagggtgcactcccacctgggcaacagagtgagaccttgtctctaaaaattaaaaaaaaagttaaaaattaaggaaatattctttcagtattcaagaactattctccaagtcagcaaagaagctgctcacatcattgacagatgagttgaagttccaacatatatgtctttgttgtttcacttttgtcttatttgttaatgcaaacaaaaatatcaaccaatactctcatgggagctaacattcttttgtcgattgcaaccataaccataggttggctatggatatgagtttggcaaaagtcaataaaagcattctatgagaatcaactggctacatggacttcacaataaagagtttttttaaatttaataatattttatttatttttgagacagagtctcgctttgtcacccaggctggagtacagtggcacgatcttggctcactgcaacctttgcttcctgggttcaagcgattcttgtgcctca

SEQ ID NO: 49595 - DNA, 1054 bp, Homo sapiens
ctccaattgaaagacacagactggcaaattggataaagagtcaagatgcattggtgtgctgtattcaggagacccatctcacgtgcagagacacacataggctcaaaataaagggatggaggaagatctaccaagcaaatggaaagcaaaaaaaagcaggggtggcaatcctagtctctgataaaacagactttaaaccaacaaagatcaaaagagacaaagaaggccattacacaatggtaaagggatcaattcaacaagaagagctaactaggttcctggcccacgccatcgggtctgagctgcgccaactgctctgagggttcgtggcccaccgctccttcatggttcctgctgccactgtccacgcttagcgctgtagagaagatggtgggtcggaacagtgccatcgccgccggtgcatgcgggaccctttttattgcgtactgcatctactttgaccacaaaagatgaagtgaccccaacttcaagaacaggcttcgagaatgaagaaagaaacagaagcttgccaaggagagagctgggctttccaagttacctgaccttaaagatgctgaagctgttcagaagttcttctttgaagaaatacagcttggtgaagagttactagctcaaggtgaatatgagaagggtgtagaccatctgacaaatgcaattgctgtgtgtggacagccacagcagttactgcaggtcttacagcaaactcttccaccaccagtgttccagatgcttctgactaagatcccaacaattagtcagagaattgtaagtactcacagcttggctgaagatgatgtggaatgagaaacaaatgtcaacataataaaatctcagttaaaaatattttaaaaattcttggtagttgagcagctctgggggaataagggcaaatatgcttgttatgaactacactgaaatctaccaaagttaatgtttactttgtgtagatccatttgtccattttatttatttttcccagtgaaaagtgtaatttgatagagaacttttcattctataaatacactatgggtta

SEQ ID NO: 49596 - DNA, 1129 bp, Homo sapiens
cactgctttagttgtgtcccagagattctggtatgttgtgtctttgttgtcattggtttcaaagaacttatgtatttctgctttaatttagttatttacctagtagtcattcgggagctggttgttcagtttccatgtagttgtgctgttttgagtgagtttgttaatcctaagttctaatttgattgtactgtggtctgaaagatggtttgttttgatttctgttcttttgcagaggaatgttttacttccaattatgtggtcaattttagaataattgtgatgtggtgctgagaaaaatatatattctgttgacttggggtggagagttgtgtagatgtctattagttctgcttgatctagagctgagttcaagtcttgaatatcgttcttaattttctgtctcgttgatttgtctaatattgacagtggggtgttaaagtctcccactattatcgtgtaggagtctgagtctctttataggtctctgagaacttgctttattaatctgggtgctcctgtattgggtgcatatatatttaggatggttagctcttgtcgttgcattgaaccctttaccatttgtaatgcccttctttgtcttttttgatctttgtcagtttaaagtctgttctatcagagaataggattgcaactcctgctttttttggccttctatttgcttggtaaatatttctgcatccctttattttgagactatgtgtgtacttgagatgggtcttctgaatacagcacatggatgggtccttactctttatctaatttgccagtctgtgtcttttaattgagccatttagcccatttacatttaaggttaatattgttatatgtgaatttgcttctgtcattatcatgctagctggttattttccctgttagttgatgcagtttcttcatagtgtcgatggtctttaaaatttgatatgtttttgcagtagctgttactgatttttcgtttccatgtttagtgcttccttcaggagctcttgtaaggcaggcctggtgatgacagaatctctcggcatttacttgtctgtagaggattttatttctccttcacttatgatgcttagtttggctggacatgaaattctgggttgaaaattcc

SEQ ID NO: 49597 - DNA, 1034 bp, Homo sapiens
tgctctcactcataagtgggagttgaacaataagaacacatggacacagggaggggaacaacacactctggggtctgttggggggtgtgggatgaggggagggaacctagaggacgggtcaatagatgccgcaaaccaccatggtacacgtatacctatgtaacaaacctgcacgttcagcacatgtatcctggaactttaagtaaaataacaagaaaatcagttggctgtaaaatatgtggatttacttcagggtcttctgttctgtcctggtgtatgtgtctgttttttatgccagtttcatgctgctttggttactgtagcttagtagtatattttgaaattattttagtgcctacagctttgttctttttgtgcaagattgctttgcttattcagggtgttgtgtatttccattcacattttataattattttctctttctatgaagaatgtaatttgtattgtgattgggaatgcattgaatttgtatattgcttcgggtagtgtggacattttaacaatgttaattcttctaacctattagcatgggctgtctttccgtgtttttgtgtgtgtgccctttttaatttctttcatcaatgttttatgattttcattacagaaatcttttacctctttgagtaaatctattcctaaaaaattttttgtatctattgtaaatgggatttttcgaaatttctttttcagattgtttattgttggcatatagatatgctactgacattcatgtgttgattttgcatcctgcaactttactgaatttgaaagattggtgacatctttaggctttcctaattatatatgatcatgtcatctgcaaataggacaattttagttctttcttcctttgttgctttatatttcttccttttgccttattgctgtggctaaaacttctagtaaaattttggtcaaaatagtgaaagtggacatcctggttttgttccagatcttaaaggaaacactttcaatttttccctatttagtataatgttagctgtggttttatc

SEQ ID NO: 49598 - DNA, 1514 bp, Homo sapiens
cctcccaaagtattgggattacaggcgtgagccactgtgcccagccttatctgactattactgtaacagtggccaatcaaaattccttcttttctttttttttttccttgagcctagaaatttcttaattgaggggagaatctagcaagcagttgagtcaaagggtgtagattatactacagtggtaaagaaagtaagcagctggcagtgaaagcaatctcaagcaaataatgaatgttccatgaacaagatgcctgaattgaaaaacagaacaaaaccaactaaccaaacaaaaaacaatccgtggatcctaactcaaatccaaggtgatttgagcctgcacttgtaattagacaaaatctatgaacttcagttgccttggaggcatctgagggaaatgaggttgcatgtagatgaatcagttgtttctggcatcatgttagtgtgattacatttagctgctgtgtgcaaaacattttagcaatcatttaggtccaggacgtggaatttattagtgcaacaaccctgtaaacagtggttagaacattaataattttattttatttatgttttatttattttttgagacggatttttgctcttgttgcccaggttggagtgcaatggcgcgatctcggctgactgcaacctccacctcctggattcaagctattctcctgcctcagcctgccgagtagctgggattacaggcatgtgccaccgcacccagctaattttgtattttttagtagagatggggtttctccatgttggtcaggctggtcttgaactcctgacctcaggtgatccgcccacctcagcctcccaaagtgctgggattacaggcgtgagccaccgcgcccggccagaacattagttttaaacttcctaacccttgggagaaggcaaaacacttgatgaaatctacataaagactaaaacattttaccaattttgcattgtttgtttgaaattgcattgacgactggtatgttaattttgtatatatttttatgagaacaatgttggacatcatttaatttttttaggtttttttaattgattattgattggttcatttgcaggaactgactattagtaatcaaggatacaaattgttaagagaatatgttacagagaaaaacttgacaagctagacttagatttttgtcgttaaagataatttgtgggatatgatttttataaggagttgcattaaatagaatgtcttacacagatttaagaggttaataattataaaattaagatgagttcttataaaatattcttgaggtataataaaattatacttgtggagtatatctttgaataacatttaaaagcaaactaatactttccaggtaaaataattatcaacataactttttaaaaataattcatagtacttcaggttatttctatgtttgacacattaacttaaaagaaaaaaggaaaatggtgattagttaatgccatacacactggacagaaaagaaacttagctcttatggatt

SEQ ID NO: 49599 - DNA, 1078 bp, Homo sapiens
ataacatcttcaacattcatccatactgtagcatataatttgtacttaattcctttttatgattgaataatctatatatgaatgtaccaccttttgttcatcagttgatgaatgtatttacatgcatttaaataaaatttttttttttgggttttttttttgagacggattctcacccaggctggagtgcagtggcacgatctcggctcactgcgacctccgcctcccaggttcaagcgattcttctgcctcagcctcccgagtagctgggattacaggcacacgccaccatgcccggctaattttttttgtatttttagtagagacggggttttaccatgttggtcaggctggtctggaactcctgacctcgtgatccgccctcctcggcctcgcaaagtgctgggattatagtcgttagccaccgcacacagccaagaaaatgtatttaaagaaaatatggggctgggcatggtggctcacacctatacttccagcagtgtaggaggccgaggccggcagaacggttaagcccaggagttcgagactaacctgggcagcatgatgaaaccccatctctccaaaaaatacaaaaattagctgggtataatggcctgcacctgtagtcccagctacttgggaggctgaagtgggaggatcgcttgagcctgggaggtagaggttgcagtgaactgaaatcacgccactgcactccagcctgggcaactgggtgagggtctgtctcaaaaaaagaaaaaagtaagacaatatggtataaattggggatggtgaagggacataaagaaaagttagtttctaaactggacttgaattaatgttgacagccgtagaatgtaataagtaatgtatatatataatgtgaagcaaccactaaaaatgccatgcatatatgcaaaaactctagagaggaatcagaattttataaaatgttcagctaactcacagaaaggcagataaaaacagacaaatagaaaactaagaacaaaggaaaaataaatcgcagacttaaaccctaacatatgaacaattacattagatttaaatcgtttaaatgtac

SEQ ID NO: 49600 - DNA, 1066 bp, Homo sapiens
atgagttagtaacaccacaggctaaaagatctacacacaaaaatgaatgaatcacgttgcttttttttttttttgagatggagtctcgttctgttgccaggctggagtgcagtggcctgatctcggctcactgcaatctcggctcactgcaatttctgcctcccgggttcaagtgattcccctgcctcagcctcctgagtagctgggaatacaggcatgcaccaccatgcccggctaattttttgtgttttagtaaagatggggtttcaccatgttggccaggctggtctcgatctcctgacctcatgatctgcccgccttagcctcccaaagtgctgggattacaggtatgagccactgcgcccggaatgaatcacatttctatatactagcaatttaatatgtggaaacggaaattatatacaaagtaccatttacaagcactgcaaagaaacacaacatttagacataagtaaacatgtacaggacttgtattttgtaaattacaaaatgctggtgaaagaaactcaggaagtcctatataattgaaaagacttatcatgttcatgacttgggaaactcaacatagtaatgatgtcaattctccacaaattgataggtttaatggaatttccatttaaatcctagtatgtttttgtagatatagaaaagcttattttaaaatgtatgtggaaaggcacaggccttaaaatagctaaaaccatcttgaaaaatagtacattggtagaatcattaacttgacattaatgcctactatattcctatattaagacagtgttgtattggtggaggatagacacataaatcagtgtaacataattgagaactgagaaatagacatatacaattaggcccgactgaattttgtcaaacgtggaatagcagttcagtaatgaaagaaagcctttttaacaatggtgcttgaccaattgtccatctgtaggcaaaaagatgaacctgagtctcatatctaatacaaaaatgtactcaaaatgaattagagacttaaatgtaaaacttaaaactataaaacttttagaagaaa

SEQ ID NO: 49601 - DNA, 1514 bp, Homo sapiens
aagagaatatggattacttatccactgctgattggaatgtaaaatggcatagcccctctgggaaactgtttggtagtttcttattaaaataaacctgcaggccaggtggggtggctcactcctgtaatcccagcactttgggaggcagaggtgggctgatcacctggaggtcaggagtttgagaccagcctgaccaacgtgaagaaaccccgtctctactgagaatacaaaaattggctgggcgtggtggctcacgcctgtaatcccagcactttgggaggccgaggtgggcggatcatgaggtcaggagatcaagaccatcctagctaagatgaggaaaccccgtctttactaaaaatacaaaaaataagccgggcatggtggtgggcgcctgtagtcctagctactcgggaggctgaggcaggagaatggcgtgaacccgggaggcagaatttgtggtgagcagagatcgcgccactgcactccagcctgggcgacagagactctgtctcaaaacaaagcaaaaattaactgggtgtggtggtgcatgcctgtaatctcagctactcgggaggctgaggcaggagaattgcttgaacctgggaagcggatgttgcggtgagccgagattgtgccattgcactccagcctgggcaacgagcgaaactccgtctcaaaaaaacaaaaccaaaacaaaaaaccacaaacctgcaactaccatatgacccagcattttcattcttgagtgtttatcccagagaaatgaaaacttaacgttcttgcaaaaatttgtgtatgaatgttcatggcatctttgttcatgatagtaacaacacagaagtgcccagatgtcctttaatgggtgaatggctaaacaaatggtggtgcattcataacataataccacacaggaatgaaaaacaaagctgatgcacaaaacaacctggatgaattcccagagaattatgctgaatgaaaaaagccaatctctgacgtatagttacatactatattatactatttacataatattctttttttttctttttttttttgagatggagtctcactctgtcgccaaggctggagtgcagtggcacgatctcggctcactgcatcctccacctcctgggtacaagtgattctctgcctcagcctccagagtagctgggtttacaggcgccagccaccatgctcggctaatttttgttttagtgattctcctgcctcagcctcccgagtagctgggactacaggcgcgcgccaccatgcccgtttaatttttgtatttttagtagagatggggttttactatgttggccaggctggtcttgaactcctgacttcctgatctgcccaccttggcctcccaaagtgctaggattacaggcgtgagccaccgtgcccagcctgataccttgttttctacaagaatgttaggttaactgatagggaagttgtcactgagtagacatcagataatgtttttgggatagggcaataagccataaggt

SEQ ID NO: 49602 - DNA, 1050 bp, Homo sapiens
ctggccaacatggtgaaaccctggctctactaaaaatacaaacaattagccaggcgtggtggcaggcacctataatcccagctactcgggaggctgaggcaggagaattgcttgaacccgggaggtggaggttgcagtgagccgagatcacgccactgcactccagcctgggtgacagggtgagactccatctcaaaaagaaaaaaaacacaaaacaaaaaaccaaggagtatgactgccggttcatatggtaagagtatatttagttttgtgagaaaccacgaaactgtcttccaaaattgctgtactgttgatgcattcccaccagccatgaatgagagttcctgttgctccacaatctcaacagcatttggtgttaccagtgttttggattttcaccattctaataggtgtgcaatgggactgtttaatttgcaactccctaatgacatacaaagttgagcatgttttcatgttcttatttaccatctgtatatgttctctggcgagatttctgttgacatcttttgtccattttaaaaattgggctatttattgagttttaagtgctgtctgtatgttttaggtaacagtcctttatcagttatgtgttttgcagattttttttgacttatcgtttcatattttaatggtgtcttttgtggagtaatttttttttaattttaataacatttagcttgtcaatgatttcttttatggattatgcttttggtattgtatctagaaagtaattgccatacccagtgatgtctagattttctcaaatgttggagttctatttacagttttgcattttacatttaggtctggcatccattttgaattaatatttgtgaagggtgtaaagtttgtattagattcattttttggcatttggatattcagctattccaacactatttgttgctccattgtattgcctttgcttctttctcaacgattagttgactatatttatgtctctatctgggctctttattctgttccattgatccatttatccattccttcaccaatttcacactgtct

SEQ ID NO: 49603 - DNA, 2556 bp, Homo sapiens
tgacctcaagtgatctgcccgtcttggcctcccaaagtgctgggattacaggcgtgagccactgtgcctggcgcagtgactttattatttccccttcaatattgtgatggatattttgagtcttttggctctccatataaaattcacaatcagtttgctgatatccacaaatatgctgggagtttggaattgcatgaaatctgtagatgaagttgggaagaagtgacatcttgacagtattgtctttgtatccacaaacatagaatatctctccatttgtgtaatttttttttctttcattagacttttgtagtttttttttttcatatagatcttgtatgtattttggtagatttatacctaaatatttcatttttggggctgctagtgtatatgctattttgtttttaattccacctgttcattgctggtatattgggaagcaattcgctactgtatgtgtgtgtgtgtgtgtgtgtatatatattttgagacggagtttcactcttattgcccaggctggagtgcaatggcgcgatctcggcgccccacaacctccgcctcccaggttcaagtgattctcctgcctcagcctccctagtagctgggattacaggcatgtgccaccacgcctggctaattttgtatttttagtagagacagggtttctccatgttggtcaggctggtctcgaattcctgacctcaggtgatccccccgcctaggcctcccaaagtgctgggattacaggcatgagccaccgcgcccggccttgctactgaatatgaaccttggttttttttggttgattgttttggaatgtctacatagatgatcatgttatctgtgaacaaagacagtgtgagttcttccctcccagtgtgtgtaccttttatttcctttttttttgtcttatttcattaggtaggacttccagtacaatattggaaaggagcggtgagaggagacatgcttgccttgttcttgatcttaatggaaaggtgttcagtttcttaccttttttttttttcttttttttgagatggagtctcactcttgttatccaggctggagtgcaatggcacgatcttggctcactgcaacctctgcctcccgggttcaagcgattctcttgcctcagcctccctagtagctgggattacaggtgcctgccaccacacccagctcatttttaaatttttaatagagacagggtttcactatgttggccagacttgtctcgaactcctgacctcaggtgatccgcctgcctctgtgtcccaaagtgctgggattacaggcgtgagctactgcgcccagccagtttcttacctttaagtatgttgttagttgttaagttctttataaagttgaggaagttcccctctattccaagtttgctgagttgtttttactatgaatgggagttgggttttgtgaaatgctttttctccatccatttaaatgatcatgtggtttttcttctttagcctgctgatattatggattgcattagtagattttcaaatgttgaaccagtcttgtatacctgatataaaccccacttgttcatagtgtatattattttctccttctctgtgagttttggcaccttgtttctttcaaggtattggtctatttggtctattttaccttttttagtggttgccctagagcttgcaatatatatttacaagtccattttgaagtaacactgcattacttcattgatagtgcaagtactttttaataacaaaatagttctaattcctcttttttctcccttgtgtctttgctatcattcatttcatatgtacataaactataatcattgaatatattgttagtattcttactttgaacaaacttaactgattaattaagaataaaataataaaagtttttataatagctttacttattccttttctgatcaagaagaaattcttcttcctttctttatgtagatctgagtttctgagctgtatagttttccttttccctgaagaactttttttgaaaaacgtttctgacaagctagatctacttacaacaaattccttcaatttgtttttgtctgagaaagagtatttctcctttagttttgaaggatgattttgcaggtacagaattctaggtttttttttttcctctctctctaaaaactcttaagtatttcagtcttcttgcttgcatgttttctgagatgtcagatataattatctttactcctctatggtaaggtgtttttttctccactgggcggtttctttgaagattttttcctgtatctttgattttctgcaggctgagtaggatatgcctaggtgtagttttgtttgtttgttttggcatttatattgtttggtgttctcttagcttcctgaatttgtagtttggtgtctgacattaatttggggaaaattctccatcattattgcttcaaatactacttttccattttttctcctctgttattccagttacatgcatgttacaccttttatggttgcacggttcttcaatattctgttctttttttttttttttttgaga

SEQ ID NO: 49604 - DNA, 1072 bp, Homo sapiens
tttgtgctatgtctcagagaatgtttccacattattgtttctttctcagtagtggtcctcttggtgttgctatatgacatttttagcctggtcactggttggcaggagtgtgccctatctgttgttttattaattaaggcttagttttaggcaccagtgtcctggggtctcgtggttgtgttatactcagtactcctgcctcttcctcctgctgtaattttggacccattgtgtatttctgctctttcttcatagctaattttttttttctctctatttcattctcccagggtcacagtttttacaactatcctaatggccacagtgtttgttgcccttcctcccactgagtaaggactttgttttgtagatggagtaggatctgaacagatttctttgaccttcccaaaacagattttgttcccctctcccaggtgtgtaccttgagggtagtttctcaagactgtcatcaatcttttgtgtgatctcttgaatgggttagtggagaaaatacctgaatagtctgcagacctctcaattctgtgctgccccaccctgggcttcatacttacttgccagttaacacttaccctttgccaattgaccaaccattttagttgatctcttactgatgtctggttgcatctactttcacaggtaagccgggggtgtgtctcatcattcctttggggcaccacaacttagattttggttggccccagtaagactcctgtctctgggggattcaaggaaagttgtgaacttctttcctattctcctaccctctttatttgtaagggtgaaagtgatgctctctctagctctctacctaccagaaccagatgatgttttctagtctagtctggtactgtctttcacttactgtgaagccccattatatttactgtgattttcttcatattgttggatttatatctctaatttaaaaaaatgatttggtttggaatggttttttcataatgcaatccaaagtatcatagtccccatggtttcttagtctttccctgtttctcatgaccttgacagatttaaaaagtgtactggttaggta

SEQ ID NO: 49605 - DNA, 1151 bp, Homo sapiens
tctaaaaatgctcaagtgttttcacattattccttgtagatgtcatatagtttatctttttacctttaggtccatgatccattttaattaatatttgaatgagcgaggtaatatgttgtcactttttttggtatgtggtcctctagttgtttcagcaccttttgttaaagagattgcaggccatgcacagtagctcacgcctgcaatcccagcactttgggaggccgaggccggcggatcacgaagtcaggagttcgagaccagcttggccaatatggtgaaaccccgtctctactaaaaatacaaaaatcagccaagtgtggtggcaggcgcctgtagtcccagctactcgggagtctgaggcaggagaatcgcttgaactcgggaagcggaggttgaagtaagtcgagatggtgccactgcactccagcctgggcgacagagcgagacttggtctcaaaaagagcttatctttcctatattgtatggtttttgcatttgtgttgaaaataactagatttgcatggtatttttccggactgcttattcttttccattgatatttgtatttattgtttctccaataccacatggtattactaagtatttattttaagtctataaatgaggtagtatgaactttcaaccttttttatttttcatgattgttttcgctaatttctttgctttttaacttaaatttttgaataaatttggcaatagctacaagaagacgttgctgaaattttggttggtatgttattgaatctattagatgaaattggagagcatttgtacctcactgagtctcctgattcatgaacctagtatttcctatttatccagatcttttttcatttatttcatcaatgttttgtagttttcagcctataaatcctgacatattttgttagatttaacaaatgatgtaagaacttcattttgggggtgctgtgattaaaattgtgttgtttgtatttttttcatttcaaattccagttatttatagctgctgttatgtgaacatgattgatttttgtttattggccttgtgttctgcaaccttgttcaactcaccatttttgttctaaaaggttttttgtttttttttgtttttgttttttgagatggagtctcgcgctgttgcccag

SEQ ID NO: 49606 - DNA, 1030 bp, Homo sapiens
caccacgcccagctatttttttgtatttttagtagagacggaatctcactatgttggccaggctggtcttgaactcctgaccttgtgatctgcccccccccccccccccccgcctcccaaagtgctggattacaggcgtgaaccaccgtgcccagcctaaaaggtttttttaaatatagattatttgatattttccagacacacaattgttttctgcaagtaagagtctttttttatttcttcctttgcaatgtatgtgccctataattgtttttctggctttataggccttctaatacaatgttgaatagggcagggtgggagggcatactttactagtagttttccactctgcatgttacctgtaggtctttcatagatgccctttattaggttaagcacctccattctatttttagttttctgggagtttttattttgaaaatatgttgaatttgccaaatgcgttttcctgtattgacatgattgtgcggtcttcattaaattattgatactgaattttatttattgattgtttttaaatgttgaaccaactttgcattccttgtatgaaacccagctgattgtgatgtattattattttttttttttttgagacggaatcttgctctgtcacccaggctggagtgcagtggcactatctcgctcactgcaagctccgcctcctgggttcacgccattctcctgcctcagcctcccgagtagctgggactacaggtgcccgccaccatgcccggctaattattttttgtatttttagtgagatggggtttcaccgtgtcagccaggatggtctcgatctcctgacctcgtgatccacccgccttggcctcccaaagtgctgggattacaggcatgagccaccatgcctggcctatcatttttttatattgctggatttgatttgtaaatattttgttgacaagtttctatttatgcccattagattgacttgtagtttcctatttaaattttttttaaacactgtgtatattatatatttggggca

SEQ ID NO: 49607 - DNA, 1020 bp, Homo sapiens
taccctgggcaacatggcgaaaccctgtctctacaaaaaaaaaatatatagtagccaggcatggtggcatgcgcctgtagtcccagctgccagggaggctgaggtgggaggattacttgagtctgggaagtcaaggctgcagtgagccatgattgtgccactgcactccagcctgggcaacagagaccccgtctcaaagaaaaacaaacaactccccccccaccacacacaaaaggagtggtgagaatgggaatctatgtcttattcccatcttctggagaaagtaaagcattaagtctttctccattaagaatgacgttagttataggtttttgttattgttgtcttataggtttcttttgttagattaagtaagttctttttcattctcacttttaggagagttttaaagccttgaatgggttttcagtttagtcaaatgctatttttatgtccatcgaggtgataatatatatattttaaatgtaatatattgaactgcattgattgaattttgagttatgaaacaggcctacattttatgataaaccctactttctcatgatataatttatccaatttgcatattgttggattagatttcctaatattttgttaagaattgttgcatttgagtcaacttaggtacccaaatggttggctagataaaatgtggtatatttatatcatgtaatactatacagccataaaaaatgaaaccatgtcctttgcagcaacatggatatagctggagacctttatcctaagcatattaatgcaggaacggaaaagcaaataccccatgttctcccttattcatgagaactaaacatgagtacacatgttcacataaatgtctaatgtgaacaatagacaccagggcctactcaagagagggtggtggaaggagggtgaagatcaaaaaactacctattgggtactatgctcactacctgggtgattaaataatttgtacaccaaaccccagtgacacagaatttacccatgtaacaaaactgc

SEQ ID NO: 49608 - DNA, 1871 bp, Homo sapiens
ggtgtgatcgcggctcactgcaacctccacctccggggttcaagtgattcttgagtctcagcctcccaaagtacctgggactataggtgcgcaccaccacacccggctaatttttgtatttttagtagccacagtgtttcaccatgttggccaggctggtctcaaactcctaacttcaggtgatcagcccgcctcagcttcccaaagtgttgggattataggtctgagccactgtgcccagccaggttatatattttttgaacgagctttggtagtttgtatctttttttttttttttttttttggagacagggtctcactctcttgctcagactggagtgcagtggcacgatctcggctcaccagcaccctccacctggagcgatcttggcttactggcaccctccacctcccaggctcaaatgattctcctacctcagcctcccgagtacctgggattacaagtgcacaccattaccacccagctaatttttgtatttttagtagagacagagttttgctatgttgaccaggctggtcttgaactcctgacctcaaatgatctacctgcctcggcctcccaaagtgctgggattacaggtgtgagccaccgcacccggcctctatattctttggtagtttgtatcttaaggaattaaaagataaaaggtggataagaaaagattactaaggaagttatttcatcgatttttggtttggtgtttattattttcttattttctgcttgctttttgtttaatttgttctttttctagtttcttaactccaagtcactgaattgaggtttttctttttcaaattggcattttgtgctgtttttttctacatacgttttttggtgtcaccccacatattctgacattttcattttgattctgttcaatatactttctgatttccctcttgatttctttttggtcctggaatgtgctatttagtttatgtatatttagggatatttcagagatgtttctgtgactgttacctattttaattctcatatggtcaaagaatatactttgtatgaattacattttttaaaaattggttcaagattgttttatgacccagaatgtggtatgtcttggtaaatgttcagtgtcttctttaaaaaatgtgtgttctgccattgttgactgaagagttataaaatatcagctaggtcaagtaagtcatttgagttttcaagtcttttatatccttagtgatttttctatccacttctgtcatttatggagaaagatatattgaagtctttcaatctaattgtgaattagtctgtttttccttgaaattctagtaattcttgcttaatttattttgaagctctgcatagacttttaacactgttaagtctatcttaacttctttgtcattatgaaatggtcttcatccatggtagtattctttgttcagaaatctgctttgtctgcccaaggggtctttggtctgtaggaaattaacccatgaaggaaagaaaacttggaaaaataatttaaaaaatgattgttttttaaacataaatcatttttaaattattgattccaagggattgctgataataaatttgttcaggctgtgttaagacttgcatcttttttttttttttttttttttgagacagagtttcgctcttactacccaggctggagtgcaatggcgcatctcggctcactgcaacctccgcctcctgggctcaagtgattctcctgcctcagcctcctgagtagcagggattacaggcatgtgccaccacacctggctaattttgtatttttagtagagacgaggtttctccatgttggtcaggctggtctcaaacttccgacctcaggtgatccacccacctc

SEQ ID NO: 49609 - DNA, 1031 bp, Homo sapiens
atttttaaatttttagtagagatggatttcttcatgttggccaggctggtctcgaactccaagtctcaagtgatccacacgccttggccccccaaagtgctaggattactggcgcgaccccacagcacctggcctagaatggtatattgactttatctgtggcatatgggttatgttaggtggagagcagtaggtgatgcaataggaaaagcagtttgagtctagagtgtacagaacctagagtaccttccttgataacttggactttattctgtgtaaaatagcaagcttagcgtctaaagtttttaaaggagttttttaaatgaaatatttcaaacagaaaatacatagaatgacatactgaacacttattaccgctaccctgctttaacaaatcttataccttactatatttgtttcagattttaagaaattaatacatcatagatacaattgaagctttgtacctttccatctcataccaccatgaagttctattctgaagtcatatatccttaccatgcatttttaaaatacttttactgtatagctatatactaataaaaaggtggcattctccatgttattaaagtttcttaaaaatgctatctatattttacttattctgcaacttgtttttctcacttattattatttttgacttatgggatattccggaagtttggactggtgtaaccacagtagttatttacggccagtgtcctttcttctttcttttttgagttaaccaggatacatttattaaatatatccaggataaatattcccaaaaacaaatatttggtaaatatggcaaacttattctttggcaaattagcttttagcatgttggactgctttccatccctattaggagtattataaggattaaatgaagtattaccaacaaaaaggtacttagcaaaattctcagtaaacattggttataatccctccaacattcagacttaagttctgcctattctctttcctcagtattctttattcctgtccatataaccattgtcctt

SEQ ID NO: 49610 - DNA, 1417 bp, Homo sapiens
attactgacaatgtttaattttcaacaacaaaaataattgagagataaagagaagtaagaaaacgtgaccttatggggaagaagactggcaaaacatctcaactttgaaggcataagatgtgttactaagcagacaaatatttcaaattggccattataaatatcttaaaagaactagaggacaccatacctcaggaggcaatgatataattacaataattttgcaactagagaatataaataaataggtaagaattatagaaaagaaccatatggaaatctggagttgtaaagtataataacagaaattacaattcattagagaggtttaatactagattttaactggtagaataaacaatcattgaatttgaagatagattgatagaaatcacccagtttaaaaaatacagaataaagaagtaagtaaaatgcagtttcagagaaatggcagaagccattgagaataccaacatatgtgcagtggtagtgccagaacataaggacaacgagctgagagaaaaaatatttaaagaaataatacctgaaaattttctatattatgaaaaaaaaatccaagaagtgtaaagaatttgaagtataataattgcaaatatattcccccttagacacatcaaagtaaaattatgaaagtaaaaaaacatcttggaagcatgaagagaataatggctgatatacaaggaaactctaataatacagtaataattaaggccacagtggaggtgtatgacatattaatagtgtagaagaagtaaattcaaaattttacctgaagcacgactgacattcttaaatcaaagtaaagacattgctagataaacaaaaactgggaatgtgttcttagcagacccaccttgtaagaaaagctagtttttgagaatgaagaatactgaccccaaactgtaattgaaattcctatgaaaaatcagagtaccagtcataattatgtaataattatagaggctagtataaatgcatattttttatgtattagctggcatatatgcctatacactgtatacttataaatattcatatatgtgtattgtgtgcagtatttccatatttgtatttgtgagcttacaacatatagaaatgagatctatttaataatatcacaaagtatgtggttgagaacaaaactgttgtaataaggaaatgaatcttttttttttggagacagagtttcgctcttattgcccaggctggagtgcaatggcacgatcttggctcaccacaacctccacctctcaggttcaagcgattctcctgcctcagcctcccaagtagctgggattacaggcatgagccaccacacccggctaattttttgtatttttagtagagacaggttttctccatgttggtcaggctggtctcaaactcccaacctcag

SEQ ID NO: 49611 - DNA, 1052 bp, Homo sapiens
gtaatcccagcactttgggaggccggggagggtggatcacttgaagtcaggagttggagaccagcctggccaacatggtgaaaccctgtctctactaaaaatacagaaaattagccagatgtggtggtgtgcgcctgtagtcccagctactcgggtggctgaggcactagaatcacttgagcctaggaggcagaggtggcagtgagccgagatcacaccactgcactgcagcctgggcgacaaagactgtcaaaaaaaaaaaaaaaaaaaaaaagttacgtaaccaacaagtcaaaggagaatttataaggaaatcagaaaatactttgaggtgaatgaaaatacagaaacaacatatcaaattctgtgagatgtgtgaaagcaacgcttacagtgaaattaatagctatgaacattgtaatgaaatgagaagtacttcaaattactaacctaactttccaactttagaaaatacagtaaaaaaagaacaaattaaaatcaaagcagaaaggatataaagtttagtgtggaaatagagaattaaaaataattgagaaacacagcacttcgttgacttattcataaaataaagctttattaaaatgagaaatgtaaaacgtgatgttcctaatgaccttattccatacaagggattagtattttgacaaatatctttgtggaagtagacaaattcctagaaagacactgactaccacaactcattcaagaacaaagtgaagacaataaattggtaatttaaaaactctcacccctgcccctgacacacatgtaaattcccagttcaaatgtattcttttgtatattataccaaacacatgaaaattaccaattcgataaaaatgtcttaaaaacttggaagagcatgtaatattttttactggttctatgatgctattgttatctagataccaaagtgaaacatcatacacagggaaaactctgataatatcgcttatgagtggatctgtgaaatttcctagtaaattttggcaaaccaaatacagtaacatataaacaggaatgtacaccag

SEQ ID NO: 49612 - DNA, 1032 bp, Homo sapiens
ttaggtgaaaaggtgtgaatagagacaaaaaagtattatgtagtaaatacttatgaagggtcaattcaggaagagggtataaaaatcgtaaatatgtatgcatcctgcagcagaacaccaaaatatataaagcaaactgtaagcgacctaaagcgagagaaactgcaatacagtaatagtaggggactttagtaacccttcctcaactcttgtcacctgagtacacagaggcttattccaactgggggaacgaaatagaagacagtgggataatttgcctagtaacccaggcagttctaccctggtattccccaagtccaccagtgctgtgtatgtgccaggctttaagcctggctgtgttcctggtcctagggcgccctctagtgatgaaatggttgcagtgaccacattcttagataaaacaacacaatcacatttaatttttgggacgccctgtgaagaagggcagctacgaagtagcagactacaaagattggaataaatacctaactcttaaatgcctggacactggagaacttccacaagcataagaccatccaggagacatgacatctccaaaaggactatgggatctagttttggagcgatgtagttatgttgcctctcatacaggaaactcaaaatagctaggaactatgatctaaaatatacaaaggaagtagccactgaccgaccctaatgagatggtgatgtgtgtgatgtcagggtaagaattcaggagaaacgttttgggaaaatagcaaacaccatgataatgcaggaaagcaattcagtaatttattaaatgtaacaaatactgaaacaatagataaccaaactgaaatactggaactgagaaataatgactgaatggacaaatgcaccagaaggtctcaacagcagcactgatccagcagaacaagaatcagtattattaaagacaggctatatgaaaatgcacagtgagtgcagaaagaagcaaaaagaacaaaaaagtatgaagcatgcgtacaaggtgaagaaaataatctt

SEQ ID NO: 49613 - DNA, 1069 bp, Homo sapiens
atatcaaattcagcaaaatattcttcaaacttgaaaaataaatactttaccagacacacaacagctgaggaatttttgtcaacatcagacttgtcttaaatgctagaaagagtaattcagtctgaaaggacattaatgagcaaaaagaaaacatccgaatgtttacaactcatagaaaaaggaggtacataaatatagaataatactgtgattgtggtatgtaaacatatttttagcaggaagaagactaaaaggtaattctattaaaattataactacaaaaatattagagatagataaacataacaaagataagatcatagcatgtagggtggagattaagtgtggagttctttggttttctctttgcttgtcattccttgtgactacagataccttgtcattaatttaaaattattggttatatgatggtttttgcaagccgcatgacaacaaccatgcaaaaacctcagaaaataaaagcaaggaattaaaatatactatcagaaaaaaattagttaatggaatacagggaggaaagaagaatggacgagaggaccaactaagcaaaatttgaaagaatggaaaaggagcaaacactttcagtttcattctacaaggccagtgtttccccgataactaaaggaaaaggtctaaaaacccccaaacaacaataaaccccagaagacaaatatgtctgattcacacagatggaacaatccagaagaaaatgctagtaaactgtattcaacaacacactaaaaatataattcatacttatcaaggtggattaatcttaggaatgcatggattgttcaagctatgcaaatcaattagttttatgtcgtataacaaagtcaacaaccataatgttgtaatggatgtccaaaaagtattttataaattaaatattttattaaaaattatctcaaaattgggtatagagttaagatatctcaacagactggcagttgaacttacactgtccttgtgagcaaggaaaactgacaagcatactgctagatttggaagacattaaaaatgcccatgttcagcactttagttcacc

SEQ ID NO: 49614 - DNA, 1031 bp, Homo sapiens
ttctcacaggattcccaagtcttcacttactaggttttagggtcaggatccgactcggttggttcggccgccgccgccgaggctgctccgcacctccctggccgccgctctcaagcccgcctccaatgagtagctggttgagacccgcctctagcccagcgcctgctcggagacgttgctcaggcagccattatcttccccattgttaccaagcagcgacaggaaacgactgcccacaacaggaagtgatgatgccgcgtcccggcaccgcagccccactcccagcctattagccaatcccagtcgattcctcgaaaaggctccgcgggaggaggagggggacggcagacgacgcggcaaggcgggcggcggtttggaaaaggaaagctgttatgacgcccaccatgtgacaggccccaccctcctccgccattttgaattgtggcgagaaatttgcgttctgagaattgtgggaaccttcgctttcccattttgaaaactgaaggacgtcacggtctgactgcttgaagacattttcagagagagagaaatgtgatattagtctaccctgacatcacatcagttcacacaatccgtgcagaccagttcaaaaagtagcctgcgttttattcaacatgtatttacacagtgccaactgcatgtcaagcaccattgtagctgcttaggaaattaaaatagaccaaaattaagaaagaaaacaggccacgttcggtggctcacgcctgtaatcccagcactttgggaagccgaagcgggcggatcacctgaggtcaggagttcgagaccagcctggccaacatggtgaaacccagtctctactaaaaatacgaaaattagccgggcgtggtggcgggcgcctgtaatctctgctaatcgggaggctgaggcaggagaatagctgaacccaggaggcgaagattgcagtgagccgggatctcgccactgcactctagcctgggtgacagagcaaggctgtgtctcaaaaaaaaaaaaaaaaaaaaaaagaaaac

SEQ ID NO: 49615 - DNA, 1045 bp, Homo sapiens
ttcatgaatattcattatgaactgtgaagagctgttcacatttaaggaatttcaagcctcatgtttggatttgtgcatgcttctaattgcattcataagtgctgtcttcttgatttgtcagaagacagtaaaatgaatttaactctatgtggaattcacttttttatcttgaaaatgaatactgggatattgtagataatttttatcttgttttgatatagtatggaaagacccaccacaatttttagtaatgtattgctgcttatttaggctggggacattgtttttagttttgtttttgttaaccaaattagaggctttatattccctttatctttaaaaaattgtcatcctctctcacaagacctgttttagcccctctaggaggctggtttaaggtgcctatggtaagaggagctatatttacataggtctagttatggaaggtgccatcagttatcataccctgttctctttggggcttattctcttctctattttgatgtgacagcataaatgtgcactgtggaactgtccgataatagaagccactggagtacatattttttcttttattgtttctggtccttagcatctatatagtgaagggattgctttgtgaattgactttggtatggggaaatcgggattgagccagcaggactgcatgttgttgtatatatgtgaaacaggcaagattgagaacattgtctgtattgatttaaaatgtctttttagattttgaaatgtgcaatatttgaaacataatatgttggttgtattattgaatttcaaggaaataaatttctctctttgaaagtgcagtaaacactgagtagattatttgctcagccatacgtatgtgggttgctggtgaacttgggataagaaaaaatttcttcatttatgtcgttttgttgttgttgcaatggattaaaccacacatccttctcttctgcctcctttatatactaaactcagcaaaatctgagtaatgtgcttttcctgtgaatatagttcatgacctcatatttaaaggcaatgc

SEQ ID NO: 49616 - DNA, 1043 bp, Homo sapiens
ttaatttaatttatcttttcaaagaaccagctttttgtttcatttatcttatatttttttttttgcttcaatttcacttagttctgctctgatcttggttatttcctttcttctgctggatttgggtttggtttgttcttgtttctctagttccttgaggtgtgaccttagaatgtcagtttgtgttctttcagtctttttgatgtaggtgtttagggctgtgaacttccctcttagcactgcctttgctgtatgccagaggttttgggaggttgtgtcattatttgggaggtatgtgtcattcagtttgaagaatttttaaatttccatcttgattttgtttttgacccagtgatcattcaggaacaggttatttaatttcatgtatttgcatgattttgaaggttacttttggagttgatttccagttttattccactgcggtctgagagagtgcttgatataatttcagttttcttaaatttattcaggcttgttttatggcctatcatatggtatgtcttggagaaagttccatgcactgttgaatagaatatgtattctgcagttgttggacgaaatgttctgtatgtatctgttaagtcaatttgttccgaggtatagtttaaatccattgtttctttgttgaccttctgtcttgatgacctgtctagtgctgtcagtggagtactgaagtcccccactgttattgtgttgttgtctaactcatttcttaggtctgttagtaattgttttataaatttgggaggtcctatgttaggtgcatatatgtttaagattgtgatagttttccattggacaaggcttttcaccattatataatgtccctctttgtctttgttaactgctgttgctttcaagtttgtttcttctgatataacaacagctactccagctcggttttggtgtccatttgcatgaagtgtctctttccacttctttaccttacgtttgtgtgagtcctcatgtgttaggtgagtctcctgaaggcagcagataattggttggtgagttcttatcca

SEQ ID NO: 49617 - DNA, 1033 bp, Homo sapiens
tttttctgtttttaaattttctacagagaatacaccttttttatagcctgcactcagtgtggacaattctcattacccaactttgctacatcattattgttttcacaaatttgtcattcagataaatagtatcataactgattgttcaaaaataaaggcatgtatgtatgttatgtaaacggtcattttgccatgcctaaatgtttctatctctagaattgtgaaaacattacgactgtcaatacgttgttggtttcctgaattacactgctgccacttgactatataactggctagtttttgaaatgttttaaattttggattcagggaacacatgtgcaggtttgttacctgggtatattgcatgatgctcaagtttggagtatagatggtcccatcacccagatagtgagcatagtacccaataggtagtttttcagcacataacctcctcctttactctccccctctagtagtccccagtgtctgttgttctcatctttatgtatatttgttttcaatgtttagctcctacttacgagtgagaccatgttgctgcaaaggacatgatttcattcttttttatggctgtgtagtatttcatggttcatggtgtatatgtgccacattttccttatccctgacaccattgatgggcatctgggttaattttacatctttgctattgtgaatagtgctgctatgaacatatgaatgcatatggctctttgatagaatgatttatttttttgagacaagagtcttactctgtcgcccaggctggagtgcagtggcatgatctcggcttactgccatcttcgccttacaggttcaagtgattctcatgcctcagcctcctgagtagttgagattataggcatgcaccacaatgcccgactgatttttgtattttcagtacaaatgggatttcaccatgttggccaggctggtctcgaattcctggcctcaagtgatccacccacctttgcctcccaaagtgctgggattacaggtgtgatggcctagaacaatt

SEQ ID NO: 49618 - DNA, 1052 bp, Homo sapiens
atctcagctaattgcaacctccgcctcacaggttcaagtgattctcctgcctcagcctcccgagtagctcagattacaggcccataggtagaccataagtatatttaaacttattatgattggcaattggttgaaagagttattattagtagaaagaaatgtctgattatgataaggggttgtggagacctaggttttatcatgtagatgaagcctccaagtagcaggctttagagagaatagactgtaaatgtttttaatcagactaaaggcttgtgttaatgttaatgctggaagggtgtaatgagacatgtccaaccttcattttcccacatggtccaaaccagtctttcactttgaaagtgccagagtagagtgtgcaacccaagcatgtccagaattgctgtgaagagattttgaatcattatttccagaagtggctaatagcaaactaatgattctgactataacaccacaaaaccaagaatgatatgatagtttgacatgaagaagtagaaattgaaagagaaacgctcttggaaaagtttatcaatagtgctaaagaaatttgctatgcacttcaagctgaggatagtgggctgaattaattggtttggcattttttggaccatgtataaacaaccctctttttaaaacagatgaaagctactaacatttaggattatctgttgatgatcttggataatgtgaagcgatttatcatagtctctggggcaccgatgtatttgtcggaagtatgttcactaatgcaacaccagacagccatattatagagaaattaaggggaaattagcagtaatattaattcattagctgtactatttttatgtaaccttggggttaatatataggcactgtcaaactaaagtctctaaaagatacttatttgtaagtatttatttcaacatttatgaatttacaacattgacaagtaataatgggattttaaaatttcaaatgttcattattcatattatcattgactacatgttgagcacaaccacattgtataggatgtggtaattagcttg

SEQ ID NO: 49619 - DNA, 1050 bp, Homo sapiens
ctatcagtcacctgttgtataattataacaatgtttggatttgtggattattattttagtatataacattggattttatgtatgttacctgaagaagagcaatatctgtaccacatatttctttgtttttcttttttgagatgaagtctcactctgttgcccaggctggagtgcagtggtgtgatcttgacacactgcaacctttgcctcccggattcaagtgattctcctgtctcagcctccctagtaactggaattacaggcgcctgccaccatgcctggctaatttttgtatttttagtagagatggggtttcaccatgttggccaacctggtcttgaactcctgacctcaggcgatccacccacctcagcctcccaaagtgctaggcttacaggcatgagacaccgcgcccggcttatatatcattactttcttggctgagagctgtagtctgtggtagttgttttgttttgttttttgttttttttttgtagttttcttgatcgtgatcaattaagcagaaagtagaatttcagtcaggtaacctgtctatattagctaaattatcttttgcttattacatagagtgctagaagtatgctgtcatggcatatgtcctagtttctcatcaaatggaccaaagtcagtgattttatttgaagaggaaaaattgaacgtcattgtaaattaagttgcaagtttagtaaccatattgtaccactgtttgataaatttgaacgctttatggtatttcatatttagaatgttcaaaatagtactgaagtattcaaatacatacaaccctgagcgatattgaagtaaaataaacatgtatttaaggaagtgtcaaccttcaattatatacctttttgtcactgaattaacacttatttctcacgacgtggaagcagtttcagtatggtttgtactaagctaagtgatagttgtcatctgtatgacaatttagaatgttttctgtgtccatttgtgatcaaaattatatgttgctttgtgtgataaaacctggtggtggtagtaactttgaac

SEQ ID NO: 49620 - DNA, 1055 bp, Homo sapiens
aaaaagaaaaaaattaaaaaaaatttaaaaaagtcaaattcagcgatttctagtatgttcacagacttgtgcaactatcatcactatctaattacagaatatttttattaatacaaaaagaaattccatgtatatgtttttgcagtttgtttacatggtggtttttgccacacaaaattttaaaatttcatttaattacattttaatctcttttcctttacagtttctgttttggcttatgcttagaaatgctttccccacccaatgttttgttgttgttaggtaatgcttatttttatattttcctagtattttttactttttatttttacatcttgttctttaacttggaattaatttatagattgtaagatggtttctaaaaatgttcacaattattaaatggttagcgtattatcccagcactacttactgattttctcagtgatgtgaattgctgcccttgttatatactgaattcttatatacacacatatgtacgtttctggaactttctgttctgttgcaaggatctttctattctgacatcagcacaagacctttttttttttttttgagatggagtctcgctctgtcacccaggctggagtgccatggtgcaatcttggctcactgcaccctctgcctcccaggttcaagtgattctcctgcctcagccttccaagtagcttggactacaagcatgcaccaccatgcccagctaatttttgtatttttttagtagagacgggtttcgccatgttggccaggctggtctcaaactcctgacctcaggtgatccgcctgccttggcctcccgaagtgctgggattataggcgtgagtcactgtgcctggccaatactttttttaatagacaattttttagagtaattttaggtccacagcaaaattgaacagaaggtacagtatgtagccttttcagattggcttctttcacttagtaatgcacatataagtttcctccaagtttttttatgaatagctcatctttaatgtgtgtgctgaataatatttgattgccttgctgcacca

SEQ ID NO: 49621 - DNA, 1053 bp, Homo sapiens
cccatctcgacctcccaaagtgctgggattacaggcgtgagccaccatgtctagcctgttttttcaacttattctacataagtggttaaatactgacagttattttcgttttcataggcatttaatgttttcgcatttgttggttttggcactattttgtcttagaagtaaatttgtcttagaagaaagcaataacattacaggcagttcttgatttagacatagattgtgtctgacaagttgaatcagatgatttaaaaataaattttcttaatatttttatattcgggggtacatgtgcttgtttgttacatgggtattacatgtgtaatcaggtgattgttttgatgagggagaggaggcattccaatcaccaaatagccttcatagactcaaagattcctgcaccaagaccatatttaacacataacattgttgaaaagtagctgactcatttgtaatttcaagtagttgaattctacttccccctaccttcctgagataatgatagctgccttgcaagaaaagttccacacacactaaaaacatgtttctaccttttgtctattattgacatggcagcaattgcttagcccctgttggaaaggcacatatatacttgaggcatatttctcacttttggggaacctgtctctacctgtgtttattgcagggtattggtatttttcaagcattctctccacaccactctcacctttggctggttttactttatgacttttgcacacattgccctgttaagttaatccttttgaggttattgttagctttggactccagcctgaattggctgtatgaacatagacaagtctcagctttagcttccttaattttaaaaggaggttatgattctatttacgtagcaggattggtgtgagacacatgcagtgctataggaatctgaagcatctgtattgttatcataggacaacttatttgtagagatgctatgactactctaggagtcacaaaaatgaccagtgaagtacattgccttttaatttgaatgttctgttcttttttgaccttatt

SEQ ID NO: 49622 - DNA, 1065 bp, Homo sapiens
ttgcactagtgaacagcatgactgccataaaatgaactcctttttttggttaacaagttgcgtgggactttttttctaggaataagagctttttagattactgtgtgccagacactaaaacctgataatttaaataaatgactattatttgataatattataatgtgtatgttggtatattattggattctttgctacaattatgatttcataagtgcatgagttcctttctctatttttttttttttgagacaggatcctactctgtcacacatggtgcattgcagtggcatgaacactgcttactgcagcctccacctcccagggtcaagtgatcttcccacctcagcttcctgagtaactgagaccacaggcatgcaccaccatgcccagctaatttttgtattttttttttttttttttgtagagacagggttttgccatattgcccaggctggtgtcgaactcctggactcaagcgatctgccctcctcggcctcccgaagttctgggattgcaggcatgagccgtcatgcccagccgagtccctttctctagtactctgtcttattaatttctaaaaatgctttatatttacaagatacagtctcaagcaatttcaattcataggcctaatttgcatccaagtcaaacaaaaaactgttgaactagtaaacagttataagacaattttaaaaatgtgaatactgcctggatatttgatgatattgaagaattattttaggtgtgaaaatggtattatggttttttaaaaagagtctattttttagagatacatatttaaatatttacacatgaaatgatgtgatgtctgggacttgcttcagcataatccaggtagagagcagcgagtggagggtgtaggaatgtatatgaaataagattagccaagtattatgaagcaaggtgataggtacgtcaagtttattatgttcttatacacacacacacacacacacacacacacacacacacacacacacataattgaaaatttccataataaaaagtttaagaaaaatcaggctatgttttggaatagtt

SEQ ID NO: 49623 - DNA, 1030 bp, Homo sapiens
atgttggtaattgtagggctttttgtggagtttcaggaagaggttgctctttctcaccttagatattttgtacagagttatccttttatgaacgttataagatcagactctcatgctgtcagtaggaagcaaattgaggaatcctcttctgctatcatcaaccggccaattacttactgtgatttgccctttggcctgcctgaagagtgttaactgggtatcttaaattctacctaagttcattacttttttactctttccctttgaccttgcactattagttaaaaatcttatcttgtacctaagtgttttttgttgcaatgtagggatgaaaaccatgatttcttgcagtccagaagtagaaatattttagtgataaggagctggcctctaggactaggaggaatgatagggattgactagaatctgaatgtctttgatcttttctagctccatggtaggagtcaatctgccacagaaggctggtgggtttttgatgaagaaggagctgaactactttgcaaaggccttggagagcccagagcgacccttcctggccatcctgggcgggtatgaagaactctttaagatcatgctttaagtattgtttgcctggtagtaggccataacttgggtggtttattgtcatatagctcagtcacactgggtaactgaggagaatttaataaaggaactacaggctgggcatggtggctcacacctgtaatcccagcacattgggagggcccaggcaggaagattgcttgagcccaggagtttgagatgggcccagacaacaaagtgagatctcatgtctacaaaaaaaaattagctgggcggtggtggtatgcacctgtggtcccagttaccagagaggctgaggtgggaggatcacttgagcctgggaggtagaggctgcagtgcactgtgatcacgccactgcactccagcctgggtgacagagcaagaccgtttctaaataaataaataaataaataaataaacaaacaaacgaacgaactacatacag

SEQ ID NO: 49624 - DNA, 1051 bp, Homo sapiens
tacacacacacgtatatgtatatgtttgtacaggtgtgtgtgtctacacagacacccacacacacacacctcaaagcctcagtaaaattggggataataatacttacctggctgttataaagtttaaatgagataatatgcttagcacagtgcttaaaacagtaactgttctatagctatattttatatatgttttattattattacaggtataccttattaaactcatattgtccctaaaatattttactatgcatagcatctaatgcaagttatttaattctctctgaaatttagatcataaataggggtaatagtattacatacacatcacagaatagttgtgatgactaaacaagatgaagttctcaatgtagatcttgggatacagtaacggttcaataaataaataaatagtagtgaattagtgatgatgatgatgatgatgatgatgatgatgatgataaggaagatgatatcacctgtcctctggaaaagaaatgtaggctaactactagtttttctgaatagcaagattttactacttagttgatgctctcccagaattgtttttgttactaaattcaaacttttaacatgcctatcctgctctcctttctcatgccttctctctcactctctctctctcactcttgcatgccaaatcaagctgtttctttgtgaaagcaccaatgacataggttagcttactatttttgaggtccagctgtacattttaataaacacttttcgtattgtggaataatgacctagtctttccttcttaaaacatgcagggtgaaatcctcactatttttatgaaacagcatctgatcttgaacttttatgactcacctcagtcacttcacctgtattttggccctgtcagatcatgtctttatttaaacttttgatattttattctttatatgtttttgcattagtttttatttttaaaactttttctaagtatttttatcttgactactgtggttttggtgccttcttaaattttatgctagagatgactactgcctcattcttctcactg

SEQ ID NO: 49625 - DNA, 1026 bp, Homo sapiens
aatctccagattcagtgcagtccatatcaacatagcaatggcattcttcacaaacatagaaacaacaatctgtacagttatagggaaccacagaagacacagaatagttaaagctatcttaaacaaaaaagaacaaaactggaggaatcacattacctgacttcaaattgatggtggtggtggtgtgtctggagcagcctctgtggggatgccagctacagtgggggagatgcagcttgggctacacactccgcagagccagtgggggctggtaacaagtgggagccccatcccctactgagttggcagggtgggagccccatgctcctgtgtgcagctgaaaatgcccagccaaggttgtgaacccaggcatccttgccctctcaggggcctggaaatccatccctgcttctgcaggctcagaagtgccttttccctctctctggcctcttcccgctcctggtgcctgctcttgggtggagcaaagttgtggccttgtctgggtgttgtagcaacccaactgggtgtgtgcatgattggggcggtgctgacacagcagaccctgctgcctcagcttcctctagactttgtgcactgaggagcatgagagggatactgaggaggctgagggttgcttggcacgggcctgcatgcaccccttggcacaaacagcctgggtgccatggatggcagaaggcagacagtctccggggtggaaaggggtaggtttcaggtgaaaccccaccttcaagacagataaagtctgaaatctgggggccaggctgccagttccaagtggagtccatggcccagagtgatagcttatggtactttttcttggcccacccatggctccccatggaccaatcaataatcatttcctccctgtgagcccataaaaaccccagactcagccagactctggcagacattgggattatcagctgcaggaaggagctacccacttttggtctcctgagtgttctgtcactcaatgaagctcatctcctggctgaaacatgcacc

SEQ ID NO: 49626 - DNA, 1086 bp, Homo sapiens
aaaagtagaagtatcaaataaaaagggcaacttttaaaatattaagcctgaagacttctaaaaagacaagaaacatggcctaaataaccaacatagatttacatagtaagtttcacactaccttattaccaaaagcaaacacctcttactttaaactacattatcatgtatatctattgtatgctggtctttactttttgccaaaatcaacatataatgaagagatgcctttgtttcatgagattcaaacttgatgctatgctttaaaataaactcagtacttttagaaacataacttatgtgttcttggagtttatataatagtaattttagatgagtaatatctttttttagagggttgggaatgcaaaaagagaaaatagtagaaagaaaaagctttgaatgcaattcaaggttttcgttttctatgttttctttttagggcttttaatctcacaatacacatgaggtcaaatgaacaattttattgggtttacaaaaatacggcataaagaactctagagaaaacagggtgctttgtaatacactggaaacgcaaaaaaagttttttagtcaatattttctcctaagctttattaaatgttgctgatgatacttgcaatattttatgtggtcattttcacttttattttaatgtcaaataagttaacactgccaaaatgggcattctttaaaaatagatgtattttttgccatgtttatataacttaaaattaacatagtatattaaagtaaaaggttgaattgagtcttcctaaactgaaatattttattttgtcagctgagaaatatgttttgtagatacaaaaatgcaagtgaaattctgaatatgaaggtgagttttatttaaaaaaatctccaaaatatttggccggaaaatataatctttgccacttgttatattacattcagattgtttctgtttgtaaatcagacttgtttatttgttatgttcagttattgagctggtttgttcttgggaatatttgactctcaggaagattttcattttcaccaaacaatgcaaattggacgtcgattgcattgttaaatgtcaacatttct

SEQ ID NO: 49627 - DNA, 1119 bp, Homo sapiens
gcttgcataggcctgtgtgggggttgagggaggtggttctcaggccaatggggttatgttccagaggggattatggctgcctctgctgtgcagtatagttctccagggatttggagtatagccagtagtgaaaggactcacccagctcccatgcatttggcgaggccgatcttgattctgcagtgccctgctaacagtttagatccaggcagcctgtgcacagagctcagacctgccctgggccataagttgccttgctaagaacacaagcgcggctttcaggccctcttccctctctgtgtgctcacagtgtcagtgattcctatgctcgtatttgcagcagttcccgttcacaccccctatattctgctcaagaatgtttgtgcccagtcaaaattattacaaaattcagttggaagtttctttcaccctttgaccgctccctaattctgctggctgtcttctctgagggcccctgtgagatatagttagggatggcttccctgggcttgagctggagactctgagtgcctacgaggtccttccccactgctgcttttaactttatatttcatgcggctcctgaaatctattccagctctaggcaaggttaaatccttctcccatgatctggatttttagattccccagtggaatgtgtgtttggaggcaggttttcaccctctctcactttgggaactcacccatctcatggaatttgcagcagcgctccactaccatcaaaggatctgtgaattcttttggttttcctggtatgttcctgcagtggttcttggaacaaaagttcatggtatgagtctccacacactgttctgtctgtccaagtgggagatgcttgttagccctgcttcctatttgctattttcctcccatccatgaatgagtcttttaatgtgctgttgaatttagattgctagtattttgttgaggactttagcatctatgttgcattagaccatttttgcattgctataaaggaatacctgaagctagctaatttgtgaaaagaggttttatttttggcttacagtactgcaggctgtacaggaagcatggtgctgacatgtttatggtgagagcctcaggaagctaactatc

SEQ ID NO: 49628 - DNA, 1067 bp, Homo sapiens
ccactccagcagacccagggtccattctcaccccaatactgggacagagcctatggactgagatgctaagacaacccagacccaggttccaggcccatcccagtggtcccaggtgccaagcctctctcagcaccaggccagttcctgtggatttaggctccaggttccaaatataaaacctaatgttacacctcaagaagctaggaaaaacaaacaaacaaacaaaaactaagcccaaagttagcagaaagaaggaaataataaagatcagagcacaaataaatgaaatagaaaccagaaaaacaatataaaagatcagtgaaagtaagagttgatttttgcgaaaagataacatagataaacctttagctagactcagttctaaaaaagagagaagacaaatcagaaatgagggaagagacattacgaatgataccacagaaatactaaaattcgtgagactactgtgaacaattatatgccaacaaactggataacctagaaaaaaactgataaattgctagacacatacaacttaccaagactgaattacaaagaaatagaaaatctgaacagagcgctaatgaataaggagattgagtcacttgtaaaaagtctgtcaaagaaaagccgaggacacgatggcttcactgctgaattctaccaaacatttaaaaaaggagtaataccagttcttctcaaactcttcaaaaactgaacagcagacaatactttcaaatgtattttacaaggccagcattaccatgatacaaaagccagacaaggatacaacaagaaaagaaaattacaggtcagtattcctgatgaacttagatgcaaaagtcttcaacaaaatactagtaaactgaactcaacagcacattaaaataatcgtttaccctgatcagtgggatttatccaagggatggaaggatggttcaaaatatgcagatcaataaatgtgacatatgacattaacaaaaggaaggacaaaagccatatgatcatgtcaatagatgcagaaaaggcatttgacaaaattcaacatcctttcatgataaaaactt

SEQ ID NO: 49629 - DNA, 1050 bp, Homo sapiens
cggggaattgggaaagatgagagttgccagtctgctggtgagctctttgaaatagctctttcaaaacagagctctgaatgggtatgggtacagaccattgttgtaaactgaactgtgttaggccatttgtgcattgctataaagaaatacctgagactgggtaatttataagcaaaagaggtttaattggctcacgattgtttaggctttacaggaagcatggtggcatctgcttctggggaggcctcacaaagcctccaatcatggcagactacaaaaggaggagcaggcatctcccatgacaagagaaagggcaagagagagagacagagagtatgtggggaggggaggttccacacagttttaaatgaccaggtctcgcaacagctcactcactgtcatgaagacaacaccaagccataagggatctgcccccataatgcaaacacctcccactaggtctcgcattcagcattggggattgtgattcaacatgagatttgggcagggacaaatatccaaattacatcattccacctctggcgcctcctaaatctcatgtccttcccacattgcaaaatacaatcgtactttcccaacagtccccaaaagtcttaactccttccagtgttaactcaaaattgcaaagtccaaagtcttatctgagacaaggcaagtcccttccacctataagcctgtcaaataaaagacaggttttttatttgttgggtataggcattaggtaaacattctctttccaaaagggagaaatcagctaaaataaatgggctacatgccccatgtacattcaacacccagcagggcagtcattaaatcttaaagctccaaaataatctcttttgactctacgttccatatccagggcacactgctgcaaagggtgggcttccaaggccttgggcagctccacccctgtgtctttgcaggattcatcccccagggctgctcttatggattggatttgaatgactgtagcgtttctaggtgcagggtgcaagcagctggtgaatctaccattctggggtctgg

SEQ ID NO: 49630 - DNA, 1082 bp, Homo sapiens
aaataacgttgcccactctgacaccagtacatccacatatacctctcctttctaggggagagaggaaacttgcctatttgcagtgcacctgctttttatatataaaacgcatctttaataagatatgcatctctcaccttcctaattatacatagttgccaatgtggtgaatttaagcattagtccagaaagataaaacactaactctttaatcctggtatgggtagtaaagagtcatttaatggtaaaacaagacttttctgacttactactggaaaagctttaccaaactcacactgtcttatgttttatttattttttaactttagataaaaaaactgacataaaattgtatgcatttaccttgtacagcatgatgctttgaagtatatatacattgtggaatgactaaatctgtctaatttacatatgtattaccttgaatagttatcatttttgtgttgaggacattttatacccactcttagcatttttcaagaaaacaatatagtgttaactatagtttcatgtttgttgttggtagaggagcaaatccaaagtcattaatcatctagttcccttgatgttgatttgtaaacttgattcttcccagttctatcttcctcaaacaccaggcttcataggaggatttataccctaaatataaaagcaaaaaaaaaaaaaaaatttttttttaaaggaagtaagtccctacctggttaagtttttcattgttcttttgtgtatgtttgtttttattaaatactaattagaatcaaaaggctgttcaaaatatgaaaggtatgaataataatatgatgatgataatgatgtacaaccgtatacctagcacccaatttaaaggaaaacaaaatcctctgtgtttccatttcattccattcagaggttaccattaccctgaatttttactattattcccctcctttactttttaattttaccttatatgtctgtattgctaagcaatgttttttttaagtaaccttatattcctgaaattcatccaaatttttccatgttgctgtaatttttatatttaccccctaatttctaatatttct

SEQ ID NO: 49631 - DNA, 1037 bp, Homo sapiens
tgtgattttactgtgatcaaaaagaaggtgacaaagtgtttaataccattttgacaatgtattcatattgatttgcataggtttatctatatagatacctatatagatatctatataattacaatgtgaattataaaacccgctaagttgtcttattgcaaaggaaggtggctaattcagcggttggggaataataataatatgcaccctttatcgagcacatactgtgatgcagagagctagaagtatattatgttattcagcccttacccacaaagcaaaacaaaaacctctgctggatcggtaattattcccattttatgatgaagagactgagactcagggagctaaaataagttgccccaaatcatatagcttgtgagtagcagagttctgtttatggcctagatcttcttgacatcaaagtctaagttctttccattgtctatagattatctaatttaaaactggaagttagtctctaatttcagcctcctcctctcacttaatcttcataaaaactgtcattgaataacaaacatgatatgagttttactattttcctctgtcctctctcttttctaatcaagaggagctatacagtttttagactctgaataatctaccagtgaccatattctcacaagaatataatgtatggtcatttttccacatgccttttaattccagagtatctttatgaagatgaaacatactacagcttaacagtgggaccaaaacctttccaagctaatgtcttttcctcacacatctagattctggaaccctttatttgcctgtcttgggtgatgtggtatatgaaaagcattctatggagacaatgcagagggagaaagagatgccagtgctacttactcattcttatcatagatgtcttggtcagtttgagctgctgtaaaaaataccatagactgggtggcttataaacaacagaaatttatttctcacagttctagagactgaaattctgagatcagggtgccaacatggtcaggttctggtgaagaccctcttct

SEQ ID NO: 49632 - DNA, 1046 bp, Homo sapiens
agaaacggggtttcaccgtgttagccaagatggtcttgatctcctgacctcgtgatccgcccgtctcggcctcccaaagtgctaggattacaggcgtgagccaccgcgcccggccgagtgatctttttaaaaacatagcatcattcactcctctactcaaaattgtccagtagcttctcatctcacttaaagccaaaatctttaccatggccctgtgtgacctagctttccattgtctttttgatcacatctcctatcatctcactgccttgccgccacccctacatacaccacatttgtctactgtgtttcaaccatattggttcctcagacatacctcaggtccattacacttgccgtctgctcatcctggaaggcattgcctgctggtatctatagggtgcacaccctcacctccttcagttctcggctcatgtatcacctttccagaaggctttccctggctgccctatttaaaattacaaatcacctaagcactccatatatccttccttgtttcattttttcacatagcacttaaccaccatctgatatatatttaattagtttgtctgtctcacctaactcaaatgttaggtctgtgtcactagagatttttatctggtttgttcgctgctgtcttcccagtatcaaaaataaatttgttaagtgactaatttttcttttcattttaatactttatcaggtgcaacccagtttatgcctgaccccaagctcatggatcacgggcagtcccacccagaagatatagatatgtacagcactagaagctgaagtagactgcatgcagagactacacagaaaactacaagatgtgtggcgttgcaaataatgatgaaaataaatcatgtaatgggtaactgatacatagagtattacctaaaccaagtttctcccttacatttccaaatatgccatttgataaattacataagtggttaacacacaaactgtgaatgcagtgtaaacaatattaaatgattgatgaggagacttaggtagaagtattagcttgcatttgatga

SEQ ID NO: 49633 - DNA, 1025 bp, Homo sapiens
atatttatacatatatgtataaatacatacatatttatacatatatgtataaatacatacatatttatacatatatgtataaatacatacatatttatacatatatatgtataaatacatacatatttatacatataaacatatatttctgctctagctttcccagattaatgctagttaaattagaatggtgtatggaaaggtgtgtttccctctgtttttttttttttttttttttttttttttcccatttcctagagctggaataaaatatccatgttttatgggacttgagcttggctttgtcccttggttttgttaatgttaattcctcttaaatatctaaaaacatctctacctatttgagagggccatatgctacacaggcttcctaatactgcttagcaatccttctactggttcctaagtggtttactattgtgttccctggaagaggtattacaaacgttttattcttctcaagcctcttagaactgtcaaagttgactgtgcctcctatttcatagagaaaaaactaaattattagatatgaccattcccaaaacttcttcccatctaccttcaagacttacctcttttcagccatgcatcccccttttctaagacatgcttctctttgtgttcttgacctcattccttcccatctaagaccatattccaccctgtttaatttctagtcttcggtttctctttttacagtgagcaaattagaagaataggttagaagaatagggtagtagatactgtagtttctttcctccacctctacatagctgcaggtcttctctgtcttaaatcaacaataacaaaacaagacaaaaacctttccttaacttggcctcttcccttgaactattttttctctctccttcctataattgttatacttctttaaaaagtaattgttactttttgacaaaagtaaatattgtcccttttttccctactttcaagtcctctctgtcttgtgacattctggcctccatacctgcttaatttttttt

SEQ ID NO: 49634 - DNA, 1046 bp, Homo sapiens
acccccatatctctctagtgctgtagacctttatttctacttactagttatattcacctaacatcccatagatatgccaatgtcaatgtgcctaaaacaaaattgtctctacctcccgctccttcaaatctattctgtcttctctaatcctataattactctccctcaagtcatcatcatcacttttctgggttactgtaatagccttcaggctaatttgctcactgtcaatcttgctgtctctcatttcagaatatgttctgcttgcaggtgacagtaaactagttaaacaaatatttaatattagcttaagcaaaaaaaaaaaaaaaggcctatcctatttatagcctagaattaggcagtatagggttgggacagtggctcattggtgctatcaaggacgtagactttttctctttccactctgtcctctacagcatgctggtttgtcacctcatggtcacaagatgtctgctgtacctccagggagcagatacacattcaaagtaggaaatagcagataaaaatgtacacaagatgcgtctgactcccttttaccagaaaagtaaatgctttcttagaatctcctcagaagacctctgtgtatatctcaaccagtacttgtcatatagccacacacttagctcaaggaagatagggaatagggaaatcatgtttcttttcccctgtggtgaggaaggcaaggggtaaggggttgggaacaggtgctgaattaaagctaacatacagtatctactaccctattcttctaacccatttgtctattatgatatagttgtcttgacaactataatgaatagctgtctttctgaaatctttagtggctcatcattgcctgcagaatcaaaactccttagtctgatatacaaggcccttcatatctgattccagcttaccttctaatcctatcttccctctccttacccaccctactgctaatgtgtattatattgtctttatgacataccatttgtttcttgaacatgctttgctcattattgcctctttctctgcctgtgctagtg

SEQ ID NO: 49635 - DNA, 1346 bp, Homo sapiens
gctcagcccccgcctcaagccggcggggtctcgcactaacctagcgcgggcgcctcgatctcccgcgcgcgcgcgtgcgcgagacccccctttggccccctaccctgcagcaagggtagcgtgacgtaatgcaacctcagcatgtcagcagcaatataaaggagaatgaggcggcgcgcctcccagacgcagagtagattgtgattggctcgggctgcggaacctcggaaacccgaatgtgaggaccttaagggatccacagctgccgccccccgcagccatccagagcgcggtcacagtccgactggcggcacggaggcggcggcggcggcggcggcggcagcggcggcggcagcggcggcggcagctgtagctgcagcagcaggtaaggagactcctgacgagaaactagagggacgtggatccaccgcgttcagtgtttcttgtctgaggggaggagaggctcacacccagcgtgtagcgtagggcgaagggaacaatggaagtggcgtccagtccctgagctttcctcccgcctcgggcggagttttcctcttcagccgcagccgggggctggaggaattgagggaagtaagggttttcccccttagccaacctcctctttccctaggccagagccccagggagctagagccgtcgttgagaccgtcggtggtttagggtgacggtaaaatggcggaaaacaaaacggtgaagtgaagaatgcagcgtccccctggcagtttctctcagctctccctccaccccatattcttttcactggcgccccagtcgcctcgcccccgccccctgaccgagctaatagtaacctttggaatgcgcgagggatggcggcgtgtgcgaggaagtggcaccgaatcggcattttaggggattgggagccgtcagagcctgggagttggggggagggggggggcgtgtgcgacaactgtcgcctacactaaaacaccaccattttggttcccaaccgtctcccacgtagcggggcagaggaagctggaggaggctgaggggctgggcagcacggcgtgggtagcagcggtggcgaccgctgcaccaagtgagaggagggaggaggggaaagggtattcttgtctcatcggtctcttcctttctgctgcgaaggttctcttgttaggtttaagatctagtcagatgggtaatacctcagagggcacgtgtgtgcattctgctcgaaatgattgaaacttggcatggtcgtgggaaaaggagacttatgcgggaagagggctgcgtccaaagctgcaatactgctacttgccagggctcctttgtctcccatctctgcaaatactactttcgca

SEQ ID NO: 49636 - DNA, 5731 bp, Homo sapiens
atacttttataatagttgcactatgtgttgtaatttttacacttcattgagtgctagtgcagacttttcagtatggatttggcaaggataaagcttgcccttgattctctttcactttctaaaataaggtgttgtttgtgatttttaagatgtgctttagagaagattttggtttaatcaagtggtagcattctaagtataataacgttgctaatgtagtgagtagttgtttttgttggaatccgttgggttgcttttaacattactacagatttgagcatatgaacccttcccagcctcactatgcaagttcaggtgtaaagaaaaatattaagttgtgtaagaaacttagtttaaaatattttaaagtatctgattttgaatgtatttttataataggtaaagagagcgttttcccaaagaaaataacatagcacagaaggaaaaataaaaagaaattgctgcagattttactttatgtgagaaaatctacaatttcttcgagacactcatataaaggtgactaacaaattacttattgttttatcttatttaacagttaaataaaattaagtttttaaaaacattttcagacatttgtagttgttctattagttatgtggtaaagaaagtaattactctaattaaaatccaaatagtacactgttttaaatgttaagaacatgtccctttcagatttattttgttaacacacaggtagtttattgtgaactctcttggccttggacctcattttgcataatagcaaagcagaaaacaatggcatttgaaaaaagatacacaactaagaatttctaaaattgtgaagtttgctcatacataaagtaattctgtctgaatcgtttgttatacagaaatgtcacctacttctgtagcatatttatgtatatacctgaaatggtgataggggttcctctgagactctcctgcctcctgaataccaatttagccatcctcctttatttaagaatatattaagttgtattacgtgtcacctttctgaaactttcattaaggttgcagctttatctgttgtgcaatatggtacaatttattaagcagtcctacgtgaaaaggagataagtgccttataaaattgacaggtttttgttgatttacttagaatcttatgtttgaagagaaaatgcacatatatgtgtctaagaaatacattgagtgacagcatctgactttatgttccatactatcaaatggtcgtaaatataggataagtcatttgaaatgaaatagattgagcccttgctttcaaaaccaccttgaagctagcataattttattaatcactaataaaaagtcagttgtacaattacaagtaaatgaaatgctgagataaataatttgctaaatgtttgtatgtgatcgatcttatttttaccatatttaggaagcagtcatgtttcatgagtcctcaaaactgagacaagagaatgtagtagagtgaggccagaagtccttactggttcaaagaactccggggaaactgggatagaacattttacattataagtagaaccctgggagccagaggtgaatacaagtttatctgcagagctccgctgcagggctgatctgggtctggaagaaatggatgagagccagtggatgaaattcactaatactagacatctgagtcctctagtaatgtataaatatcctaactattgtttgttgtcatctcgttcttcttttataacctatgttttaactggaacttttagcactgcagttttgttgttttgctttcttctaccacttccctatggctcatcagcttgactgtgcctttgtctccattatttttggtttacttccacttggcacttcttttatttatggttgtcacataaagcatctaaccatggtttttctttgttttgctttcttttgtaataagctttccacacttggttgaaaggcatattgtcaattgcatttttttctcaaaacaactaactttggactaaatatattaaactattttaaaagccatttcttttgcagatattggtgaatgaactttgctaagtatggattcaggcggtggaagtcttggattgcacacgccagactctagaatggcccataccatgattatgcaagattttggtaaagcattttctttgttgtatttttttcttttttagaagtaaggggataataaaaatcaaaaataagttgaggaaggggagaattacaatgaaaacttgttcttttactaggaaaatatatttgtagagcttattctcataaagctgtgtgtcagtggtctacttaacatcacttttacaatttaggggaaggttgtgttagggacacttgaaatatggtggtaatatgttactggaaatgaaaaactcaatttacataaataactgcataattatatcacattctgttctgatagtatatatcagctctcacgtgtaggaaatgttaaactgactttctaaaacacattttaagttgcattgttaataaaattggaaaaagaagtgcttacatcaactaaaaaaaagatgcttatatagtgatatgcagaatcatgcactaggtgattattattgtgatgctatttcctcagaaagttgttaccattagaatacatttttctttctcttttttttttttaaaaaaaaaaaagaggccgggcttcgtggctcatgcctgtaatcccagcactttgggaggcaaaggcgggcggatcacgaggtcaagagattgaaatcattctggccagcatggtgaaaccccgtctctactaaaagtacaaaagattagctgagcgtggtggagcacgcctgtagtcccagctactcaggaggctgaggcaggagaattgcttgagcccatgaggcggaggttgcaacgagctgagctgagatggtgccactgcactccagcctggtgacagaatgagactcagtctcaaaaaaaaaaaaaaaaaaaaaaaaagactccttactcttgtggccaggtttgtaagtagcctcttgacagtagtcattttgatgaggatgccaagactccattgacattcaacaaataaactgaatttggccagggatgatctgaattacagaggagatagagctatttgaagtataaaaggcagggatgagatcaaaagaattgaagataagattggagtgaaagcagaaaagacaaatggtgaactgcgataaaagaacagggaacgaggtaatatggaattgttgaagctgaaattagtgatgagggaatagaactgtgatactttgctaagttaagaaaatgctactattgttcgttgataatatggttgaatgtatcatttggtcccctgtagtaaatcccacagtaacggaagtcagtaaagccgtattctagtcatggcagtgctgttaactagctgtgtaaacttggataaattactgaattcccttttataatgattgcactagataacatttaaggtcctctccagttatagaattctttgacgtttctttctgatgaataaagttgagtagtacaatattggatgtgagttaattgatgaaatataaagaaatcgtggatgtattcttctgaaagctaagtgaattgtgttgactatggatgatttagaaatgactttgggtgaaaaaaactcatcaataaattctagaggaaggataatagggccaaagagtaagagattaaagatattcccatgaattctttagtagagagttgatagtttttagaataatggaacactggaatttcagtatggtaaataaattttggttgaaatgtcaactttaattttttaccttttaaaataagatatttttaaaatggaagtattatagtagtttctccatttaatacaaaatattacctctcctatagcatttgataaagtgccaaaactcacttcattcctgaagaggttggctattagctagtaaagtgtgattcctttcaaaagatgaaaaaaaaatctgattggtgctggtgaatatttacataatgttccttttaaccttcctttccattgtttatcctcaatgtctttagaattaattactcctttattacatctactactttttttcttttagttgttaggggaatagaatatgcatattgaaatatttaacatatatgttttttcttctttactttttattcagatacattcacataccattccattcatccatttttataaagtatacaattcaatggtttttagcatattcacaaaattgtataaccatcactagtacctagttttagaacattttcatatcctaaaaaaagacacctcatacccattagcagtcattccccattctgcctctccccaccagccctaggcagccactaatctttgtctgtggatttaattattctgaacattttatataagtggaatcatatatggtcgttgtgtctggcttctttcacttagcatgtttttaagtgtcatccatgttatagcatgtatcagtacatacttcattcgttttcactgccaatgatattccattgtatgagtacaccacatttggtttatttgtttatcagttgatagatatttgggttgttgaaatatttttaatccactagaaatattatgtgtttgacaaaataagctttgcatcttagattgaagtatgagtgcctttggaggcgtgtgacagtatgccaaggcatacctgaaaccacagaataaatagcagagcctcttggaatttttttttcatttgaattgaggagaatatatatacacacatatacctatacacaattatagctgcataaatatgtagaaagtaagattttcgttcactatcccctccctttttagaaataataaaattgaaaggtttgtgaactacttctaatttttaattagtattttcatattatcatttaaagccctctctaaaatgaatttaattgagtaaactgatttgtatcagaaaaatgtttaaaggcacttattgttgtttttgttgttatatacctgtttatgatttaactggtagtattttgagttagtggttttttcaaatgatgcattctttttaaatttcatttttatgctctcttaaatcaaggtatataaatcaatggcagttaaattacttttgcatttttggtgagactgtttttctgaatttgctattagatcaagagtaactaatatgggtaatgctcactcatttgtgcctagggataatgttgacttgaaatatgttaagtttccatttgtccttggtaaattctgaactcgtaaaaggcagtaactcactctatttttgatatgcagttcccagcacaatttcatttataggcattttcatttttgtatgatattttgtgaaatgcaaaggttgtcaaacagacctaaacctaaaaagacctttattaggggacttctggaaattttagccctgataacttagatttcttctgaaagcagcccccccatgcttattttacctccctgttaaaatttctaaattctaaaatttcattagaaattagatacattctctttaaattctgttagcgtcaaaacttagatatttgcagccccataaattattgacatttgtgaaacttagagtttaacatacacagagctaaccaaataagaacactgtggcacaagatctccaaattctgtaaggttcttggttgatacaatacagaa

SEQ ID NO: 49637 - DNA, 2197 bp, Homo sapiens
ctggtgatgttccaagtattcatatttaaatggaataactttaataaaatgggaaatactggaaatcaggacatgtttcttactgttgcctgattatttaattttatactttttaaatgattttttcttattgtttataattttctaagctagtaagatgaattattaacgcaatttaatgctgtttacgaaatgatttaaaatttaaatgagctaccacgtgataggccattttactgtttatctcaagctgttcctctagctgtgcctcacttagttaatcttacacctctctttaaaaaacagtatctagggtaaatatactctaacctcttcccaggcaagtagaaaaaaggcagtctggagtcaaacagtgagttcagtttccagctaggaccttgtggcaaccttatataacatctgtaaaccatagttcctccttatttaaaatgaggataatcgcactcaccttatacagttgttctgaggattaaatgagatgatacttgtattagcaggttgcttgttggatagtcagtgcttaataaatatagctaatctatagctaagtgactttgtttagaaagtcagtggaatctaacagatgaactggtaagaagaacaagcaaaatttaataagagatatcttggatcttggtctaagtaatctgctgctaccctgtgagggacttaccaattcttggtctaggatccttgagagcatttggttcaggataaacaaacatatttggatttatttatttagttttttagatctgatctattttgacttgtaagttcctgctagaggctaagtgaactagcactgttccttcagtctatcctcttagaatccacccaaccaggttgatctgaaaccaagtccccactagcattattctacccttctttccttccctatggtctactttcaagaaccagactaatcttcagcagtgttctaaaataaatggaatttcccatattttaaatctttggtttgtgaaaagatttttgtgaattagtaattttattgtttagatatatagaattccagtacagttaattttacaggattaatattttaattttttccttgctaaaaaaccacatttctagtctgattaaatgctaaatttgaacccccacctcctccccatttctgaaatgcccagtggagtaacaactgaattaaaaatacttgttttatacatactcccttcgtgtaccagacttccaggattgtggctgtgtccttttggggtaatttagtggtttgggtgagagtttgagcggtgagaaggatttaaaagggttgaaagtaaagtatcccaaaaacgctgttgaaagctcagctttcccttttcaccttgttctttgatgtgttagtgtccattggtctccatcctaacttggtaactaacttccataatgaattgattaaaaataatgaacactatgtgacaaataacactctttcaggtactactttatagaaagtgatcaaaaggttttgtactggatgatttcttgtagataatttattataaccagatccacaagccctcttaatttgtttttgtaccacctcagggagcagaacttagcagaattcctcatgaagggattttacacttgtacaatatttacagggcaggtaggagttggtgtttaccatgccgctcaagaaaaacattaaagctttattcctacagatttactattatcaaaccaaatattagtctaagatgagtacagagtttttccccctaaatcaggtgttgaaagatgccttccaattttggatacagtaattattataagttaaagaagttcagacactttcatgttcatgatgtatattttataatagaatattttattaactcacttaacatattagtatccttttacgtttttgtgcctttttattttaattttttgaaacaattatagactcacaagcaatagagcaaaggagtacatacagtccatgtaccctttacttaccttcctgtgatggtggcatcttacataactgtagtataatacaaaaaccaggaaattgacattcacacattactgttaactagactacagacctaattcagttttcaccatttttaacatatattcgtgtgtgtgtatgtgaatgtatatattctatgcagttttatcccacatatagatttgtgta

SEQ ID NO: 49638 - DNA, 1153 bp, Homo sapiens
accaataacgtttgagaaatccagtttctccacatcctcaccagcctatggtgctatcactgttttttgtgttaactgttttaattggaatgtagtgatatctcattatggcttttatgttttacttgaaaataaagtatattattttaaggtcttcatgtagattttactaacatcgttttcacccaactctaacccaattcctggttgttggtgattttaattgcagttaaattgtcaatgattttaaaaaatgatttatttggccaagattacttaatatttaagaaatatttatagcatttgatttattaaatacagtactctaaattaataaaataactttaccttttttggataattgtttgtattatagtggctggaatggctggtactgcacatatcgatggagaccatattgttgtttcagttcctgaagctgttttagtttctgatgttgtcacagatgatgggataactcttgatcatggccttgcagctgaagttgtccatggacctgatatcatcacagagactgatgtagtaacagaaggtgtgattgttcctgaagcggtacttgaagctgatgttgccattgaagaggatttagaggaagatgatggtgatcacatcttgacttctgaactaattacagaaaccgttagggtaccagagcaggttttcgtggctgaccttgttactggtcctaatggacacttagaacatgtggtccaagattgtgtttcaggagtcgactctcccacaatggtatcagaggaggttcttgtaactaattcagatacagaaactgtgattcaagcagctggaggtgttcctggttctacagttactataaaaaccgaagatgatgatgatgatgatgtcaagagcacttctgaagactacttaatgatatcttgtaagtgaaacataaagcccataattactcaggagattgatttatataatctggaaaagttttctgggatgagggatatattcaataaaagttataggggaatctttttgaaaaataattttttgaagcagtgtcattaagatgctgttttgagtttactgatgtttttaatttattcaatgaaaattcatacctgaaatgaagtaaaataatgcagtttattagtatcttaaa

SEQ ID NO: 49639 - DNA, 1940 bp, Homo sapiens
actgaaattgtcaattaagtttttcttaggaacttaagcagaatatgttaagaaatgtattgatttttaaattaaatacttgaaaagtaaatcataaactcagataatgtcctacagttctccctgtgtttatattgcttatgcctaaatatgtgtgtgtatattttatgcaaagctatttaacatgtttattttagactgctttgcaagattcttaaaacattctatccgaagcgggaagatagaaatattttgttctcattttaaatgatgggtttatgagagcagcaacaaaaataaaaaatatcttgataagttattgatggagcttaaagaagtaggtatattagttattaaatttgaagggatcatgctacaagtagttaagattagacaattttttttgacttatccagggaagatttttattctttttaaaatacaaaaatggttgactgggaagtttatcaccaggtagagtgtgtgtgtgtatgtgtgtataaagtgatcgtatgtatatgtgtattagtgaatttaaaactgaaaataaactaaatttatttaatttgtgaatttaattgtaaagtttagcataacttttttcttctataagcacttttgaaggtgaatttttacattgtttttaagaaaataatgtaagccactaaaagactgcaaatattgttacctatttttaaatagatatagattactaaagcaactccatatttacatcttaacgtggcattttttaaaagatctatagtatggttatcatgtaaaatgatgtggcaaaagttggtagtctacactaaaattcagtatgtcttcaaaagagtattcattaatttaaactgatattaaagtagtgcaaaatttagatgtcatgtattgtgaacagtcataccttgtgttatcttctatgatttaattctgcaaaagttttttaaaaaagtttctggaatattctaagttagaataattattttgataactacctcatatatcaaatacaaggactcctttgaggaatataattttattttttgttgatttgtttggtttcaacttttattttaggatttgtacgggtatgaatgatcccatctcctaggtactgagcatagtacccaacagttagttttttggtcctcgccccactccctccctcccacctctagtaatccccaatgtctgttgttgccatctttatgtccatgaggaccccatgtttagacttctcttataagtgagaacatgcagtatttggttttctgttcttgcattaatttgcttagaataatgacccacagcagcatccatattactacaaaggacgtgatttcttcttttcttacggctgtgtagtattctgtggtgtatatgtaccacatttcctttatccagtccactgttgatgggcacctaggttgattccctgtctttgctattgtaaataatgctgtgatgaacacacaactgtgtgtgtcttcatggtagaatgattgttttccattggatgtatacccagagtgggactgctgagttgaatggtagttctgttttaaattctctgataaatttccaaactgctttccacagtggctgaactaatttacatcccaccaacagtgtttaagtgtccccttttctccacagcctcaccaacatctgttgtttttttgacattttagtaatggccattctggccataataaaaaaatagtagatgttggcatggatgcagtgaaaagggaacacttttacactgttggtgggaatgtaaactagtacaaccactatggaaaacagtgtggagatcccttaaggaactaaaactagatctactgtttgatccagcaatcccactactaggtatctacccagaggaaaataagtcattatacaaaaaagatactttcacatgcatgttcatagca

SEQ ID NO: 49640 - DNA, 1936 bp, Homo sapiens
gatgcaaagcataagaatgatacattagactttggggactcgggagaaagggttgtgggtggtgaaggatacaagagtaaacattgggtacagtgtacgctgctcaggttatgggtgcactaaaatctcataaatcaccgctaaagaacttattcatgtaaccaaacactacctattccccaaaaagctattgaaataaaaacattttaaaaaatagcttgtcagtatgaacaagcaaaataataataataataataataatgataatggtcattctcactggtgtgaggtgatgtctctgtggttttgatttgcatttctctgatgattagtgatgtggaacatttttttcctatgtttgttgaccacttgtatgttttcttttgagaagtgtctgttcatgccttttccccgtttttattggagttacttgttttctgcttgctgatttaagttctttgtagattctggatattatacctttgtccgatgcatagtttgtgaatatttttctcccattctgtaggttgtctgtttactccgttgatagtttcttttgctgtgcagaagctctttagtttaattagttctgacttgtcaatttttgcttttgttgcaattggttttggggacttagtcataaattctttcccgaggccaatgtccagaatagtgtttactaggttttcttctaggattcttatgtctagaggttttatctttaaactttggtccatcttggctaaattttgtatggtgaaacataggggtccagtttcattcttctggatatggcttcccagctatcccagcaccatttattgaatagggagtcctttcccattgcttacttctgttgattttgccaaagattagatggttgtagttatgtggctttgtttatgggttctcttttctgttcctttggtctatgtgtttgtttttgtactagtaacatgctgtttatgttactgtagccttgtagtgtagtttcaagttggataattgatgtctctggctttgttctttttgcttagggttattttggctatttctttcttggttccttatgaattttagtgtagttttttccaattctgtgaaaatgacgttagtagtttgataggaatagcattgaatctgtagattgctttgggcagtatgtccattttaatgatattgattcttccaatccttgagcatggaatgtttttccatttgtttgtgtcatctgtgatttcatttattagtgttttatagtactcctcgtagaggtttttcacctccttggttaaatatattcctgggtatttttttgaggctgttgtacatgtaattgcattcttgatttggctctcagcttggatgttgttggtgtgtagaaatgctactgatttttgtacattgattttgtatcctgaagccttaataaaattgtttatcagttctaatagcctttggcagagtccttagggttttctaagtatagaatcatatcatcagcaaagagagatagtttgacttattttactgtttggatgtcttttatttctttctcttgcctgattgctctggttaggatttccagtactatgctgaataggagtgatgagagtaggcatccttgtcttattccagttctcaagaagaatgcttccagtttttgctcattcagttcgatattggctttgggtttgtcataaatggctgttattattttgagatatgttcctttgatgcctagtttcttgagggtttttatcatgaagggctaatacattctgattttatcaaaagcttttcccatatctactgcaatgatcacatggtttttgcttgtaattctgtttatgtggtgaatcacatttattgatatgcatatgttgaaccaccctttcatccttggaatgaaacctagttgatcatggtgttttaa

SEQ ID NO: 49641 - DNA, 2670 bp, Homo sapiens
gcttgaatttaaggtattttgagtattatctgcatttagaagggcctttggagatttatttctaaagtcagttgattgcctattaagtctttgttaatttcgtactttccataacgaaggatatagaataaatcttggtcaagttgatggtttacctcttaaaactgcgtgccaatatctttaataattttatcattttctgtgaacttaaaatacagaataagttcagttagtacatttcaaaattgctcattctgaggaatctaagtaaaaattaatggatgcattaaatttaaaagtatgaaccttaagaaaaggtagaaatggaatcagagagaatagtattagtaatttcatacttattgctaaaattatggtacaaaactattaagaagtggtgaaaaaaatgtgactttcatttcatgaactttaattttgtgaattatagttttaactcagcttatcccagaaggaactgtgatcgctttaaactattcatgtataataaagtagaatttataaaatgagagtatttttattattttattaatttaccataagttatttcagcctaaaagtttgtattttggacactttttgaagtttttttatattctgtttttaattaatgagaatatagtttttttctaaaaacttactcatgattttttctatgtcatttttattcaacattattttataagagaagctattaagccagtaatatcaaatacttaatctttttttattttaatttgtaccattgtcaaaaatgttgccaaaagtttagtaatataattaggagctctgatggaatgaaaatatgtagactttattttgatcatttggatgctatctttcatagacagtaagctattaaaatttggaagtaggatagaatcatttgtatttaatcacaaagttaaagtagctctgcaatgtaaaaataatttttaatatgtgttgttttccactattttgaaaggcctaaggaatatttttcaagttgtatgtatcaagtttgaaactaaagtaaggaaaatctagactttgacccatttagatcttgctaaaattgtttttaggagtgctgaattaatagctttttaatgtcactttattctgtttttaatggttctagaattgttagatgtatgtaggggcttcaaaatttgatgtttcatatttagtactgttacatatatataataaggaggagtagattttcaatttagattacatttgtgtttttataggaacagcattaaaagaataaattataggcatataatatttaggaggcatatattgtttgaatattatttatggtcagaggacagagtttattaatctattcattgcatagttcatgcatagtattcatgtgaacttaaatgttatcctaaaagactatacagtggagaatcaaaaattttaagtgtatttaaaatgtaagcaataggtccaaatactgttgccttatctttatatatgattttcttttaataaggaaaaagagggggaaatacccatttatttcccttacatataattttgaaataaagcatacattgcaaaatctagatatatacaaaattcatggcttgaagttgtcttccattgaccctgcagaaattagagtatttactaagattttatttccatgatgtatgaaaacctgtttttatagtcacttaggtgttctctgtgtttctttttttaatcctagatcttgtatgctaatttgttttagaaacaaccactatttaatttgggaactgtagtttatgtgaactcattttatgagtaatatatgttttatgttcttaatttttctgttattaaatttagtgttaggatttaccttaaaatattgaaagtgatagaatttgaagccgttttaattaaagctatatggttaagtattttgtatctattaattgaaatctgtaaatagatttttatataattgcgattatgtaatataactgatcttgtgtactgtttttccatgaaccttgatgcttttttaaattttaaaaataattttattgttgcagatttatgttgcacaggtacaggtttattacatggatgtaatattgtgtagtggtggggtttgggcttctagtgtacctatcacctgaatagtgaacattgtatccaatagataaattttcaaacctcataatctcctctccccccacctttttgaagtccctaatgtctattattcatgaatcataacacttttaatggcttcataataggttattaagtgaatacagtgggtaggtggttaacattatttcacgttacacttcagcttaacacccactaaatagtggtaatttttcttgttttgttgttttttgtcaatggtattttttgactgaaataattttgtttatattttatagtggatgatgttggagaaaaattagagcatatggggaatacaccattaaaaattggcagtgatggttcacaagaagatgctaaagaagatgggtttggttctgaagttataaaagtgtatatatttaaagcggaggctgaagatgatgttgaaataggtacaaacactaattttaatttattgctccaataggagttataatttattatattttctggggactagtctaaaaatgttctcaaagcatgggt

SEQ ID NO: 49642 - DNA, 9114 bp, Homo sapiens
agaaactataatgagtgtttacaagcatggattctagaggcaggctgcttgggttttaaataggtcctgtcacttagctgagtgacctttgataaattacttaacccccttctgtctgtttcctcatccataaaattctcataataataaaagctacctatagggctgttgtgagggttaaaggggtaaatatgtataaaagacttatatactgcttggcatataagcttgatgtaaggattaacaattgtcatttctcagtgatagctgaaaatttaaagtataatttatatgaaaatgttcttggcactttgaaatttattttggaatttattttttttctaagaaatatttctatatattcttcttattaatttaggtggttattccatgatacttctctattttaatgcgtgttttaatttttaaggtggaacagaaattgtcacagagagtgagtacaccagtggacattcagtagctggagtgcttgaccagagccgaatgcagcgggagaagatggtttacatggcagttaaagattcttctcaagaagaagatgatatcagtaagaaaataagggcactgtagtgacttatcagtagccatcatgcattatttttaaaaaatctcagagatacaagcactgtataggaacaaagttcaataaaataagcctgatcctttgaccctttgctgtaaataatttaaaagtgaagggtccttttgaccattcatttgtacatgtattgttcaaatcaccaaacattaaataatatatcttagtatactatactagaaatacagagatgaacaacatacagctcctgacatcagtgaagctcaaaaatatgtaattactgagtacctactttctgtgcgttactgaatatgttgcaagatactatctcatttaattcttacaactcatatctgaggtaggtggtatttttcctgtcttatggaaggaaaaaaaaagattcagggaaaataatttatccaagatcattccaatattaagtgtgaagggcaggattttaatggttatctaactccactgccaatgttctttccacatggcagtgggcactgttggcttctctctggatttagcaattgaagggctgatggtttgttctcctgtcactaaagggttatcttatgtaagtattcttccaagccaagctgccaggagtttgatttcctatgctgttgatggtctccaagcagttgctgcttaaggttttgtggggctaagtaccacaggacgatcaaacctcctcaggtttcctttcctgccataccgcaggtttccttatgaagacattttgctctctgcctactttctcctcacctcagtataggaatgcagccctttcctaaggctattcctgtcttcttactatgctgagaaaaacacaatattgccttgccctagaaggctaagagcctccatttcactgcattaacttgacaatattgggctttacctgtgctgcactctgatacctactccaagtttccttccctagaagttgtagggtgctgaattccacccccaaacagctgaaaatatcaaaacaaatgagtggagaagattctgatggataggaaaagagtttaatcaaataatttctatttgatctctaaattctttatttttttatttattggtaaggaaaggggcacagtaggaaatggaagattgaggtttaagttaacttatgccagaattctatgggaatgtgggaaacttagaccagtgtctctttttggttaatagagagaagacaaacttgggagaagagggatacttttttcccatgtttttccccacatttcttctgtagtcatccaggatcccagtatgtgaatcaaaggaaaagcaaaaattcaagacaattttctatttaacaagttaaatgtaaacagattattttatataaagtatattgtggctctctaggtttaaatattttttttttcttaccgcaatattgttttgttcaatgaagctcatttaatgctttctctcctcagtagaatctcttaaaatctggcctattgaagagtgtccacatattcttgatcactagcattatatacatatataatttttatttttattttaaatttttttcaattacaagtatttttggtgatttttattacatgtatagtactgcatttcatttataatacagtatacgagatagtatggaccactttctagtattatttctatgagaaatattttctgagtcccaaaagactgtcaggcaaataaatgtataatgcctgatagaatgtaagatcattcagtatatttcaagcgcacatgtttttataaaatttttaaaagccatttccatagaacttggttctaagaggagaataagagttttggtaaatgattgtctcctagtggcactagcctccaaaagtgcctaatataaattgaaattaaatttataaatttttaaattaaccaaactgaaatttgaaagttgaaagatttacattgtttggaatttttacccacttattaaatatttggggttataaacaagcaattatttctaaaatttaggttgcgctgaaatagcagatgaagtttacatggaagtcattgtaggggaagaggaaggaacttctctccctgagattcagcttgaggactctgatgttaataaaacagttgtccctgttgtctgggctgcggcatatggtaggatactggcattttttcacctgataagtacataatatgtatttactcagcctttaggccattaaataagctttgtgaatgccaccatgaattggctaatataataaaatgttttacactgtggactgattcatctctagttactttagatgatttttctaccacataccttgtactatttaaaatgaaccttgcttaatgcattatgtttttcagtatgatctattttaaatcctacctgtataagtgagtgccataaaaaattttatttttctaaaataggaatatcctttgaaaatcgatccttcctcttttggaaaaacttatttcatttattaactctacagatgataaagttttggggttttgaaaaagaaacagaaacccaggtatgctcttttagaaagcatataatgaaaggtaaatttatcaacttatttttccctttcagtcttattttatttcattcctatgtaacgtacaagatggtccaggtatactctttactttgaaaaattttgatgttcaaatgcattaatttatctaaacttggttcttccaaaggttcattcattcagttatttattgagcatcttcaaagttaggggtacactgcagaaatatctacccagttttcatttaaaaagtaaaattgttctagatgttaacaattccaaggatgctgaacagcagcccttattttcagtatgtgacattatctaacctataggagtggaagaacacaacaattttttttaacccaaggaatggtgggcaaagtaagattttgtagattaagatgtgatccactagtagtcattataattagcatatcagtttgtaattggtctttttttttttttttttttttttaggagatgaaagaagagtttcccgaaggtatgaagattgtcaagcatcaggtaagagagcattgtatatgagatgtgagttaaagttctggctttattttattttactgcttggtaagtaacaagtttgtgtctacagacacatttgttggactcttacttgcttagtcatacctaatctagttagttaggagtttcttctttgaggaattaatttatgtgtggacataatgtgtgttaatctgtaaatgcagttccatttagatttccctcaaactttaagcatcaggcagtttatcaaatggaccataacaggttgctatggaaaaaatgaaataagaaattatttggacagaaaagtaaaaattattcatgatatcaaccccttgttaatgttctttttggggcagaactgttttcttaatttctatggcaaccagtgcatttatatataactgttatataaaacccatgtgtcagcttaattttttttagttttaatacactctatatggtgttgttctctagttgatcttcttgttaagttttcttaagcaaggagatattttcttatgataatgtgtcattgttctgtttctacccttgggaagtatttgactctctaaacttaggtgttgatttcgagaaattgatgagaagtatagatcacagcatgtaagttaacctgacagttttgtaggtctacattttttagctaaattgcataaaaccacaatggatttttgataactaggattttattaagtactttttaatgtatgcactgatcacactgaaattgcaataaattgcctaccatatgttaacccgtaaaatcaatcttaatatgtagtactctttatatcaagtacactattctgaagcatatctgcaagagatctgtttcgttttttatgcattacacttagtcaccataactataatggttcagtaatatgtctacatttctttttcaattaatttcatcagccttcattggtaaaaaaaaattggtctgatgccaagattttgtttcaaattcagtttcttttctttcttttttttctttttctttctttctttcttttttctttttttttttcaagagacagggtcttcttgctctgttaccgagactggtgtgcagtagcacaatcatagctcactgcaaccttgaactcctgggctcaagcaatcctcccatctcaggctcctgagtagctgggactacaggtgcatgccaccatgcctgaccaatttgttttttgtagagacaggatcttattatgttgcctagggtggactgaaactcctgacctcaagcagtcctgcctcagcctcccaaagtgctgggattacaggtgtgggccatcatgcccaccccaaatccactttcttatattacattcatcttatcagtttattcctgataaaatagagatattttaaatttaattgatgatcaaattgagatattttaaagttaatttcacatgatatcctattcaaagtatttacaaatacatgtctttacttgtgagtgagagagaacaagagtgagagagagaaagagaatcataagatggatatactttgtgaaatttactaccagagtggtaacttggtgtcatgtcatctgtagtaactcattcaacagaaccaaaaaagtataaatgtatgtgatttaatgatgtttcaatttttttttccaggaaatactttggactcagcattagaaagcagaagtagtacagcagcacagtaccttcaaatttgtgacggcattaatacaaataaagtacttaaacaaaaagccaaaaagaggagaaggggagaaaccaggcagtggcaaacaggtaaatactttgctttatgaatattataattatttgagatgtggaagtattttttgtcaccaaagaaaaatatcgatggtttacttggcagttctactctccatgtacctgtttgtgtatgctatagataattgtttttttttttttttactttgtgtgactggtacttaataaaactatgcttgtttgctctttattccaaagatacttttacagagaattttcaggttggtttaacaataaagggtacctgtttttggtattcaaagtatatatgatattgcattttggcatgtgagtggttcatagtagagtgctgctcattactttttagtgagctactttgccataaattgcttttattatgtattttttatattacaggatttcattcaactagtattgttttcacatagtgaatgccaactagttttggcacctttgttataaaatcctttaaaacagtctgaccaaatgtcacaactttctcttttctttatctagctgttataataggtcctgatggacagcccctcacagtgtacccttgccatatttgcacaaaaaagtttaaatccaggggattcttaaaaagacacatgaagaatcatcctgatcatttaatgagaaaaaaatatcagtgtacagattgtgactttacaactaacaagaaagtgagtttccataaccacttagaaagccataagctcataaacaaagtcgacaaaacccatgaatttacagaatacacacgaagatacagagaggctagtccactgagttccaataaacttattttaagagacaaggagccgaagatgcacaagtgcaaatactgtgactatgaaactgcagaacaaggactgttaaacaggcatttgttggccgttcacagcaagaattttcctcatgtttgtgttgagtgtgggaagggttttcgacatccttctgaactcaagaaacatatgagaacccatactggtgagaagccatatcagtgtcagtattgtattttcaggtgtgcagatcaatcaaatctgaaaactcacattaagtctaaacatggtaacaatttgccatataaatgtgagcattgtccccaagcatttggtgatgagagggagcttcaacgccatctggatttgtttcaaggacataagacacaccagtgtcctcattgtgaccataagagcaccaattcaagtgaccttaagcggcacatcatatctgtccatactaaggattttcctcacaaatgtgaggtctgtgataaaggttttcatcgtccttctgagctcaaaaagcatagtgatatccataagggtaggaagattcatcagtgcaggcactgtgactttaaaacatccgatccatttattcttagtggccatatcctttcagttcatactaaagatcagccattgaaatgtaaaaggtgcaagagaggattcagacaacaaaatgagctaaaaaaacatatgaagacccatactggaaggaagatttaccaatgtgagtattgtgaatacagcactacagatgcatctggctttaaacgacatgtgatatcaatacatacaaaagactatccacacaggtgtgaattctgcaagaagggattccgaagaccatcagaaaaaaatcagcatattatgaggcaccacaaagaggctcttatgtaataagatcaatataaagaaagaagctatttaggagatatgatatgctacttgggagaaaactctcactaactgtctcaccgggtttcaaagcttgatactaaaccatgactttacattctttgtattaaagatcttaaaatatttgaattcacaggggatcccatagccctttgaaaattacttaaagaatttaagaagcactatagaatggttacagaaaaacttcttaagtatctgtgtaatagtattatatgcatacttaaactacagaggggaaaagcaaagacaaatactttatttggctgattatgttagatacaaatgtttctgagaagagaatacataattgagtttagtgatgctttgctatagcaagcaaacccacttttatgcaattttagaaatggggcagggaaacaaaatgtggtcattcatcagtcacttagtcattgagccttttatattgtacctggaaattaaattccagcaatgacaaaagttttgtgtattcattaaaagaaaactaactggaaaacaggttagattaattcagtactattaaaaaagaattcagagctgttaatattttatcacaggataggatacttaaaatatagcattctgtgctgagatctaaggtgaagtctataaagattaaagttcccttttttctgatgttcaagttgattgttgttcagtatggcatatatgacaaaagtatatttgagtcaaatgtggctttctaaaatggatgcaacattagcgttgcaaacaaaatcagcactatatttcttaatgatctaaagattaatttgagagaacacagttttcttaaatattataatgtctagagtttttttaggacagtcttagcaagtatgattgttctagtcttacttgctctaatgtttaaaggtgcaattttatgccattattgaaattgatttttaaaatctatataccatatgattaacatgcattttcaatatgaggcagtgtttatgcagtatttaacagagcaatctgctgccaatagagtttggaggtggatatttagtttacagtgtataaacttaaaatatgcatccctttaacaacgctttgtgttagcatgctgcaaatcaaaatggcacttaatattaaaagctggtttagggaaattttatgaaaatcctgttcataaatgtaatgcatatgatatgtacttttaagttttagttgcttcatgtttacattcagctgttcaacataattaaaatgtaattttacttcatgctatattgtggctttgtgtttcaaataatgttcacctttctgtttttgcaccagataagaatcagttccttgagaataaattttttatctttcttaacttcagaatattaaatttggaatatctactaaaattgtgtgttatgtggctgtaaatgatgtacacgctgtaaaataagatcgctactgttatgtgggattattatttctaaatgttactcattgaaatgagcatacaataaaaagcatttattgcacttaatggttttataagtttatttaaagtttccatattttttattaaaagacttcacttcagagttacttaggcagattggtcctttctttaatgtcttgttgaattttgttcatgaacaacaacatgaactaggaatttaaacagttacgatgactatgtaatgcatatttcttaagaatgtatgttatttgctaaaatcataatgaaatactataaataaaagtgtccattttaagatcttagatttcatattagagagaaaactaaaagttcttaacttgcttaaatgacacaatcctgagcagtgaatacatctaattatgttcccaatatacattcaaaaggaaaagtattgttgtgtgtatttggcaaagatttctgcaaatgagcataaaaataactttctatgttcaaaccagtgagcatttcatataattctata

SEQ ID NO: 49643 - DNA, 1027 bp, Homo sapiens
tgtgtctatgccagattttggtatcaggataatgctggcttcatagaatgagttaaggaggactccttcctcctctatttttggaatagctatggtaggattgatagcaattcttccttgtatgtctggtagtatttacctgtgaatccttctggtcctgggctttttttgttgttgtcttgtaggagttttttaattactaattcaattttagaattcattatttgtcagttcaagttttcactttcttcctggttcaatcttggaagggtatgtgtttttatgaatttatccatttcctctagatcttccaatttgtgttatagaggttttcataatagtctgaggaccttttgtatttctgtgggattggttgtaaagccatcttttttatttctgattatgcttagttgaaacttatctttttctttgttaatctagctagtgttcaattggtcttttttattctttcgaagtaccaacttttggtttcattgatctttggtatgaactttgcatctcaatttcattcagtttttttctaattttagttatttattttcatctgctatctttggatttggtttgttcttgtttttctagttccattaggtgcaatgcaatattagattgttaacttgagatctttctaacttttgttgtaggtgttgagtgatgtaaacttcctcttaacactgctttggatgcatcccaaaatattttgatatgttatttctctattttcattaatttcaaagaaattattttttatttctttcttgattttgttgttcacccaaaagtcatttgggagcaagttgtttaatttccatgtaattgtgcagttttgagatatcttcttggtactgatttctatttttattgcactgtggtctgagcatatgcttggtataattttgattttttaaaatttattgaggcttactttatggtcaagcatatgctcaatattagaatatgttctgtgtgcagtggaagtctgttttgtggttgttgggtggatgat

SEQ ID NO: 49644 - DNA, 1070 bp, Homo sapiens
ggaaaatattcattttcatcgtagtgagtttaaaaggctctttttccatctgtggattctttgatacttcaacaacttttgatgctggtgacttttaactcatcatctatatgaattttatttatttatatatcattttgagacagggtctccctctactgcccaggctagagtgcagtggcgcaatcatggctcactgcagcctcgacctccctggctcaagccatcctcccacctcagcctcctgagtagctgggactacaggcacatgccatcatgctcagctaatttttgtatttttcatagagatgtggtttcgccatgttgcccaggctggtcttgaacccctgggttcaagcgatccacccgtctcagcctcccaaagtgattacaggcctgagccatgcatctggcctgaattttagattctatggtacagtcttctctgacaacttctgcctcttgatttgctgactgctaaagtgccagctttgtttgccttccatctcaaaacttctcactgttatctgttcttctccacatacaattgcaggcaatcatatgcctcttcaaataccacctggatgcagatgcagatgcagatgatgccaaacttttctatctactttgacatctaagtttgatactttgtcatcatttgctgagaggcatctcctgactgtgttgcagttctactaaaaactgcataacacctcaaatacttcatagtggtgtttttaatatttttcctttttacaggaaaaataaaaattaacttgatgctctcaacacacatacatacacatacacagacacacatggacacacacacactgtttatcaggtttaccttttcaagctaaggtttacttgcttcacttatcaccagactgtattattctgttgttagtcactgactgacctttatgatttctggtccagttgaatgaaggttaacttccctatttgaccagtgaaagtcagtgactccttctcattcaactcatcaggtcccactgtatttttacatttagggctactattaggcacctaattgtatcttcttcctt

SEQ ID NO: 49645 - DNA, 1048 bp, Homo sapiens
ccctggtatgttgagtcaaaatattgcctggcctttttctcccccttgctactgatgttgccttgggaatttgagacccagtcacatcagagtactctttgtttatttctttctcagtgaccttcataaatgtgatagtgctgggaacaatcttctgaagcatctctcttacttgccctaccatatgatttttttgccaaaaaggttggggctgataggagcttttactctgctactggtctctcctccatttttgcttagtagtgtggagcacattttcccatgaacattattcctgtatttgatatgtattgtagtatagttcagtttcctaatatgtttagtgcttaaagatataggtcatgagatacaggtacttgttatcaaggaatttacaatattataaggaaaacagctgtatataacctcagtattcggtaagttccatatgaatgattcagatttaggaacaggaaagattaataatttggattaaaatagactaggaactgagtcactgggaacttctcttcctccctccacgtacttactccaagggaagaatgcattcagagttcaaaacagagggttttttttttttttttttttgaggtggagtcttgctctgttgcccaggctggagtgcagtggtgcgatcttggttcactacaacctccacctcccaggtacaagcaattctcctgcctcagcctcttgagtagctgggattacaggcacatgccactacgcccggctaatttttgtatttttagtcgagacagggtttcaccatgttggtcaggctggtcttgaactgacctcatgatccgcccgcctcggccttccaaagtgctgggattacaggcgtgagccactgtgcctggccaaaaccgagttttgaggctgcagtgagctatgatcgtgccactgcattccagcctgggctacatagtgagacctcaactctaaaaaataaaaattaaaagaaaaaagaagtttgtggcataggtatttcttgttttaagaaaatatatcagcaggaaatttg

SEQ ID NO: 49646 - DNA, 1823 bp, Homo sapiens
tgaagattatccctaatcttccatctaaatatgaaaatatttgcattttaagctgcataaccatggtatccttttcttcttttcttttcttttctttctgtgtttttgagacagagtctcactctgtcacccaggctggagtgcagtggcgcaatccctgctcactgcaccctctgcctcctgggttcaagtgattctcttgtgtcagcctcctgagtagctgggactacaggtgtgcgccaccacacctggctaatttttgtatttttagtagagacggggtttcaccatatcggccaggctggtctcgaactcctgacctcaagtgatccgcctgccttggcctcccaacgtgctgggattacaggtgtgagtcaccatgcctggctgcttttcttatttcatttgaactcttttctccaggtatattatatatactgtataaatattattaaattaaatattattatatatagtatataaatttggggtttaatgactgtttctaaactaagatcacatgaactcagaaatggtaaagtagtactttgagatttgtggtagtaaagaatttgactttttttcctcctaagtttactaaatatttcaatacaaaagcccatatttccttaaaagatatgatgtaaaccaactatgcaatttaaagcaaatcatttttcaagtttgctattctcattataagaagagttcaatacattttagaaaatgtgagaatgcagttaaggagaaggaatcaaaacaattgcctataaactttacataaactattgttagtaatttggtatgtttatatttaatcgtttgtcagctgtgtagttaaacttttagaattctttctaccactttttgtagctatacttccctttcagaaatgaattcctattttattataaggtacactgatacagataattttggtagatgatagcttctaatagcaaagtagtattttaataaatcctggcaccctcacttcatttaattatagtctggttactggaaattcagtatctagaagcattttatgccttgaatagttgtggcataattttatctttagtcatgtttgagtatgtcagtagtcataggccatttttatgtgttttgctggatagctttaaaaacctaatgaaaaatgtttatgatttatccctttatcggattaaaattatacacaatttgctatcaagatgtaaaacaacagaatctcagttttctcagattagtaattataatgatacatttttcttatttttgagatgggaataatttggaaaaaatctagaggtgtagagtggatatgtagtactagaaacatatcaacaagtttcaggaaatcttgtaaacctctattttcattattttgggatgggggggttctattgaattaccattgcaaatgaagcaagatcttcatttggaaaatttacttgtattaaacagatgactgggctgaaatggctgctaaaacaatttcatgcttttgtttttaatgtagtccagttataaaatgtcacatcagattgtgtgtgagtacacaaatgcataattttaattttatttctgagttatcacattttaggaagttgattaaaatcacccagaattttttctaagctttttatatataacaaattaactatttgaaatgagttaaaacaagattgatattttggcagtaatacctttattaaagaaattgatcaattcttcagtagttacccattttgtccttttttaaattttattattattatactttaagttttagggtacatgtgcacagtgtgcaggtttgttac

SEQ ID NO: 49647 - DNA, 1031 bp, Homo sapiens
tttttgaaacaccattattatatacacattgaagattatgtcttctttattaaatgatcattacataatcatagattgtacttctttatctttggtcatattcgttgtcctgactctgttgtgtaattatttacctactctagcttttttattattatgatttgtgtgatatatcattttgtatccttttacatttaacccatttttatctttatattaaagtgagtcaggtagacagcatatatttgggtaattttttaatgctttgtgaaaatgtctgccttttaattgatatggttaatgcatttacatttcatgcagtgggccctttgtgtctgcagttttcacatctggagacacaaccaacggagaaatagtggatgcagaacctgtggatatggagggctgaccatgagggacttgagcatgtgtggattttggtatccaagaggggtcctggaacaaagcccccatggatacctagggataactgtataattattaatatgactgtatttatttctaatttcctttttttgttttttatttttttatttttagttttgttttgttttgttttgttttgagacggagtctcactgtatcactcaggctggagtgcagtggcgtgatctcagctcactgtatcctctgtctcccgggttcaagtgattcccctgcctcagcctcccgagtagctgggattacaggtgcatgccactgcacctggctaatttttgtatttttagtagagacggggttgcaccatgttggctggaatggtctcaaactcctgacctcaggtgatccacctgcctgggcctcccaaagtgctgggattacaggcgtgagccaccacgctggcctcttatttgttttctatcctatctgtcctttgttcctttaactctttttttgccacatttggattgtgtgtcattttaactattccacttgatctcatgtattggcatattagatatggctctttgtttagttttcagtggttactatagaatttatattatgca

SEQ ID NO: 49648 - DNA, 1029 bp, Homo sapiens
gtatatatttaatacaaggaatagagacattctagccaaaatagtggtgaagtaaaattcacgtgtaaaatatccctttccttgcatgcttcaaagtaaagtggtgtcactggaaagatatacactggtgttttagatattagtttttaaaaatcatttaattattaggtaagggtgttttattttgtgaaatatggataaaaatctgaaatataagtcatattaggtaatgaccagttcccaaaggaaccttataaagagcttcatggatgaatgagtttacatctaataagatataaactcgctgataagtggctttctctctctctttctctgtctctctgtctgcctccttccctccctcccttcctccctccctctctctctctctctctctctctctctctgtgtgtgtgtgtgtgtgtgtgtgtgtgtgtgtagtactagtagtagtagagagcatagtcaaggaaataactacaagatgagatagtgaaaccttttgtttgatcaaaaaaagcaactctttgagcaattcagctccactggggcaggaactatgttttctttattcctccctctgtgcctagaattggtagatatttaaaagttttgattgtatcattgtaagtaaaagggggacttggattttggttataaaaacgtttatgccactttcaggaacagatatattgtatcataatgcgataattcttaattgaaatggcggcctttttgaactcttgtgggcacatcagaactattttactatatttagattgttcatgtgtggcttttggaacttatttcccatcgtgtaaatacagtgtattcatctgttgatcccctacttattaggcaccatgccgctactcttatagatgtcatcttatttaccagatatcttcagtatgtgtctgaaagcagatattttaatctcagtttttcaaattgggagatcgtgactcagaatttaagaatgctgcccagtaagttgcttggcagtaagctcttgggcttacatttgaa

SEQ ID NO: 49649 - DNA, 1030 bp, Homo sapiens
tgtgattcagacctcttgttcccaatataagcttcctggcttcctttttagtctccagatataatcttggctgctggttcactcaaacattaatcttcctgactggtctattgtttttgtttgggtggttcatttgttccacttggtctcctgacatgtgaccacaaatgtcaacttggatgtgtagcatgttaagacagttctttaacttaggtaacttataacacaaaatcaccaatatgttaataccttaaaaagtgagatcgtggacttacatagcccatccaaaaagaaatagtataagctacattttggccctattctttctgataaactaccttacctaaatgttgactgaaaattttagctgaagtctccagttatctgtccttaacagtattttgtagatttcttatgatgctcaggactttacttatcctatctaaataaatgaactaagctgttaaataatgaaacgtatgtttgtctgtctaggcatagatatgtagatataaaccgttctgtaacaccactaattcttcttaagcaaggtattagagctattagctagatgttatagaaaattgtgtaccggtcctcttttagtaatttctaaggatgtggttgaaataagcatgtgcttaagagtcagatatggatttgaggcctagaactgctacttacttgttgagtgatgtttgggaagtcacttaactactttgcttctcagtttctttacctagaaacaattttcagaatggctaaacttaaaaagactgacaaggatttggggcaattagaactgtgatattttgctgaaggagtgccaaatagccactttggaaagcagtttttaaaccgttaaacatctacttaccataagacccagctgttccactcctagatatttttttaacagaaatgaaagcatgcttacacagataacttacatgtcaatgtttgtatcagctctattcataatcatcaaaacctggggacaactgaaatactcatcaaataattaatagat

SEQ ID NO: 49650 - DNA, 1073 bp, Homo sapiens
aggttagcgttaatttgatagccctgtgtagacacaacttactaaatgcctcctttagaaaatgacaaaactcactatctttacctagatggtttcaggaaatgatccattttatgaatagctctgttcttgagggatgagaatgcatatttattggctgaacttatggtatgaagtcctgcactaaacattttaatttgcatatattatttgatttaattctcacaacaacctagatatgaaggtattgctatagtatctttgttttgcttatgggacgaataagttgaatgagattaaataactggtctaacgtgacacagtttttaagtgtcacagtcggaatttgattccaggtttttggtctctgctaatctctcttttagacaatgcataccatttaatgtaccatggaaaattctctgaatttttttttagttctcatattgttgttcaacaaagagaaggtagtttccacatttaattttatcaagctacttagcatcgaatgtttaactcttcaaatttcttgcttgatgtgaaacaaacacaattaattttttatgtattatgaagtattttttgtattatgtattttatgtattatgaagtatttgtatttttgtttgccagagtttgaaacggcatcagatagatgaattggcttgtctaaagagaatctgtaatgttacaaaattgtaatacctctccaaatgttgaaggatctttgttaatcatgacttctactccaactatattgaaaattttggatcaacttttatggtgtacttttatgtcaaatgtattatttatttatttatttatttatttatttatttattaagatggagtctcactctgttgctcaggctggagtgcgatggacgtgatctcagcttgcggcaacctctgcctcccaaagcaattctccctgcctcagcctcccaagtagctgggattacaggcatgcaccaccaagcctggctaatttttttatttttagtagagatggggttttgccatgttggccaggctagttttgaacttctgacctcaggtcatccgcccacttt

SEQ ID NO: 49651 - DNA, 1027 bp, Homo sapiens
gttgattcatcatgtaagagaaaataatgtaagagaacactaaagtctcagaatttttcatgaaattgaaataagattggtcccatagtcttaaatagtctttcctgtcatgcttgtattacttatcaatttggattcctaggaaatgttatagtttttgctataattagatattttctattaatatcaaaatccagtaccttataagtattgtttactgatttgataatagagtgctttgtttatgattagatcctttatttatttgcttgtgaatttcacagatgattttgttactatacaggtagcttctcaatctcataatagatcgttatggttcattaatttttggtattttatttcaacatgattatttcactaattattgtagaagtgatagtttagttgaggatattactttttgtctgaatgagtccttgcagttgaaaaatggaaataatccatactctcatgcccttggaattagcacctttatcattcatttgtctgatttgtcacattatgccttagaatatgagaatataaattttggaagatagagaggtgtgaaaattagtttcttttttttagattatgtacactggagattgttgtgctgtatttgttgttctttgtaaattgaagttcatatgcacacacaaatctggggtgattagactattctgaagaattttgacatttaaaaaaagttactactattaggcctacctttcttttttctcatttgatatcgcagacctcacatttaaagaatttttcaatgattcaagtgattgccatttattataatcactgtttaacgttaaaaaattgcttgtagcaaagtgttcatgcttatagcaaattattcatatagtaaaataaggtagtttaacaaatgtaaatctcccttcaatctcagacttacagcattttgcccagataaaatcattaattctaatttttcacattttctcctagaaatagtctatgcctctcaacacatatgtgcatttatcattttttg

SEQ ID NO: 49652 - DNA, 1049 bp, Homo sapiens
tttatcttgtttatgcattcaaagaatcaacttttggtttagttaattctttgtgtggatttttgggtatcaatgtcattccgttcttctctggttttattcatttcctatgctagcttttgcattgatttgctcttgtttttctgcttcctctaggtgtgaagctagatctttaatttgagatttttctaactttttcaggtaggcctatagtgctattaacttcccttttaatactgcttttgctgcatcctcaagattttggtatgttgtgtctcttttcatttattccaaaaaaatttttattttctgtaaaggcataaaatttctttttctgtaaacttccccctccatttctttgcatattttctattgagcatttacgcttttgattatggacttatttgaattgaatgctacaagaatcatagattttataaaattttagagttagtctggatcttagaagttattaaacacagactctttgttttaccaatgaagaaactgaagtaagagacaatgaggtaagtgtaaaacccattaaagatagcgtggtatagtaggaaaagccagaggaaataaattcacacatacttgcattccagctgtgatacttgtaacctcggagactgaattttctcatacataaaatgaataggctaatgtttacctggtagtattgtgagaattaaacaaggttatatatttaaagcactcagcacattggtatccctttcatttaacttgatgctctgtgtgtgtgtgtatgtgtgtgtgtgtgggtgtgggtgtatgtgtgtgtgtgtcttagttattgatgcttcagtacaactgttaattcagcaaaatttactgctcttcttttcagcacttggtagagctaatcagtcagaattgaagcaattcttactgcagctgccaaaacctaatcaaaccaaatcaaaaccaaacaaaattcatacaaaacctctcatgtatgtattgctgagaatgctttattttcattcctcttaacgttgattctttgaattttctctttcacgcta

SEQ ID NO: 49653 - DNA, 1052 bp, Homo sapiens
tcattctattttattcttttttcttttgtctcctttgtgtatttttaaatagcctgtttttaagcttactaattgtttcttcagctttatcatttctgctcttaagagactgatgcattcttcagtatgacattgcattttctaacttcagaatttctgctcgattatttgtaattatttatgtctctttgttaaatttttctgctgggattccaaattccttctctgtgttatcttgaatttcattggatttcctcaaaacaggtattttgaattctccatctgaaaggtcacatacatattttcctctccaggtttggtccccgatgccttaattcatttattgaggatatgttttccttaatggtcttgattcttatggatattccttggtgtccgggtgttgattaattaaatatttattgtagtcttggcactcggggcttgtttgtacccatccttcttgggaagacttttcaggtatttgaagggacctgactattgtgatctaagtttttggtcactgcagtcgtatcttcactaggggcatcccaagcccactaatgctgtggcttttgcagacttgtaggggaactgccttggtggtattggataatatctggaagaattctctgtattgtcaggcagagactcttgttcttcttccttactgtctcctaaacagtctctattctgtgtgctgagctacctggagctggggaaggggtgatgtaaatgctcctgtggcgaccaccactgggactgcgctgggtcagacctgaaggcagcagaacactggttctcatacaaggcgtatggtaaacactgccaggctattgcctgtgtttgctcaaggccctagggttctacggttagcatgtgccaaagccagccagggttgtcttcttcccttcagggcagtgagtaccctttggccttgggctgatccaaagatgccatctgggacccagggcctggagttggtaaccttagaaatctgcctagtgcttttttctgagagccgagctgggtcccaagccacaagacaaagt

SEQ ID NO: 49654 - DNA, 1031 bp, Homo sapiens
gtatgaatttacactatagttcccattcaggaaacagtgactaagcacttcctttgtgcggagtactttcccttgttctggggttacaaagaggaaattatatgattattgtcatcaggaatcttatagtataatagatcatcgtgcctataaagaaacagtctaataaaacagttgttataatggaagcatttgctaagtgtcaaagcaatgggaataacagggaaagaaaacctaagtctgcattactggaggtgaagctgtgaactactgatagagagtaggatctattactggactgggaatcagaagaccaatttataatcccagctctgtactttctagccctgacatcaagcaagtcaatttacttctctgaacctttttccttcaatgtaaagtaaggataataatattaggtctatctagttttaggattatattcaggataatgagtaactgtgaaaatggttagcctataaaatgctatgtgcatttgcatataagctgctttcactgttgacagtgtgtggtgttgtccaacctgaccacctttgtttggaagatggcgtggtactatttttcttctggtaggtggaatagtaaaagttcagctgtgaaggttaatttttggggaagaagacctgcattaattctccaggtagatgtctatacacaaatgtaagctttttatttacaatgtaagttatttacattgttagctttttctctgaaaatgtttcaaaactattgatgagcattttatttttagtaaagttatttcattataaaattaatacttagttgtggaaaatctggaaatatcattggcaaatttggaaaaaaaaattgtatacatcaaaaaattattgtcatctggaattctgacatcccaagataattatttttaacttttaaataatattctcaaaattcatctcatcagagagatttatgttccttaaaatgttagtatgttgctgggcatggtggttcacacctgtaattccagtgctttgggaggctgaggt

SEQ ID NO: 49655 - DNA, 1047 bp, Homo sapiens
ctaatggctgtgctttgaaaattttcatattaaatgtagaactataatcctctttctgtgtagattgtgaagctagtactttattttctttctctcaggcttctgatttatgttttcattgagtgaatatcagaccattgctaatgtcataaaataaaatccagaaaatagatgagtcactcattgaaaataaaatctgatcagaaatcctttgactgtgttacattttaagataatgaatgcttggtttttgagttttactatcataccaacttttcccatgtgtgcatgtgtgtatacatgtgtatgcatatcagaaaaactgaaatactatttctgctcaattctattttgtgaagtcaatccaacttttatagtcccataaatatcaaataaatgaaataattattgtcactaaagtggagaaactattgcttcttcttatcttgtttattttgtttgctacttaaattgacattgaggcaaattttaagtgagtttatgttgtgaaaccctgctaaaatttagaactcactgtagtttgttaaaatatgtaaaaatccattttaagtaagtatgaaatccattgaagatacttttattttttaagcaaccttggagtgtagattttaaagaatacttgtctggcaatatccatagcttaaaatatgtagacatgaataccgatagttgaaaattaacttatttaaccatttgaaaatgagatttattttgttttatccagtgaaaaatacaaaaccaagtagacattgttttttggttaaaaaggtcacaaatttatgactgtatatgttactgggattagaagtgttttccctattggtagtttatcaagtgagtgaatacctttctgtgaatgtgaacaagcttcaccaattttagcagttcaattttagagaagctgtgatgagttattttgcacaaaaggctttatctttcaaactgctttgctatctttgcttgacagagagaggatttgatgactttttcaaaactcccctttactgcttcacctgagtaatgttt

SEQ ID NO: 49656 - DNA, 1045 bp, Homo sapiens
ctaattaccattgagaaattaaacatttgaagaataacatctatgcggttaggttaaattaactgcagttgtttatttggagaacaggacgggaatgagaagggaactttcactctgtgagaggttgttacgtacagcatagtgaccagttattttcagttcccactgaggacaaagcaagaagaaataggcttacatctcatcagaagggaaaattacctacagaaggggtccttcacagaaagattgaatgtgactgacgtaggtcattaaaatgttgtctgaggctctctggctgtgtgctggtttctgtgtactcaaacagcccaatttcaaagacatggcaagactgaaggttttgaagcttgaatgaggatatttggaataaagaaatttcttatgtgtcaattagttattgagaaattttgctatatacctaactaaattttggagatgtacttgaacatataaaatatatgtagtatctttcataatataacgtttgtgtgtactaggaaaaagaaatgatcaaaatcagctgtagaaacacgtgtcctattaaaggtattttgtattcatgtaccattttagaaagttattaaagattaggtagatagaattcaattaaattcagttattaatctttatgtgtaacatttattggtcagatgattaaattaaaattgctgtatatggtttattaactgatgattgcacctgatcagttaatacagtgactcactcttgtcttattttcattatcatccagtgataactgcgcttattaaaataatataaaacttattttagctttttcaaatatttcccatttctagaactgctgtttgtgttattgtttgaagatatataaaagaagattgtagagtgaccattttgttcatccttttgcatcttataaaaataagtcatatatgtctctccctacctgtcatggctggagagaggaaaaacacatacagggatgcaaaaaggcactttgcttctggctagagcaaaccttgaaatgcatacaatataaccacca

SEQ ID NO: 49657 - DNA, 1039 bp, Homo sapiens
ggaaaaacacatcatttttacattaaaacagatatgtattatggagtagaattcaaaatccacattaattttaaaaataaaacagatgacttcaaagaaatttcccacttgtagcagatccctacaggattattttcagtcttctcttccattaggggtactttggtgggaaaagtttatgaagcattgcctgaagaattagagagcagttttgttttgggttaagtttacgtatttatttatttagtttgttattcagttagttagtgactattgcagggaaaagggaggaaagtaggcaaggtgagggaagagagagtatatcacttccttttaaacattgtcataggccgtatgaagttcagaagcaaattgtataatgtaactttattaccagtaaagttaataaaataacattgctcttgtcattttattcttggttaaattataaatctgtgggtcatttcattcaagattggcataccaattagtctttagagaaagaaaatggttgttacagagactttgatgcctttaaaacattgaattttttttttcttttggtgaaccacaattatttttttccccaatgattaattttaaagtttatatatatgtatgtatatgtacatatgtaaacttatatctaatagatatatattgtataaaacattgctggtttactagacatatttgatgtctttttttccccctgtggctatcactttaattttcagctttaaggattttttactgtttgatttaaaaccactcctgttttataggttgactccaggttttaaaccaaatggttagtaaagtttaattaaagctattttattcaaaagggggaaattatattaatgtatttgaaggtattatttatcctgaggtttgcataaatccaaaatgggtttcacttcagttaaattggtgccatcctacaagataaaagctagttaagtttcttctgaacagtgctaacttttttatgaattaaataaattattataattttaacaatcaactataccttttg

SEQ ID NO: 49658 - DNA, 1043 bp, Homo sapiens
aattaagttatttgctcaccatcagccatgtcattattgaagatgaaagctaaggagataaatcctccactcagttttctgtcatttatccaataggtcttcatatgcccctttagccatgagactgcaaggtggtgtgggaacctccgtactttatattaaagtctgttagagaaataatgggagtttggctacttgtttgtgccattaagacactgctaccctctgctgcctaagttaattacattccagtagtgggaaaaaaatgcatttgcctatatagacaccaatggaaataaacatatcgttcatacacttacagagaatgtacgtgtactgttgagagtgaggaaaaattgtagtttatagctgacatactttaaaatgctttgtttctaaagatgcaagtgcgaaattgatccaatatgttcagcagtcaaatattgagatcaaaattgctctatttcctttattcgtgtgtccgttaacaaccctttctgataatgtcagagacttattcaccggcctcaactgccgaaagaattttaaactaacagccgatgtatcagtctaaggactggtagatttacttgagaaatgttatgtatggtgtttcttagctataaaaaactatgtatcctgttatgtaaatacagatactattgaggcctttgaggcctcaattaatgaatcttctgtgggaaacatcttttaaaatgatggtgactgttgaagatatttcttatacaaaggagtgtcatatggattatacgtaaaattgttaactcatactacacattttcttcgtttttattcttcattatttttgagacagtgtctctgtctgttgcccaggctggagtacagtggtgtgatcacagctcactgtagcctcaacctcctggactcaagggatcctcccacctcaacctcctgagtagctaggaccagagatgtgcaccaccatgcctggctaatttttttttttttttgtagaaactgggtctccctatgttgcccaggctggtctcgagttcctgggc

SEQ ID NO: 49659 - DNA, 1033 bp, Homo sapiens
ggcccccagagtagcttcagggggcagggccattggtggtggtgaggttgtggggagggtttgtggtatgtagggataaccttcctggcccctttctgtaagctgtcaccagatctggaatgttcaaatcttgctgtatcactgctctttttcatacagacctatcattaccattcaggaagaatttctgcaatctatatacgttctcatttaatgggatatttacaaattctgagccttccttatctctgaaccaaattcagcattaccaatactgccaggtatcctggaacaacatctcgttttccatttccttgcaatccgtttatcattttccttcttctccacatgccaatacactctctaatttctttgtatctgggtggttatgatactgccctgtttttggagggccacagtaacaaattcatttcctcgtgagtatttgttcttacttatccaaattagccttatggaagcacttgtaacagataaacatttgctttggaactttgtgctcttaccttaaaggaactagctttaagctttgaatctgaagtaggaatagagataagaaaaaaagactttccacactaaagagacagttaacaaaggctgagaagtgggaaactctgaaaggtaaggggcaccgaattgttacatttaattggattattggatagataatgaattgtgaatggggcagtttaagataagacagaaatgtctattgagaccagacccctctgggtcttgagtacctaaggaagaagctcttattatatgtataaataaggtttttgagtagaaccccactgaaaggctgcttgctgacttgaataaaaagccactgttgaatcaccaggatgatcttgccagttacaaaacccttgccttgtgaaactaaaagtttattcctataaagtagaaatagtcatagctgactctgtatgggaaaaaatgaaatgagcatttatgcaaaagcttgaagcatgcacctgcctttcaggtttaatccttgtgtctcatttgg

SEQ ID NO: 49660 - DNA, 1265 bp, Homo sapiens
aattggacacttctgagctagtcagctttagtttaccgaagtctaaattcaggcagcttttggctgggcgcggtggctcacacctgtaatcccagcacttcgggaggctgaggtgggcggatcacgaggtcaggagatcgagaccatcctgtctaacatggtgaaatcctgtctctactaaaaatataagaaaaaaaaatttagccgggcgtggtggcgggtgcctgtagtcccagctactggggaggttgaggtaggagaatggcgtgaacccgggaggcagagtttgcagtgatccgagatcgcgccactgcactccagcctgggagacagagtgagactccgtctcaaaataaaataaaataataaattcaggcagcttttttgttgctgtatactagtggtcacaagtgaacactggataatatgcacaattcattgtagatccatccacattgctggcaaaaataatcaagctttcctgttacactgattgatactgggtctgtgtggtcatcttcttataagaaatatggtcatcttcatagaaaaataactttatatcttttatataacatggtttgaaaaatgtgatttcaactttgtcatcgtgctgcttctttcaacttttattgtctaagctcattttcttcattttattatattctttcatgacttcctctcactctaaatcagttaagattcagctagaatatatgttggtacatacaatttggaaagattgtctttatgttctgtgatcaaatgtgaaaaatagaaccatggagtcaaaacagagtaaggctttactgtttttttttgagacagagtctccctctctcgccccggctggagtgcagtggtgtgatctcggctcactgcaacatccacctcccgggttcaagcgatttttctgtctcagcttcccaagtagctgggattacaggagtccaccaccatgcccggctaattttttgtatttttagtagagacaggttttcaccatgttggctaggctggtatcgaactcctgacctcaagtgatccacccgcctcggcttcccaaagtgctaggattacaggcatgagccaccgtgcccggcctggctttactgttttgtaaaactgctttcaggaagtaattaaggtagatacacacaagcccaagttgaacaacattatatctcacttactttgaatggcctagtcaggaatattgtatatatccataaacgtgaaagtaaaacatttgacgatgtattttc

SEQ ID NO: 49661 - DNA, 1023 bp, Homo sapiens
tttagtttttcatcttaatgttattttattttattttattttattttattttattttattttattttattttgagatggagtctcactctgtcgcccaggctggagtgcagtggtgtgatctcggctcactgcaagctccgcgtcccgggttcacaccattctcctgcctcagcctcccgagtagctgggactacaggcgcccgccaccgcgcccagctaattttttgtatgtttagtagagacggggtttcactgtgttcgccaggatggtctcgatctcctgacctcgtgattcacctgccttggcctcccaaagtgctgggattacaggcgtgagccaccacgcccggcctaatgttattttaggtattttaggtgtggtgcctagttttcaactcttgttaaatatttcttaatgcataattctaagaggtttcatttaaacttgatctactttatttaatctaaggcatttgcagtattgtttctgttctttaatttagtaaaaggaaagttaattattgtattctttggagtaggaagtctttgtgaatttaaatatttgtcgtatagaagtctaacaaaaaatattctttttaaaatatggtcaaatacaaattgaaagcaactatatctgtagaaaatttttcataaaaatcattgactgaaggaacaaaagcatgtcattgtatataccaacccttctttatgcattatccactaaaatgacatttcaaaagattcacagtgggtagcatatggaatactccataaacactgattagatttaataatgtttgtatcactgtttgggaacatgtacaaggaatgcgaccgccatatattattaacatcaaaataactcagaagaaaagctcctaattaaagcagggttggtttagagacttagcaaaattgcagccagaaataaccacctacccacctgcccgggacttggggcttgctttcatgcatgcaaaacagacttgattcttagagcttcaagatagctgctatgaaaa

SEQ ID NO: 49662 - DNA, 1042 bp, Homo sapiens
atctcaggttgaattttaagtccatactgttagtatattactaaggaatataatctagaaattcatatatagtcacacaaaaacatgagtgataaaagctttaagagaattctatatagtgcataaataccccagtaattctgatcactgcttccctagatgagattccctagataaaaatgctttgtgggctgggtgcagtggctcactcctgtaatcccagcactgagaggcctgggtgggcaaatcacttgaggtcaggaaggagttcgagactaacctaaccaacatgatgaaaccccatctctactaaaaataaagaaattagctgggcatggtgctggccacctgtaatcccggctacatgggaggctgagacaagagaatcacttgaacctgtgaggcagaggttgcagcgagccgagatcacgccactgccctccagcatgggagatagagtgagattctatctcaaaagaaaaaaaaaggaaataaaaatgcgttgtgggacttatgataaatgttttataaattaactttccagattcatgactgagaccaaactgatttcaaattaataacattttcaaaacattagcattttaccttgcagtgttttaaaatgctgcacacattttagtttataaaccccacaaagaacacttctgttagggagaagatgatgtgattttagcttacagttatcttaaataacttcatgcttgaaaaatcagaaatatttgtctttgtagaacaaggaatttgaaaggggactagtaaaaggaaaattgcattgaatttcttattttcctctcatacttgccaagtttatatgtattagatatgtcccacttcactgccataaggttatatttattttaggttataaattactctgaattaccttcatcttggaaggtccattgttttcccagagttcttctctttaaatatttcaaggacttccaaagttgcttaaacagatgggaagaggtcactctacattttgatcctggaatagtctaatcatcctccccagagt

SEQ ID NO: 49663 - DNA, 1046 bp, Homo sapiens
gtctgacttgcctggtgttaatttaggccagtggttctcacccaagagcgattttgcctcccaagggacatttggcaagatctagagacatttttgtttatcacaactaagtaggatctgcaactggcatcaagtggctgaaaccaggaacactgttaaccatcctacaatggacaggagagcctcccacaataaataaatattcagcccaaaatgtcagtaatgttgagattgagaaaccctgtttcaggattacctgcaaaagattttttaaaaaaaattataaaaaatcagtggaaaacaatgtgcaatagtccaaattaataagcaaaatctactagataagttaatattatatctatcatattgatgtaatattttaataatttcaaatgttaatttgatcactgtattgttacagttactacttttttctatagctttgaaacatcccagtttatatggcttgtaaaattttttaattaccaatcatgcatgtaaattgtagaaaaattagaaaatataaataccaaaaagaaaaaaaactgtcgactgcaattccactatccagagttaattaatattaatacctcggtacatatccttccaggcattttcctatgcatgtacataagtatttagattgtgaatttgtttttcttaaaataataataaaaagacttctgaaaatttaagttttaaatttatattttcttgtaaaaaggctagtggatcatgcttatatggatatgtccatccacattcagtgtatagtgccgttggttatgtcttcagttgtgattaaacatgttaattggctcacttcatgatgcccttttacaaacacctggtctttggcaccatgctaacaatcatgactactgtaagccatctgtaaagagatcggtagaatcttgatttctctttttgttttctacataataccctcattaaacttccctgtgtcaaggggccttaaatcagtaattggtgactgtccagttaggctattcacactagtgtttcttaagcactttgctgttgtt

SEQ ID NO: 49664 - DNA, 1064 bp, Homo sapiens
gcctgtaatcccaactggcaagaggaatacttgagccctggaatttgagaccagcctgggcaacatagtgagaccctctctttaaaaaaaaaaaaaaagaaaaaaaaaagtagtacctggaagaccaagagtagagagaatttcagaatggagaattagtcaacatggtcacatcctatagaaaagctaggcagaatgacaactgataattgaccaatgggtttttcaactagcagattacacctgaccttttcccatgtactttcaatgtaattttgagggccaagaggcagcttcttgttttttttttttgtttgtttgttttttttttttttttttttttttgagacagggtctgactctgtcacccaggctgtagtgcagtggtgcgatcaccactccctgcagcctcaaactcccaagctcagatgatcctcccacctcagccttctgtgtaactgggatgacaggtgcatgccaccacgcccagctatttttacttatttatttattttttttgtagagatggggttttgtcatgctgcccgggctggtcttgaacttttgggcccaagccatctgcccgcctcagcctatcaaattgctgggattacaggcataagccaccacgccacaccaagagccaggatataatgcattaaataatgaagaatatattttataccttgaatgctgagatttgagggaaagaaaagtagttagaagacaatgaaaagataaattgtgtctcttttagagattctgacaggaaacgctagacacaccaaagatcttgaatggaattgtcaatcactaataattatgccaaattttactttcaaatatgtgatgccccctgcttaattcagttgcatttgttgagcatatactgtgtgatttagctaaactaccttagcatgcctagtgatttgtagttgtgtgatatgtaattcatagcctccaatgtagagttttactctcataagttaaaatgaagaacatttatggctcatacaaagagggactggattgagggtagaggagagatattcttgagttaacag

SEQ ID NO: 49665 - DNA, 1025 bp, Homo sapiens
tagccaggggtggggtgcggtggttcacacctgtaatcccagcactttgggaggccgaggcagggggatcacaaggtcaggagttcgagaccagcctggccaacatagtgaaaccacatctctactaaaaatacaaaaattagctgggcgtggtggcacgcgcctgtaatcccagctacttgggctgaggcaggagaatcgcttgaacccaggaggcagaggttgcagtgagccgagatcgtgccattgcactccagcctgagcgacagggcgagactccgtctcaaaaaaaaaaaaagaaaagaaaagaaaattagccaggtgtggtggtacacacctgtagtccgagctactcaggaggctgtggtgggagaatcacttgagtccaggaggttgaggctgcagtgagctgtgatcgtgccactgcactccagcccaggtgacagagccagactctgtctcaaaataaaagaggggcggggggtgggtggggccaccttaagaaaatctttgtcaacttcagaattaactggtttgcaaagggtgaaagtcaggagcaggtgggtggtagtacatatgtaattctcttgatgggagggaagcaggtggtcgaataggggcaaatcagatatccttatgctagccacttagttttctcagcagcatgagtccaggagtctcggagaaatgataaacatccaggtgatagttaataacatgagggtgggtcagataatctctggagaatgagtagagcagtgatcctaagacagaaccctggagaaaagaaacatttatggcagtgattctcagctctggccacacactggtattactttgaggtacttctaggaaatacccacgtccagttcctctctgaagcaatcaaattgaaatctataggattggagcacagatgatagcatgttcaaaaattatttagccaattttaatgtgcttccaaagttgagaaccaccaatttatgggactagctcggaatttggagcctatgaaagacagcatg

SEQ ID NO: 49666 - DNA, 1033 bp, Homo sapiens
atttagtttaattggagctttgtgttgttagaacccaacacattaatattaacatttgagacaaatttcctatcatctgagtctttcattctaagtgaaatgtccatattttctcattaatttgggtctatttaaagatcagtcacatcacagtaacataaagattggaaaagtaatgttcacattttagttaaagtcatgaaatatatacctataattgactatggtgttttgatttggttataaagtatagctgtaccttccacacggagttaagagaagtcctggcttaacacattagtggtagaaagtgtaagtttacacttaagccactccccagccaaggatttgcataaaaaatgagtgaagttcagcttgggtttatgttagcaaaatggcaaatgtagaggcacgctaaaggtcctttctgccacccttgtatacaatacatgtctgcatcttgcctaatcttaattaaatgtctttattaaatctttattaaattaataaaatgtcttctgggtctgaggactgaaattctgaaatgtaaccaatatttaagagcttaaacagtgcttctgtatagaacttgtagtatgaaatatgacttcaaaaaagcctgagctgtagaattaattttttcaattgaatgagtaatactgctttaaaaaatatacatggccgggcgccgtggctcatgcctgtaatcccagcactttgggaggccgaggtagggagttcgagaccaacctgaccaacatgcagaaaccctgtctctacttaaaaaaatacaaaattagccaggtgtggtggcacatgcctgtaatcccagctactcaggaggctgaggcaggagaatcgcttgaagccgggaggtggaggttgtggtgagccgagattgcgccattgcactccagcctgggcaacaagagcaaaactctgtctcaaaaaaaaaaaaaaaaaaaaaaaaatatatatatatatatacacacacacacacacacacacacacacacacacacacacatacaca

SEQ ID NO: 49667 - DNA, 1027 bp, Homo sapiens
ttccttaacaatgaatgaactctctgttctcctttctatatcagggtatctgcttatttatggtttctactgccatgtggcttttaacatcctctctctcttagcttctgcttctgcctaacatacatatccgtttctgcatgtgtctcattaagttaccccaagaaaaatttggtttgtttggttcagagcagagattttctgctggaaaaatctctcatggcaatctatagatagttttctttggtacgtactcattatctaatctcttatgattggggtcatacgaaaccaaacattgtgacctatatgtaaagtacctctttagcaggagactctaaggtatctcagaagagagtagtacaacagagatattatttacagaatattctgtatattgagcccttacatcaggagacttgaggtactagatgtttacttttactatatatcattgaatcaaagatagtatcaatcataagatattacattaatttatttaccattgagaaaggaaaagatgctgccaatgaaatcacagcacaccaatgattgttagatgcatctcagtctcagagatgttaaaatgtgaaaaaagtacatttttaaaagatgtaatgtggtgtcagtagcatatctgagattgtctgaggatcaaagcaggtatagtgaacccccagagaagttccctgaggactgactcctagagtggggtaaatgctaaaggttacaggttggattactaatctgacagaccagagggtagtgtctagagactagatagccagctatctgtctgcaagtggagaggaggccagtcactggtccagagtgtggtttgcctcagggacttggcagatatcagaaggtagatccaaggagaaggtgaattattcctgtattgatttaaatgacatgaatatattgggaatttctgtttctcttaattcctcatttgtgttctgggatcaattcagttgtgtctcttatcttctagaatatctccttgtttattacttgtacatta

SEQ ID NO: 49668 - DNA, 1031 bp, Homo sapiens
tattttagagtaccatttgaaagggacatgacaaagtagttcagaatactttttaaacatctttcactacattcatcgtcattctcccttaaatgttgtatgtgtggaaatacataggaacctgttttaaaaattatattaaataacattgatattttttgtagtcactgatgagacttgcagatctttaggtaaataccagtgccaaagtatttatttgcaccaaagttaaggaaaatctaacacgtgtcagatcagtctgagaactaacatttgagagtacctacacattttgtatttagtttcagtggtatatttcctttgttaagaggtctgaagaaatacaatggaattgggattggagaacactattttgagtcttatatttgatgatataagtttactttctcactaaagatctatgttataaactcagaattttaatgttacctattttcttccttagtggggaacattccttatgaagctactgaagagcagttgaaggacatcttttctgaggttggacctgttgttagtttcaggtgagatccccttttccttcatggtgggagcttcttaaaaatcaccacagatttggctcttagtaataatggcaggttttctttactggtgacttttcacatacattttgttcttgtaacagctttattgagatataattgatacactatacaattgacatttattcttacctaaaatatgtttttttcgttaaaaatgttttttaggcagggcatagtgactcaagcctgtaatcccagcactttgggaggccgaggcaggcggatcacctggggtcaggagttcgagaccagcctgaccaatgtggtgaaaccttgtctctactaaaaatacaaaaattagccgccgtggtggcccatgcctgtagtcccagctactcaggaggctgagacaggagaattgcttgaacccgggaggcagagatagcagtgagccaagatcatgccactgcactccagcctgggcaacagagcaagactccatct

SEQ ID NO: 49669 - DNA, 1024 bp, Homo sapiens
tggaccagcatacattttctctagactctgttggctttcatttgtatttccagtgagcactagtttccagggtgttctcagttttcactgtgcttatttggctgaattttgattaattcagtggtatccagttgtgctgtgtaatatttgttgatgatgctggaggtgttgtaagcaagtatgtcgaacttgctagttgatctctggctaaaccctgccttctgctattgctaacagtagaaaatgatcttcagagtcattgatttgctttttttactcatatctgtatagagatcataatttgtcacattattactgaattcaggttacctatacattaaaaatgccaaaaatctctcttttctctttgtacacataggtcccagtcatgcagggaacaggaatgcaaggagcaagtatacagggtggaagccagcctggcggctttagtcccgggcagaaccaagtcactccacaggatcatgagaaggtaagcaacactgtctgactgcctccttatgcacaattctagcctttttgattcctcttttcacagttaccatgtgacgatcctgggtcttcaaagtccctttggaggtgatgtttattctaacttagaactcttttatgatcttgttacctgaaaatttgtgagtctggtcctgaagttcctaatggatgtgaagttcttaagtggatgtaaatggcagcttattttatatttcacactcatctgccaatagcaggtttttcttgttcaggccagattgacctgaaaatccacaccctttttccttccctttctactttatccctaaaaacaatagtagattccccatgattatatctttctgtttttatatttgaccattgtggggagcttatgtctgatggaaaggctaaaatttgtgaaaaagagagactttcaaaacaggattaaaacttgaaggatttccagggctcacagataccatcttagtctccaggaactttgagttcatgaagttgtctgttttgaatcgtc

SEQ ID NO: 49670 - DNA, 1337 bp, Homo sapiens
actgcagccttcacctcctgggttcaagtgattctcctgcctcagcctcccgagtagctgggattacaggtgtgtgccaccatgcccaactagtttttgtattttttagcagagacggggtttcctcatattggccaggctggtctcaaactcctgtacgcctgacctcaagtcaggcccacctcggcctcccagagtgctgggattacaggtgtgagccaccacgcccggccgagatggattagttttggacccacttatatgacatagccattctaagagagaacttgcatatgttgcctgtactcttactggttttttccactagaaagctagttcagctgatgaatgttaccttgtcaggttgtttctatttctatttagggcaaggactttctgagaaagtcaacctctagactttgtttcctggattgttgtcaacttatttattgtatgcctgttgtatgctagctattgtatactaaatactggaaacacaccctgtctctgtggagaaaaaaggactgtttggctgattaatgataacttaacacttgtttctgtgtagaacatatgcagtaatgtcacctcaaaagagagttaagaacgtccaggcacaaaacaggacttcacaaggtagtagtagttttcagaccacgctttcagcctggaaagtaaaacaggatccaagcaactcgaagaacatctcaaaacatggacaaaacaatccagtgggagattatgaacatgctgatgatcaagctgaagaagatgctttgcaaatggcagtgggatattttgagaaaggtaaaggtggattgttttccttatgaaactcctatttctgtaaaaatattctagtctttttttcttaagaatttttaaaggaaagcataattttgctcattcatgcttttgtttatttaatagacattgagcaattactatatatcagtatgctaggcactagggacacaacaacaaaacttactagcagagtggttcccaaacggctgcatattgggatcacttgagaacctttttttctttttttttttcctccctctctacccctttggctctgagaatctttaacaaacaaactgatgtcaggcatctactcttagactttctgattttattggtatgggatgcaacctggcatagggattttttttaaaggcttcctaggtggttccaatgtatggtaaagtttgggaaccactgtcctaatattgaaacaggttgtagtctaagttcagtgcttttagtttagaataggaatgtcagggcataatccagctttcctcactgaagttgctatcgctgttaaatat

SEQ ID NO: 49671 - DNA, 1050 bp, Homo sapiens
agagatagggtttctccatgttggtcgggctggtcttgaactcccaacttcaggtgatctgcccaccatggcctcccaaagtgctgggattacaggcatgagctgccgcgcccagcctaatgtgagatttttagatccaagagtgaataatagtaaaagaacaatcgagacactaaaatgtagtttaatttagcttgtctcctttccaggaaatgctgtaaacacacggatattgaagtgcatgatcccagcaacagtaatatcagaagattctgtggttaaggcagtctcctggctttgtgttggcaagtgttctggtagcaccaaggtaatctttttaaacactttgatgataagtccttcagaaccacttaagggctggcaaggaagagccacttatgaagtaatggcattggccttttgtgcaaagcctgtagttttggaacaatatatcttgatgcaaggactatgttcaaacagaaatttttactgagaaataaaatctattattctactttgtgcctgaagcttctaaaatagccctggtggcgggggacggggggcggaattaaactcttctgtaccagttatatttctttaaagataagtattttgtctcttcaataggtacttttttatcgttggctggttgcaatgtttgacttcattgatcgtaaggagcaaattaacttgctctatggcttcttttttgcttcattgcaagatgatgcactggtaagtaaaaattggacagcattaggcatcaatcaaatagtacatgtgtgtatattgatgcaccatatatgcttcagtgtgctacacaatatgtttttccttattttaaaaatatatcaaacatatagaaatgtaccaagataacgtagacatatcaaatatacagaaaagggcaaataataacattctattttgcacctgtctctcagattaacaaatagaaaatttttatcgtatttactttatgtcttcttttaaggaaataaaaatgttacagataaagttgattccacgttggagtcttgtttgctgatc

SEQ ID NO: 49672 - DNA, 1049 bp, Homo sapiens
atcctcccagatgactatgttaatattctcaaaacagaattctcctgtttcctgtcttatgtggttgcacggttgtacatatagaatcaagtgtgtgtgtgtgtgtgtgtgtgtgtgtgtgtgtgtgtgtgtgtgtatttataatattatagggaattggctcatttgatttttttatggtggctggtaagtccaaaatctaccggatgggccagcaggctggagacccaggagggccaatgttccagtttgagttaagtggcagtctactatagaaccaggaagaactgctgttgcaaataaagtctgaaggcagtctgttggacattttcttcttcttctgggacctcttctattcaggctgtcaactgattggatgagacctatccacattgcggagggcagtcaatttgctttattcaaagtctactgatttaaatgttaaacatatctaaaaaaccctcacagaaacacccaaaataatgtttctccaaatatctgggcagcctgtggaccagccaaatcaacacttaaaattaaccatctgatatggtttggctgtgtctccacccaaatctcatcttgaattataattcccataatccccacatgtcgtgggagggacccaatgggaggtagttgaatcatgggggcggtttcccccatgctattcttgtgatagtgagtgagttctcacgagatctgatggttttataaggggcttccccttcgcccagctctaattcttttccttcctgccatcgtgtgaagaaggatgtgtttgcttccccttccgccatgtttgtaagtttcctgaggccaccctagccacgtggaactgtgagtcagttaaacctctttcctttataaatgacccagtcttgggcagttctttatagcagtgttagagtgggctaatacatcatcacagggtgtaaacctggctactggcactctgagacctgagcactagaaaggggtgagaaatggtcttggtatcctcccttggctgtgcctggtatccgagtccagcttcattttcagagtaa

SEQ ID NO: 49673 - DNA, 1018 bp, Homo sapiens
cattcttcttttatttatttattggagatggagtctcactccatcacctaggctggagtacagtgatgcgatctcagctcactgctacctctgcctcccaggttcaagccattctcctgcctcagcttcccgagtagctgggactacaggtgtgcaccatcacagccggcctaatttttgtatttttagtagagatggggtttcaccatgttggccaggctggtctcaaacttctgacctcaagtgatacacccacttcggccttccaaagtgctgggattacaggcatgagctaccgtgcccagccacctttttcattcttttactgtcttttaaatggggctttgggagaacccagaattaatcatatgttcgatatgccatttttaactggaaatctcccccttaccttttttagtattaactttttaacaaaaaagatagttttaattaactagactataagttctaaaggcctcagcacaactaagtattctctaaaaagcattctagctcaaaacaaacactctgatactcattaataatgggtgtacagaggttaggagatattttcaacatagataaactgggtcattttggttttgttttaataaatttaatttcaagaagctgttataaaatggaaatattgtatttctaagcctcatttgctgcctttgtgcagtattcgattcaataaaattttagtataataaaacaatttggttacttccttagaattcattttagtggtgtgttttctctggatagccagatgtataaaacaggtatctagcagtaatcacatctttcgttgtgaaattagtgcttttgttaagacttgtttcagttatatcaaagctgcttgattatggcataccaattgtaatttcctagataattttccaagaattataataatcaggtattagcttctcttctggtcctgtctccttgaggtctaaatcaaggatgagtaaactttgagtcctgagtatgctaccagtgagaataagct

SEQ ID NO: 49674 - DNA, 1041 bp, Homo sapiens
aaaaatatattgctcagtctggcctcaaactcctaggctcaagtgatcctcctgcctcagcctcccaaagtgttgggattataggcatgagccaccatgcccagcctatttttgttatatattttctatatgacgattcccttatccacttttcagatacttaactgttgatcggttgttctgtcattgcagctgccttctcagatgggctcagtgctaaacaactctctgctgcttcactacattaactgtgtcagagatgagccagtcttgctgaggttttattactggttgagtcaaacattacaagaaggtaagaattgagtgaggatggaccaagatagttaacaaatgggtttcttttataagggtgccaaattctagacagcaggagccttcatatgctgtaattatgtctgtggtaatcttatatttagagcatgaatgtttctgttgtaattttaaggcagtaagaaggtagagggattttgttaaggaaacactgctagatggccaccaaaactcactgggtggctccactttgatgactatcacaatccaaggattcttcatctttgtatgttcagaaacttgctgttagggccccagaatcatcctgttaatggtaacgaaactcagaagagacaaatgtacaagccagaatgtcagcttattataaaattaattatttctggtaagcgaaatgctcatatctgccaactagagtatcccctctgctatcagcatatatgggagccaaatttgtcattagaagatttcttaattatagaattaaaggaaagggcagtgagaagtctttcatccaagccatagtaaagcctgagcatttcattcctccaatggtgggggtcggtggggaggggcgggtatatttctctagagataatatttcttttgaccaaatttgagtgtttctttactggatactggataagcaactcctgattcttctggtggttaaagttgcttttagttggttccaggccaattcttcttcttcttctctgaatcttttaaaca

SEQ ID NO: 49675 - DNA, 1060 bp, Homo sapiens
cccaaagtgctgggattacaggcgtgagccaccgcacccagcccatcattgtatgtttttgtatgtgattgaggcttgggaaatcaaggcaaggcctgagaaaagaaagactagaattgctttttttttcaaagtcacagaagataagataaatttttatgaccatcaaaaaggtggcaaattgtaattgtagaccacaaggtaaaaagggagagaaattcatatctgtagcaacttcaaaagttctctgaggggggatgataaagatgctgtttttatttgatgatgtaatagttgttataaattgatgtaatttagagaaaggtctgttctaggctgataagttaggcagtcctgttgaggtatgtttcttgtagagaaaatggcaaaataaacttgtacttggcattcgtctgtcttctggagactaatcatggtgtagaagcagctgttgggttcaaaatttgatgtggtcatctccatggtccttttcatctctaagcctctgttagttctgaacactgttatgtctgaatgatttcatgaaatcttttttcattttgtccccctcagtgtagtgtgcttcagagtctgaaagagctattgcagaattggctgttgtggctttctatggacattcacatgaaacctgttacaaacagtcctctgtgagttatctaacggtcttccacaagagacgatctgtatacaaatgtttgcatatgtttaatagtgtggcgtgaaacaatttttttcatgtaaatgcttagtagtacttttttggaagacttttttgtgacttttcactcttcttcccccacaatcctgaaaggaaggctaattctctaagttcctattgtgtaaatcagaaagcaacccttatctgctaaatgacttctttcaagagttaatataacaaaacactagagagatgagactagaatttgcaactttgacttccattcagtttaactcattttataaattatattcttatatttaaagccaattttcatgatggctagaaaaatctctaacgtaattttgcgtacaactttgt

SEQ ID NO: 49676 - DNA, 1052 bp, Homo sapiens
tttctgttgcctgcttttgtgtgtgtgtgtgtgtgtgcttcttcctcatactgcttagtttctttgtgtgcctggttatctttgacgatgtgctggatacttggaatattattttatagaaataatttgaacactgaaatgatatatttctgcacagaggacttttctttgcttctcactggtacccagtggtgttctttgtctggtactaccctaatccaagttctgtgtctgagattccctgaactataggaggttagactgcaagcttgtgagaggactaatttacttctggttatgtcttatcttgaaggtatagcccattgggtttccaagtttaaagtggggcatgatttataagagttcccaattttggaaaaccctgtgctctgaatttaattaccttagttctttgagaccgtggaagtacagttcactttggtagcaaattcctctggattggcaaattccctcaggccaaaagtgattttgagtattagacttacttctttgggttatcatcttctatattttggccttgtaactccttaccgtagcattagcaccttgttactttaaaaaaaaatctaccttttgttatggaaaatgtcaaacataacaaaggtagaatagtatgatgaagccaggcacggggtggctcacgcctgtaatcgcagcactttgggaggccaaggcgggcagatcacttgaggtcaggagtttgagaccagcctggccaacatggggaaagcccgtctctactaaaagcacaaaaaaattagccgggcgtggtggcacgtgcctgtagtcccagctactcaggaggctgaggcatgagaatcgcttgaacccagcaggcagaggttgcagtgagccgagatggcaccactgcactccagcccaggtgacagagcaagactccatctcaaaaaaagaaaaaaaaaaaaaaaacaagaacaacaaaaaacaaatatacagttcaaaggcttttagtttattcatagagctgtgcatccatcaccatcatcaattttagaacattttcattattc

SEQ ID NO: 49677 - DNA, 1067 bp, Homo sapiens
ctgatatggtatattccattaattgaggttcatatgtttaaccaaccttgcattcttagaataaatcctgtttggtgatggataaaaattcccttttacacattactgggtactttttttgttttgtaaccctctatagcacacaggcttactaaattcaggaaaggcaaccaaaaactctttttacaagtcttatagattcttggaaacaaacagatttgactattgaagaaaaatgttaaagcatataagtgaccagtttagtttggaaaatagctcaggctagattgtcatgtaagacttttatgatgtaatgttgaacttcatgaagacaagtgagtcaagtgcagtcataaatatttgcaatgataataattattatgatgatgctaatgttttgccttgcctttgtttaataacttatcctcttttttttttctttttttttgagacagagtttcactctcgtcacccaggctggagtgcaatggcatgatcttggctcactgcaacctctgcctcctgggttcaagtaattctcctgtttcagcctcctgagtagctgggattacaggcacccgccaccacacccagctaatttttgtgtttttagtagagatgggtttcaccatgttggttaggctggtcttgaactcctgacctcaggtgatcctccctctggcctccctaagtgctgggattacaggtgtgagccactgctcccgccttatcctctttctttaagtaccacaatatacattgactctttgattatcaaagcagtcctgtgaggttgtaaggttaggcaccattattcccatctggaaggtgaaaggaatagcctcaggaagattgatttattgctaaaagggaaaaataattaacaattatttatttatttgtttatttatttattattttcaatgttttatttccataggtttttggggaacaggtgctatttggttacatgagtaagttctttggtggtgatttgtgagattttggtgcacccatcacccgagcagtatacactgtacccaatttgtagtcttttatccctcacc

SEQ ID NO: 49678 - DNA, 2072 bp, Homo sapiens
gtgtcagtgaaaagaaaaaagaaatggtacataaccaacattctatggcacagaggatgatgtgtgaaaaaatacagacatcccacaactcagaggagttgtactctgaatagaggggtttactctgaatatgaagttttagaagtactttcaccagtttattttgtttatatttactatcttatgtttataaaaatgatatatgataaaaacctgcctacatctgaaacaactattttaatcattataacaattctgttaaaaaggcattgtgttatacatagtttatttatttaaatagagacaaggtctcatgttgaccaggctgatcttgaactcctggtctcaagagatctgcccgccttgtcctcccaaagtgttgagattacaggcatgagccactgcacccggcctgttttacatagtttaagagttttcacttagcaataatttttaaaatgttatttcttaaagctgatggatatttgaaaggaatccaagagtgatggtaggaatagaactttgcaaatgagcaagtgaattgccatcttaattttctgatgatttgtactaaccaagtatttctatcaccatatctccccacttcttttttgttttgctttgttttgttttttgtttgtttgtttttaaggaaagcccagaagaaaggacagtaaatgtgagctctattcgggtaaataaatttactttcatcgtgttgagggatttcatacagcttaatttcatcaagagaatttatacttttccttttttccaaaccttaagcctgctgcctccacaaagtcaaaatgaagtgtttgccttccaaattcattccagtgactttaatgtgaatttattggcacttattctttctagtcttatctaggatataacttttgatagttacagttgcatgtatataaagtatgattgtaatgaaataaagtatgatttgttactggcgtaacaaagccatacataggctgggcattgtggctcatgcctgcaatcccagcacttggagtggttgaggcaggaggatctcttgaggcctggattttattttattttattttttttgagaaggagtcttgctctgtcccccaggctggagtgcggtggtgtaatctcggctcactgcaacctctgcctcccgggttcaagtgattctcctgcctcagcctcctgagaagctgggattgcatgtgtgtaccaccacgcctggctaatttttgattttttagtagagaagatgtttttccctgttggccagctggtctcgaactcctgacctcaagtgatctgcccgccttggcctcccaaagtgctgggattacagatgtgagcccccgcacccggaggcctggaatttgagaccagcctgggcaacatagcaagaccatgcctgtactaaaattttaaaaaattagccaggcatagtggcacgtgcctgtggtcccagctacttgggaggctgaggcaggaggattgcttgaggctgggaagtcgaggctacaatgagctgtgatcactgctgcattccagcttgggcaacaaacagagcaaaaccgtatctcaaaaaaaaaaaaaaaaaaatatatatatatatatataattatctcattatcaaaaactgctatttacacatttaatataggcagtaatataataatatctgctcctatgttatctcctagagtgtgagaatgatgacacatttccattgcacagtacttaaatttttttgccaacataataaaatggacgtttagcccttggaattgggtactttctggtttaaatgttacttagtgactgagctcatttcccccccgaactaattttgatatgtgcatgcgggatgctgcaaactcttcctagggaaagaggaggaaatagagaaaaagcatagtaaaatattcgataagtaattttcctttttctgtgcctgcagggaaagaaatggagctggtatttggactatttattttcacaggggttacaaggcttgaaactttttataagaagtagtgttcatcattcttccattcccagagcagagggcataa

SEQ ID NO: 49679 - DNA, 1061 bp, Homo sapiens
gaggaggaaaaggagaggagtaaaggatgactcagatttttgacctgtcaattgggtgaactctgagattaaattctgttttggctatgttaggttggaaatgctgtgtaggcaattggatatccaagtctggacttcagagtacaatttgggactagaaaattaatttgggagtcattagggaataaccatgactttggatgagatcacctagtacagctagagaagagaaggtagcaaaagacagagacctaaggtatgccagcattgagaagtagaggagaagaggaaccagcaaaagactgagaaggacccaccagtgacctagaagaaaaatcaggaggctggtattctggaagccatcagaagaaaatgtttcacaaaaggaaggtagtattgaatggtgtgaaatgttacctatatacctggaaaaaagcaacttcagctgctttttaagtaaatgtgatagtttgtactgcaaataactttccatattgcttttcagatcatgatattttggtccttaagatcatgtagaactttccattgtgagaagggagttgattattttatcattaaagaaacttttctaaacttaaatttatgaaaaataatttttcccttaggtttgtctttttgttcaataatgattccctgggtatctttttttgccccacaaataaaatacttagacatacctggatacctttttttgtgcctatttctcttttaactttttttttttcttcttgagacggagtctcactctgtcaccagggtggagtgcagcggcctgatctcagctcactgcaacctctgcctcccggattcaagcgattctcctgcctcagcctcccgagtagctgggactacaggcacatgccaccatgcccagctaatttttgtatttttggtagagatggggtttcatcatgttggccaggatggtcttgatctcttgacctcgggatccacccgtctcggcctcccgaagtgttgggattacaggcatgagccaccgtgcccagccctcttttaattttttaactcacttaagatta

SEQ ID NO: 49680 - DNA, 1051 bp, Homo sapiens
atctcctatctggtgaaggaaaaatcaaagctcaaaaatgtcagtgacaatttcgtagcaaaattgggattagaacctttgtcttttgactcctaattcaacattctttccactataccactttaaccgtagcttgaatggttttggcctaagtggaatatatttgaaaacataaatagaagttatgttatataacatcccagctgctgggtctggtttagcagaagcttgaagaacagcagaagagggtgggaggtaaccaagtgtgtaaaatgagttccacattttcagatgttcaacaaaagcaacagagagtgctcagaccattgactgggacaatactgattctttaacccttagtctgttatggctttgcattattccttatcaactccaatgacgaattccagcctttttgacattgtgccccctacatttttaacctgttcctccaacttaacctgttccttcaacttatctcccagcctcctgcatctatatcatacatggtgaaaatccctccctcctactctctgactcattctctcatctgaattcatattaatcttgttcgtcctgagacatttgcctctatctgttcttctaacccttttggtttttctgcatggaacctcaattcgttggaagcaatctctgctatgtaaatcaaataatatggcagaagatattctgcaaataatagctggcaaagatttattattattctgcattttctgagggatattttttactttgcaaccttactgaaacatgggtattctttgccctgatgatgctgcttccctctaaactttctccggtttgtccataacatagtcttaaactggttgtgtgtgtgtacgtgagatgggactttcttttttaaaaaactttatttatttggagacgaggtctcactatattgcccaggctggtctcaaactcctgagctcaagaaatcctcctgcctcagcccaccaaagtgctgggattacagatgtaagccactgtgcccggcccaagggggtggggctttctatagtggggaaac

SEQ ID NO: 49681 - DNA, 1048 bp, Homo sapiens
ccaggcaaatatcacttggccattcagatggggagcagagaagctgccttgcagagctaagcggtacatgttggcccctcttccttctccgtggaattatggaaagagagaagcctaattaccccaaggttccatccagcattatgaatccacagggtttacccctactctctggcgcaactcagggaggcaaaagggtatccccgagacaccttccccaccccaagtgcccctgaaaaagtctgggcagtgtgtgttctattacttcagctccaggacagattgctagccatcctaatgctacctaggtattggtttctcctcaaatatcttcattttctttagcctcagtccctgacagaccttccttaaggggagaacagttcattctggttcttctacgttatatttggaagcattaaatccatacttatgggtttagattttttttttgccccacatcttcctatttcttaaagtcctcagcattttgagagacccactgagttgcgagttgctctggaaacctggctgaagccaccctttgctcctctgagtctgtcctcacagacctgaggacacagtggcagcttgctgagcaagggagtgttgctttccttgggtaaggaagaggaagcccacctcaagtctggagtagtatgactgccatccaacacccttccaggctgtgacccttctagctctcaggctgaatcaggtgaggtggctgattgtccccagctaatcataaggcatttgcaactggctaccgtgtgtagtggcccctccataggagccacaggccacaaatcaggaagctggccactttccacccagacaacaacagcaaggccttcctgtgcctaaaattgttatttctaactctggaaggtgaatccaatcctcaaactgaactagctcttcctaggcgacatataccatgatctctttatccagaaactgttcagaatagatagtaggggtgggggagtgggcttgggaatgttgaatagattcagagcccacttaggcagctttctcccaagag

SEQ ID NO: 49682 - DNA, 1026 bp, Homo sapiens
tctgttctgttacagggccaagtgatccagttctaagtgtcatcttttattatgaagacaataaaatcttgagtttatgttcacttcatttgtttgctgttcatcttttgggagggaataagctagagccatcaatacaattccgcttgtggggaaatttatgcctcttactggtactacttgttttgcattgaagctgactggttgagttcacatcatatgttgcaattttctaatttggcacttcaatcactaggggccttatgaggcagtttgtcattatgcaatggttattggttatcatgtgagtagacacatttcaggctaatagggagaagtcagtaacacattcatagtgaatatgagatgtctttgctaagagttaagtgtcagatctttgttataacagttaatttaataaagaattttggcattgttcttcagacacagtacactgtaacatatataacattgtctgtggacttggtcttacactcttgaacattttgacattccccctcacattttaaagtagatatatttataccaaaataactacaaagaataggttttctagtgtatgaaaccccccagtggagttttttttttttttttgagacagggtctccctctcgtaagtgccagtggtgtggatcatagcttgctacagctttgagcttgcaggctcaagtggtccacctgcctcagcctcctgagtagctgggactataggtgcctgttaccatacctggctaattttagtttttgtgttgggtgtctctctttgttactcagctagtctggaactcctggccttcagtgaaactcctatctcagcatcccaagatgttgggattacaggtgtgagccaccaggtctggccaaactccccggtggaagaatcttaagagacaaaatatccattctttaaaatgcctcttaacagttccaaattatacatctttttttttttctttttttgagatggagtgttgctcgttacctaggctggagtgcaattggtac

SEQ ID NO: 49683 - DNA, 1051 bp, Homo sapiens
gcgtgatcttggctcacctccacctcctgggtacataaaagcgattttcctgcctcagcctcccgagtagctgggattacaggcacctgccaccacgcccagccaattttttgtatttttagtagagacggggtttcaccatgttgaccaggctggtctcgaactgctgacctcaggtgatacacccacctcagcctcccaaagtgctgggattacaggcgtgagccaccgcacccggccgattgctgttaatttttaatggtatctaacacgtaataggcattgaataaataactgctaaaaaatgaatgagttaaaaatttggtgaactctctgtttatacagacgtcttacagaaaagctgtcagcataattgaattttctattaatagtttgcttttttctcttactatatcacgagcatttttccatgacagtagtcttctttttttttttttcagctacaccaaaattgcattgagccaaacttgccaccaagagcccaacaatcaccatgatgctgagcacggaaggcagggaggggttcgtggtgaaggtcaggggcctaccctggtcctgctcagccgatgaagtgatgcgcttcttctctgattgcaagatccaaaatggcacatcaggtattcgtttcatctacaccagagaaggcagaccaagtggtgaagcatttgttgaacttgaatctgaagaggaagtgaaattggctttgaagaaggacagagaaaccatgggacacagatacgttgaagtattcaagtctaacagtgttgaaatggattgggtgttgaagcatacaggtccgaatagccctgatactgccaacgatggcttcgtccggcttagaggactcccatttggctgtagcaaggaagagattgttcagttcttttcagggttggaaattgtgccaaatgggatgacactgccagtggactttcaggggcgaagcacaggggaagcctttgtgcagtttgcttcacaggagatagctgagaaggccttaaagaaacacaaggaaagaatagggcacagg

SEQ ID NO: 49684 - DNA, 1231 bp, Homo sapiens
ggaaaactccagtgactatcagtcaaaccttgcttaggtagagaaggagcactaaatagctactccagatataaaagctgtacatttgtgggagttgaatagaatgggagggatgtttagtatatccagtatgattggtaaatgggaaatataattgattctgatcactcttggtcagcttctctttctttatctttctttctccttttttaagaaaacgagttaagtttaacagttttgcattacaggcttgtgattcatgcttactgtaaagtggaagttgagattattttaaaacttcaagctcagtaattttgaacactgaaacattcatctaggacataataacaaagttcagtattgaccataactgttaaaacaatttttagctttcctcaagttagttatgttgtaggagtgtacctaagcagtaagcgtatttaggttaatgcagtttcacttatgttaaatgttgctcttataccacaaatacattgaaaacttcggatgcatgttgagaaacatgcctttctgtaaaactcaaatataggagctgtgtctacgattcaaagtgaaaacatttggcatgtttgttaattctagctttttggtttaatatcctgtaaggcacgtgagtgtacactttttttttttttaaggatacgggacaattttaagatgtaataccaatactttagaagtttggtcgtgtcgtttgtatgaaaatctgaggctttggtttaaatctttccttgtattgtgatttccatttagatgtattgtactaagtgaaacttgttaaataaatcttccttttaaaaactggaaaaaatcttgaactgattgatttttattatgttctgtcatatgggcacactgattgactttacaattccctcaaagttaagatttttaattttaaaattataaatgatatttagcatctttatatgttcattgttgcatatatcattaattatttctaagatatatccctagaaatgggattgctgagtcaaagatatactcatttttaaggcttctgatttgtgttaccagaaagattctggtactttatctttctacttggagtgtgtgttttattttcccccttataccctccttattgatgcacattattctttttgaactttgccagttttttagttgagaaatgatatctcattgctattttaatttgtatttttttgattaatattaaagttgtaca

SEQ ID NO: 49685 - DNA, 1023 bp, Homo sapiens
ccacaaagagcatatttgtagtaagtaatgacacaattttagattattaccactaaactcttttaaagataatttataatctacttaagaattacacagctatcacaatgtgcatcttaacaaaggcacaaaaagataatgctcctccatggtttattatgattttgtgtataaaaagaagatatatgaatactttttttctcaactttcattttagtttcgggggtacatgtgcagatttgtcacatgggtaattgtatgttgctgaggtttggtgtataaatcatctcaccacccagattgtgagcacagtacttgataggtagtttttcaaccctcgcccccctccagcctcccgtctagtattccccagtgtctgttgttttcatctttatgtccatgtgcacccaatgtttagctcccacttataagtcagaatacgagacatacggttttctgtttctgcattagtttgcttaggattatggcctccagctgcattggtgttgctgcaaagaacatgatctcattctttttttaatggctgtgtagtattccattgtgaatatgtaccacattttctttatccagtccaccgttggtgggcgggtacccgggttgattccatgtctgctattgtgaatagtgctgcaatgaacatatgggtgtgtgtgtctttttggtagaacaatttattttcctttggatatatactcagtaatggggtgctgagttaaatggtcgttcaactctagttctttgagaaatctttaaagtgttctccatagtggctgaactaatttacattcccaccaacagtatataagtgttcccttttctctgcagcctcatcaacacctgtttttcttttttttgctttttaacaaaagccattttgactggtatgagatggtattttattgtggttttcatttgcatttccctgatgattagtgatgatgagcacttcttcatctatttgctggcctcataggtgtcttcttttgagaagtatcgttcatg

SEQ ID NO: 49686 - DNA, 1049 bp, Homo sapiens
taaaaggtaaaataaggagggcaagaaaacacaattttttaaaaaaggaaatggcatagggattttctatttttttctcagccccagaaggtaattactcttacaatgcagaagtatcaccagatactatctgcacaggttttcccattttttcctcacaccactgtggtaaagcagggggatctgtcacctccactgaggagactgaggctcacaagaggtgataacatataaaactctatcagtcatttatggagtggagcagaggctctcaaagttcagcatgcatcatctgtaggtgtataaacactaattgctgggccctgcccctagagtttctgattcagaccatctggttgagacccaaagatatgcatttctaagaagttcccaggtaatgctgatgctactgctctagggaccacagtctgagaaccactggtctggctaatagacaaacaaacaaataaacaaaacagcatttattctttacaaggtacatagagaattgcactgagctgagaggattggtggaagtacatggcctggagtcaaagcaaaggggtcagagtttgcagtgtacctaggcccatgacctgggccattcactcaggcagggggtgacactatatcattctcctaaaatgtaagggaaccagtcactggtccttagaacagctcatgtgggcattggtgatttcatcacatctcttaccctggggagcctggtgggtgagggattaagctccaggctcctgggatctcccttgatcttagctattcaaattacttattattaaatccgtaattcagatcagggtataggaagttaggagatgttaagtaaatcagggaaactgtcttataaatgcttacttagtagtgaaacctggaattactgtaaagctttccccatggtgtctggaatccaccagggctctaagtactccaatctgtctgggtaactgatgctgggcggggtatggcttagttttttaaaatagtgaaatatattacttttaaattatattattactgaaaaatttaaa

SEQ ID NO: 49687 - DNA, 1048 bp, Homo sapiens
gaggaagatctaccaagcaaatggaaaacaaaaagaggcaggggttgcgatcctagtctctgataaaacagactttaaaccaacaaagatcaaaagagacaaagaaggccattacttaatggtaaagggatcaattcaacaagaagagctaactatcctaaatatatatgcacccaatacaggagcacccagatacataaagcaagtcctgagtgacctacaaagagacttagactcccacacattaataatgggagactttaacaccccactgtcaacattagacagatcaacgagacagaaagtcaacaaggatacccaggaattgaactcagctctgcaccaagcggacctaatagacatctacagaactctccaccccaaatcaacagaatatacatttttttcagcaccacaccacacctattccaaaattgaccacatacttggaagtaaagctctcctcagcaaatgtaaaagaacagagattataacaaactatttttcagaccacagtgcaatcaaactagaactcaggattaagaatctcactcaaaaccgctcaactacatggaaactgaacaacctgctcctgaatgactactggatacataacgaaatgaaggcagaaataaagatgttctttgaaaccaatgagaacaaagacacaacataccagaatctctgggacgcattcaaagcagtgtgtaaagggaaatttatagcactaaatgcccacaagagaaagcaggaaagatccaaaattgacaccctaacatcacaattaaaagaactagaaaagcaagagcaaacacattcaaaagctagcagaaggcaagaaataactaaaatcagagcagaactgaaggaaatagagacacaaaaaacccttcaaaaaattaatgaatccaggagctggttttttgaaaggatcaacaaaattgatagaccgctagcaagactaataaagaaaaaaagagagaagaatcaaatagacacaataaaaaatgataaaggggatatcaccaccgatcccacagaaatacaa

SEQ ID NO: 49688 - DNA, 1058 bp, Homo sapiens
atcaggtgtgttgcagtgattcacagtcatccacagaccctcaccaccatctccactggaaaatattgaacactcgccactgctagggtagtatgtagtacatgaatggcagacaccggcgagatctcaagtgttacgacggatgaaaattccacctgttaagtctcctttccatccaagctctagcagttggttgttccatgggtgtggtgaggctgatctgattacatgcttatgtaaaatccaaataaagccccttgaatggaaaacaggttaatttgggaagtcactagtaaagcaggttaatttggtaagtcactagtaaagcactaggctcatcaggagttgggtcttaaatatatcctctagaagtcttctctgaagaaggtcttagacacctgaaaaaagatgctgagttcagccagaacttcaaaagttacaaatcacctgtgtaaaattgtcaatattagaaaacgaaatgtctttccaaagattaacttatagatcatattgaatacgtgctggttttgtttaggacaattttgtatttaaaatgtcaagaattactagtcaattttgaaagctgtaaaatagtttgcagtaacagaagacattttaaaatgtggcacaaaataatgtaaacaaaagaatgagtcttttgttatttttacaccctgaatattttttgtgtcaaatgaaaatggctatactgtattttctgattacaatattagaaaagaatgtcatattaaaagaaaaaaaaggaacacgaaaaagaaaattaaagctctacttgcaccttctgctttccttcctgatacccccttccacagcccatttggtgcaggcattgtacttagagagggcaggtcgtgtagggggcgggtggggagtgctggtcttatagtctaagagagaaataagtgattactcaaagaagaaacataaaaggccacagccaagggccgggagtgggtagggggatgcagaccctcccctgtaactgaagatgggtaaactccaaccacaaggcgatgatgccacttgtgggccctcag

SEQ ID NO: 49689 - DNA, 2179 bp, Homo sapiens
tgagtccgaatgtgtttcttgcactccccggactgtggcgaaatggcgtgctttgtgtgtctgtggttggggggaagtgggggaaatgacagcagggaaacctatcggatagtttgttcgtaatcctcctctctcaacagcacttactctccatgttttcgatctgtcatcctgcaggtctgctgtagcaggtggctccgcttgaagcgagggaggaagtttcctccgatcagtagaggtcggtgtgggcgtgggggctgcctggaatgggggaggggttagaaatcgccggcactttggacaggctcttccaatcctgctttattttccttacctccctcccatttcaggctagggagggggcagacctgtgcatgtctgggatagcataaagaggttaaaaacaaacctgataaccggaatggtgaatcaggaaagcaacgaatcaacagtcaacccatcaagtgctccattctcactggctctggtctctctgcagattggaaagattgttgggagtggcacaccactagggaaaagaagaaggggcgaactgcttgtcttgaggaggttagtgcaagggttctagtcaggtccctagggacatctgaggttgtggtgactgagaccccagcagagtctgtggattccattgacattatctaggctttgggcggggtgacctgggatggggagggaaaggctgaaatgagaggcatagagatttcgtcaacaatctacatttcctacctagcattcaattattattatcttgtccctctgtgcagctccctgcatggggcaacacaagcagaagagaaactcaaacccaattttcttcttccactcctaggtcaacccccagaatcagctcttgtggccttgaagtggctgaagacgatcaccctccacaggcttgagcccagtcccacagccttcctcccccagcctgagtgactactctattccttggtccctgctattgtcggggacgattgcatgggctacgccaggaaagtaggctgggtgaccgcaggcctggtgattggggctggcgcctgctattgcatttatagactgactaggggaagaaaacagaacaaggaaaaaatggctgagggtggatctggggatgtggatgatgctggggactgttctggggccaggtataatgactggtctgatgatgatgatgacagcaatgagagcaagagtatagtatggtacccaccttgggctcggattgggactgaagctggaaccagagctagggccagggcaagggccagggctacccgggcacgtcgggctgtccagaaacgggcttcccccaattcagatgataccgttttgtcccctcaagagctacaaaaggttctttgcttggttgagatgtctgaaaagccttatattcttgaagcagctttaattgctctgggtaacaatgctgcttatgcatttaacagagatattattcgtgatctgggtggtctcccaattgtcgcaaagattctcaatactcgggatcccatagttaaggaaaaggctttaattgtcctgaataacttgagtgtgaatgctgaaaatcagcgcaggcttaaagtatacatgaatcaagtgtgtgatgacacaatcacttctcgcttgaactcatctgtgcagcttgctggactgagattgcttacaaatatgactgttactaatgagtatcagcacatgcttgctaattccatttctgacttttttcgtttattttcagcgggaaatgaagaaaccaaacttcaggttctgaaactccttttgaatttggctgaaaatccagccatgactagggaactgctcagggcccaagtaccatcttcactgggctccctctttaataagaaggagaacaaagaagttattcttaaacttctggtcatatttgagaacataaatgataatttcaaatgggaagaaaatgaacctactcagaatcaattcggtgaaggttcactttttttctttttaaaagaatttcaagtgtgtgctgataaggttctgggaatagaaagtcaccatgattttttggtgaaagtaaaagttggaaaattcatggccaaacttgctgaacatatgttcccaaagagccaggaataacaccttgattttgtaatttagaagcaacacacattgtaaa

SEQ ID NO: 49690 - DNA, 1033 bp, Homo sapiens
tatctgtctcaaaacgcacatagaaaaaaaacttttttagaaaagagaattcagcctgtagtcccagctatctgggaagccgaggtgggaggatcacctgagcctgagaggtcgaggctacagtgagccgtgattgtgccattgaactctagcttgggtgacagagtgagacctgtctcaaaaacaaaaacaaaacaaaacaaaaaacaaaaaagaatttggtgtttgactatttatttttgcctttgtggatctatccctatcaggtaatagtacagtttttttcttgctatacttctgagatctgtttgtctacatattttagagtttgttaatattttattttttttatgtttatcattgataactgcttatagttacctttttatgtactatctttaacagattttggtctcagctttgctagctttataaaatcattagtgaactttccattttttcctgttttctggtagagtttagataacattggtattatcttttccttaaaggttagttagaacccaactgcaaaacttttggtttgttttacaatggtaaatctacaaacacatttccgatctcatctgtagtaattgttctagtcaaattttctatttcttgagttaatgttggtaacttctattctattaggaaattatatgttatctttagattttcaattttgatgtcatatgtttgtgtgtaaaattataataataataattataatataataataatttactcatgtgatttataataatcacatctatttgtgtggttcaaccctttaatcataatttgtatgcttttgctttccctgtgttttcttagtcatactcatgatgtttatgtattttattggtgatttaaaaaaaaccaactttttatcactttttaaattacactttaagttctgggttacatgtgcagaatctgcagttttgtttcataggtatacacgtgccatggtggtttgctgcacccatcaacctgtcacctacattaggtatttctcctgatgttatcc

SEQ ID NO: 49691 - DNA, 1105 bp, Homo sapiens
ctagattgttcatgaggtgtcatctgttgatggacacttaggttgtttccatcttttggctcttatgaatattgctgcagtgaacattggagtacaagtatctgtttgagtccctgatttaaattcttttgggtatatacctagacgtggaattgctgggttgtatgatttgtttagctttttgaggaattaccagctgttttccacagtgcctgtaccattttacattcccgtcagcaatatgcaagggttccaatttatccacattcttggtgacacttgttattttccattattatttaaatagccatcttaggaggtgtgaagtagtatatcattgtggttttaatttgcatttcccgaaagtcttatgatgttgagcatcttttcatgtgcttattggccatttgagtatattttttagagaatgtatgtttacgttctttgctcatttttaattgtgtttttggttattgttgcattgtaggagttttaaaatatatatattctggatacatgccccttattagctatgtgatttgcaaatattttctcctgttctgtaggttttttcacttttgatgatgtcatttgatgtgcaaaagtttttaatttcaatgaagcccaatttatctatttttttcttttgttgctggtgcttttggtgtcatatctaagaattcatcaccaaattcaaggtcacaaagatacccatatgttttcttctaaaagttgtatagttttaaacatcagagtaattagtgtttctatcacctcaaacatttatcatttctttgttttgggaacattcgaaatcttttcttgctatttgaaaatatataattatttattgttaactgtagtcaccctacattgctatatagatcattagaacttattcctcctatcttgctgtaattttgtatctgttaaccaacctttcccaccccattcctttccctatattctcttaacttttaattgaaaaaaaaaaaccacaataacttttgcaccatcctaatagtaaccactattctacactctacttctatgagatgagcttttatagcttccacatgtgaatgataatatgtggtatttatct

SEQ ID NO: 49692 - DNA, 1048 bp, Homo sapiens
ttaagcagtcagtatatttgtagaaagcttgttgagttttttttctatccattttgtttctgtatgccagttttatcacaaaataatacttatgagttcacctttcctttctgagcaataaacaagcttaaggtatctaagccttgaaaattggccttggtactattctctaaatttgaagtaatgtctttgttcttcaacaaggtcttaccagctattgtcttatagccttaggatttggggcacacagcagcaagtttagggctgagtgagtacggactgactttgtgatatgctcagtatcaatatacccagcaatttcccaagtaattccctaaagaacagttctagtataccttcctactcctaaaaatcagactgcttttcctattttcctgttgttgtaacaaattaccataaatttgattgcttaaaacaacatatatttattatgttactattctagatgccagaagttcaaatttagtcttgctgggtttaagtgaaggtgttagcagggctggctccttctggaggctgtgagaggagaatccgttttcttgcctttttttcagcttctgcctgtgttccttggcttataatctctttctcacatcatttcagcctttaattttattgtcccacctctttctgtctttgaccttcttgcctccctcttttaatgactctgcttatgttgggactaactgcataatcaaggatagccttcccatctcaagatccttaacttaattatatgagcagagtccctttttgccatgtaaggtaacatattgacagtttccagggattagaaaatggaatattgtggagagggatacattacttagtctattatacaacttacagtgaaggcagtggtcacagaatcaagcaagttatagataggtaaataaatgtggtaaaataggctattcattgagttttgggcattatgtagatatctttaacattcttacttccagttattggcattttaccatctatgaattcacatgggtatatcataataaggggaaaattgatg

SEQ ID NO: 49693 - DNA, 1030 bp, Homo sapiens
taccatacatggaatggcttaaaataataccaatttattattatcttacagtcctggaaggttggaaatcttcaaagggcttcaccacactaaaatcaagatgttgccagaggagctatccctctggcatttctagggaagaatctgtttctttgtcttttccaggttctggagacagcctgtatttcttggatcttggcttccttccatcttcaaagccaacgatgaccagtgtagactttctatgctgcttcaatctgacatggagtccctgccttccacatctaaagtacccttgcaattacattggccaagataacccagaataatcttaaattaaactcagctgaatagcaatcttaatgatcctttgtcaggtaatataaaatggtacatgttctggagaacaggacatggacatctttaggggaccgttacctgccaaacacaatgagggtagtgtctaaatgagttttcaaatggacaacagtaacaacatcaacttggtgtttaaccacattgctctgtctgtcccatgcaggaagcagggaaaggaggggctcaagagtagaggacggatgtgggggtgaaagaagaggattcaaatgagccaggttgctttgtctcggggaggggggtgcacggtgggatcctctcctgagaatgactgctgaaacaataggtagttgtggcaggtggcggagatccaagctggtttgataccagccacatttccacactgccaaatatcatggcaagagaagacttgacagggaaccgaagagaagccaggaccatccctacctggcggcatcaaagagagaggactgttatgacctcctgcgggtcctgacagggaaaggtcctcttttgggggcaactgtggggacggtgcaatgccaacgtgagccaccatttgaaatgagaaacagcggtgtggcagaaagaaatgagtctggtgcagaccagtggttggtttcctagggttagaggtctaggtctaccttcttttagaagaggggcagtggtg

SEQ ID NO: 49694 - DNA, 1043 bp, Homo sapiens
tgttggtgggactgtaaactagttcaaccattgtggaagtcagtgtggcgattcctcagggatctagaactggaaataccatttgacccagccatcccattactgggtatatacccaaatgagaagctacctttcttactttgtcccttccctccagttatccctcccccgctataatgtctgtcaaaagcctgtcgatccttcaaatattttctacaaggccatccaccccctacatggtgacactcctgatccctctcaccaactccatgaactttcaccttcttttgagcccacttcctaatctaatgtgtttataccttcactccagcggttaacttgtactgtttgattggacagccattcagataatcttcatattctgccattaacattcctgatccttccttctctgtgtatctttgtttatccttggcccaggtattcaatgctggttcaggttagtggaaacaccttgcttcagaatcaagtaaatacttcctttgagatgggactgtacactagaaagtttgtcttagaaagagatggtaagcttagaacatactgtttttaatgtgtttatgaccttagcggcatatatttttaatttttaagtcatttactaatggaattggataatgtagtattgcactgttgttttgatattagtaaagaggttaaacatattttcagatgtttattacctagttgtattttctttcttgtgagtggatatttttaggttttccccatttgcctttagaggtccttggtttagaggttttcagaggttcaagaaatccttataaatttctgtgcacacacaaacctatgaacagtccagcaattttgaaaggaaagtaatttggaggttgggcaggaatctaaaattttttttatcaacctatggttattaaaacagtagaactgactcaggaaaagataaatgggacacagagagcccatatataggcatttatactaagacgacagttcagattcatggaaaaaagtgaaatattcagtctgctgtgggtcctcaa

SEQ ID NO: 49695 - DNA, 1031 bp, Homo sapiens
tttcattctgtatactggataattttaaacaatctgtctttaagtttactgacttttttcctgcatgattaagcatgttgttgagctatctgttgaattgttcagttcagttattgttcagctccagaatttgtttggttcttttgtatagtttctatctctttgttaaatttctcattctgttcatgtgtttttaaaatttcatttatttatttatctgtgttatgttgtagctcactgagcttttctaagacaattattataattcttatcaagaagttcattgattttcatttctttggcatcagccattggagctttattttgttcctttggtgtctcatgtgtccttgattcttcatttcccttgaagccttgtgtctctgtcttcacatttgaagaaacagtaacctcctcgaggtaaagatcttcacaagtgagtctgactcaagattttgggggatctctcagatattttgtatggatatatctgctccaatcttctgaagtcttgggattgtgtaccttctcttgatttcacaatgccatgccagctgctgaaagcctcctaattattttctctatggcagtgcaatcttgaagtgtcaagattgagcattttctccaaatctagcagagttgcagtggctggtcatatctgtgtgctgtctattgaggctcatgcacactatctgtgggtgaatgcagggtctcagctcttggggaaggagcatgtggactaatgagggtgtatgtcagctagttggaaggtccacaggtgaaacatcctatgaggttcatgagtggaacttttggtggaatacacaagccagttcataggatccgtcagtttctgaggaggtctcttttggccctgagctctgccaccttgggcaggtgggtggtggggggtgacatgggtatatgaaattgttctacttaccctcttcaatacatctattcctaggttgtttttttgtttttttgtttttttctacagcagggagctcgaaactttcagctggattcct

SEQ ID NO: 49696 - DNA, 1056 bp, Homo sapiens
aacaaaaaaacatgcctgaggaagcacagatgccagacttactagacagagatgttaaaactgtgatcttaaatatgctcaaaatgctaaaggaagacatgaataatgacagtaaaatggtgtatgtacaaaatggcagtatcaataaagatatagaaattatgaataaagaacgcaaaggaaattctggagctgaaaggtacagtaactcaaaagacattcaattagtgcaaaagctgatttcagcaagcggaataaagattcagagaactagaagatagaaccttttaaattattgagtctgagggacagaaagggaaaaaaatgaagaaaagtgaacagagcctaagggacctgtgggacgtgatccagcagaacaacaggccaacttacacattatgggaatattaggaagagaagagagagagaaaggggtagagagatcattcaaaaaataataatggctaaaaactttccaaatttgataaaacacttgaatgtaaaaatccaagaagctcaatgaactagaaacaggacaaaacaaagtgacatatgctaaaacacattataatcagattattgaaagacaaagagtgaatcttaaaagcagaaagagagcagtgactgatcatatataagtgattgtcaataagactgtcagccaatttggtatcagaaacctggaggccagaatgtgttgggtttatatcatcaaagtgcttggggaagagtcaacggagaattctatgtccaccaaaaaatattttttaatggggataaattaagacattctcagataaacaaaatctgagggagttcattttcactagatatgccaagcaaggaattctaaagagagtcatgcagatttaaacaaaaagaaactagacaataactcacagctgtatgaagagataaagatctctagcaaatataaatacgtaagtaatgacaaaagccagtactgttagaattttggattgtagctccacttttttattttttgtatgacctgaaaggcaaatgcataaaaatcaatatttaatgtatgttttg

SEQ ID NO: 49697 - DNA, 1115 bp, Homo sapiens
gtgaatcctcagaattggagaagggagtaatgggaagaatatgacgtcaagagaaggagttgttatctctggaaccttgaagcagggcccaaataaaacgagaatattccaccagcaaaaccccgaatgttgaaagacagataccaataatatggggactcttatccttggcgttggcctgtctaccaagtgctcttctgccaccactcatatcctgactgtcttactttttcatgtgtttgtccataggcctactttaaggctggccaattctgcaagaaaggcaaggaggaggagactggctcacagctctggaggttagtgagaagggggagaggacaatgcaggggacagttggagagagcatggcaggtggcagatccacttccacctgtagtagaagtggcagacccacttctattctgccggatttgcacagtgccagcatcctttttatttcttgcaggagacacgagataggtgtaggttgggttgtgactcagaaaagacctgagagcagggactaggacacaggaaaccatagatacattgaactcttgaatgggaagacagatatttgtcacaggggccagagtgcccacctacctaccaagcactcacactccattctctcctgtatgttcacttgtctgtaggacccccttctgtcagctgtggggcttgacaccacttgaacaagaaaaggagggggaaactgcaccacatcagtgaaggttggtatgagagcgggtatacttttgggcggggtagtggagaccagcatgggtccgggagtgattagggtccaatctgggggcttcttggcccctcccattgccgacacactttcccaccattgttggacctgttttgtaggaggcagccggtccagagagactttctcaaagcccagctgtcccacctagcattcaacatcagtcgcactgcatacgtctcatacaattggaagagactcaaagcctcatttcattctctctccctagatccacctccagtggctgctctgctggtggtggagttgctgctgacaaccaccctcaacgggtctgcacccatccaggaaatatctgtcttcctttagcttggttgtacct

SEQ ID NO: 49698 - DNA, 1075 bp, Homo sapiens
actgggcactcctttagcctttctcactctcagcaagcttacctgccatctttgttcctgtttgatgcagagtaaaagaatgacagtgcttgggcaggacattgttgagcattagtggcagtgtgcaaggtataaaattaagtagcagagttttttattaatccacttctacacaattcatttctactctcctatgtccttctgtgtggctgtttgcatagagaagcacagttagacaagactcaaagccagtttctttcttcaacctcaggtccatctccactggtggctgtggtggctttggattgttggaagaccatcaccttcagcaggtctgcacttgggaacaatcattctcccccagcccgagcgtgcctctgccctctgtatcattgacagaggctgtatgtttggaaagagaactttgtgactgcagaactgacagttgactctaattcttgctaccaagtttttccccgacccagtgaaagagtgttaagacttcgacctaggacacattgagaaccaaggccaagactggacagggccatataactgggcttcaaccatggctgggactaagaataagacaagagcccaggccaaaactgaaaaaaaggctgctatacaagctaaagctggagcagagagggaggctactggtgttgttaggcctgtagccaagaccagggccaaagcaaaagccaagacagggtctaagacagatgcagtagcagagatgaaggcagtgtctaagaacaaggttgttgctgagacgaaggaaggagctctgtcagagcctaagactctgggcaaagccatgggagatttcactcccaaggctgggaatgagtccaccagctccacatgtaaaaatgaggctggtactgatgcctggttctgggctggggaagaggccactatcaattcctggttctggaatggagaagaggctggtaatagtttcagcactaagaatgataaacctgaaattggtgcccaggtctgtgctgaggagttggaacctgcggctggggccgattgcaaacctaggtcaggggctgaggaggaggag

SEQ ID NO: 49699 - DNA, 1025 bp, Homo sapiens
ctggttttattgtggggagggaaagaatggaatcacattccatttctgccacttctctggagagggtcttagtccctttgagaaggagcttggtcatctgtgaaataagacgcaccacattatcttcttcagagtactgtcctgagggataaatgagaaaacctgtcaagtgcctatgggagatagtaggacttcagcacataacaggtctggctatttgccccctccctcccagagagtagatgacattgacctaaaccaaagggcattactgctattgagaccttgtggaaaggtagcagcaagagctgaaatatatccccataacctatgagctttgggccagttctgagttgtgggatgagttacatgtgagagctggggaaaaggaaaaataaatcaccataccatttcctataactgcatctgccttcctatcctcttaatttatcattcagtttgacactggaggagcagtttcccattaactttaaggtagaagggacaccacagggcaatatgacaagaatactggacggaagactagagtcataagaccagacacattatgatccacgattatgttctgttatatggcaaaagggagatgatcagcataggcctgacctaattagtcaagccctgtaaaatcagagaattttctcctgctgtttagagtagggcaagtcagagattcaaagcacaggaagccttcaatgtgccattgctggatggaagaaggaggccacatggcaggcaagtggactagcccccaggagctaagaatatccccaactgacagtcatcaaggaaatggggactgcggttcaatggccacaaggaaatgacttctgccagcagcaagaatgatcttggaagcagatttttatctagatcatccgcgtgagacctcagtggagccaacatgggcaccttgattctagctttgtgagaccttgagcagagaataaggtcatgctggaccagtcttctgacctacagacctgtgagctactagatggatg

SEQ ID NO: 49700 - DNA, 1040 bp, Homo sapiens
tttggtaattctatttttagtttttttcaggaatgaccatactgtttctgtaatatctgtataaatttacattcccagtattgtacaagggttccatttttttccacatccttgtgaacacttaccatcttctgtttttttaaataatggccatcctaacaagtgtgaggtgatatcttgttatggttttaatgtgcatttccctgacaattagtgatattgagaattttttcacatatctgttggccacttgtatgtcttactttgaaaaatgtatattttattatatatggacacatgattattgtacatatttatgggggtacactgtgatatttcaatatatgtatacaatgtgtagtgataaaatcagggtagttagcatatccatcatctcaaatctttatcatttatatgtgctggtaacattcaacattttctcttctagctatttgaaaaaatacattaaattattgtttgataatttagtataatgctatagaacactagagattattcttcctatccagggtctggagtatgggctagccttcaatggatgttaatctagtgtctggagtacagacatgtgcaaagtgaccttggcttaggggcccggatcccagcctagttcctctaattggtatgttttctcagggagttatctgaagagtgaaggtgttttgctaggtctctatggcagtggctctggtgtctgaggcatgggcaggcacagtcaggcacagagctggggtctggagtatgggtatttacagagtagttgtagcttgggggggtcagtgacacatgcagcattgggacaggtggcacctctggtcccagagtggtataatagctgctgcttcttgagatgagaagtgtgtagccacttctccctctctggggttccttgggcaggaatggctgttggttatctcagtggcgaaagatgccagtgtcctctccagagcagactgctggggaccatggtgattcctgccacatggctaatagcaatagcctttgcctttcttctttgc

SEQ ID NO: 49701 - DNA, 1053 bp, Homo sapiens
tggaggctttgttcgtttttttttattcttttttctgtaaacttctcttctcgcttcatttcattcatttagtcttccatcactgataccctttcttccagttgatcgaattggctactgagacttgtgcattcatcacgtagttcttgtgccttggttttcagctccatcaggtcctttaaggacttctctgcattggttattgtagttagccattcatctaattttttttcaaggtttttaacttctttgccatgggttcgaacttgctcctttagctcggagtagttcgatcatctgaagccttctctcaactcgtcagagtcatttgctgtccatctttgttccattgctggtgaggagctgcgttaatctcattacttgttatgtgtcggttcaggttttggatttcttcctggttcaatcttggtaggttgtatgtgtctaaaatccgttcatttcttttagattttcaaatttattggcatattgttactcatattagccactaatgatcatttgcttttctgtgctatcagctgtaatgtctcctttttcatctcttattttatttatttgtgtcttcttttattttcttagtctggatacaggtttgtcaatttcatttaactttgcaaaaacccaagtttttgtttcggtgatcttttgtgttgttttcttcatttttatttcatttatatctgctctgatcttcatttattttcttctaatttggggtttgagatttattcttgcttttgtagttctttaagatgcatcattaagttgtttatttgaaggtttttacatttgatgtagacatttatacctataaacttccctctgagtactgcttttgctgtatcccataggttttagtgtttccattattatttgtttcaataactttttcaacttccttcttaatttctttcttttcatacaggtcattcaggaacataatgtttaatttccacatttttgcatagtttccaaaattcctcttgttattgatttttaatttcattccattgtggtcagagaagatgcttg

SEQ ID NO: 49702 - DNA, 1015 bp, Homo sapiens
aggaatctcagataagacttttttaaagccgagcccagccatggatttgtgccatcaaattcctgtgagttgggtgaatttcctcttctcttgaggttccaagataaacttggggctcctgggcctgtcagaaagtgacattctttacttgccaccggttaggaaccctgtacagagctgtgcagacaaaggtaagaggctactttttccaaggggctgttattggctccgtaaattaggtttgataccttaaaggatagcacaccattccagtcaaagccttggtaaaataaccagtttcttcaattgtgtcctgttacacatgaaaacagattcttattgcacttacgcaaataactatattgtcataagttaagaatactcacaaatagtttccaaattctggagaaattaggtagagagaaatatgcttcaaattttgttcacaggagtatagtttactcaattgttacaagctgtaactagcttgaaagttttcctgactctgaaaaacaaaacaaaggattagcaaggttttaaccaaaaagttaaaaagattactttagtcttctattagttcagttcacacagttaactcctgttctgcttgatattcatgaacatttcagctcttcatgagagtcctgaaagttttttcctctattctaatgtcacaaactccaaagttatcagaaacctgcgtttaacaacgcctgttacacagttctatggctgattataaaaccaccttctaaggaggatcaaacaagacaattgtctgtgaatgacaaaagcttttagggcaaccatagtcaaagacacaattgacaaggaaatttgttacctctgtggcatacaataatttaacataacaattataattattactaataatgtacactaagtcatatcagaattataggagtttcccgtgattttggaacacataccaataacatttatacaaatacatcctaaagaaaaccaaataccttttcatatttgacactgtttc

SEQ ID NO: 49703 - DNA, 1024 bp, Homo sapiens
ctaccagcaacagcctaaatctcagaggatttggcagtgctttatattcctctagaggaggctgttctataattgataaactctgacaaacctctccatctcttgccgattcagccgtatactgctgtcttcagctaaccctaaaaagtcttaatcacaaatatttacataaaaacgttaggtcaaggtgtagtctatgagatgggaagaaatgggctacagttgctaattaaagaacactccacctatagtaacccctatgaaactaaaggtcaaaggaggatttagtagtaaattaggaatagagagcttagttgaatgaacatgaacacaccacctatcagcctcctgaaatactttaacaaacccaaatttataattaacacaaatttatgtataaaagaaggtaagtcacaacaaaataatcatactggaaagtgtgcttaggtaaaccaaaatgtatctgaattcaaaacacctggcttacacccagaagatttcatattaatctgactactttgaaccaaaactaacaaatctcaacaattacatatatttaaatgaaaacattcattcataaaaagtatagaagatagaaatttatttaggtgctatagaaatagtactgtaagggaacaatgctaagaataatttttaaagtacaaaaaaagcaaagccacaaggtagtgatgccttgtagttttcatttacatttccctaattgattaatgatgtttgagtatattttcatgtgcttatttgacagttgtttatcttctatagatgagtgtctattcaactcttttgcctatttatttattggagtgtttaattgaattttgtgatatttttctatattttggatacaagtactttatcagatatgattttcaaacattttctcccaatcaggggcttgtcttttcattctcttaacaatgtctttgtaagatgcagagtttttaactttgacacattccaaattattgatttattcatctaagaaatctttacctaactcagg

SEQ ID NO: 49704 - DNA, 1049 bp, Homo sapiens
gggaatcacattgctctctgtccctgagatcttgctggagacagggctactcagtccctctttgccaggtgagtatagatgcagtgtggtgacttactcaagggcacctagagttagtgggataggtctggcactgtggccaggtatgtctcctgtcccatatccatctgcatgtccattatacacagctgtattagtttgttttcatgctcctgataaagacatacccaaaactaggaacaaaaaaaggtttaattggacttacagttccacatggctggggaggcctcagaatcatggtaggaggtgaaaagctcttcttacatggtggcagcaagagaaaataaggaagaagcaaaagcggaaacccctgataatcccatcagatctcgtgaatctcattaactatcacgagaatagcacgagaaagactggcccccatgattcagttacctccccctgggtccctcccacaacatgtgggaattccgggagatacaattcaagttgagatttcgatggggacgatggggacacagccaaaccatatcattctgcccctggcccctccaaatctcatgtcctcacatttcaaaaccaatcatgccttcccaagagtccctcaaagtcttaactcatttcagtattaacccaaaagtccacagtccaaagtctcatctgagacaaggcaagtcccttccgcctatgagcctgtaaaatcaaaagcaagctagttacttcctagatagaatggggatagaggtattgggtaaatgtagccattccaaatgggataaattggctaaaacaaaggggttacagggcccatgcaagtccaaaaatccagcaaggcagtcaaattttaaggctccagagtgatctcctttgactccaggtctcacatccaggtcacactgatgcaagaggtgggttcccatgatcttggacagctccgcccctgtggctttgcagggtgcagcctccctcctggctgctttcatgggctggtgttgagtgtctgtgacttttctggccatatggtgcaaact

SEQ ID NO: 49705 - DNA, 1051 bp, Homo sapiens
gtgctgtgtggttcattgtagtgccacaaaccattgtaacgtctaccatctccccaccctccagaatcaattttcagccccttggggacaatatctcctttattgagaatgcatggacattgtgatgatggcaaaagctgtaacttcattcctgtcccttacttgatgtatgacactggaatcctttcttagcctctgtcagcctgttcttggtcatctgtaaaaggaactcacaatgccttcctcacagaactgttctgtggggtaaattggaaatcctgtacagagtagatggcacctagtaggacttcaacaaatgtttgtcctggcccaccttttccttccctctcagagaaatgatgactgtcacctaatccaaccagcataactgccacaaagaccaccaggaaatggagcaggaagtagaacattgtgaatgaagcactggggccatttctgtgttgcaggagaactttgctgaaggattgagggagactgaagaagctcattgaaccattttctttaattccttgtcattttctcctcccttgtttgatcttctagattgatattggaaaagcagtttcccattgagtctcaaatgaagagagtgcagatgaagaggaggtaggagtcacaagcccttgaccctcatgctagacccattaccacccacaggaccttgcagtgggatttcatctgcaccatcagcttcttcagagagagaggttgttgagtgagtacgcataagggcataatcctagcaacataaaaaaacgacaagtgtttaagtcctagatggtcatcatctctaaaaggagatcatatgttgtcctttgaggagagtaagagttacatccccactcctgatcattactagatgcctctgcaaaattgattttccatcagtgagtctgagttggtaatctgtaaactggaaataatgatgccttcctcacagacttcttgtgagagaattacacaaggcatacaattgtttccatacttttagctaagttagtgctgttatccagcttttcatcctctgaag

SEQ ID NO: 49706 - DNA, 1037 bp, Homo sapiens
atctagttgtctctcctcttacgatgttaagattgatcactaggttcaaaagttgttagatttattgattataaaaattcccatctgcattatacctcaagtattttgcagcctctaaatgtgtataagtccacatttcattaaaagttgtagcaaggtgatgttctaattctatttttggcatttattagcttgaattattctataaaagaaacatcccctcatcaactataggttagtatagtatgcataggaaaataagatgaatgcttaattcttttgttatatttctacttttcaaaataatgggttgttctaggattcttcagaggggagcagtgagttgattttgttttgttttcttttgttctattctattattattttaaagtgttttcataagctctagatgtttctatatctgatgtgttttaacctattgcaatatttttattgatgttcagatttttctgtctttgtgaatggaagcttctttagctcaacttattcttgacatggttttgagtatgttagtttggtctagactcctctggtaccattcctaccccagacctggagtcagacattttttccaaaggagtctggttctttttagtgggaaatgttttagaggtctcattcttggtactagagttgcccattactattgggttggtcattattacttatccttttcagtgcttaaaaccattaaatatgtattatattttgagataatacacatgattgtctttaatcctgggctgctgttctatccctttatgcataatcatttttatcaatgtttgttttgaccttctaattttaaaattataagcaaatacattattttctcctattttatggtttaaaagtaggctactctacttcagtggagtccaatatgatttctgcagagataaagagtctctgtctacactgttcaccacagtagccactaggtccctgtggttcttgaacacccaaaatgtggtgattgtaattgaagaactgaattatttatttcatctaaattt

SEQ ID NO: 49707 - DNA, 1030 bp, Homo sapiens
tccacaggtttttggggaacaggtggtatttggttacatgagtaagttctttagtggtattttgtgagattttggtgcacccatcacctgagcagtatacactgaacctgacttgtagacttttatccctctcctccttcctaccctttccccgagtccccaaattccattgtgtcattctttgcatcctagcttagctgccatttatgagtgagaacatatgatgtttggttttatattcctgagttacttcactaacaataatagtctccaatcccatacaggttgctggaaatgccattaattcattcctttttatggctgagtagtattccatcatatatatcgatatataccacagtttccttatccactcattgattgatgggcatttgggttggttccacatttttgcaattgcaaattgtactgctataaatgtgtgggttcaagtatcttttttgtataatgacttatttttctctgggtagatacccagtagtgggattgctggatcaaatggtggttgtacttttagttctttaaagaatctcacactgttttccatagtggttgtactagtttacattcctaccagcagtgtagaagggttcccttttcactgcatctataccaacatctatttttttttaaatttttttattatggccattcttgcaggagtatggtgatcatattgcattttggtttttatttgtatttccctgatcattagtgatgttgagcttttcttcatgtttgttggccatttgtatatcttcttttgagaattgtctattcatgtcctaggcccactttttgatgggattgtttgtttttttttcttgttaatttgtttgagtttgttgtaggttgtggatattagtcctttatcagatgtatagattgtgaaggttttgtcccactctgtgagttgtctgtttactctgctgactgttccttttgccatgcaaaactctttagtttaattaagtcccagcagttcatctttgtttttattgcatttgct

SEQ ID NO: 49708 - DNA, 1048 bp, Homo sapiens
aagataggaccctaatcccttctagcttgtagggtttctgctgagaaatctgctgttaatctgataggttttcctttataggttacctgatgcttttgcctcacagctcttaagattctttccttcatcttaattttagataacatgaggtcaatgtgcctaggcgatgatctttttgcgatgaatttcccaggtgttctttgagcttcttgtatttggatgtctaagtttctagtaaggcttgggaagttttcctcaattattcccccaaatctgttttccaaacttttagatttctcttcttcctcaggaacatggattattcttaggtttagtcatttaacataatcccagacttcttggagactttgttcattttttaaattattttttctttgtttttgttggattgggttaattcgaaaaccttgtctttgcattctgaagttctttcttctgcttgttcaattctattactgagaattttcagagcattttgcatttctctaagtgcgtccattatttcctgaaataatttccttttgatcgttttttatttatgctatctatttcactgaagatttcttccctcgtttcttgtatcacttttttgatttctttaaattggacttcacctttctctggtgaatctttgattagcttaataactgacctgaattcttttttaggtaaatcagggatttcttcttggtatggatccattgctggtgagctagtgtgatttttggggattgttaaagaaccttcttttgtcatgttactagaattgtttttctggttccttctcatttaggtaggctctgtcagagggaaggtctagggctcaaggctgttgttcagattctttcgtcccgtggggtgttctcttgatgtagtactctcccccttttcctagggatatggcttcctgagagctgagctgtagtgattgttatctctctttggcatctaggcatctagccacctagcaggctcagtctggaactgggggttgtctgcacagagtcctgtgatgtgaaccatctgc

SEQ ID NO: 49709 - DNA, 1050 bp, Homo sapiens
ttctattctcttcactgctctttcttgttccacatgaggttatatttctttatttcaccccacagttaacctcagagacctggtaatccatatgaccccacagctatgcctcatgcccaaagggcaggatttcatctctaccatcctcttcctcaatgtgaagggctgttgagtgagtacccttagggaacaatactggggaagtataaaattatcatcctccaaataagaagctgctggttccattgtgtgggagggtaggagatagaacctcattgccattctgccagttatctggagagggtcttagtatctgtgagccagagcttgatcatctgtgagatggaactcaccacactttcttcacactgctgtcctgatgggtaaatggaataaaccatatatttttataccattatcttagtccatttagtgttgctataaaggaatatctgaggctgcataacttataaagaaaaaagtttatgtggctaataattctgatggttggaaagtttaagattgggcatctgcttatgatgagggcctcaggaagcttccactcatgatggaaggccatggggagccaacttgtgcagagatcacatggcgagagagggagaagagagatgggaggtactaggcttttttcaacaaccagctcttgtggcaactaatggagcaagcactcactcatcacagcaaggatggcaccaagactttcatgagggatccacccccatgacccaaacacctcctgttaggtcccacctccaacattggggatcaaatttcaacatgagatttggaggagtcaaacatccaaattgtagcaaacacttattgaaattatttcttctgaaaatgatgtttctgagatgtcgttaaataaggtgactttggggctattttgatattttggccacgctgccatgactgttcttgcacacatgccagggactctctgcagtgcagacttgagagggcagagttgacggggccatgcttgcttctctcatatatgttccccattgtctctgcaaaggcagt

SEQ ID NO: 49710 - DNA, 1051 bp, Homo sapiens
atgtactcttcggatgtttttctctgcatgtagtatactaacttacttttattgacacacacacctctaaatccatgttaatctatctatataaattattttacataaatccatgcactacattataatttatgacttaactggttgactaaatatgattctgtttcatattttttgttttggtgtattcccaagtgttggaatttatatcatttttctgagatttatatattgtctcttgatatgattggcttacttctcttgttcatgaatatttcatatttggaggatataaagcatgattgaatatgggttagaaataatttctcccaaatttttatatttctttttattttctattttggctatacagatacaattctatactttataattttttactatttaaaaagcacttcagcacattgttttcgaaagaacaactcaacaataataatgctttaaggctgggtgcagtggctcacacctgtaatcccagcactttggggggccgacatgggcagatcacttgaggtcaggagtttgagactagcctggccaacatcaggaaaccccatctctattaaaaatacaaaaaattatctgggcttggtgatgcacacctgtagtcccagctactcaggaggctgaggcaggagaatcgcttgaacctgggaggaagaggctgcaataagccaagatcatgccactgcactccagcctgggtgacagagcaagactccatctcaaaaaaaaaaaaaaaaaaatatatatatatatatatatatgcttgaagttatatcaaatgttagctgacaggacagaagggaaaaaatgttttgaataattctaggtttagaatcctggaacaatagtttataaggtagtttccctagatcaagttaccagtcttttaatttgtgttccctgatccaactaatgggcataattattggtactggatagaattgttgaaatcaaaatgagatgaaatataaaataccctttatatagtagttgtgtacctgttaatagactaccatccaggttc

SEQ ID NO: 49711 - DNA, 1028 bp, Homo sapiens
ttaacagagcatgtagaaaactctttttggtacttcgaatatgaaggagaagaaggataagggagggagagacagagacagggagaactgtatcctgtagctgaatgggtgataagggggtccaaggagagattttttttttaaatcttcaatttcttgaaacttgaccaagttaaaagctaatgtgaaaaaaaagctatctcagaattaacccttgaagttgaccacatgtttatttcccttatgcttttatatcacattggagctcatgagatacctctgatggaatagaatgggtttgagctcaataggtatttagttattacctaatgaaagaatagacattgtgtgtgaagaaatgctagtaactcttggatttttgtctctcagggaggcagcagatggctgaaattctgatccgatgtggctggttaatgcatgatctgaaaacccctgcactggtgattttgggacagatctagaatataccaataaatatattaacataccaagtagtctaggagcagccactgggcgaacaccaaaccttgcatccctgctgctgtctctgagctcagcaggtaagttcaaagacatgcctgtcttcccagtgtggggaactaaatttgggtcatctcagaagcatgatgttgggcagctcttacgagcttctgataacacccacgaagcagagaaactactgtctacaaaactttgaactcaaggcatgtcacagggacatttgctttcttcaaatagatgtctgtgttctcataagggggagcaatgagaaatgatttttcacaatgcctgccttagcactgaggctcagccagcccctagtgctgtgtcccatttaaaggccatttaagtcccaccccatgccatatactctcaagaggtttcctcatatacccatcagacagctatgtaaggatggtatggtcagtcccatttcacagatgactaacctcaggctcacagagcctaagtcacctcttcaggtaagtggcagggtttgaatgaaa

SEQ ID NO: 49712 - DNA, 1029 bp, Homo sapiens
tatttagacacaacataacatacatttgcacagattgacaaaagtaatgtgtattatgttcattaatttgaaatagctattactgtattctatttaatggtgaaggaagtagttaagtagaaggacacaaaacaagtctcaacaaatttaaaaaatcaaaatcatatcaagtatgttctcagacaaaaatgtaataaaagtagaaatcaataacaagaggaacctgggaaactgtacaaatatgtggaaaataaacaaacagcatgctccagaatgaccactgagtcaagaaaaaaaatatggaggatatcaaaaagttatttgaaacaaatgaaaatggaaacacaacataccaaaatctatgggatacagcaaaagcagtgcttagagaaaaatttgtagcaatagatgcctacatcaaaaaagtaaaaagattccaaataaccaatctaactgttcacctcaaggaactaaaaaaggaaaaaccaaatcccaaatgagtagaaggaaggaaacagtaaaggtcagagccaaactaaacaaaatagaaactaaaaatatacaaaattttaatgaaacaaaaagttagatttctgaaaagataaaaaattgataaaccatcagctagactaaccaagaaaaaaaagagagaagacacaaataaacaacatcagaaatgaaaaaggagacactacaactgataacatggaaatacaaataatcatcagagactattataaacaattatataccaccaaattggaaagcctagaggaaatagataaattcctggacgtataccacctaccaagattgaatcaggaagaaatagaaaacctgaacagaccaatagtaagtaatgagattgaatcagtaataaaaattttccaacagagaaaagcccagacctggatggtttctctgatgaattctaccaaaccttcaaaggagaactaacaaaagttatattcaaactactgaaaaaaaattgaagaggagagaattctccctaactcattttatgagggc

SEQ ID NO: 49713 - DNA, 1890 bp, Homo sapiens
cctacttgaaatagctaccaaaaaaaaaacctaggaataaatttaaccaagtaggtgaaagacctctacaaggaaaactacacaacactgatgaaagaaattgaagaggacacaagcaaatggaaagatatcctatgctcatggcctggaagaattaatatagttaaaatgaccatactgtcaaaggtaatctgcagattcaatgcaatccttatcaaagtaccaatgacattttttgcagaaatagaaaaaacaatcctaaaattgatatgcaaccacaaaggaacccggataaccaaaccaatccagaccaaaaagaacaaagctggaggcatcacactacttgacttcaaaatatattacaaggctatggtaatcaaaacagcatggtattggtatgaaaacagacacaaagaccaatggaacagaatagagaacgcagaaataaatccacatgtttacagacaaaactgattttcaacaaaggcaccaagaacgtacgttggagaaaggacatcctcctcaataaatggtattgggaaaattggatatgcatatgcagaagaatgaaactgcatctctgtctctcatcatatacagacatcaactcaagatcaattaaagacttaaatgtaagatctgaaactataaaagtactagacaaaaacctgggggaaacactttagtacattggtctaggcaaatattttatggctaagaccttaaaagcacagacaacaaaaccgaaaatagacaaatgaccaatatgtgtgtccaccacagagtccagggcctttcctctgcaacaccttgtcagcgtcagtactttcttcattcctctgtagcctttctcacctccctatacttggggagtctaaatggcactactttatgagtgtctgtagagcaatacttatcaaggcctacataggcacacacgctttgtgctagcatttccttttatatgtttatcttcaggacttagtgaagaatgttgattaaaatctggttacaagtactgccatcctgatatttcccttttttcacttttgggcttgaatttagaaagggagacgaaatgagatgcaaagacacaagccagaaggaagtaaagggaaatgtggttgtcagcacacacatacactcacactctctctctcacacacacacactcactcctacatcaaccaggttctgttatcacaatactacaattctctcaacatagttgttgggctccaaggggacccattcagctcaccagagcaaatagccatgggaactctgccctggattacaaccactaccagtgcacagactctgaaaagatgctatccatgtcgtgtagataatagggaatattggaacactctgaataatatggggttgtgaaaattgattatgtcacatccacagtatgaaatttcagaagagagcaaaaatgagttatattgaaacaatgatgagagatgattttttttgcctatcagattagtaaagattcacattatttctaatatgagcagaaaggaactttcacactggaatattagtagtataatgcttttattaaaagtattttgatttcagataaatgcatgggggcaagatggcagataggaggcaggaccagcttgcagctcctgctgagatggacagagcagcatgtggagactcgtactgtaaacctttgctccaagaagtactgcaggaacataccaggaaagctgagagaatccacagaccctttgaagaaactggatcactgttgcaggccccctgagatgccgaaaaactgtgagtctgcttgctttgtcagtggggaagctggtggtctgggacaagttctcagccctggtcactggttgccctgaaatagactcggtgctg

SEQ ID NO: 49714 - DNA, 1085 bp, Homo sapiens
ctccattggaccagacaccacacccccatcccccacagcagtcacagcaagccacacccaaggagaggctgagctcagccatgcctatccctgcccctaccgggtggtctttctctacacaccctggtagacaaagaccaaggtcataatctcttgggagttctatggccctgcccaccgcctgagaaatctgaatacttaaccagctgtccctagggaaagttggcatcctctctgcaggaccacaactgatgcactcttgaaatcaccacctcctagctggaggccaaccaacacaaaactagcacactaaaccaaaatacaaccaaggacccttacagagtccacttcactcccctgctacctccactggctgcaaaacctgaagatggatcacatcacaggactctttgcagacactccccagtaccagcccggagcccagtagctccactgggtggctagacccagaagagcaaaaacaatcatgacactttggccctcaggaagccgcatttataggggaagggggagaacaccacatcaagggagcaccccatgggacaaaagaatctgaacagcagctcttgaattccagatcttccctctgacatagtctacccaaatgagaaagagcgagaaaaaaatttctgctaatacgacaaaacaagtttctttaacacccccgaaacattgcactagctcaccagcaatggatccaaactaagatgaaatcttggaatagccagaaaaagaattcagaaggttgattattaagctaataaaagaggcagcagagaaagatgaagtccaacttaaataaatcaaaaacgtgatgcaggatatgaaaggaaaattattcagtgaaacagcataaattaaaaaaaaaacaattacaatttcgagaaatcggggaacatatagagaaatgcaaaacgcactggaaagtctcagcaatcaatcgaacaagcagaagaaagaacttcagagctcaaagacaggctttcaaattaacccaatccatcaaagacaaagaaaaaagaattttaggctgggtgtggtggctcacgcctgtaatcccagca

SEQ ID NO: 49715 - DNA, 1026 bp, Homo sapiens
atatgtgggcatcataaatataatcaggtcacaattacagtgttttttgtttttaacattttgaacaatgaaatttccacatttaaaacactagggaattgcaaatttataaaacaaatatcctctatctccctccaaggcaaatatactgatttattaaataaatctttttaatatactatttttataccacagcatatgaatgtgattcttagtcaataaatgtatttctacactatcattttgtgactagggtcacagattttcctgatttacaaaacattatcttaatgactttgtcacattattaactttttttattgtttaagccatatgaaacataattgaaatgtatattagaaattaaaaatattctgtctaaatcttctccatctccataatacaaagatggcctgtattaatttattcgtatctattctccagatcttttttctctccatgtagtacactaacttatttttagccacacacacatacatataaacccatgtagagagagatagatatatatattttttcacaatggaaccatatactacattataatttatgactttgttgattgtccaaatctgattctttttcattttgtgtgtgtgtgtctacaagtgttttggggagattaatattggtttttattgcattgtctcttgatataattgacctatctctgttgtttaagagtacttcatacacagaggataaaaacctagattaaatatgcatacagcatttatatattaacatataaaagctaccttatctaacatttgtagtgtaacttgcgtgtttaactgtagtgggtagaattatgtccccctcaaaacatgtcccaaacctaacccacccaaactttatttggaaatagggtctatgtagatataattaagtgaaagatctccagaagtaaatatcctgaatgtaggttgatgcctaactccaatgactggtgtctatataaaagaaagcagagggagatttgacacatgcaaggaagaaggccat

SEQ ID NO: 49716 - DNA, 1184 bp, Homo sapiens
tctgtggagtcagtagtaatgtcccttttgtcatttctgattgtgtttatttttatcttatctctttattaatgtagctagcagtctatcaatcttatttattgttttgaagaaccaacctggactaattgaccttttgtatgtttttgtgcaaataagttttagtcagttcagctctgatttggttattttgtgtcttctgctagctctggggttggtttgctttcgttcctctagttactctaggtgtaatgtttggttgttcatttgaggtcattctaactttttgttgtggacatttagcacttcaccattaaaactggtttagctgtgtcccaaagattccattatctgatatgttttatctttgttctcattagtttcaaataacttcttgatttctgccttaatttcattgtttacccaagagttattaaagaacactttgtgtcaggagttcaagaccagcctggccaatatggtgaaaccctgtctgtactaaaaatacaaaaaaattagctgggcatggtggcacgtacctgtagtcccagctacttgggaggcagcggcagaagaatcacttgaacctgggaggcagaggttgcagtgagccgagatcacaccactgcactccagcctgggcgacagagactccgtctaaaaaaaaaaaaagaaaaccaccaccaacaaaaaaaccactttgtataatttccatgtaattttatagttttgagcaattttctgaatactgttttctatttttattctactgtaatgtagtctgagaggtctgagagtgtgtttggtatgattttggtttgtttgaatttgataaggctttttgtttttgttttttgtttttttctgttttttttgtttttgtttttgttttgttttgttttgttttgttttttttgagatggagtctcactctgtcacctaggctggagtgtaatggtgctgtctcagctcactgcaacctccacctcccgggctgaagtgattctcctgcctcagcctcgtgagtagctgggattacaggcgtctgccatcatgcccagctaatttttgtatttttagtagagacggggtttcaccatgttggtcaggctggtcttgaactccttagggaatccacctgccttggcatctcaaagtgctgggattacaggcatgagccacca

SEQ ID NO: 49717 - DNA, 1084 bp, Homo sapiens
gggtaaatgagaaatcctatacagagaagatggcacctagagaaatcctatacagagaagatggcacctagtcttcaacaaatattcatcctggcccacttttcttctccttcccagagaagtgatgactgtcatctaaaccaaacagcataactaccacagagaccagctggtaatggagcaggaagaagtagcatatacttacatttagtttataaatgaagctttggggctatttctgtgatgcaggatggctttgccaaggaatgtgggaagagggaaaagatcatcaaaccatttctttaattctgtgtcatttttgccccattatttgagcttctatactgatattggaaaaatagtttcctatggagtgtcaaataaagaaagagtgcagataaagaggagagagaagtcacatgcccttgaccctcataccattaccacctacaggactctgaaccagaatttcatctgcaccagtgggtaattcaaagtgggaggagttgttgaatgtgtatccatgaaggcacaatactacaaacgtgtaaaactactaggttttaaatcctagaatgtcatggtgtataaaatattgataattattgctttggttttgaattaggggaaaatatatcctcgtatacttggaagtggctccctcagtatcttttattcttgagcttcagggatattcttcattctaaatgtgtatctctttcctgtgggtggggtaaggaatgcttgaatgttcctgacaatgtttttgtataattgcaggagcatttgatatttattacagttataaatacataagaaatgaaataaacagcattactctaaaacaaaagagaatacctgctctcaaaatatcttgagtatttcaaagagaatacctgctaatgcttatatctgtataatattctttcacaaattttcttatgcaggtacttataaatttatgcagaaatgaatacatttatatacttatctacaaaatataagatctcattctacatttagttttataacctgcttgtctcactaaaaccatacctcaaaggtcattggttgtgagtaaata

SEQ ID NO: 49718 - DNA, 1024 bp, Homo sapiens
ccaggagaaacagcaaatgcacaggctctaaggcaggaaagtcctcagcccatttagaactaaaggaaagcagtgtcgctggagcttagcaatgaagggaaagagtacctgtgtcagagtagtggccaagagccagatcttacagggcctgaagggttttatttttttttaactacctgaatgcaacagaggcatttattggatataatgaggggaggtgtatgctctaattatcttgtaaaatgttctggctgggtgcaatgcctcacgcccataatcccagcactttaggaggccaaggcaggcagatcacgaggtcaggagatcaagaccatcctgtccaacatggtgaaacctcatctctactaaaatacaaaaaaagttggccgggtgtggtggcacacacctgtagtcccagctactcaggaggctgacacaggggaatcgcttgaacccaggaggcagaggttgcagtgagccgagatcgcgccactgcactccagactggtggaagagtgagactctttctcaaagaaaaaaaaaatgttccttggattgccatatagagactggattggagaagggtaagaggagaaaccgaaagaccagttcactgattattcagtggcctaagatctgtgatagatacaaaacaattatgaaacataatttaaggcatcatggggtgtgggtgggagcagaacatgggatgcctgtgcaggtccactgttgcatgtaacaactgctggggaaaaaaaattgaaaaattatggggtcctgtcagcccaataaaagtctgagaaggggagtatctgtagagccagagaagttattgtgaggaagatgaatctgggtctgatctagaaaggtggattggattggagggttttttttttgtttgtttccctttgttgttgttgtttgagatgttctggaaagggctagtgaagtaaagagagtaacctggcctaagaagtgaacaaacagtgcccagtggaagcctttgcaaacctcagcaagattc

SEQ ID NO: 49719 - DNA, 1072 bp, Homo sapiens
gccatcctcgtcctccattttgctgcctgcggaagcctggagatggatctacagggaaaatggtgggctttgcggaagggaggggctcggattgagggcaccccacagggcatactggcttctcaggtggaaaaaaatgaaatgttagagtataaagtcaagtccagggctctgaattttaaaaggtgcctagtagggcctctgtcctcagtgcttatcagtccaccaagaattcagcccattttctctctcttgtctcctaggagtaatggagtccaaagaggaactagcggcaaacaatctcaacggggaaaatgcccaacaagaaaacgaaggaggggagcaggcccccacgcagaatgaagaagaatcccgccatttgggagggggtgaaggccagaagcctggaggaaatatcaggcgggggcgagttaggcgacttgtccctaattttcgatgggccatacctaataggcatattgagcacaatgaagcgagagatgatgtagaaaggtttgtagggcagatgatggaaatcaagagaaagactagggaacagcagatgaggcactatatgcgcttccaaactcctgaacctgacaaccattatgacttttgcctcataccttgaatcctaaaagttttcgctgaggttaatgtgaacactgctttacaagcttgtatttttgtgatttactttttctgtaagccttttggggtttacacttaccagtttctaatggaaattagaattctaattgaatattgttttgtctcagcctaaaagttacggtcagcatggcaattcacctattttaggaaaaatactcttttcataatatgaaatgcataaagcagttcaaaaagcagtctgtattccatcatcttcctttttcattccagtccttatttttgtaagtattacttttcctcctccggctacctggactcaaaatctcagttgtctttgacagtttttttcttgtccctgaccaaaaaagaatgatcatacccagaattcaatgtttgatattttaagaatgtatgttctagtgtttttcagagtgagtct

SEQ ID NO: 49720 - DNA, 1117 bp, Homo sapiens
ttctaaggtgggaaaaaacgaaattaaaaaatcctttgatatcagggctctgaatcctgctggtcagagcaccaagcattcagtctctctccttgcctttgtcttacttgtgttcaaagaaaaacaaccagaaaaaaaaaatctcatcatggcaaatattcaccaggaaaacgaagagatggagcagcctatgcagaatggagaggaagaccgccctttgggaggaggtgaaggccaccagcctgcaggaaatcgacggggacaggctcgccgacttgcccctaattttcgatgggccatacccaataggcagatcaatgatgggatgggtggagatggagatgatatggaaatattcatggaggagatgagagaaatcagaagaaaacttagggagctgcagttgaggaattgtctgcgtatccttatgggggagctctctaatcaccatgaccatcatgatgaattttgccttatgccttgactcctgccatttatcatgagattaatactgtgattcccgctgttttctttttccttgcattttcctaatatgcctttactgatccgtttgctgtgaaccctatgttatttccatgtgtcaagtgggtcttgtgttgccagcttctatttgaagattgcctttgcactcagtgtaagtttctgtcagcagtagtttcacccatttgcatggaaaaatttaaagctaataaagcaatttaaaaagcaatctatacatttattgtctcattaaaaatgtatacttacatataacagatgaactaaaaaaaaatctgagattaaatacactagagtgttaattggtgaacatttctgtgtgttaactaatcccagcactttgggaggctaaggtaggcagatcacgaggtcaggagatcgagaccatcctggctaacacggtgaaaccctgtctctactgaaaaaaaaatacaaaaaattagccggtcgtgatggcacacgcctgtaatcccagctactcgggaggctgaggcaggagaatggcttgaacccggaaggcggaggttgcagtgagccgagatcacgccactgcactccagcctggacgacagagccagacagtctcaaaaaaaaaaaa

SEQ ID NO: 49721 - DNA, 1029 bp, Homo sapiens
gatagaattaggcttccctcttttccactttcccctggtacttatcaaccttgatgtaacatttaaaatcatagatgtctcagaattataatattagatttagaagtggtcttgttgatcatgtgatccgacttcttcatgttatcgagggcaagagctagaagaatccaggtcttttaatttgccttgacttgtgattatgtatgtatgtattttttatcctctacctgacatcactgggcagaaatagggtgttattcatctttgtgttcttattcatgatacttaataaaatctattgcacatagtggatatacaataagtatgtttcaattgacttaagatcagagggatggataaaatagaggtaccattcatagtattgtactctgtaccagggtactatgccaaagttttacaagaattacctgattgatcaaacaatcctatgagataagcaccatttgtagctttatttgcccaagacttcatagccagtaagttgtagaatctggacaaaaataaaattcctgtggctccagattctttgttcttagtcattgtgctatagtgcaaaacaacaaggtgggaactcaaacattttgggtttagaatacgactgatggatgaatttggcatgaaagactaacttttatttcctggaggacatagtagctgggtttgggaagatagtttgggacaatattgtagaaggctctgaatgccaagcatggtatgagaagttacctcccttccctagctctccatctgcaccagtctagatcaccgtatgaggcgcaactcaaacagtacttattgtttgaagacttccagaatcttccaagtcacaatgaatttccccttctcccacagcactttgttcatacctttgttataatacataatattactttctttcttttatgtttttttgagacggagcctctctctgttacccaggctggagcgcagtggtgtgatctcacctcccctgggttcaagcgattctcctgcctcagcttctgagta

SEQ ID NO: 49722 - DNA, 1084 bp, Homo sapiens
gtacacagaccagtgacactataaagcaatcacataaccaagcctacaaaataaccagctaacatcatgatgacaggatcaaatccacacaaatcaatactaaccttaaatgtaaatgggctaagtgccccaattaaaagacacagagtggcaagccagataaagaaccaagacccattggtatgctatcttcaagacacccatcacacatgcaatgacagacatagactcaacataaggggatggagaaaaatctaccaagcaaatggaagacagaaaaaagcaggtgatgcaatcctagtttctgacaaaacagactttaaaccaacagagataataaaagacaaagaaggacattacttaatggtaaagggttcaattcaacaagaagatctaactatcctaaacgtatatgcacccaacacaggagcacccagattcacaaagcaagctcttagaggccttcaaagacacgtagacttccacacaataatagtaggagacttactgacagtattagacagatcatcgaagcagaaaattaacaaagatatttaggacctgaactctgcattggatcaaatggacctgatagacatctacagaactctctactgcaaacaaaagaatatacattcttctcatcatcacatggcacatactctaaaattgatcacacaattggaagtaaaacactcctcagcaaatgcagaacaactgaaataataaacagtctcttggaccacagtgcaatcaacttagaaatcaagactaagaaattcactcaaaacgatacaattacatggaaatggtaattgtattacagttccatgaaagactctcctgaaagattttaggttaaataatgaaattgaggcagaaatcaagaagttctttgaaactaattaaaacaaagatataacataccagaatttctgagacacagctaaagtagcgttaagggagaaatttatagcactaaatgcccacatcaaaaaattagaaagatcttgagttaacaacctaacatcacaaccaaaagaactagagaatcaagagcaaacaaatcccaaagctagaagaa

SEQ ID NO: 49723 - DNA, 1027 bp, Homo sapiens
tttgtttgtaagttggcttgcaagcttatcagtcattctcaaacaggagcttaacttacttaggtgaacagttcatgatgacgcctttaagctgctagaccaacccaaactccgaatttgcagtttctgacctttcaccttgaacctgtgccctttctaccctctattctccatctccttttggttcttgtctgactctttagctgcatatgtaaagagcacagactttgaaacctgagctcccgcgttcgaatccccactgtaccactatctaaacatggcatcttgggcaagtgattcaagcatgctattccttggctttttcatctgtagaattggtataataatagtacttacctccagagttgcagtaaaaatattaaaatttcacatgtgaggagcacctagaacattgcctatcatgaagttaagcagtatattgaaatataaattataatgattgaatttgatctcacctaagacctctggctaataaataataaatgataataatcatttcacctgggatagaggggattgccctgttctctccaggctgaggctgtaatacctgattctagggactgctgatatggaaattactaccactctggctggagtcagaagagtatattaaagagtctctttgtactgtcctaaaataagcaaaatccaacgtttgcagttctatggaccacgcactatgataagtgctttaaacccattttgttgttattgcttcatcctcacaatagccctttgctggttcttaagtgtattaccctttcctgtcctctttgtctgcttaaagcagctaagaaaactcagattagtcagattgcatataaatcaataacttgcccacggtcacagagctaataacaaatagagccaagacttaaactcagatacattcagatgtgtcttggtatttctcaaatatcactgagaaaaaggccaccataaattcttttcaagtgctctctctcccccaactccccaccccaagaattgcctgaatgcccat

SEQ ID NO: 49724 - DNA, 1029 bp, Homo sapiens
atttgcttaaaatcaattagctaggaagtgacagagcaagaatttgaactgtctgattccagagcttactcataaccactatgctgtatgctttgtttatggatgaagattttactttagtcctaatttaaatactactttcttttaaaatagtgtactacaaaaattttcagacagctacaaaggtagagagaaaagtgtaatggaccccatgttcctgtcacccagcttcaacatttattcatatacggcatcatgcttcatctgtacctctatccactccccaacccctgccttattttgaggcaaatcctagacatgtatcattcataaatattttagtatatttccttaaaaggtaggggctcttttaaaaatacaaaaaacctcacattccttataaatgttataaatatgtcctgttaattatatcttaaaattgtatggattctgtagttctcttgatttctttcgtgttgtgtttttgaaggtggaacctaacttcttgtggaacaagtgttgccagctcagaaggcagtgaggagctgttttcatctgtgtctgttggagatcaagatgattgctattccctgttagatgatcaggacttcacttcttttgatttatttcctgaggggagtgtctgcagtgatgtctcttcttctattagcacttactgggattggtcagatagcgagtttgaatggcaggtaagtttttttgtccttttcttgacattgttactaccgaagtagaagtataaacttttcttttgatattttcatctctacttcaaagtaaatttctctaatgtttatccagtcctggagattctctgacatgttttaaggttaagaattggatgggatatctttatttttgctaatgtacctttttgatgctatagatatccttttgtagatttttatgttatttaatacttgcgtaatattaccattattatatattatcggtacctttctgtgcatgaatccaagcaaagttacacttcctaccctataataaata

SEQ ID NO: 49725 - DNA, 1070 bp, Homo sapiens
aacttctctataaattgctagaaatatacagagcaatgagatatagaaaacaccttagcttgttggttattaatagagctctaattttaactgtgaaatcatggagtttctttaaatgttttcctagagtgtttgttatcatgaacattagaaatagcattattccttttcttctaccacatgtcttgaacattcacatgggttaaagaagatggaaactgatactactgacaatcaagctgctttctgactttcataattttctttatattgtggatagcattttgaaggtgaccgtgattctgtaggaagagctgtaatcaatatttttcaaactctaagagtacagaggttagtaagatttcttttttttttactttttgttacgtcaagtagcttattaagaaaaagattcatgacttaaattcttaattctcagttgatacaaaggcttataatcatgtgttttaaaattttgatttcattttcgttccttgaaggttaaagaatggaaactggggataaaaattaatacactgcagctttgccaaggtctgtgatatggttgtaaccttttaaagactactaaagtcataatttgaaatttttactaaaataaaacatatgtgtctatggttttcaattggagtagtctttcttactttcccccttcccctctttggttctcctaaccagcttagaggacccaaagagagcttagggatagacaccagaatactctgtggaggtggaacaacttaacctcactgttttcccttccaagtataggaagagcaaatagagcatagtaactgtatctaaattctctacctgctcttagcaaaagcaaaatcccacagaatgattgcctgctgtctttacctattcttcaaggaaaacaggccacttttggagaccatagagcaccatttatctgtcaaatacttggaaactatttacttaacggtcatcagtaaaaaaccctaaacaaggtcatgatataatttaagaccaattcccctactctcccaataatcacatagtcttattactttcaatttaacttgagt

SEQ ID NO: 49726 - DNA, 1025 bp, Homo sapiens
caaattgttctgacttcggccgttggaatttctttcaggttggctcctgcgccctttcaacaagccctctcatcttttcttttttatgacacccttgttttcctcaccacaagatgtgccaggcccactgtctatcttcccttcaaaaccatcatctatgccttacagtgtgtttgctattgggatatcactgcttctagtccctcttggtgcatatagctaggaaatatatgtatgtactaacttatgcatacacacacctatgtttatttctgtatctgtctgaattacattaagaaaaaaactcatgagtccatattgatacctacaattccaacccagcaccgaaagattcatgttagccttgctcctttccttgtttaaacctttttacttgagaaacctggttctcattatctacaaatatatataaatataaatatatatatatatacatatatatactagattttcaactccagtatactgataaagtagtttcagaatccctaagccatatacccttatgagaaacaaatttatgaactagagtagtgtttgtgtatagttttttgtccttagccctataatatttcatccaaaccctgttttccaaagttacttaggtcagtttctttcttccccatacccttcatcatgtgactaatttgtaatacagctagattcatttgtcacagtttgtagtctatcctctttcccccaaaatcttggttgcagtttaaaaaatttacatgcattaaaacccacttatgatgttatagttctatgggttttgataaatatatgtagtgtgtgtccaccaataccatacaggacaccatcaactccccaaatccctcatactgccccattagagtccaacttttccccccacccttcacctatattccattcatatggtttaagtagtaggatgtaccatagtttaattattaacttgctgaaaggcctgtgaattggttcaccttcttgtctattatgaataaagcgctttaagcattcat

SEQ ID NO: 49727 - DNA, 1053 bp, Homo sapiens
gtttgtctgaaggccatgactaaggctgcagcctttctctgatctcgcttttcctttttggcctgttcctcttggtccctattatagaacaccgaggttgccaggtttaataatgcctccagattttattcagggtccagggctcacttttggaggtttctcctgatacctggggctgattgggtaataaaattatctttttggatcagttgacccttgagggagttgggtgacaggggagtatattttcttaaggcctcccatagccgctggagaaaggcagaaggattttcttcctttccctgagttatggtggacatcattgagtaattcatgggctttttcctaattctccttagtccttctagaacacaggtcaacagatgtttgcaattccagtccccatgatctgagtcgaggtcccagtagggatccattaccggggatggcttgctgaccagtagggaatttgtccctttcttcagctgtcattctatcatttacttgactaagataccagatatcttcaaactcttgggctgcagctaaaactgcattgttttcattaaaggccagggtttgatctaacaatagcatgacatctctccaagtgagatcaaaggtttgctctaggctgtgtaggacatctatatacctatcgggattgtctgaaaacttccccaggtctgccttgatctgctttaaatcagagagggagaaggggacatgtacccaggttgggccaaattcccttccccctacagcttgaaggggacataaccgatagcccaggggtttttgtggtcccttggagatttctttgcttgcttccttctgggtgggggagattagaggaggcttatcattaataggaaggggagctgtagaaaggctagtatatggaggtaagctgagaggttctgctgtgggatgtaaattgcatgctttgcatagttgtggattctccttcaatgaaaagaaagcttgggcataaggtatttcactccatttgccctccctgttacagaaaaggtcaagctgcaggatagtatt

SEQ ID NO: 49728 - DNA, 1100 bp, Homo sapiens
gtgtcagtgattatgtggaatgccctgtgtcctgagtggtataaaagtttgcgggttggtttagttcttctgcttcaagactattctgttaaaaagagttatccattcagaatacagcctgtccccgtggatccacagatcaaactaatttctacaatgggttaagtattccatgaatttgttgtcttatcgctgttttgtttatataaatttgcaatgtaccatattaggaaaaaagaccacaaaaattactgaagctgttagaacctatgaaacctttaaatttatttgtccataaaattttcaagcaatcacataacctaataaatatacctatttattattttatttattaagaaaaattatctgagacatttattgttgattgaagaatgagctccacttggattgtacttattttgttttattttatttttggtcatataatattaagttaataacgaatatattttgcacttactagtaggtgctatctaaaaagaacttctgttaactttttgaaataatttcagacttacataaaagttgaaagaatggtatagagaactcccatataccctttacgcatattcaacaattactagcatttacctttgctttatcattatatatctctcttcatacatatacatatctttacacacacacacacatacacacatatgtatgtatatatattccttgtgatccagtaagagaaagtggcagccatcatacatacccctttaagcctaaacacttcattaatatttcagtgtatattttctaataacaagagcattctattacataatctgagtacaattaccaaaatcgggaaatttaaaattgatacaatactaatacctaacctatagtcagtattcaaattttgccaattgctgcaatcttgaaagggcttttcctagttagtattggtatattgacatcacaaatatttttggaccattaagattaatatattaaataattgtttttagatatgaccgtgattttttcactttcatttgtaagaattgtagattacattgcttaagtttaaatattgtttttggtttataatacctttattctgaacc

SEQ ID NO: 49729 - DNA, 1029 bp, Homo sapiens
ttgtggtttttgcctataaaagtaatggcaaaaaccgcaattccttttgcaccaacctaatatttttacttttttgtttgtttcctttttgtgtcatttatttgggggcagactaggccaataatgattatagcctcttgacatttcccaaggccctcaaaacttggtatcctgtttttgcattctgtgtaatttgaggctattgtgggtgttttaaatttctaggtggtatctatgactatattaatttcctaccttttgtccaggccagtactacaggaaagctttcataggaagttttctctatatctggcatagtagtcttacccaggttctataactcttctagaataaatagtttagtattatagaagatgccagttctggaatattggcacaatcaagacaagttaatttttcccatgagtttatctttttaaacactacgtccaggactactactatttatatggaaataagtgtttaatccagcttttcagatagtagtataagaaggacttttgtttgtcttccttttaaaaaatattttaatagcagatggattagattcaatcattttcataaaagcactgttatgattgaagttttgccagaactgttgattatgaaaaatgaatacactaaaattgtagtcttttatgagattaataattgtgaattagcctaaagtgttttctctaaattattggttttagaatgctaacagaccctcgacctctcaagcagctagagtagaaattcaagaaagaaatggtaaacggcatcaagatgatgagcctgtgaattctcagtatttccaaactacatctacaaatttaagtctgagcaataaaataagaattcttcaaggcccacacgctaatccgtaagtcatttgtattaagtatatgtaaagtatattttttcttttgggttatctctaccctgtaaaataagcaattatcgtagaagctgtattaatttgttagggcccccataacaaaataccacaactgagtgacttaaaca

SEQ ID NO: 49730 - DNA, 1080 bp, Homo sapiens
aaattctgaatagaaccagttgatttgtttttcatttgagactctttttataaggattggttatactcttcttatcctttatagagttgctgtacctcaaccaggagcttctgtacaaacaaagggaattaaaccgggcatgccaagcatcttcaaccgtatgttactatttgttattattatttatgaaaactttatgaaacattattctatgaagattactatttaattactaagcacaagtaatacatgcttagaatgtatactttgcatatagtaatattagcttaggtcactgtcaaaagtgtactgatcaatttggtatcatcccaaaagtgaaagtaattttaaacaaacttatacttaccagtttgtttcattagtaatagtatatctcttcaaatgtactatttttaatagaagaataagtaggaagtttaatttttaattgacaacaaatatggatagctcttaaaagtaaattgtatcttctttctttgctattgggttggctgatttgaactttggcctcatttctgaagtgatttcgtaatacaattttttctggtggggtgtccgtagagtagtttggtttaagtcagatcttatcaggtatcatctctctggattagactttttagcactttatttccttgctttgcttttggtgttattttgttttcatcctccacctagacaaaagtgatactgtcattttattgaatactaccttgttaaatttgatgtctcaacgaacctttccaaagtatttaaatatgacttttgttgattgttacatgatataaaattggagcattgtgaacaagtccattctaaacattttaaatctttttagaaacatctgtccttacctattagatttatgtgggttagttaataatagatttttattcatttctcctgtcatattctagactgattattctctataaggctgaatactttgtccaaaagtttcaatgagcactttagatgatttcagtaaaaaatataatttgcggacttatggagaaaaagattatttttcccagctaagcataatttgaattaaaaaaatgt

SEQ ID NO: 49731 - DNA, 1069 bp, Homo sapiens
ttctaattctagttctcctgccatttccaccacttctgcagttacttcctaccctaaagtgttgaacacctcaaagtcatctatggggtttggaatcaatttcttctaaactcctgttcatgttgatattttggcctccttccataaatcacaaatactttaaatggcatctagaatggtgaatcctttccagaaggttttcaaatttccaggaggttttcagttttcacttttgcccagatccatcagaggaatcactatggtagctatagccttatgaaatgcatttcttaagaattaagacttgaaagtcagaattactccttgatccatgggcttctgaatggttttgtgtttgcaggcacgaaaacaacattgaactccttgatggaactccgtcagagctcctggtcatcagagctcctgagtgaccaggtgcattgtcaataagcagtaatattttgaggggaatctttttatctgagcagtagttctcaatagtgggcttaaaatattcagtaaaccatactataaacagatgtgctgtcattgaggctttgttccatttctagagcacaggcagagtagatttagcataattcttaagggccccaggacttttggaatggtaaatgagcattggtttcaacttaaagtcatcagctgcattagcccctaagaagagagtcagcctgcccgttgaagatttaaagccaggcattgacttttcctctctaactatgaaagtcttagatggcatcttcttccaatacaaagctattttatctccattgaaaatctgttgttcagtgtagccaccttcatcagttatcttagctggattttctgaataacttgcagcttctacatcagaacttgctgcctcaccttgcacttttatgttatggagatagcttctttcttaaacctcatgaaccaatctctgctagcttccaacttttcttctccagcttcctcacttatcttagccttcatagaattgaagagagttaggttagggccttgctaggaattaggctttggccttagggaatattgttgtggctag

SEQ ID NO: 49732 - DNA, 1065 bp, Homo sapiens
taatttgatttgatgatagagaacaacaaaaattgagggggtctttcatctcaatttcgttccctttttgttttccataaaggagtgtcatatataataaataaatggcccctttgtttttcgtttttgttttgtttttttttcttgttttttttttttggtttttttgttttgttttgttttttagtgacaggtctctctatgttaactaggctggtcttgaactcctggcttcaagtgatcctcctgcctcagcctccaaaaatgctgagattacaggcatgagccaccatgcccaacccctaaatggcccctctgaaggagagaagtaatgaagaaggagactgtatttgttcagtttacttttagcagagattaacaaaagtttattttaggctcaaatttccaccaagagtgagtgatctctaatcatgaatttaatttaatttgaatttgtcactgaatataaaaagaacatatgtttaagagcttttagaacatttagaaaaagtagaaagaacgtaattacaaatctacataattacaacaacagagaaaacaatgtcactttagtattttacggtaaaagtttattttgaaagtgaatttagttcctcactttaataagaattttcttttgtatattcattttatattttgtaggtagtggtttgatttttaatgttacttaaactcttcctcattaatgtgtggtttttttttgcagtgaatgacttgatttgattagtttatagatcaattgtgtctatctccttgtgtctttaacaggtcgagcaaatataaatgctaatctgcaagggaaagccagaaaaactataagtgataggtgggagagtcagctgtggagagagaaaaagtttggcttaatagatcacctacactacagccgtgtttatcctgaaagtattccacggaaatttatgtttgaacacagaaagtttcttagtgaccagtataattctcagcctgcgaaatatgtaccaccagaaggaaggcccccaaaacttgatgattttaagagcgcccgaagccttggacattttg

SEQ ID NO: 49733 - DNA, 1050 bp, Homo sapiens
tctagctactatatcatccctgaccttgcattagtcagatatctttgagtccaaatggcaataagggaacgaatagtcatctccaaactcccctgccccggaatagcacctgtcctaaatgaccaaggaaacactctacatgtcatttgtgtgaccatgctgtcctttggatagtaagattccaatcttccatcagtaggggaaaccttttgaactgttatttccagcagtggtgaaaggttgcactggagtgtctactctttcaacaaataccatgtattcataaattgcaatactaggagtttagtctccagttttcaaacacaggttttttcagatctaaagctatctggaacatgttgggatcaaaccagcaaactcggcatcagcaccacatgctaacccactgaacttttaataatgtgtgaactttctttaacaggtctgaaccatgagatagcaatcgatgttgctttcctacccatgtattgtccagaagatattcgaacatctcaaatagacacactgttgacctccatgaattacagctgtgcatatccacaggacacaactggaaatgaccgattgccaggtccaagagcggttgcaggtaaaacaatctcagtgttcttttcactcagaaaaaaaaaaaattataaacagccctagccttaagattttattatgtaaacagttttagccttaaaatttagtgtagttttaattaaagggttatttggtaaatgttccccaagacttataaatgagaatatgtcttttaaataaattgaatagctgtttctactctaggctagcattaagaatattatcttataatacaatacaattccaagtataattatttcatcagacataagtggtatgcacatggaacagtacaaattctactcttttcttcctttttctcaggcgacacaatttgtcctttcaccttgtaattgcctgaaattacaataactctatagtataatacagtaaaattattctctcttataaatgtttagttattccagtgctatgcaataaatt

SEQ ID NO: 49734 - DNA, 1482 bp, Homo sapiens
tgtgtttagggagctttttaaaacacttcatttcagattcattattgaaaaaggtcatcaaaataatttttgtgtataagggaatttaccttgcttaccttactagtatgactattatcttgacttctggtaatttatgttcactattccatttgtgaagtgtactttcattctaaagcctcagtataaggcatcctaacttacaagagtaactttccatggacatttaacatccttccaattttattcacatataatgggaaattttgaattgccagtttgaagactgttctcctaaagtgttcaacctgcacttcttacaaccaaggtagtttgtatcattttcaaaagtacacattattagggtctagttgcccctggtccttagcttgctcagctgcaaaataagcgtgctaaattaaattgtcttaaggtttttccacttcattttgtgactttgtgtggttcgaatttctcagtattttaaccagtgtgttgatgttaaagtcaaaggctgcagtatgtctatattcttgctgtactcattggtagtttcagtatatgtaatgtgagtttaaatagtgaaattgtatctcatattaacatttcaaatgctcatattgaaaatggaaaatagtaaacacgggaattgattttattctggttgtctataatacttcattttaaatgtaaatggccactctgcatttgcaaggcccggtggttgacatctgtgtggtttgttagatgagacaaaatgaccattaaatgagtttatagattattctgtatcaagataaatctgattccagttaagctataaacttgtgggattttcttgtagccctatagttctgtgacttcatttgctatacgctttaaatgtgttgagcagcctatgaacctaaagacatactgcagtttgttcataaatgtattcagtcttttattctttataattgtgtgtaaatgttaactaaacagtggattcctctcgtgttacagttttgagtgaattattaaagaagttaaaatgcaataactttttggtctcctgtctcattttgaatgaatttgatgtgtttccttcatatttttggcctaaatatatacttactaaatgagccaagatgattcttccatatgggtttaaagactgttgtcaaaacaaatctgaactatattagctttttgaaaaattatatgcacattttcagtgaaaatcaagcaatatccctaaaagaactcaagtaactctgatgttattctaaggttattgtacctgacttctagtagcttgagacctagaagttgcccctaacaaggttttaatatctattttgtagatggggaactgaaaaagactaaatgacttaatgtaaattagtaaagacaatttaatggtaaggtcaagcttatattccaaagtctatttctttaaactctaattagagcaaaaagtaaaatgtttgaggctgggtg

SEQ ID NO: 49735 - DNA, 1048 bp, Homo sapiens
atcacacaaaaaaaaagagagagaggagagatgctgctagaagcaacaactgaagtgagaaccttcctccctcaaagaaaattatccaatgtgagaactcaaaaatgagtcagactgcttgattgctaagatctgttccatttccaaaaatttatgacaagagtgaaaaattgcaacagtttagaaacaaataatcttactactatgttaaataatggcatacaaagataatccactgtcaataataaatcataatcagtatctattagttaagaaaataggacagggagcaagatggccaaataaaacccaccagtgatcatcccctccataggaacaccaaattgaacaactccccacacaagaaagcatctttgtaagaatcaaaaatcaggtgagcagtaacagtgccttgttttaacatcatattaaggaaagaggcactggataggataggaaagatagtcattaatttcttacaccacccctccctcatcccctggtggtgcagcttggcacagagagaaaatctgtgtgtttaggggaaggagagcacagtgattgtgggactttgcatcagaactcagtgctaccctgtcacagaggaaaacaacatggggcataattgtgcccatacccatggagggagcatttagaccagccctagccggaggagaattgtccatccctctggcaagcctcaccactgtgagctaaagtgccctggggtcctaaataaatacgaaaggcagtctagaccaaaaggactgcaattttgaggcaagtcctggtggttctgtgctgggctcagaaccagaggacttgcggtgcatatggccaagaaagcgtttgcatcacccctcccccaactccaggcagtacagctcacagctctgggaggagaggaaagattaaagtggactttgtcttaacatttggataccagctcagccacagtaaaataaagcaccaagcagagtcctgaagcccacactccaggccctagatcctggatgacatttctagacacaccctgggccagaaggga

SEQ ID NO: 49736 - DNA, 1029 bp, Homo sapiens
agaatacctgctatagagttaacaatctatgttgctttctagatgtgattggattttgctcaggcactaaaagtctgatgagtgccaagtttatttgtcgtaagtgtgaacacccaaataaatggagagaaatatagatatttatccaagtatatatataaaacaccatgggtaaaagtttccattcaaaagagccagagcaaaaatgttcaaaaactttaagtttagttccttgaataatctactttattacactcttcaaaatttcaaacattaaactaccatctttgaaggtaaatgttttttattttatttcttttgtcatttttttaaattttctaaccacctactgcctgttgatgaaggtgaaggttttaacgtgactttatgaatacttaagaggcaataatggatagaactgacatacttgtcatcactcttataaatttatgtttagggtttcattgcttaagaggttatttttttccctctgggatacttttcctgtagtttagaacaatagataaactgatgattcagtcatttaaattaaaggaatgtgctgtgcttgagatccagactacaaccatgaattttccaacctgtatttgcaaaaatgtaactcctcgttcaaacagctaaacttaatattaagttgtcaagtatgtgatttgtcaaaataagcatttaaaaaaaaaaagaagggaattgttgcaatttgagacctatactctctaatcattaatttttcctttattggcttcttctaccttaccctttcatttacacattgatttgaatactccttaactttccttgaatcctatctatactcatctgttctcacgctgctatgatgaaatacccaagactgggtaatttataaagaaaagaggtttaattgactcacagttctgcgtggctggggaggcctcaggaaacttacaatcatggtggaaggcacctcttcacagggtggcaggagagaaaatgagtgctgagcgaagggggaagccccttataaaacca

SEQ ID NO: 49737 - DNA, 1030 bp, Homo sapiens
ttattcttttgccattgaaagttcctgccacacttgtcaaagaatcgattgactgtagataaatgggtttatttgtagatgctcattcttgcatatgtccattcttatgcctgtaccacagtgtttttattagtgcaactttgtagtaagttttgaaatctctattccttaagaggatgtggtcatcttgtgttttgacagagatttccttgaataccaagagctcaaaaaagaaataagtaaaaactctcagtctttgaaaaaaaaaagtacatttttgttttgtctaaggaaagttttcatatagcagattcactgggttttacctgtcaaagagtaggctcactgagaaatgggatctagggccgggcattgtggctcacacctgtaatcccagcactttgggaggctgaggtgggcggatcacctgaggtcaggagttcgagaccagcctagccaacatagtgaaaccccatctctactaaaaatacaaaaaaaaaaaaaaataactgagcgtggtggcgggcgcctgtaatcccagtttcttgggaggctgaggcaggagaattgcttgaaccctggaggtggaggttacagtgagctgagatcgcaccgctgcactccagcctgggcaacagagcaagactccatctcaaaaaaatttttaaaaaatgaaaaaataattatcaaaaagaaatgggatccagggaaaataatgcttggtaagaatgaaagataagagatgtttgcaatgcaacatggtgaggcataatgggttgagttggaagtcataattgcttgggttgggaggcattatggacagccaagagggaagtcagaggtgaatggcatcagttatgcctgtagtctggatattctcatggtctcccctgcccttcacattgagataagtttccttcaaaatccatgctttcctagatctctgcattcccagggagggcttccattctccttgcccccaaccccaccacaggcttatttatggttctctgaaaagaaagagttccac

SEQ ID NO: 49738 - DNA, 1027 bp, Homo sapiens
ggttttctttggcccctgtggatatttaatccttttcctatgcgtctaggaaaaatgtgaaggcatgaaagctttattttctccttgtgttaatccttctgccctctgcataatgcagcaccccagaacctgaggctatattgggagaggagagggggaggacaacttagttttctactgattgatttctattaagtccaacatggataattgctgactggttagattttcttgtttctggcttaatcattagcttcttgtttcctagatattctgaaatcttcattgaacataatcacatttttttttatggagttccccctatctttgtttttcctatactgaagaaatggtaactgctccctataactgctcccccaggtgactcttggttgatgctctcttgagcagagtagcttttcttctaacataaggatcatccttggctgtctggttatttaggaaacacacacacacacacacacacacacacacacacacggagggggtgggtgttaaaagtgctgaaatcagagaacttggatctgaatccttaacctttctttgccccaataatctaatctgtaaagtagtacctacccatactgttgttatgaggattaaatgagatagaagtaaagttcttaggatcttgtccaaaacataataagtacaacagtaaatgttgacaagaaggggtggtgataatattgcagaaaatgtggaaaatttagaacacggaagggagaagatatgcctcttaattctgccacctgacataaatgtcacattatcatttctgacctcccagatatttgtgtaagatacactttttcaagaatgtttaatacatttatagctctcttcacttagcaatatattttgaacagtttctccctttaatatttagtatatatgattttctttttttattattaaagattttaatttattttttagagatgaggtctcactatgttgcccaggctggagtccaatagctactcacaggcacaatcatagcaca

SEQ ID NO: 49739 - DNA, 1029 bp, Homo sapiens
tttgatccttgggattaaaatattaagcaggaaggaaagtaaagtgtgacatttttatttaaagccaagatcttaacattttaaacaaactgattgccagggattgccagttaacagtgctttgcagctcacatggtgcagactaagagctcttgatttccttagtggattactcgttagtaatgcattcaaaagtgtgacacatgttcttcttgttgtggaaatagaatgaagagctacaaaacacagatgattaggaagagctaattcagaactttctaaaagccattcaaatcttcaatgactgtttctcaacaacctcttttatttcagtaacttcaacagaactgataagctgagaacttgagttatgttatccagccagatatatgggttggtgagtcccatgtaattgctagttaccatctgtaatgctagagacagcctaagaaacatccccccaactagtagttgtcatatttaatttgtcggtcattattttaatatctttctgtgggacttagaaaatagtcacatttgaaataggcaggattttctttccaaaggtgggtataggaaaactgcctttagtagacaacttattgctacctgatttttttttcattatcattgtcttatagtgatggagtattttacaattgagtgtctatcacttctgtgttggcagggtttggggagtaggtagagatccctgtgtgatattcatttgtacagtagttctctcctcaaaaggtgtagagagttactttttctagccctttttatgctttgttggtcactgaatttgttggcctttgagtatggttggtttgggatacttgaactaattgatcatgcatttgccttgggtaagtaatcattccaagcgaattggttaccactgatgttatgtgcttatgcagtagtagtaatggagagtacagggtatggttggtttagatcaaggtacaaatgttacctagattatggttcaaaccttattatgtggtcacaggttctcacttatcc

SEQ ID NO: 49740 - DNA, 1067 bp, Homo sapiens
ctccatacttgcaactccaggattaggtcagggaggggctgtgcaggacatgggtagaggctagggacatgaaagggtggttgtgtccctcttatttgttttcatgactactagaattctcgtctggcatgttgcaccctgcaaggccacctctgggaagtactcctgtaaatcagagtgacttgattgctttatgaacatatcatctgaatggtgcaaattgatttagataaaactgatttagttaatcccttccctaagagcagggaaacttgcttcaactcgcagatcctaaagtggtgccagtggagtctcacaattgcatccaaatattgctctgagtagtgagcctgtccattccttcatccctcctcccataaaatctgctgacaccacaataattgacaagggaactacacaaggagtatgtctgtcttcatcattcagcaaacctcattggcttggtgaagaggagagaatgttgtcttctcattctatcccatagaactcaagctctgtcttttcagacagggacacagagcccttaaaagggtgaagacagggctgtgggcacagaatatgtctcaaatggctgctcttggaaatacctgcttggtcttgtgtgtgtctgccattcaatctttatgaatcttggtaatatccttgctgttaggccatggggctcggctgctagtagaggccagggggtgctccatttccatttagcattaagtttttgtcctctctttggcacaaaagcgagaatgaagctctgtgttcatgaagcactccttactcattaagctgggtgtcttgacttagaacattgcatcatcaaaatatgagatgtaacatgttgatactggatatacaacagttttggataattcaaaattgtttacattttgataaatgaaattttggtaccaagatggtgttgcactaacatctgtacttcaggtctctcaaaaaatattgtgttcatcactaagcagtgtacagaagagactagaaaagtgtttctcaactggtgtgttgggtcatgctagcaagtgagaagaccagat

SEQ ID NO: 49741 - DNA, 1031 bp, Homo sapiens
caggtactaaatcacagtagctaaatataataagaacaaaacatttgagaccagatttatgctctttaaggtctggtggtaatggtggtgaacatgtgtgtgtggggttggggacagtatctgacaggtttctcagctaaaccagccttcaactcaatgctcataaaatcattcttgcttgtagatctgccttctctgtggtctcttaactgttccagacttgctccccatcacatacaatatgtgtaaatctgtacatatttcatgtgtgtatgaggataaaacacatttcatttcatctctacccaaactgtgcactaagactcatttgaacccctattcttttctctgcaagacttatattgatttctctgtctctgaactcatttattattaacaggaccctgttttggaagatgttttccattgtttctttggtttgagagcaagtttagcaagtagatactcctattatctgtacccttatctttctgtttttctgttatttcttttggctcaagttttctcttcaccaatatttgaaaggagctaacaatcgtttgtttgagaacaatttacaaaatgttgacacagagattgttcttgggtggatagaaatcctgtctgttattgttgggcaaagaaacatattacagaaatataatataggtgaggaaagatcaaggaaacaagaattactgaacacaaagaagtgaggtttaaagggaaaaatgtgataatggccttcaagttcatgaaaggttgatataatgaggtaatgccttattctttgtctcacatgaagctagaactgacaataacttaaaccgtagcatcagggatttaggctagggattcattcattcatttaacaaacaattaatgaacattcactttgtttactaaacactttgaccactgtggtaggagctgggacacaggaaataaggcacaatcccagtcctaaagggactttgaacttagtaggggagatagacaagtgggaaattccagttcagtatggtaagtgc

SEQ ID NO: 49742 - DNA, 1124 bp, Homo sapiens
atttgcatgattgaatatagagtaacagctaatagtgaataaaatgtggttagaaattataatcaccttccttgttctcatcaaaaagactattaagtacagaacaagttgtagtgaaaatagcaaagtaagcagtttatttttatagctcattcactttaggacctctctaaggtctcatcttgccactctgaagagcttatgaccctggccagcctcacccaaacatagcctgttccaacctttcccagcccatcctgccaatcaaacctttatgttcagggccctactctttttaagtgacaagtctcataaaactatccatcattgtgttaatagggaaggaaccactttggctttttaggtaacaagcagtgttttaacagttccgtcctgaagttagtattcttgcctgagtcttaatgaggtgacactagtgctgccacatgcaaatagagtaaggggaaagagtagcccatacagtagatattcaagaagtgttcttttatggatgcttgctaaatccgatcatgtaagccactgtcggctctggatacacaaaaggtctgcttttactaatccttttttatgcctggcattgtaccaggtataaagaaaacagcataggcacagtatctaccctctgagggcttacatgctgcaaaaatccaccctgatgtggatacacatgtgcaagaaatacagacaattgaatataaacattaattgagaactgggaaagaatagtgagatattgttgagagtgagaatgtattttgggatttaacttcatagtctattgggtttaggattctgtctttgatgacagggaccctacaggatggcttatggaaggccatttctgtcttctatgacatcatccattctgaaaggttagggatgtgcccttaacttcctctttttttttttttttttgagatggaatctcgctctgttgcccaggctagagtgcagtggcacaatctcggctcactgcaacctctgcctcctaggttcaagtgattctcccgtctcagcctcccgactagctgggattacaggcacacgccaccatgcccgcctaatttcttgtattttagtagagacgcggtttcaccgtgttg

SEQ ID NO: 49743 - DNA, 1074 bp, Homo sapiens
gaaggatccttaaagtgtgatctgggttaacactttagctttgatgctgccacagcaaatgctatgtctgttcataaacattgtgttttcttaaatgcatcattttaagaaagtaatgaattctttgcagctcagtaaggtgacaaggctgttcataataatttcttgataattcatcagatgtccaatttacctctcacttttccttctcatctcctttgcacagaaagtgactgcttattaaataaagccaaactcagcctcttttttctgttatggagtctcagaaggtgggatagtgatcacctgagtggtcctgggcaataatgggaagtgggaagtttgttgtgtccccctcccagttcttcatgtactgtgtctgccttctctcttcaccttgctctcaactaagatgtcaattaacaattcttaaggtgttactataatgctaagatcctgacatttttatccaagtactttcagagactcaaaatgacagcacagctctccataatatatctccaacccttgtttctagccttgtttgcctccattacatctgtcaggctgatctgctttaaccaagcacgttttctatttttctgcttatgcttttgctcatgctattcatgtaattcattctgcctaaacttgtctccccttaagctccatttctagctgcccaagtcttgctcatccttgaagaccagctcagctacatgaaactttatctaatcctctgattgtccttttccaaattttctctttcctatgatctcatacacctttaattgtattctattatattacttgttttgctggtctttaaattataattagttgtattcacactcatagtctctactagactgtaagtgccttgaaggcagaagctgagtcattttcatcgttatatcccactcagggaaacccagcactatgctggatacatgtgggatatactgtggtatgtgggagacactcaataaatgtttgttgaaataaaaacttccccaaatgaactttaatgccaaaatttcacaatattctggtgaaagggagatctatttgggc

SEQ ID NO: 49744 - DNA, 1064 bp, Homo sapiens
caagtaatatgcctgcctcagcctcccaaactgttgggattacaggcgtgagccactgccctcggccaacaattctttttttcttcaaatacgtgtatacttcaactttgttgagactgctaaggcctgactcctatactttcttccgacctaccagctatttcctgtcttcgcttctttctttagcctatttaggatctgtgatttctcacttcagatactctcttttcaatattctcaatccccttgccccattgtccttttaacataccaacctgataaagtcctaatcctgaatcagtcccactttttccattcctatatttgagttgcagcaccctactggagaaaatcacataaccaaagaggttggtactactgcatcacaaatgtatagcttctaaacctcacctgggccttcagtgctaacctgaaatccttctgcattgctttggtcagctttctttttaacttgtcatcataatggctatctcaaatcttttgtacttacctcaaaattccaactctgccacttttctgcttatgctcagtaaatgccctcttattttacaaagaacagtaagtgtgaaatagcgaattcaacttctcatatcaaacttctgaacacacttaggtccacatccattaacttctgccttccttctgattaaaatggaagagatgtctcttcatttgtgctttggccaaatacactcttttttccatagcttcaatttatccctctctatagttgacttcacatccatttttaacccactcatgtctttcctacctaaaaccaaccaaacaaaaaaaccccatgactttcctctacttcatatcccctccaattatcacctgtccctctccttccctgcacagcaaacttcgcgaaagactttacatttcttcacccctaatttactcttctgaaatatttaaaatgtatttatatccaagtaataccttgtgcatagttagaaagtaaaatattactataagtcatattgcaagaaatagcaatctcctcattctcaatgtctgctctctgataataccattat

SEQ ID NO: 49745 - DNA, 1138 bp, Homo sapiens
ttctcttctttgtttatgggactttgattagtgaactgttggacatcctagactttttttctctaattttatcttttccattttccatgactttgtcttcttattttactaagatacttccttaatttttcattaaatccttctattgaaattttaatttcagcattcctaattttattcacaagagctcatccttcaccttgtttcttttttagcattctgtttttgctttgtggatacgaactatttggttttcttcttgagaatattgtcatttttaaaagtttgcttctaaaccctgcattgtctgggtttcctcccagttccttttctctgttagtttaaattgctgtcttttcctaaatatctggcaaactactggctgtgtgtttgagtttaagcactaaaagatgactggaaactctgagtggatgggaataatttatgggttggtgaactttgctataggattataaggcggaatgctggctttttattgatggactcccaagtgtcagttctgtaggtcttttctcttgggtcagtttcccttggatgaaatcctccaatctcctgcttttgattggaggggcagcggtgtggaaggtataagcctggctgccagcattctgggagccaaggagggaaaaggagctgagagttttaagactgcttttagtataatgtcaaagatcagcagaaagtaaaactcacatatcctgccagaatgagggaagggtagtctctggtttagtgtgcatggatctgtggatctagttgttcctcatgcaaactttcaactttctgtggcactaaatcaacttgatgttgttggcttcctgatctagctttctctggactgttattggttaccacacattcatccctttctagcttccaaacatttgttgacaatcttttacttgttggcatctcttttccattctctttgtctttgtgggtttatgacatttcattctttgactgttatttcagtgagatttcatgaaagcaaaaataaaacatatattcaaaccactgtatttaataatctctgctctccaaccctctgaaatgttttgtcccactaccacaccattgaaagtattcttttcaaggtcatcaaatgaataccttg

SEQ ID NO: 49746 - DNA, 1027 bp, Homo sapiens
caattggttagagccagccgggaatttcgtgcgggtgctgaaggagctgcgggagccggagaagaatgaaactgcgtggagtcagcctggctgccggcttgttcttactggccctgagtctttgggggcagcctgcagaggctgcggtaagtccttcctcccctcccccgcgcccatcaccgctctttcacgctgaaattaccttttttttggggggggggtccctttatcttccttttggcgttgactagggaattcaaatttgctttctcatgtttaggaagaaacgttatttgcaacaccggtaactcaagccttctgaagtccaacggagaggtttaagtgcttaaaaatagggctgcttgcttccctgcagctagctcctccgggggcaagagcaaagtcagaagtgggggacgctaattaaaggctcactaggctgtggtgggtatttaaaacttttcctcccctccctccaccgtcgggtgtttccctgcctggcgactaaccttttcactacttgtacccagcccactctttgaattttgtctgtagtttaatattttggctcttcgaaaatccagcttccatcaaagtgtttttagcgcctcagtgaagttcgtcccctttgctctttccttaagcaacaggaacctacccccacctcaggtcattcaagccactgacctccttttcccttttgacatccttgttacaaatgaaatgctaaggcaacataccaagaagagtgaggtaaagtctcaggcttcaggtcttttgcgtctttttgttgttgttgttttttctaaattatgggtttttttgtttgtttacttttttttaaacctaccaaggcatctgaacaaattgagaatttgcccatcacctattcaaaggaaaatactcctttttcaaaggagaatcagtgttccagtttaaaggaaagtgggggaggaggtacatgtgaaatagcagcaaaaagctccattcagttttaggaatgtagaattcaaacctcagtatatct

SEQ ID NO: 49747 - DNA, 1050 bp, Homo sapiens
ttggataaaactgcaattgtgctgttgaaaatagttcattttaaaaacatcttcttggtgccctctgtttctggcatttggcccagggacaaagattttgtagatgtttgattaaatatatatatgttttttgatgttacttttaacaaatttgcaccagatgacaactatacaggtatgtatagcaacactacacatcaattaatattaaatcaatttatgttaacaatgaggtttctttttattgacaaaacttgagagcaagcttgttttcttggattcttaaactaatgagtattcatgaagtcattacagctctttcccttttcctcctatataatttttaaagaacattttatatccccttttcctatcattaggatattgtgcctctattaaaaccaagggtttgtttttcctggttcatacataaatattttaataggctcaaaaatatgaatgatatcggctctgcatacttgtgctggagatatcggtgaccatttctagagtaaaactggttggtggtagggctagtctttgactggagtagtttagtattggggtttttatatcaaaaaagtgttgctatttaaagtgctttactcttttataggtaaatgatttctttatctctgaaatcatgccaaattggtacatcacaaatatgtggaagatcttttttttaggtagagcattcattaggtggaataaagtaacctctatgccaaaaggttagtaataagagaagacagttttaagttggaaatataatttttagtgatggaaataacatttttatgtgaaggtaattatacctgtactgattcactgtcagtgggatatgcacttagatttgtggatgtgggtagtatgtaaaattatgttagttttattttacatagttagtaagttgttttctgtgcagtagattggatatttttgtctactttaaacgtactatcttccttgtgaccagcggcacgaatttatcaagggtaggagtgttgtttgtagccatgaaacacttcatcctctatgaagtatatt

SEQ ID NO: 49748 - DNA, 1029 bp, Homo sapiens
cccttcctacccccatcctccatccccaaataaccactgatctgctttctgtacagtagaaagtttcattttctagatttttatataaatgcaattatatgatatgtatacattctttgctctgacttatttcacttagcataattattttgagattcatccatgtcatggtgtgtgtccatagtttattattttattgcacagtagaattccattgtattgatacaccacactgttgatggacatttgggttgttttttgtttgtggctattaaagttgctatgggcattttcttgcactttaaaagtactaaattgagctataatttccataaagtgatacacagtgatcttaggtgaacagctcaattattacttaactcaattataacttaacaaagtgtataccaatcatatatactttggtaactaccaaccaagtgaagatgtagaacgtttccattaccttggaaaggtccctcatgcccgtcccatttcaatgtcttttgtgtcttgtctgaataagccacaaggttgtgaagatacatgttttcttccataatctgtatagcttcagattttgtatttatgtccatttttcttatatagatacccagttgttccagtattgtgtatttaaaagaaaaattcctttttttttcattgaattaccttgaggactttattgaaaatcaatggaatgtgtatatgcaggtgtaggttgaaactcactagtctgttctattcacctgtttgtgcatccttatgccagtatcacactgtattgattactgtggcattactttggtagcataagtcctttacatttcttcttattcaggattgtgttagcttttgtgttggctatttattccatataaattttacattaatcttgccaaattttgcttaaaaaccttttgaggttttgataggaattgtaacaattgtgtagatcaatttaggaacaactgaaatcttaaaattattatttttttcaatccatgaacaccatatacctctccatta

SEQ ID NO: 49749 - DNA, 1067 bp, Homo sapiens
gacaattaagaaatagcctctattgctcaaagtctcaagaaatactggaaaaaaatgcatggatactttattgggtgcttgttaaattattaaataggtgacaacttaggggtgctggctaaactttttaacttcttgtttggccttgtacagtttataaattttagaagtaacactgagaggacagaaaatatctagaagactttttaaaggtgcatacatatatatacacacatgcatttcagaccaacgagtgagggatgagtatggcaggaggagtggggacagaggaccgaagaagaatgagaggatgttgggaggtggagagagagataagaaacaaaataattagagaaaaattaaaaggtgtatttattaggtatagggtgaaaaaatttgcctaattcctgaatttggatgatttcagagtgttcttatctggttctgtacccaaaataatttattcttagggattctgtgagggattaaatgacactagagacaaacgatgaggcaatgagaaaattatgaagaaattaaggagaagagcaatatcttcttatttgctataattcataatacatggatgtttgagaatcactattatctagtgtataaggctgacttgttcccattatttcctaatccataatgctgctccttttttaccccataatccttcccttaaaccacatgtgcatcatttctttcatctggaatggatgtcttgtgtttcaaaaatgttttaccttatcactcttattttcacttctgaactaaaggtacattgcttgtataaccccctttttgctgttttgataaggtactaaattgaataatgtacctttaggccagagagcagtatagggcaagttacttagtttgtgagagagcctaggcaaccgattgctgaacagctattatctccttgtgatttcatttcctttgctcattattaggcacactataagtattgtgatattttctttggaaaattttggtcctaatcagaaagccatctgctaacaattgtgctggaagtgaagcagcatgataaagttaccttt

SEQ ID NO: 49750 - DNA, 1046 bp, Homo sapiens
ttttttatatgcaatgtacaaaataggcaaatctatagagacagaaactagattggtggttgcctaggactgggtgggggatgtggttggaagaaaatttgaagtgactcattggtatggggtttctttttgggatgataaaaatgttctaaaattgattgtggtaatggttgcataactctgtgaatatactgaaaaccattgacctgtacggaagtcatagcccaataagctgttagagaaaaacaattgcagaaaccaatacactttctcctaaatggttcaacatttatattaataactagggttcaatattggtttatgcattttagttttgatataaaaattccataagatgaaatgcagaaatcttaagtgaacattcactgagttttgacaatacatacatctgtgtaatccattccccatcatgttatagaacattaacatcaccgttggaagttccctcctgtcatccttctagtgagttttctcctatgtaccacctaaggcatactttgatctgattgttttccagcacggaattatccacctgatttagtattttacataaaatgcataatttaataggtacttttttatgtaagactttcactcagtatgctattaatgagattaatccatattgttgcatttctttagtgactgagtcatattccattgtatgaatataccaatgaagatttatttttttttaattttttttattttttgaagttttaaagctgggcatccgggggagacatcacatgtcagtaggttccgtgatgccccacaagccgcaaaaccagcaagtttttattagggactttcaaaaggggagggagtgtacgaataggtgtgggtcacagagatcacgtacttcacaaggtaatagaatatcacaaggcaaatggaggcagagcaagatcacaggaccacaggacccgggcgaaattaaaattgctaatgaagtttcgggcaccattgtcattgataacatcttatcaggagacagggtttgagagcaaccggtctgaccaaaa

SEQ ID NO: 49751 - DNA, 1092 bp, Homo sapiens
taattactgtactctatacttgaggcagtacagttcttttcatctccagtatttcttcaggtcaatgtaacccttgtcaataataataatttttaaaaaaaattttggattcatgaggactaatcgtgttcttcattttagctagggcaaccttaaagtgataagaccaatgtggagttggtttgcctgatacatttcatgttaaattggactaaatttttgtgcctcttctggttatttgtttatttttatttacttatttatttttgccagtgtgctttaagaaacaaacagaccactaaccaaagtttcaaatttgaagggccaatgtatctataatcagtacagtgtgctatatgattaaagggagcattgattaacttgtgtttcaggcttccaattatgtgagtaacaaattttaaacaaattaaattgatttattatgcatatttttaaagtctgaatgcttttcttatatttcttactatgtaagtaaaagaatgaactttaaagttggagccacaatgtataggtttttttctttttctgtcttttaaacttgatgtctaggccacttcctttctctcgggacctactttttccatgtgtaacaaggtggagagaagggtattggactcacaaagacacacaacagtagtaattttattctttcaaaccttctgatgaagttgtttctaggattaccgtggcatacaggtatttgaaaggaggttgctttggtgttcttctacagcaatttcagcttttgttttctaaaccaagtgtccatattagtactttacagtagtgagtgagaaaagctgggtgcctagaaaacataatgacctgcaattgctagaactattgctattattgtcctcttggtgatattaatggccttctttcttaccatcttttcccctttacaaaaataatttgaaatagtttacaataaaagaaaaatgcaacagagcagttaaaataagaatctatataacacatgggcaggaaatggggcagatcattaactattaaatgtgatgatagaatttatggcgtgatcgtctcaaaatgtctttgttggaagaaaag

SEQ ID NO: 49752 - DNA, 1074 bp, Homo sapiens
caagtgttgcttacaaaggttcaatgaaaacaacaacaacaaaacaaaacttggggaagttggggtgggggtgggggattggtcctttcccctgcagagctcaggagaaagatagatttggtcttaataggttttctcaatttgtaattgtctgattcacacttctttctttcctgagtgtgtgctttctagggacttttaataacgcatgtaggaagctgctttatgaaagaataattgagggtggcggagctacagattttctgtcatgtttgtgttcactatgaaatttaagtcaaatatacttccagtcttattaggaataaaatatcattgctgaggtttaacatattggtttttctttggttgaaatttagtaagactcttgacttcaaactgcattgaagccgcaacagtgcgaatgttggaaaacttatgtgtccagacatgttagtaacattaacttaattcgtattatccataatgagtctcagttattaatacttaggactgtactaaatctaatgaggatatacttaaagaagatcttagatattttttattcactttcattttaaaatcagcttcagtcctctaggaaataatctctttataaaatgagaagataaaattttaataagtatcagaagaaatggaaattttgagagtacagtcctatttagcagcctagtttcccttttgaatcactattccaatcttaggtcccacaactttttgtcttcttttgtgtgaatatttcttatatccatccaatagagacaggatgaaatatcacactgctattaggtgttgatttgtacatcagactggcagtctcttaaatctgaagttcatttacctttataggtctataagaagaatttgttaatatttaatttatttaatattaagttttttaagaaaatacttaatgagttacaagaatacagagtaaaaagaaatgattagttagttgggtttaatcaataaagaacatgggttttatttttaaatttttttggtatatagtaggtatatatatttatgggggagttttcttttttaaaggaagaa

SEQ ID NO: 49753 - DNA, 1008 bp, Homo sapiens
ttaagttgtactttgtttgattccttgactcttcctgactcacatgcctcacttgattcagccctttgtacattaaatgttattggatgggttgaaggggtaaactggagagaagaaaatgttagaaaaaaagaaactgattttctttttctctttcttctttttccactcttttttctttttttccttactcatttcagggcattccaggagctccaggtgctccaggctttcctggatctaaaggtgaacctggtgatatcctcacttttccaggaatgaagggtgacaaaggagagttgggttcccctggagctccagggcttcctggtttacctggcactcctggacaggatggattgccagggcttcctggcccgaaaggagagcctgtgagttggtttgatatttttggttttgtgatgttaaattttcacttagaaatgttttctaagttaattcaaaggatgggactgatgctgagataaacacccaatcaatgcttaaaacaatgtgaccatacagtaatggcacattgttactgactacgtagggtttctgcactactcttttctttcacttgttttgtaaacttatttttcttaacccattaatattgaatactattttctatgaataggtgggcaggaggttaagatgtttatgagacagtataaggttccccatctcttaacccccacatatctttccttgggtttacttaaacctcatgactgggcatggtggctcacacctgtaatcccagcactttgcgaggctgaggtgggcggatcacctgaggtcaggagttcgagaccagcctggccaacatggtgaaaccctgtctctactaaaaacacaaaaattagccgggcatggtggtgggcgcctgtaatcccagctactcgggaggctgaggcaggagaatcacttgaacccgggaggcggaggttgcagtgagccgagattgcaccactgcactccaccctgggcaacaagagcaaaact

SEQ ID NO: 49754 - DNA, 1027 bp, Homo sapiens
aaagagacctttagttgagtaaatacttctcatttaccattgatttactcttgctttcaggtcctaaaggggatccaggtcagactataacccagccggggaagcctggcttgcctggtaacccaggcagagatggtgatgtaggtcttccaggtatgtgaggaatttatttcaaagtaacttcaacaccgatggcttttttttttttttttttgacagagtttcgctctgtcacccatgctggagtacagtggcgtgatgttggcttgctgcagcaacctcctacttctgggttcaagcagttctccctgcctcagcctcccaagtagctgggattacaggcgcccaccaccacgcccagttaatttttgtatttttagtagagacggagtttctccacgttggccaggctggtctcgaactcctgacctcaggtgacccattgcctcagcctcccaaagtgctgggattacaagagtgagccactgcacctggccctgatggcttctttctttgaacgttttcctttcaataactgctgtttctccataggtgaccctggacttccagggcaaccaggcttgccagggatacctggtagcaaaggagaaccaggtatccctggaattgggcttcctggaccacctggtcccaaaggtatgttggaatgggtagcaggcagagtaggttagaagtttagcatgatgttattctctcataaaattcattcaacaaataaaatatattaattgcaccttttttctctgtgctataaagaatgtaaataaaaaatcacagtgtattttcactgtaagttcattatctttatctaaaacagtccagacaagaaaatatctacattttagatatgcaaaagtgatatataagcttaaaaatcacaggaattattgtgttttgtgttcaccatagtattttcagggtttagaacagttcctaacacatagtgtgcacttgatgtttattgagttaaaggattttttaaacagaaaacagacttattgcagat

SEQ ID NO: 49755 - DNA, 1034 bp, Homo sapiens
gctactttaatccctgatatttcccttctgagttcatctaaaattgatgtatttccaataatacaattgcagtgtattattgatatgtaattgttgagttagacatggttttggaagcagaggcctagaaacttctagtgctgatcatttcagatctgagtagcggtacagcattcatagacctttgtggaacctcctaacatttcttagcacatgacaactagaattagggttcagcaaaactttctgtaaaagtgtattttaggcattcccattttctttttttttcagtgagttattttccctttttgcccctaaaatagcagtcattttgcaattcatcagcactccaaatctttacttttaatattttatattggatactcaaaaaggtcttttgtcaacacgtaacctaatgggtttgcctctatagataggaaatcatatggttcctctaaatttgtgtgaaagcatattgagtttctggattctgagctgtctggtgatgtgaattctcgttatgttaatctaggtaagtacagtaaaggccaccttggggccatcattatgttattgcaaaataccataataatttatgaaattaaaacaaatatgaaatatttaattgttccttaattcacatgaatacatctgaaggcttaaacacagagttcagatgtgcatacatttatctgaagcaatggctatatgtttcctgaccttaaatggcagtagatattttgttattattctaaaaatttagaaactcaggttaacaatataaaaagcttgtaaatgttattttcattatgtactatttacaattgattatatggcacattatacctttttatggtccctgacatgtcactactgatttaaaactaagaaaacttagagtgttgctttgaaccaggttgttacaaaatagctgctttatcacttatggaaaaaacattctgtccaactaacaaagcagagggatcttcaggaaaaagcacttatttttaggtttgacctgctgtttttttttt

SEQ ID NO: 49756 - DNA, 1067 bp, Homo sapiens
agaaatgttctcaaatcacagtacttttcattttactatgagatggaccacatttcatatttatacaaggcacagatactcactttctaagtaaattttacttacatcaccaaaatagaatattatcttagttcatttaaaaaacatcctgatttatgtccataaatctcaataataaggtaatcggaaagattcttatatcttgataaacctacttatgttgcatggctgaaactctatcaatgtttttgtaataagcttatttaatatacttgtatttcattttgcgataggaaaaatgcaaaatattctatactgttatctctctactgtagaatgtttacattatgctttttaggctttcctttgaactccagttttctattatttaattaagcttttactatttacctttctcttttctaaaccaggctatacagtttaacacggttataagataaggtcccattgaatatcagtttcccattccatagcagggaaataaaagaaaaattgccaaaggactagaaacaaaatatttttcatctcatgacctgctaacccaggcagaaatggaggttgttgattcttgttattttctttggccattacctgtacaattactgtcttactgaatttttttagagatcagttaaatatactctatttcatgttcacagatcatatcataaccagaaccaaacgtgttatagtgtgtgtccagtcttaggacaaagcatatggctaaatcagctaaagaggaaaaaaaaattcatcaccactaatgtgaatcaaaacaaacaaaacaacaacagcaaaaccctaggaattgtttatgaattattcatgtcattttcatagatgaaggagaaaatagttttctaacacttcaggaggctacaaaacccttgggtagggggagggtgtgtgtatgtgtgtgtatggaaagttctcacgaataatacatgtttttgaaattttcctttttttataaactggttccattcggctgccaataaatttagaacatcagtatatccctatatcacatctgtagacatatccat

SEQ ID NO: 49757 - DNA, 1061 bp, Homo sapiens
tttggataaagaagggagcatatggaagtaaaagggagttggaaattggaaaactgggtgtaacctgctgtactcaattttttaggtggtggaggtcatcctgggcaaccagggcctccaggcgaaaaaggcaaacccggtcaagatggtattcctggaccagctggacagaagggtgaaccaggtgctgtagtttttcatttttcctatttttctaattttctctgtgttgaatttaacttgcctttttattacccacagtgaaattgtatcttctttcttactaagctaccacacactttccccttttcctagttaccgtcttcctcttcatcctgagactattagctcatgtatcttgatcaagttgcctcttacaaaaaaccccatatcttttcttgtctaattttttatatcaaaaagaagttacctagcctttgcaaatttctctgtggtttactatgcaatctatatttcatttatatttttttcttataagcatatagatatatttaacattcatcggaaatagaatatatgtttagatcattttctcatgttagaattgcagttctgtgttggaaataaatcttctgcatgtttcatataatatacattgctgcacctaatgaaaacctcaatgatctaaaaataatttggccttgtttcagtttgtattatccacttgagtttttgttttgttttgttttgtactctgacaggtcaaccaggctttggaaacccaggaccccctggacttccaggactttctggtaaaccttaataaaacatgctaaatcaatctataataaaatgagattatttccaaatacatctatttttccatctccaccttttactatcataaaatgcatgtaagaacccagaaaactcaaacctagtgttaacgttaaaacatttattatttagcaacttagtttaaggagttgtgttaaataaaaatgtatccttacggaaatttacatgtagagatctcttcactaaattcataaataagtgctgaggaaataagaaagaaggcaaaattgcaggaagataag

SEQ ID NO: 49758 - DNA, 1086 bp, Homo sapiens
aagaccaacagcttatcctttagaataagctctatttgaaaaagtttggctctctatacttctgtatggttctgtttgcatactgattatgctgtaagtataagaaatgctggcaaagaacattattgttttaacttgtactataatgtgaaccacttctaactcataatcttattttgtactgtgtgatgtctgatactgctaacatcgatctttgggctttggtgaactctgatcttcccaggttttcaaggttagactcttcactggtcaattcttttttttttttttttttaatgctttgtgtgtgtgataagagaaatgcaattttttgctataattcagaagtcattggagagtgctgttatcctcaagctggggttttaacattttgatgaaggtaatgtgacttgattataattaagtttcaaatgacgttagggtctttgtgtttgcaattgtttataataagtaatcaatacataaagacatgttgaattttaaacggaaatacacttatttttaccttcaagactgcattaaaatatttaggcaagcatatgacctatttgtaatctctgaatgttgattttattttctcaaaattttgttttctcagattgccctgatctgtgtatttatggctattttcagtgatggcagagatatactattgaatactgttaaaaataaaacttatatgttctttatgtaattaataactcataatttgaaggactctaaacatcaggtctgaattaacatgcaagtttcccatttttttttaatttcgaaaagtgcagtgccttaggttatttcagatgatacagtgttctgataacttttaaaatggagtagagggtcataaaaggtttctttttttcccatcttactttgttattgttatcaggttgattcacagtttatttatttttcataattagctgatttgctacttaatttctagtgcaaatcatacattgtggattaaattgacaagtttgcttagaacactgaagttctgtttttttattcaaatgtacaatgtactaaaccttttcgttatgattgagaagggaatttctg

SEQ ID NO: 49759 - DNA, 1047 bp, Homo sapiens
catcctgtgaatattagaaaaatgtatgagagaaagagaaaaagatagaaaatgagagggaaacacaaatatacaaagataatagtggtggggagaatcgttacaaaatatctatgaccactaatggctcttaaaccatactagtcactgcattagatcatattgctgaaaagtaaaccattaagtcaccaagagagctacttaacacacaaaaaatgtttagttataaatttgaaccagtaacagaattgaaataccagaaaatgtggatctgattgtcttatttcttatttcccagtaaacctcagtcagaaacgctgaaagcaggagacttgaggacacgaattagccgatgtcaagtgtgcatgaagaggacataacattttgaagaattccttttgtgttttaaaatgtgatatatatatatataaaattcctaggatgcagtgtctcattgtccccaactttactactgctgccgtcaatggtgctactatatatgatcaagataacatgctgactagtaaccatgaagattcagatgtacctcagcaatgcgccagagcaaagtctctattatttttctactaaagaaataaggaagtgaatttactttttgggtccagaatgactttctccaagaattataagatgaaaattatatattttgcccagttactaaaatggtacattaaaaattcaattaagagaagagtcacattgagtaaaataaaagactgcagtttgtgggaagaattatttttcacggtgctactaatcctgctgtatcccgggtttttaatataaaggtgttaagcttattttgctttgtaagtaaagaatgtgtatattgtgaacagccttttagctcaaaatgttgagtcatttacatatgacatagcatgaatcactctttacagaaaatgtaggaaaccctagaatacagacagcaatattttatattcatgtttatcaaagtgagaggacttatattcctacatcaagttactactgagagtaaatttattttgagttttatcccgtaag

SEQ ID NO: 49760 - DNA, 1042 bp, Homo sapiens
gaaagatatgtaaattgggcatgatgtgatttgtagcacagtttgaaagggagctgttgatacaagtgtcaccatggtcacttttaaacttcttttaaaagatctcatatatttcagcttatatgctcttttaaaaggagaaataggtttcttcttttgtcaacaaattatgagagcatctaaattagttaaattttatttatcactctgaaataatactttatgagacattttctattttaaggggaaatatctagcattaatcaatgtgttaaaaaaagaagtgtgaaaataatttctaaactattacagtgaaagatgaacagtgctgatcactttgtacccagggtatattatttggctgcagcgaagtggaattagagctatagtgagatgcttcacagaagaattttactttgtatctttcctaatctggcaagcatgagtacttgtaaactgggagaatgtctgactagaacattattttcttcctacaggtcaaccaaaccttctcagtcctaaagttgtctcaacactgaagctctgtagagcagaccatcattactgaattgtaccagatgctagagcttgtctgacatacatttaaattttcattttcctggacaacttaatgatatagaatagtcatttagtttaggtcagattctcataggcaaagtaaaacagatatctagatggtttaggcaaaatgtagagaatttttatttggcttgaactcactcagtggtggctttaatgctctaccctctcttggttatagattcctgtctcttattttttttcgtttttgtttttattttaggacagtttatcccagaaggctaaagttgccttgcatattcagttattacaactgtaaagtttggaatctgcacaaagggtctgaaatacagatttttaaaacaacagataataaataataagacttaaaagatagttcttgttttagtttgccaattcaactcaagggataaaaaacacaagcattgtaactggcattttatggctataaactaatgta

SEQ ID NO: 49761 - DNA, 1046 bp, Homo sapiens
acactttgtatgcctgcagaattagtaccacagggatgctgccaaggcttaccacatgtgccctctggaccagtggtttgagttacactggggcctgcttgagccacagctggggtgggccaaggagtactgcactataatgtggagagcacagacctgaggtgacccttggcagtgagccctgaggtcttgcaggtaccctgggccccttaatgaaaatcattctactccaaagggcctagtactctgagcctgtggtgaaaaggatagcttagaagatccctgaaatgtcttcaggatcactctctcatagtcttggtgaacaaaatctggcttctttctattcatactaatctccttatcaaaaagttgttggccatgctcttagttttctctactaatcacacttttaaattcttgatatggccaggctgagaattttccaaatctttacattctgctttccttttaattataaggtttgtcttcaaataatttcttatggcgttttactataaacagttaagagaagccatgcagtgtcctgaacaatctgctccttagagcttttttctgccaaatatctcacttccttgctcttaagttctgctttccataaagtcccgggacatagacaatttagcccagttctttgccactttaaaataaagatgaccttttcttcagtttctggcacattgttcctcctttccacctgagacttcatcagaacagtctttattgcccacatttctagcaacattctgttcgcaatcatttatgtaatttctaagaagagtgaagctttctctatagctcttctccttctgagccctcaccagaatcactcttaatgctgtattcatgttaatacagacttttttccaggattcacttcaaaactgttccagcctctacctattacccagttcaaaaacagcttccagattttaaagtatttgttatagcaacatcccattcctctggtaccaatttttgtcttagtacttttgtgctgctaaaacggaatatctgagactgggtag

SEQ ID NO: 49762 - DNA, 1189 bp, Homo sapiens
tcatggagggatattgaattttattgactgctttttctgcaacttgagagagaatcatatggcttttattcttctttccattgatttgatgtatcatatttattgatttgggtatgttgaatcacccttgcatccctgggataaaccccacttgaccatgctgtatcatttttttcatgtgatattgaatttgatttgctagtattttgttaagaatttttcgcgaaggcccgcggcgggtgttgatgcgatgtgatttctgcccagtgctctgaatgtcaaagtgaagaaattcaatgaagcgcgggtaaacggcaggagtaactatgactctcttaaggtagccaaatgcctcgtcatctaattagtgaggcgcatgaatggatgaacgagattcccactgtccctacctactatccagcgaaaccacagccaagggaacggacttggcggaatcagcggggaaagaagactctgttgagcttgactctagtctggcacggtgaagagacgtgagaggtgtagaataagtgggaggcccccggcgccccccggtgtccccgcgaggggtccagggcggggtctgccggccctgcgggccgccggtgaaataccactactctgatcgttttttcactgacccggtgaggcgggggggcgagccctgaggggctctcgcttctggcgccaagcgcccggccgcacgcaaaagagctcctgaaggaagcgctaaacatggaaaggaacaacgggtaccagccgctgcaaaatcatgccaaaatgtaaagaccatcgagactaggaagaaactgcatcaactaacgagcaaaatcaccagctaacatcataatgacaggatcaaattcacacataacaatattaactttaaatgtaaatggactaaatgctccaattaaaagacacagactggcaaattggataaagaatcaagacccatcagtgtgctgtattcaggaaacccatctcacgtgcagagacacacataggctcaaaataaagggatggaggaagatctaccaagccaatggaaaacaaaaaaaggcaggggttgcaattctattctctgataaaacagactttaaaccgacaaagatcaaaagagacaaagaacgccattacataatggtaaagggatcaattcaacaagaagagctaactatcctaaata

SEQ ID NO: 49763 - DNA, 1050 bp, Homo sapiens
ttttcccagtcttttcatgccttgcacctgttaatacaactcagcttgcttttaaataacagtatgttgctggcccctactcagtggatgatccacaagctcacagaatttttattcctttgccacagatgggccaccttcttctcagtctttgtgagacttgtttttagtttcctccccctctgtaaatactcccctgaagattctcctctacgaaacctttccataggagcctgacctgactccagtaacactttttgtcctttcccagccgtctgaatacatgtcagaatgttgggctctttaatgaatacctttgtatgcatgtaggtaatctggtgtttggccagatcatttttttttgtttgtttgttttttgttttttgtttttgcatgtttctttaatgtttctccaccattagtgggaacacttttttaaagtaaaggagtagtggatttttcctttgtaactccttgcagagctgaatataatactgtatatgcacattaattgtttaatgtgtacctggataatggtgactgaatgattgatggaactgactttttgctttccttttttctttctccactggtggccctatgttcctattaagagaatcttccagccaggcatggtggcacacgcctgtaatcccagactttgggaggctgaggcaggcagatcacgaggtcaggagattgagaccatcttggctaacacggtgaaaccctctctctactaaaaatacaaaaaattagccaggtgtggtggcacgcgcctgtagtcccagctactcgggaggctgaggcaggagaatcgcttgaaccgaggaggcagaggttgcagtgagccgagatcccgccactgcactccagcctgggtgacagagcaagactctgtctcaaaaaaaaaaaaaaaatctttctgcctgttttttgaaatagccacaggagtgaggcaatctcagctcctgctcacacatctttttgtagaatttccatcacaaagaatggttattagaatctctactcttggcccaaagtgtctgt

SEQ ID NO: 49764 - DNA, 1060 bp, Homo sapiens
tccttccttccttccttccttccttccttccttccttcctttctttctttcattttttttttttttgagacggagtttcactcttgttgcccaggctggagtacaatggcatgatcttggctcaccgcaatctccgcctcctgggttcaagcgattctcctgcctcagcctcccgagtagctgggattacaggcatgccccaccatgcccggctaattttgtatttttagtagagatggggtttttcaatgttggtcaggctggtctcgaactcctgacctcaggtgatctgtctgcctccacctcccaaagtgctgggattacaggcgtgagccactgcgcccggcctgcaggccacctctttacctggctggtatagcaactgtttttttcaatttactttcctgcccttgcttcctgtcttccacagaggagtctggccctggtgtcaccattacttgctgtttgccctggacagacagttcacagggatgtgtgtgctcactgagcctgcatgtagagccagtatgggttgcttgcagatgttggttgtttggaaatgggacccactcagctgcggatataactgaggccatcatttcctgcctccaaatagaggcctgcatctaatcctagtaaacagttgtatggggctccagggcaagggatcaaaattagaaccttagtctagcagaggtgacaaaggccaaagaagaaaaacgtcagaataatctgtcagcccagtagtagaggttagttcatcttggttgagtagtagaaacagcactggattaagggttagccagacctgggtcctggttgtaggttcatcactagctggttgacaaaactgagtaattttggccattcaggtagcctctctgtgcctcagtcttcttatataataagaaatagagtgtggtagttaaaagtgcaggctctggagccagactagtcaggttcaaatcccagttctgctgctttctagctgtgcaactctgggaaagttaattgacatatctaggcatggtttttgatttgttttgttttattttgtttg

SEQ ID NO: 49765 - DNA, 1082 bp, Homo sapiens
tcctgccaaagtcctgggattactgttgtgagccactgtgcctgtcctctagctttcttaaaggagctgttatttaatttcagggcttgtagtctctaaaactgttggtaaacgttgaataaaggctgaagggtaacagggcacttaaatacgagatgccatgttttatggctctgtgtgagaattagtaaaatttgtgttctgttttacaagagggccttgggagatgatggtttctagaagagaagcaattgaaacaacagattgtacatgtaacttttatctccttgcagggtttaagagcaggcagatacataactaggtctagtgtatggtatcattcatttatctgtgtgtcgtgaaaagatcttgtattcaggaacactaggttaataatctacaaaatctaatactattagaatggtaggcttgatcttaaaatttttatgttgttgttattgttgggtgtgtgtgtgtgtgtgtgtgtgtgtgttggcatatgtgttcttgaacccagtggcctttattttggatggtttgtatatcagcttgcatcagggaaggctctgagggcttgtccccaaagccaggctctttcctcctctcctgctggctcacgtatgtctccaggttcttataaggcagaatagactaggtactgctattagaaggaacaaaattatttaccttgggacaggaaggagaagccctaacaggtgggctctgatggcagtgctgcttggcatacagtcagtgctacacaaatgttaagcattctgctcactggtcctaggtcaaagcccttgggatgctcatcacttgtgggctcaggtatcagggcagctgagttagaaagcccaacaatattgctatacagagggagttaaaaaccagatggcatcaaaacccaagctgcacacacatcttgttcttcagctgccaactctgcacctcaatctgattttaccttattctcacctaggtctgggtaagttcatgtaattgcatgttcctgccatgaatatcctggttttcagaaaaagagtgagtgagatgaggccacagtgtggcagtatttgttt

SEQ ID NO: 49766 - DNA, 1026 bp, Homo sapiens
catgcaaattgttccattttataaggtgcccaaatgaaattcacagccaaaatttgctggaatgcaaaaaatgtcgtttctttacaggaaaaaaagaacccagagacctattcactgtgttttcatgccatccaaacctgatgatggtagtttggagtttctcattctgtaggtgattaatcttctttgtgattggtagtatgttttatttgaaaagaaactacacttcagaccatttctatcctttggctgtgttcatgcctgagagaatgagtaaacagtcatttgtatgaactggttatttgtagttcccctggggaagtaggtatcaggcaggtagcaaaggcatctagcatctggaggaagcttgtggatatagaggctttctcttagaaagatagctctttccttttcctaaaggtaaaaccaaacagatggcccatattcactggggataggtctcagggtcttcttcatcgggttctgagggtgggtagatctaaggactccttgagggctcttgaggcagagaatcagatactttctaatctctccttttttgcttttccctgatccccacttttacccagtaccatcttcctgttttccccttatacttccagaacagtacagtaaagtaggaaacagggaaaagcttggaaaatggaggactgactccaagaggacaggaataactaccctcagcttttaaactgcctctgcaggcaaaactcacaaatttgtattcccccccgccccaccgcccacccaacttctttggagggaaaaattccattggtcattaatactgggaggaggccatgtcatagagttcattcagaggcggaagactgaaaataataagccagatcttaggctaaccttctcctgtaacagagaagtgacccagaatcacagctgtttgatgaataatagaatttgcctggcatatagtttaaatttcaccttcttatgtgacttggtgttctgtgttttactagttggcatcatgtcagatcatgttct

SEQ ID NO: 49767 - DNA, 1035 bp, Homo sapiens
tataattgaatggcgccactagggttgtgcagtgcacaacctacacaactgtactcggcggccctggcataatgtaatgtcagtactttcttcatcaaggtaccagtttgggattgtcctcagggtaagggggctgaagcagtgagctgctgctgtgaccaggaaaggaagaaagaagtaaagttgtggctttgggagaattatcttctctgtaaatgagagccatcatataggagaactacgtaccttcgttctttcagtaaatagttttttaagtgcctactatgtgagggttgaagaacagggaggggtttgcataggagggagcatttgaactgggctttgtgaaagaagtagaatattaacatgtgaagatgagtcaggaggagagaatctcagggggaaggaatagcgagaagaaagacagatgggagaccacaagggatatatgggtaatggtgcataattcatcttggttggatagaaaagcatgtaaaagggagtagtgagcaatgatgctggtcgggggtcaaatgatgatgcaggaggggagggagttgaatgcccaattaaggaatttggacttttatttatcaagcaataaggagctatccaaagtttgttttttaaacagctttattgggttataatcatataccatataattcattcatttaaagtgtacaattgaatgtttttagtatattcacatatatgtgcaaccaccaccacagtcaaatttagaacattttcatcatccaaaaaataactccatacgatttagctcacccccctccctacctttcccccactcaccagccctaagcaattgttaatctactttctgtttctatagattttatctattctggacatttcatagaaattgagtaattataatatgtgacctttttccactggcttctttcacttagtatgttttcgagattcatctgtgtttagcatgtatcagtacttcacttatttttatggccaattaatattccattttaaggatatgccacattttatgta

SEQ ID NO: 49768 - DNA, 1044 bp, Homo sapiens
tcacttatattcacctacctctctcaaatactagtggaattctaattagaattgccttaagtatatatttcagtttttaaattatatggctccttttatctaagaaatggtatttctttccatctgttcacgtcttattgtttcagttagatttatctttttcttcatatctgctctatgcctttcttgatgcatttattcctcaagaattaacagcttttctgccaggtgcagtgactcacgcctgtaatcctagcactttgggatgctaaggtgggcatactgcttgagctcaggagtttgagaccatcatggacaacatgatgaaacctcgtctctaaccccccaccaaaaaaaagaattataaaaagaatagaaaaagaattaatagcattccccctctcccccaaccacgccgtaatgagtggaatatttttcccctttctattcctaagtgctttttgctagaataggaaaagattgttgatttttaaaaatatcttatatctggctatcttaccgaattctcttgttcttgtaaattttattttagttttatctcttcttttccttagttataccagttatttcattttcttgttgcatttgctagaaattcagagttaaataaaaattgtgctgacgggctactcttgcctaaaactgattttaaatggaaatattttctgtactcctccatatttgctgttggtgtttgttaatagtctattatacttaagtagtttttacatttatgtagagatttttaaatatttatttatttatttatttatttatttatttatttagacagtgtctcactttgttgctaggatggtcttgatctcctgacttgaagcaattctcctgcctcggcctcccaaagagctgggattacaggtgtgagccactgtgcccagccaagattttttaaaagaaggaatggtagctgtattttatctaatgctttttctacatctattggtcatgtgggattttttcatttaaatttttgatataataaattacattgatagattttct

SEQ ID NO: 49769 - DNA, 1074 bp, Homo sapiens
gttctgattggtgtgagatgatatgtcattttgttgttgttgttgttctttgagacagaatctcgctttgttgcccaggctggagtacagtggcctgatctcggctcactgtaaactcatcctcccgggtccaagtgattctcctgcgtcagcctcccaagtagctgggactacaggcacatgtccccatgcctggctcatttttgtatttttagtagagatggggttttaccatgttggccaggctggtcttgaactcctgacctcaggtgaactgcccacctcagcctcccaaagtggggggattacaggagtgagccaccacgcttgacctgattgtggtttgatttgcatttctctgttagtgataagagattttttcatgtgcttgttggctgcttgtatgccttcttttgcgaagtgtctgttcacgtcctttgcccactttttagtcaggttatttgttttttgcttgttgatttgtttaagtttcttatagatttgggttattagatctttgtcagatgcgtagtttgtgaatattttttcccattctgtatgttgtctgtttactctgctgataagtttcttttgctgtgcagaagctctttagtttaattaggtcccacttgtcaatttttgtttttgttttagttgcttttgaggacttagctataaattccttgccatggccaatgtcaagaaggtattttctgggttttcttctaggatttttacagtttgagagcttacatttaaatgtttaagtcatcttgagttaatttttgtatatcatgataggaaggagtgcagtttcattcttgtgcacgtgtatagccagttttctcagcaccatttatttaatagggagttctttccccattgtttacttctgttgactttgctgaacatcacatagttgtaggtgtatggctttatatctgtgttctctatcctattcctttagtctttgtatctgtttttgtaccactaccatgctgttttggttactgtagccttgtagtatagtttgaagtcaggtaatgcggtacctctgggtttgttctttttact

SEQ ID NO: 49770 - DNA, 1047 bp, Homo sapiens
cgggattccctttgtaagtgatctgacccttttgtctagctgcctttaagattttttctttttcattgtccttggaaagtctgatggctatgtgtcttgtggatggtcatcttgtatagtatcttgcaggagttctctgaatttctgtaatttgcatgttgtcttctctaacaagattggagaaattttcatgaactgtatcctcaaatatgttttccaagttgcccactgtgtttccttctctctcaggaatgccagtgagtcttaggtttggtcttattacataatcccatatatcttgaaacttttgctcatttttaaaaattcttttttctttattcttgtctgactgggttaatttgtaggaccattctttgaggtctgaatttctttcctcagcttggtctagtctgttgttaatgcttccagttgtatttgaaaacttgtgtagtgaagtttttcaattccaccagttctgtttggctctttcttaaaatgtctatgttgtcttttaactcttggatcattttactggctttcttcgattgagtttcaactttctctggagtctcattgagcttcttgccatccagattctgaattctgtgtatgtcctttcagacatttcaatctggttaggatccattgctgtggagctagtgtgatccctcggatcatcacattttaaaattaaactttaggttgggcgcagtggctcacaccttaatcccagcactttgggaggccgaggcaggtggatcacctgaggtcaggagttccagaccagcctggccaacatggtgaaaccccatctctactaaaaatacaaaaaattagctgggcatggtgatgggcacctgtaattccagctactcaggaggctgaggcaggagaattgcttgaacccaggaggcggaggttgcagtgagccgagattgtgccattgcactccaacctaggcaacaatagtgaaactttgtctcaaaaaataaaattaaattaaactttatactttgagataagtatataatatgaggagatttcaaa

SEQ ID NO: 49771 - DNA, 1043 bp, Homo sapiens
ttctctttgaagcaattgtgaatgggagttcactcatgatttggctctctgtttgtctgttattggtgtataagaatgcttgtgatttttgcacattgattttgtatcctgagactttgctgaagttgcttgtcagcttaaagagatttggggctgagatgatggggttttctaaatatacaatcatgtcatctgcaaacagagacaatttgacttcctcttttcctaattgaataccctttatttctttctcttgcctgattgccctggccagagcttccaacactctgttgaatagtagtggtgagagagggcatccctgtcttgtgccagttttcaaagggaatgcttccagtttatgctcattcagtatgatattggctgtggatttctcataaatagctcttattattttgagatatgtcccatcaatacctagtttattgagaatttttagcatgaagggctgttgaattttgtcgaaggccttttctgcatctattgagataatcgtgtggtttttgtctttgattctgtttatatgacgggttatgtttattgatttgcatgtgttgaagcagccttgcatcccagggatgaagccaacttgatcgtgatggataagctttttgatgtgttgctggattcggtttgccagtattttattgaggatttttgcatcgatgttcatcagggatattggtctaaaattctctttttttgttgtgtctctgccaggctttggtatcaggatgatgctggcctcataaaataagttaggaaggattccctctttttctattgattggaatagcccctctttgtacctctggtagaattcggctgtgaattcatctggccctggactttttttgtttgataggctattaattattgcctcaatttcagagcctgttattgttatattcagggattcaacttcttcctggtttactcttgggagggtgtatgtgtccaggaatttatccatttcttctagattttctagtttatttgtgtagaggtctttatagtattctctg

SEQ ID NO: 49772 - DNA, 1051 bp, Homo sapiens
ttatgaggcaaggtactgttattcccaagatcacagtgcgccagcaaggttagtttcttctgaggcctctctttggtttgcagatggccaccctcatgctgcctcttcacttggtcctttctctacacacacatccctagtgtctcttgtttagccaaatttcctcttataaggacacacatctgattgcatagagcccactgtaatggcctcctttgaacctaatcacctctttgaaggccctttctgcagatactgtacagtcacattctgaagtactgagagttagggctccaacatatgaattttggggggacacaattcagctcatagcacccatactaccctacatagaaaccattgtttcttcccctcaccctgctttccttcctccctccctcccctctgcctttccttcctccttccttttccgccatctcatagcagatgtgctggtgtatctgttacattaacagctaatactttccaaataaatgtgaggctgtagtcaactaacttatcaaaaatgtttaagtaacctctcctgacattgaaacttctttgttgggctgtctcttaactagtgattccagccaatctggtcaatctttgtgctctttttctaaagtgatgcttagaaaagctgggaatgtctccatttgcctatgtatttgcaattggtttaggtctggttcttttagatggttgggatccctcttggactactctggctttagggctttttgccttgcagccccttagttgagctcagattgacttaacatgagacacatgaggattggcaactctttcttaaacctgatgatccaattaggttgtaagccagcttttgacttttgcccttccttcttggccctttatctttttaattattttatttttttgctcattagcagtaatgaggaagcaagaaaaataaaatgaactgattagtgtgtgtactggtaccatagacatacatatactcacatacacaaagacagagtgacagggcattggaagtagttgtgacagtcagctaaaggatttg

SEQ ID NO: 49773 - DNA, 1030 bp, Homo sapiens
tatttgacagatcaacgagacagaaggttaacaaggatacccaggacctgaatttgactctgcaacaagcagacctaagagacatctacaggactctccaccccaaatcaacagaatatacattcttctcagcactacatcacacttattctaaaactgaccacatacttggaagtaaagcactcctcagcaaatgtaaaagaacagaaatcacaacaaactgtctctcagaccacagtgcaatcaaactagaactcaggattaagaaactcactcaataccacataagtacatggaaactgaacaacttgctcctgaatgactactgggtaaataactaaatgaaggcagaaataaaaatgttctttgaaaccaatgagaacaaagacacaacgtaccggaatctctgggacacatttaaagcagtgtgtagagggaaatttatagcactaaatgcccacaagagaaagcaggaaagatctaaaatcgacaccctaacatcacaattaaaagaactagctgggcaccgtggctcatgcctgtaatcccagcactttgggaggccaaggtgggcagatcacaaggtcaggagatcgagaccatcccggctaacacggtgaaaccccatctctactaaaaatacaaaaaattagccgggcatggtggtgggcgcctgtagtcccagctacttgggaggctgaggcaggagaatggcgtgaacccgggaggcggagcttgcaatgagctgagatcgcgccattgcactccagcctgggtgacagagccagactcagtctcaaaaaaaaaaaaaaaaaaaaaaaaaaaagaactagagaagcaagagcaaaccaattcaaaagctaacaaaaggcaagaaataactaagatcagagcagaactgaaagagagagagacacacaaaaaaaccccttcaaaaaaatcaatgaatccaggagctagttttgtgaaaagatcaacaaaactgatagaccgctagcaagactaataagaagagagagaagaatcaaat

SEQ ID NO: 49774 - DNA, 1073 bp, Homo sapiens
tcaacactctaaaagaaaagatttttcaatgcagaatttcatatccagccaaactaagcttcataagcaaaggagaaataaaatcctttatagacaagcaaatgctgagagattttgtcaccaccaggcctgccttacaagagctcctgaaggaagcactaaatatggaaaggaaaaaccggtaccagccaccacaaaaacataccaaattgtaaagatcattgacactatgaagaaactgcaacaactaacgggcaaaataaccagcttgcatcataatgacaggatcaaactcacacataacaatattaaccttaaatgtaaatgggctaaatgccccaattaaaagacacagactggcaaattggataaagagtcaagaatcattggtgtgctgtattcacgagacacatctaacatgctaagacacacatgggctcaaataaaggtatggaggaatatttaccaagcaaatggaaagcaaaaaaaaaaaaacaaaaacgggggggggagggtttgcaatcctagtctctgataaaacagactttaaaccaacaaagattaaaaaaaaaagacaaataagggcattacataatggtaaagggatcaatgcaacaagaagagctaactatcctaaatatatatgcacccaatacaggaccaccgagattcataaagcaagtccttagagacctacaaagagacttagactcccacacaataatagtgggagactttaacacctcactgtcaatattggatcaacaagacagaaaattaacagagatattcaggacttgagctcagctctggaccaacggaacctaatagacatctacagaactctccaccccaaatcaacagaatatacattcttctcagcaccacatagcacttattctaaaattgaccacataattggaagtaaaacacccctcagcaaatgcaaaagagcagaaatcataacaaacagtctctccaaccacactgcagtcaaattagaactcaggattaagaaactcactcaaaaccatacaactacatggaaactgaacaacctgctcctgaatgac

SEQ ID NO: 49775 - DNA, 1033 bp, Homo sapiens
gtatgagttccaaaaaggacctaatacatcagcataatcagaggcagatcaaagtagaaaaagggttttgagcctgttgagaggagctgctcaatgagaaaaaaaatacagaaaaccagttcatagtaagacaaagattggatgttttgggaaatgcttttgccatatggtttgaggccacctacatacattgaaaaaatactacaaactagaagagggctcaaaatgagatgaaatattaatgaaaatgtttatctgaaggcaaccagacaaagcttttaaagtaattttcctacttctgagaaacctttggagaaaagtaaacactccattttttcatgtctgtagacaggaacaggaagtaaccatctaatctagatgatgaatcctccctgccaactagcagccaatactgtcaggtcaacagtagctctagggaaatgtagttgcatacaatcagcaaaagtacgaaaagcaatgtaaatctgaacagggcactccccatctactgatgtgagccagaacaaatcagaaatatgtttgcaggagcagaatacaattaagtgatacaacaaaaaaggtgtatttacttaataatattttaccttaaaccctatctctcctgccatatcaaggcaaaacagaggttacaaaaaagtcttagactctggcaatttgctcttctttagaataagattctttagaatgagatttataggaggcaacattaacaaaattacatcaatctctaccaatgcaataataattataataattaatagaatagggtactcaacaaggttatttatattggggggggggatacaggaaaagagagaagccctgtaacttgttctgttcttctgccatcaaataatgattgtttctcaactgtattcaggtttctcagcaatttagctcaaaaatacaactatattcctcataacatccagctaaaaataccataattccccaggatctagcagcttgcagaagtacagaaatgatgatgtcttctttccaccaccaggta

SEQ ID NO: 49776 - DNA, 1047 bp, Homo sapiens
ttcatcataaattctttacctagaaaaatgtccagaagagtttttcctaagttttcctctaggattattatagtttcaggtcttacatgtaagtctttaatccatcttaagttttgtatatggtgggagataggggtccagtttcattcttctgcacatagctagccaattttcctagcaccatttattgaatagggactcctttccccagtgtttactcttctctactttgttgaagatcagttggttgtaggtatgtggttttatatccagttcactattgtgttccactgatctgtttgtctatttttgtaccagtatcatgctgttttagtttcagttactatagccttatagtgtaatttgaagtcaggcggtgtgatgactctcaacttggtctttttgctttaggattgctttggctattcatggtctttttttgttccatgtgaaatttaggattgttttttctaattccatgaaaaatgacattggtagtttgatagtgattgtgtggaatctgtagattgctttgggcagcatggtcattttaacaatattgattcttctagtccattagcatgggatgtttttccatttgttaatgtcatctatgatttttcatcagtgttttgtaggtctccttatagagatcttttgtgaatttgaaaagaaaatgtattctggtaatgttaggtccaatgttttataagtgtcagttaggtccagttggttggtagtattgatcatgttttctatctcctcactgatttttgtctacttgttctatcaattactgaattaataatgttgaaatatccaactctaattgtagttttgtctacttatccttttatgtgtattttttttctttcatgtattttgaggatctgttaggtacatacacatttagtattttgtcttcttgagttaaccactttatcattatgacatggccctcattcctcgtaacactgcctgtcctgaagtccaattcatctcttattggcataataactctagcattcttatgaatgtttgtatatc

SEQ ID NO: 49777 - DNA, 1033 bp, Homo sapiens
ctttgccaaaaagccctgtgttgggtatgccttcaatgctctgagagtttacaattctgccttagccttcacttcctgcttgcacagggtctaaaagtcagccacctcaggcagatacagtattaaacaattgctgctgcttgttttcaacaaatgtcccgaggatagggcttttccactgagtcagatcaaataaagacaagcctcgtgaatggggccttcccaaggagctaccacacaggtcaatagtgacaattatctggggataagatgtgaggagcttgcaactctccagtagctacaggttttcacagctaccatggatgcaaggttactagtttccagagatattttggatctggggaaaggttgattggattagggcaagttaaaatacaacaaatctaacttttttttttaaccgaaaatcagctattttattgaataaacactcctcaggttgttggaagcttttggttaatttttagaattctgaaaaacttgtttttaacaattgttgccagacattgcttttataggggagtagattttctgaagtccttactccaatattccagaaataccctctttacttgagtttgaaaatcattctggtattggtgtcttcctaaaaggcatcagctcttaaaattgcccaacaaaatatgtggaatccctggtgatatgtacacataagctgctaggtaaagttcataaacatctatagaattagaagagagaaaatatgatcagctttgatttatattctactttacctttggtgactacagggaaacaaatgtatttttaataacagatggaataaaaaagcatttattgttataaacgtttggctgtatttcaagtatttttaaaatactgctttatttttttaaagattcacatactttaattttaaataaaagaacatgagagactataaatgatcctagtcatggtaggactgactgcacagcatctagttcaatacctgaagtcataactaaacagaaggaagcttactaaggtctca

SEQ ID NO: 49778 - DNA, 1043 bp, Homo sapiens
aaatttcttcattaactttaggaggaaagaaagtgaccaaaccatttaattgtatcataattatagtatttttaaactacataactttgtagctagacaatttttctaacttcatctttgagacactgaagttcagaagaaaaaagatcactgaacatagaaggcactcaggcagtgtgacataaccaatgttaatctaactgacttaagctgaatgcgtactgaagaatgaaagcactttgtctacagagcagactactgcttgtgttatttcctagtctcttgtcaaggtttcatgacattcacaacattaaaggtgctggtgagacataattaaacagacaaagagaaattttaccaagaaagaggccactcacaggccattaaaattttaaaattgtcaactgttagaccttcatttcccaatgcttgttatagctagtctccttacaggtcccctttcttgctaggttctcccccacttcaacctacttttgattggtacccactgaccactgtataatgctcatcctgacctatgtctaagatgtttctctgcctagactgctttttccatctatgaaagttctacctagcctaaatcctattttgtctgtaaagctctcctgtacaatcttagcccacattagtctacccaaacaatgagtcctacagacatcactgtctccatcactcatttagctgttgaatcatatgtgacttcattatttgtttcatgaatcttgtcttttcagtatgactgcaagctttttaaggacatgaagcatggtttatgcctattttatagatttctcacccatactcataaaggggtctagcatagtgttctacccagaacagctgtattacttgttgaaatgaaatattagaaccagtcataatattaagagcagtacttgcatagaataagagataggtattgatgtcaaacacagtcttaagataatactggcaaaaaagacttgagacttcaacaaatattcattttaaaagcctgtaagcaaagggataatcatagtaaa

SEQ ID NO: 49779 - DNA, 1047 bp, Homo sapiens
gagaggatgggaggatgactaggaagggtaatgaggaagggcagggagatgggggaaggaagggaaaaactggagctcctaataaacaccaggcacattgtgaagtttatatgttatacataggtcatttgtattatgcttatcatacatgtacatgaatatatacacccaaacacatacacaaacacatacacaatcactttccagggattgactcatctatttggctcactctcaatcatgaaaagagcttaggacagtgacacttttagaaagccctgaatgagtgttaactagcctttcttcttatcatgatcatcttcattgtcattatcggcatattatataaattatctcatttatttcttctaactacaggacttagcaactattatttttatttccagtttacaaatgaggaaaccagtatcttattttatccaagcttgtgggtactgagaatataaagaggaattcaatatggttctaggcaaactttggggtcttccctatctagtgggagggaccgaggcacacataagccctcatggtccaataggtgctgtggtagaggaacgtatctggggaagttgaggaagtctccacgaatgaaggaggcttgagcagcatcttgagggatggcaggttatgtcaggaggaacagtggaggcaggggaagacattccaggcaaagtgagcagtatttgtgtgacagggcctagtgcatgtttcaaagggcaggacaattgtagctgggtgcaccactggcagcagcaggaggggagtggacgagtatttggggtcagctattcagagccctattggccaagctgaaggttttgttctgtgagcaagagggagccactggagctttttattaaggcagattcgggacagactaggaagacagtccttaccagggtgttgaaagattggagggaagagaggccagctgcatgcggaccaattgggagaccatctccagggtctgggcaagaagtggaacaggctctgaaccacgaccgtggcagtgagagccgagaggag

SEQ ID NO: 49780 - DNA, 1038 bp, Homo sapiens
tgcctaagacctgccctgacaatcagagtagggactacaagagtgtatggtgtatgaggttctgaactcccatcaccaccgaggccagtcctagttcttggtccagggagaagtctaggcaggataaatcatatcttacctcaaaaaacccttagcgtatcttgccatgtgtcagcaggcaaacttgaggaagccctggttctatttcacctggcaggggagcctataaggagagcgatgcccactcctataccacccttgtaacccagtagacttgccccatatgccccaactcatagcacctaaaatgggtctccagggtccttgccctgtttatagtatccatcctgaaccattcgttttgacccataataatagtgatagtataatggctaccagttattgataatgtatcatgtgacaggcattgggctaaactcttgacaagcaccatctcactacattcttacagtaacacaacttgttcttgtgttgtcagcttctgacctcttgatctgttgtttatggcctttgtcttgtccctcagtgggggttctctagctctgacctctgggtgaccccctcagttgttgattgctctcactccccttggctgttgtgcttcatggccagcactcttgatgagggtcttggtctataaacaggcatagatagctagaacataatgtgagcagtgtttgccttcaggtggtggggttatgggtagtttttattttcttccttctacttctctatacatttcagattctctacagtaagcatgtgttacatttgtaattataaaagtaagtaaacttcatttatgaaaaaagagttcattgtggctcctagaatttgatttactgagtcctttattcaaccaatattagttatgtaacttatgtcagctactctttgggggacagacggataagaatcctgctgatatgaacattccattccaatggagtggggagaacaagaacacactgaacttagattggaattgtgaaggctgtgaagagaagaaatcaggac

SEQ ID NO: 49781 - DNA, 1051 bp, Homo sapiens
attatttcatttagcagaggtttaagccgttgttgtcaattgtgtgcagtaacgcctctgacttcccttttgtggaattttgtatcgattttggatttttaagtcaaaggagactttaaaatcattttgatttggcacggattcttgagattatctagtccaattccatcatattcagattttaccatttgcttaaagtatagcttttggcagaactgcccctaggagcagctccttgattcccagtcccctgctctttctaccctgcataatatatgttgtaagctttttgtttctttatagttgtttgcctagtgttcattttagttactcgaattccttgcaaggtaggttttgtttgtttatttatggaagttatttagtaggaatttcacacttaactgggttttcctttggcgtatgacaaccttacctaggacttagaaatctgtgatttctgagtttttggaatttaggaaaatgctctgggtaggattgatagtagattgaataaattaagactttaagacagaattgtagacttttggagttgggagataatttaaagaatattttaaaccaccagttttacagatgaggaaacatgctaaattaatcaccacatttacatcttattagtccttattaaagaatggtaaccaaaagtctgtttgaaatgtttgctctatttgtttggtttcattacatgacagagctgcaggttcttgatattaatgagtaagtggaatgcagtttatttagcagtgttctattagaggtactgaaattttcagggataaggaaatgaaagagagtttagcattgggaaatttgcaccatggatagattaagaggtagacagttaatagaacatttacgggttggagtagatgaaaagagatgtgatgttttgggatgaccttgggaattaaggattttagatacttataatttgggaggaaagaaagctcaaaggatttgttggtaagatagtataaccaatgaatttgacatagggttctggaacatttaaaagtagtcattatctgca

SEQ ID NO: 49782 - DNA, 1029 bp, Homo sapiens
catatagtctgagaaatgacacatggacagatcatttgaaattaattttggggaaacatttggaaagggtcatcatgatagccatgtggtgatcaattttctgctgtacatgtaataccatttatttatttatttatttatttattttgagaccaagtctcgctctgtcacccagactggagtgcaatggcgtgatctcggctcagtgcaacctccacctcccagtttcaagtgattctcctgtctctgcctcccgagtagttgggattacaggcatgtgtcaccccgtggggctaatttttgtatttttagtagagactgggtttcaccatgttggccaggctagtctcaaactcctgacctcaggtgatcctcccaccttggcctccaaaagtgctgggattacaggcgtgagccaccacacccggccgtaatacgatatttttattggggagtggggagtgaaaaataattttggttaacactagtgcttagtatgtatcaggtactattcagagcactttacacatatatactcatttaatctttaaatattcctgtgcaataattggtattgtccattctacaaataacataatgtgaaaaaagttgtatttcattttagggtccaagagatgttgtggaaattgtaatttgaacactgaattccagtatacttccatcctttatggggacagtaggagagaatatttgaaatcagaggattttcctaagaaatttagattgtatgttagccacaggcgtaacggtatgctagccataggtgtataacctttttgaatttttacattgctacttaaaaaaccacagtgatggctactcatagaatccatgtgtagaatccatgtggagaaactctttcaattggtttacctgattgcaagttatttacaaatctttttcttttttcttagttgtattttaaagtttcattttggtccttgctttatttcttttcttggaattttcagcattcccacagcttctactgttgactcctttatctgt

SEQ ID NO: 49783 - DNA, 1057 bp, Homo sapiens
gtattctgttgctgttggattgaatattctgtatatgtctgttaggtccatttggtgtaaagtataattcaagtctaatgtttcctaattgattttctgtctaggttatctgtccattgttgaaagaggggtaatgagatcccaaagaggagactttttcttttttctcttccccattttccttcctatcctcctaatttagttttatcagttctgtgagattcattttcaatgttgacattattatgactgcttaactacggtattattcacatctgagccatgtagtgttcaatgattttatttcctttcctgtaaaactttgttttatctcattttgttatttcatcattttcccactttttgatagtaacatctccaaactttccaacagaagtgtacatctctcattatattcaaacacatcgggttatctaaacctttattatcttttttgagatatccacactggagttctctgtcctatttttggaaatgcttattttctagtccttctgagtgtctatcttcctgcgatttccccttcatccttatcctgtaatttctctttgcttttctcttgtgttgaatctcctatttccaagattgctcccttccacccccagactttaaaaaaaaaattctttattttggtttcacatatcttcagtagcttttctgagaaagggtggcaacatttttgaatctttttttttttctaaaaacaccttgttttactctttcatttgatagcttgcaatagaaataaaggttggaaataacttcccctctaatctagagcttcattgttttccgaatcctagtttttcttttgagaagtatattgtgttcttatttgtgttcttttgtgtataaactgttcttcttctgtgaaagctttaggatcttctctttatcccctgacttcagaaactttattgttatgtccagggatgatcttttttgctttcattgttgtggctgcttcatgggccctttcagtctcaatatggatactcatgttctacagtgctagaatttttttatattgtcatca

SEQ ID NO: 49784 - DNA, 2323 bp, Homo sapiens
tctgcagcgctgacttcaactgccttttcaggcctagactttgggctgctttccggatacctgcataagcaagcccttgttactgctacccatcctacctgcaccctgctttttccctcttgccacgctttttttcctctccctcttacccccaccctgtacaaaatgcataaaggatggaaaaactactgcagccagaagtctttgaatgaggcatcaatggatgaatatttaggcagcttagggctgtttcgaaagctgactgccaaggatgcctcttgcctctttcgggccatttcggagcaggtaaaaggaaaacatatcttccctgtactgagttttcagagtttgagacatgggatggtcctgtagtttgccagaagaaacaaaaaaattcccctgctttctagtgaaaacatcgggcctgtcaaggtcctagagagaagctgcctgctcttattagcttggtgcatgcctttgctgaatagtctatattgctgaacctttgctatcttttctgtttttttaaatgccagtttgtaatgtaggaggggtaagataaggaggctaaagacaactttgaaatatatcttgatcctttgtaagcatcccctgcttcctctaattttaatgcctaagaaaaaaattataggctgtgcacataaggagtagaaaaggggatggggcatgacagtcatccttcccccatttcgttgaagatgatattaaaaaaacttttagtaagatgatttaatttcccaatttcctacatatgttctgaataaggaagccttaagtgtccagttcatagtcttgatttagaagtgcctattttaaatgactactgacagtgggctggtctttctcttctttttagttgttttgcagccaggtccatcatttggaaatcaggaaggcttgtgtctcatatatgagggaaaatcaacaaacttttgagtctgtaagtagaatacatacccaggggagaactggtagagtgtgtagcaggtggaaaaataattgtgagcacctaccaaaattaaactatatcatgctgtctcctcaatagcaaatatataattcccaactggctcccttcccagtagctaacatgcttcttgagcctctgctagaattaggttgtttaggactctaattaaaaatcaagaataatctacattttcccactacttacctcgtcctacgccaagaactccagaccctaaaaagttatgttttgattgctgttttatattatccatacagttttattgaacaattaataatagttcatgaaaggtttggctctgttaatattttgcaatgcatattttaaaatacgtaaaaatgggaaccccctctattttcttgcttaatcctgtgtacaataatcttcagccagtcaatttgaggaatcttgtaaaacttaattgtaagggaacaaatgagtctaagtatctagtctttccatgtcacaaattgtataattagagctctgccactaatgattaactttaggtaaaacaacttacagaagacatatttgtacaccttcatgtatttgaattcttgttaatgaaattggaggcttccttttcttttttttttttttaaacacttctggcccttgcagtgctatttgtttcttctgtttattgtgggtattcgcctgctgttcgagttttactcctaattttctcaactggtttcagtgaattttaaaactatgtgaagacttcttgacttaaaagcttgttaccttgaagttcattgtagtcttctctacacctggggaaaggattattagtaacattacttcaaatgcaaggccatagtgtaaagcagtgcgtctcaagtatttctgtgcatacaaatcacctggagatcttgttaaaatacaggttttcattcagtaggtctgagttggggcccgagatttctttttttttttttcttaccttgagacagggtcttctctgttgcccaggctggagtgcagtggcaggatcacggctcgctgcagcctctgcctacgaggctgaagcaatcctcccacctcagcctccaaagtaacttgggactacaggcacacgccacctcactgggctaagttttttgtgtttttagtagagatggggtttcgccatgttgcccagactggtctcagactcctgggctcaagtgatctgcccgccttggcctcccaaagtgctgggactacaagtgtgagccactgcgtgcagtggagatttctgcatttttaacgaactgaagtaatgcttgctattggtttgtggacaacattttgagtaacaaagatgtg

SEQ ID NO: 49785 - DNA, 1056 bp, Homo sapiens
ggtctcgatctcctgacctcatgatctgcctgcctcggcctcccaaagtgctgggattacaggcgtgagccacaacacccagcctgtatgtcatttatatctcaaaactttttaaaaggaaaatttaaatgattttttaaaagtctagtgatatgtatccatggaactagaaataaatctattacagtccctgagtttaatttcatttttattgaggcatattttacattcaataaaactcgtcattttaagtttaccatttttagttttggagatgatatgcaatcatggaactaccactgcagtcaagatatagaatgtttccgtcacccctaaaaggttcgcttgtcccatggtctttttagaaactaatgaaattctctttaaagttcctcagtttaattttgtaaatgcatgttttgtcaaatttgaaatccttagaaatactggtcttgcttgatttatgaaaattgtcattacttaaattggcatttcaaatgaaactcgaaagcataccatttgatgaaatgcactggtatgtggatatgccaggaccaattcctaagatacttttatactccagcttttctccactcatgacttttgtgtatgtgcaaatcttcttgaggtgctgtgcaaagtagatacttacaccataattgttgagctgagcaaaaaacgcattgcaggataatgtagaatataatcagatttcagtaatgctgtgtatttggttaagttgagtttgttttatttttgaagtatgtggagggatcttttgagaaatacctggaacggttgggagatcccaaggtaagatcaaatatgggggtttaatcttttcagagttatttggaatagtaatgtaaatttattcattcaactgtattattttagccagaccccaaatattttatttagtagccagctgtgttgaatccaatagttctcacataagtttagaggctggcaattgaccaattgttttgtgttgaatattgataattgtgtgttaatcccatcaaccatagactagcaaaagagtatacactactt

SEQ ID NO: 49786 - DNA, 1035 bp, Homo sapiens
gcattgtagggtgcttcatagcatccctggcttctatccactagaaacaaaaatgtttccagacattgccaaatattccctagaggagggagaggcacagttgtccctggttgagaaccatggttcttaagggactttgtgtaaacttaagcactcatatttgagagctaaaaagaaaaaaatgatcttgtggagatgagtagaatgatggttaccagaggctcagaagggtattgggggtgggggataaagagggattagttaatgggtacaaaaataggtagtaggattaagatctagtatttggtagcataatagggtgactgtagttaacaattgcatatttcaaaaaaactagaggactggatttggaatgttcccaacataaagaatttgtaaatgtttgaggtgatagatatcccagttaccttgatttgatcattatacattgtatgcttgtatcaaaatagtgcatgtaccccataaatacgtactgttctacacctataaaaattaatttaaaaaacttaagctgacatggatcttaacctgagggggaaaaatatttcttagagacctgagggggaaaaatatttcttagagaactaggaaaatacctcatagaagcagccagggatattaacaggcataatttattagagaatagtaatgtgtgtgattggatgactcggagtttttggggtttttgtttgtttgtttgtttgagacagaatctcgctctttggcccaggccggactgcagtggcgctatctcggctcactgtaagctccacctcccgggttcacgccattctcctgcctcagcctcccaagtagctgggactacaggctcctgccaccgtgcctggctaattttttttgtatttttagtagagatggggtttcaccgtgttagccaagatggtctcgatctcctgacctcgtgatctgcccgcctcggcctcccaaagtgctgggattacaggcgtgttttgtttttttttttttttttttttgagacagtctcactctgtc

SEQ ID NO: 49787 - DNA, 1082 bp, Homo sapiens
tatatccttcaaaaatacaaaaattccctccctatgtttatttggtttgttcctaggggaagcattggaaagtttaaggcagtgtggtggtgacagtacactgggccttttgctttgattatgaagcttatttgctacctctttgtttgcctgaaagttatatcagagatggacataaagcaacagaagaagatgttcaagaaaattcgagggaaagaagtttacatgactatggcttacggcaagggagaccccctcctcccacccaggctgcagcacagtatgcattatgggcacgatcctccaatgcactactcacagacagctggcaatgttatgtctaatgaacattttcatcctcagcatccatctccgagacaaggtcggggatatgggatgcccaggtaagacattgacagatttgtattttcatggtctagggaaatatgaagcaattgaagagatccaagaagatagaatgccatcaagatgagggtctctgtgacatacagactgtatttcattaataatagttagccctaatgccagtattgcagagagcagagctctttctagttgaatgtttttagaaagacagattagttctatttaactacagagactgactacttaggtattagtgaatagagagttctagtttcctttctctttattcttaggaattcatctcggtttataaacaggcacaacatgccgggccctaaagttgatttttacccaggcccaggtaaaaggtgctgccagagctatgataacttctcttatagatctcggtaagtattgtgttgaaagtcagagaaaattggtaagtctgatttcattgctgaacattaatgttttaaaaagtgtcaactttgagatatttgaactgttatttagaaattaggaacaagttactatatttcatcatttttacttttttattatttgaaccacttaagttcatttagacgtagtcaccgccagatgagttgtgtgaataaggagtcccagtatggatttaccccagggaatggacagatgcccaggggcttggaagaaactattactttttatgaagt

SEQ ID NO: 49788 - DNA, 1028 bp, Homo sapiens
aagacgtgatggtaagtattaaatacatagttacctgtagaagtaagacaaatgagggctgagaagttgagactatactatgtaatagccttatgtttggagggtgtagatgtagttatttttttaaatgatagaattgagagaatatgggcaaagcattttttcatgctctcagtcacatcagattctttagtttagatgctcagaaagttattccgagactatgtaatgtgggctaaagcaaatgagtaatggtgggatattctaattttatcccgtgtccttgtgaaccaggattcttagtgtggaaaaaaggtaatgcagatgttatagaggttaattaaaagcttttatagtcttgaacttgaattagaagtatcagtatgaacttgagatattttatctttaaatatatatatatgtttcctcgctgtgtccactgaaaggcctgaaaacaataagtatccctagcaccgagtttgtggtcttaaaataccatttattacttttaaaaataaacggctctgtggagaaatggctgattccaggtctgagcaggaaatgttcaagatgagcctggaacatcttgtcataccagatagcaaggaacatatcaaagagtataggcattatgtcagaaggactcagaaaccatcacaaagagagattcccactggccaaagatggaacaatttgagcctcaacaaagatcattgcaatagattggaatataccaagtatgttgaatataaaagttcttagtgatattttaaaaattgcttactttaagaggatgataggaaatcaattaattttcttgaaaactggaacatgaaataatcaaacatttattctgccttccttatatgaactatactactgaatagccaaatagatgaggggaagtatctttttgtaatagtattctaactaatcaattaaaaagtgaaaataatttttcagttcttattaaatggatggacattaaacatcagtagctactaagattgcaaagtcagtcaaacatt

SEQ ID NO: 49789 - DNA, 1030 bp, Homo sapiens
tatgctcctatgctaaactcagtgtgctaaaactctgactttaaacatttatagaatgataagactaaactttctatgtttctcagggttaaaatgataatgcagataacaaaatgatgaaattttgtacttggatttaagctggctaaaattattcagttaaacttgaaggtttgtatcattcatcttttgtaaaaaaaaaaaattaacaaatttgcgtgttatgtcatacatatatgcaggtatgtgtttttactaggttgtaaccacattgtttcctttattgtcatagaggattaatatttaaatataattacatctgaatttcttatgtcaaaaacttttaaatattgattatttctaagctatagtaacaggtatagaaagctaaagggataagatattgtatctaacctgtttttagattctgtacctccttagaaatggaacgttcatgatttaaagttccctatattcctgagatgctaccagtagaaaccttcaaggattgctaaaatctgtagtctgtgcactttaatccatctcttattagcttctgcattttgtgatttgactgagagtgacagattgctgaaaacattcttaaatttgcattgggtattaaactaagtaaaaattttgctttagttatgttttatttatgtacctgttagctaaatgttcaaagtctgatagtcaaagctctgcctcttccagttttttcccttttaatttccaatacttttcttaaatcaaaatgacctgttatgaactagttctccattggtatgtctaagagaatgtagacaattcactgtccaagttttttttatacccaaaccttaagaattaagagttctttgaccatactggagacaagaaaagtagatgagcctactgttcataaggtgttatagttgtgtattgctactttatgttttgtttctttgttagtgattgcctcaccatcctatccatgccattctgctattcctcatgctggtgcctctctaccaccaccaccaccacc

SEQ ID NO: 49790 - DNA, 1041 bp, Homo sapiens
ttgtgatgaaaaccaaaacaaaaccctaacacttaatcaccatctaggataaacatagtggtagacttctcctttttacagattacctcttaagttgctcttgttacaaaaggtatcctgtcttttctctgcttttaaccaaatttcagccatttagaattgtttggggaaggaaatacaaaggcactgtaatttgtttggaaccctttacttacagccccttcttgacataaatctggttacgctaaaggtaaaaagctggataatttctcatagccaggaaaaataattaaattcatttttatgctgtatatattctcaaaactgattgtggctttctgccttgattaagagcagatgaaaacattgagtcggttttactgttgaaatttaagacttatgaatttaaaacagctttcatttccttaaagcttataatcaaggcataacctttcaattagctttggatttaaaaggataaacaaatcatgggattttttatgtgaacaccagacattcagaacttagacaaatctccatagataatgaatgatatagtctattgggaagggtggagcataaacttaatctagacttttgtaaatctgggccaaatttagttcatttcatatgaaacctctttaaggccttttatatttacgtttataataaagaatttatataatttatataagaattcaagagaactaatacaggttgagcatccctaatctgaaaatccaaaatgctgcaaaatctgaaacttcttgagcactgacttgctgctcaaaatgttctttgtggcaatttggaatttcgaattaggaatgctcaaccagtaaatataaagcaaatattctcaaacctgaaaaattttgaaattccaaacacttctggtcccaaacatttcagaaaagggatactcaacctatgtagcaagagacaacctcttgtttccctccatcctacctagaatgttaagtttcagtaggagcaacttgatttagaacacttgtcttctctcctacctcaatgaccaaa

SEQ ID NO: 49791 - DNA, 1049 bp, Homo sapiens
ttatccttgtaatcacttaattttaatacaatcatcccttggtatactctggggattggtcccaggaccccccgccccatgtaccaaaatccatgcatactcaagtcctgcagtcaccctgcagaacctgcagatacaaaaagtcagccctcttgtatatgtggttttacattccatgaatactatattttctatttgcgtttggttgaaaaaatctgcctataagtcgatctacacagttcaatcctctgttgttcaagagtcaactgtaattttaatgacgtgttattttatccctgctagataatatatttcataagggcagaaagattgcatcttttttgttcatagtgatttttctagtatctagtgtagtattttatgtacagtaggtactctcatatttgactgactgaccaaccatatattctattttatgtaacttcaaggaagacagctttctaagtcatagttgttgctgatcaagccgaggcagtgcataagggccatgaacaggattataaagcaggtgattccacttggagaaggtacttcagcccttgataaattacagcctttccaagcctcctatcccagtcaaatgggatcgtgtccagacacagccagagtgaagtttgcttctcctccacagaaccagccaacaactattgtgcttcatccctgtgaggaagctttacctgataatgttgattttgtatcaggctgtcagcattgcgttcctataattgaaaatagacagagatgttacatcagcagtctcccagcaccctacccacccaaacatctgaatataattatttctatatattaggactagagaatgctacaggagctcctgcctgacaaatccccaaagcaaatgtatgttggaatgattttatgatgtttaaaacagtgagttggtcacaaaggagggacgggaggaaacagttttgtttaaaaagattcataatattggccaggtgcggtggctcatgcctgcaatcccagcactttgggaggccaaggcaggaggatcacgaggtcag

SEQ ID NO: 49792 - DNA, 1041 bp, Homo sapiens
cttggaaactactgcaggaattcagggatgaggtaaggcacgggccataatgacaaacatacagcaggcattccactatccctcattcctatgcccattctgtgcattgttttttgcttatggcactctatctaatctgttgaacatggtttaactgtaatgtaaacttaagagtaaaaaaagtttgataatgctgaaaagaaaataacatcttttttattacctttccaaaaatactattgtcaatataagccttataaaacctccaaatttgttttttactagaaattccataaagatattaattaattaattttatggagaaatgcttggcttagttgctgcagaattcttcccaaatttcaagtttatgtattgcatagtaactgattgtggtaaacaaagctcagaccaattttttagcatagggatgctgcaagtgtattcctaagacaagaggccttaattttcttggcacttgttactatgtagtgagcttttcagaataaagtctagagctatgtggacactttggagctctgatgaaacatagatagcgatagctttacaaaattcttattacattcaccagggtgagaatattatggaattgttgcactctgtaatatactgctcactgtcttttgtcaataagagaatctttaatccaggcactctttaaaaatatcctatattttcccaagaagaggtatgcaaatgaaatgtcactaaatctaaagcatattttcccacttattactgctttcttgcatcccatatttttttctttttaatttttaagttgtatgggtacataataactgtatgtatggagtacataatatatattgatacaggaatacaatgcataataattacatcagggtaaatgggctttccatcaccttaagcatttatctttttgttacaaacatactaaatatacccttttagttatattgaaatgtacaataaattattgatgactataatcaccctgttgtgcaatcaaatactacatcttattcattgtacgtaaca

SEQ ID NO: 49793 - DNA, 1128 bp, Homo sapiens
ggagttcgagtccagcctgaccaacatggtgaaactctgtctcaactaaaaatacaaaaattagctgggcatggtggtgcgcacctgtaatcccagctactcaggaagctgaggcaggagaatcacttaaacctgagagtcagaggttgcagtgagccaagattacgccactgcactccagcctgggcaacacagtgagactctgtcaaaaaaaaaaaaaaaagaaaaaagaattcgggtttttccactaaagatactacatggagagcatgagagtacactcacattctggtgatgacaggatggcatactctttgaagatttggcttcacctaaattttttagaaggtaaactcactttacctagaagtcaacatggatgttgatgggtcatttgtaatttaaaaagggggaattcctatgaaggaaacaaaaataaaacaccatttaatgaaacaggtgttcccttgggaagggttgtaggggttgggctggggagtgaaattttatgtttcaaaaagctcgatcaatctgaaagtgactgactctataaaggcttcgtttaagggccacaatagaaaagtaataaaaacaaacaactatccctaaaagtacaaaaccataaattctgtatcggtgggtctatatttttcaaaagaagcaaaaagaaatgggtgaatttttgtttcagaatttgttattttattttgttttgttttttaacagtagtatgcaccctagagactaattatcagcctttcatttcctggtcacaaattactttcaagcttcattgttgtattagtatccattttgtggtgtttacttctgttttttaaccatgaatacacatattggagtaaggatgtgtaactgaggatgtaaagcaatttgctacatatgcagccaacatttaagtcatttcaagccattaaagcttataaaagcaaattatttgccctttctgggtccgctaacaataaccttcaccaaagtggttttagaggagcatagttactgaattagatcctgctgaattagtaagtttctactcccccaaacagtatttagtaagtcagcatatctgtaatttttaaattactgctcttataaacaaagacagagaca

SEQ ID NO: 49794 - DNA, 1173 bp, Homo sapiens
cgggacgtaagatgatcccagcccgggaggtggagtgggggttaatggcatctgactctagccttatgcgatgctccttgcctctcacctgagctgcacgatatccccagtggtgcagaaggttgaacttttgcagaaggttgagcttggagctaagtgggttggagagcctcgccatttagcgtcagacagacgggatgctgggggcgcccggcctgttaagagggattgggaggagggaagggagcctggctaacagtaggtagaaaatgtagggaaaagtaaaaaccattgaggggcaagcacttactccactttgctggatgtcacaatggactggggagcctaaacttgatcctcgagatgcagttcatggtgaattccaactaagtggctggagccccacacataccagttggaatcacgtgccccaagtctctgatggtcacatgacgtctttttactttaaagctggaatgtaatggttgaggcccatattccaaaaaccacctctacgtttgaaaaaaaaaaggtggggaggagtgtgaactagcttctaatcaaggaagtctactaggattttggatgaggggaccagaaagggaatttggtgctcagcttttatccaaaacaaaaacaggagctgtttttaaaataagggattgaaatatatgtgagctgggacatgtatctcctctcttcttcaatctcatggtttttctaaatttaaaaaacatcttactaattattttctagggaagtcatcctattactcatgcctcattttgtccctgaatactagatttgaagctaaatcccacaagatagtgttaaaaagtaaggctctgttcatcttccttggtctggcctatattctaattgaactgttccctattttaggcaactacttaaaggtagtaaataacctcttgactaaaattaaccaccagttatttgtggttttcaattaactggattagaaatcatgcacaaaaacagtggatagtaaatttgatacatcgagttggttgggtttttgcctgtcagtggtttggtagaataatgagaggacactgaaacaactttcccatattgacctatacccgcccaagtggcccaagttaaggttgcttctgggaaaacgtggcaatttggctattcagattatatatt

SEQ ID NO: 49795 - DNA, 1049 bp, Homo sapiens
ttgcttgagcctgggaggcggaggttacagtgagccgagattgcgccattgcactccaagcctgggctaccgagtgagaccccatctcaaaagaaaaacagaaaaacaaacaaacaaacaaaaaaaaacagaaaatgtgggaagttaagttgaaaaataaacaccttcaaagctattaacttggattttcttttcttttcttcttcttttttttttttttttttttgagtcaggttctcactctgtcgcccattcatactctgtccagttcattgaaaatacaagtctgattcccttgagttgtgatattcatacacacacgagtatatatacacttatgtgtgcatatgtatattatataaagttttacgtgatatataatataagtttttactttctgtaaaataaaatttgttagggccgtataatagttttgaatattcatattattgtgttccacattataagctctaattacatcgtgttgcactcagattgacattctgctgttgacactgaaaataacgctttcattcatagatgaatgtaattttcaagctttttttctatatttcttaacttgcttgaatgttcccatttttgccatttcttgttgttcattttaacattttggggcttgtgtttcagatcaggaagaatcaccattatagggtgcaaagagtttgctcagaggtgaaaatgatacgaaattgtccctagagcacatcctattgctatactattcaacatgtatgaattaatctactgggaaagtgtcttgtgtagtgtgtactttaaagatgttttcaatcactttgctttggattagaaaaattcaaggtaactataattttaaatgctcatatttttatgtttattttatatgtaggaagagaaatttttaaaaattggaataacactatatcccattcttttcatttattacattataaacatgtttccaagtgatcaaatatttttaaaaatgtttaaaatcactgcagtatattttatataatggctgtttcataatttatttcactaattcc

SEQ ID NO: 49796 - DNA, 1808 bp, Homo sapiens
ttctaaatataaaccttgtgtgaacaaagaaattcacttataacccaatataatcaaatctaaactaagaacaaatctcatttaaacattgttatttctttgcaataattattgcataccaaaaaagagcccactatgagttaatgttacttaaatagaacattgctcagcctacaaatgaaggtcagcagacaccagtgtcttggaataaaatagccctttggcaagaaaacgagccacaccccattaagtttttacaaaaataaaattctttccagctttactaaattgtagatgttgcgcccagcatgtacttctgcagtagttgattctgcagctgtggaaatattcatgtatgcagaagtccccaaaaacatctattcaccattacttgcacatgcagctcttatactttctgtagtaaagtattccgttaagttttattttgactcgtggataatagcaagcaactacaggtatagctgacaccttaatttcctgccttgaacttctggccacagactttatttttttattttttgagatggagtatcgctctgttgcccagactggagtgcagtggcataatttcggctcactgcaacctccgcgtcccaggttcaagcaattctcccgcctcagcctcttaagtgcctgggattatggtgcataccaccatgcctggctaatttttgtattttttagtagagatgggttttcactgtgttgaccaggctggtctcgaactcctggcctcaagcgatctgcccacctcgacctcgcaaagtgctgggattacaggcatgagccaccttgcctggcccattgtcacagaattcaaattgagcaggaatacgtaggatttcaaatctaacagttgtttcatttggtgggatagcatcaaagccatgtactgtgaccactgtatatggttttcttcaagagcagcaataaatttctgccatgtaccatgggaaagagctgtacttttagggagaaaggaaataagccctgagaaaaagccccattttcctagttcctttcacagttcacctggcacacaacgggtcttgatatttatatttgaaagagtgaaacatggatggccataaatgctccttgctgataacgattgaattgggaaaatctaatcaggaaatcagtgatttatgaattacattgcataaaatacataatgatgggagcctgtaagaagactaaacaaatggcttccttagtttatttttcctttaggttttagttgttttcagtgaatattatgagtgaatgttatcgatagtgttttcattgtgagaactgctaaactgtagagtcaaagaagaaattgggacatattaatattttgacttttatgccagctttattgagacataatatcatactttttttttttttgagacagagtttcgctcttgttgcccaggctggagtgcaatggcacgatctcggctcaccgtaacctccgcctcccagattcaagcgattctcctgcctcagcctccctagtagctgggattacaggcatgtgccaccacacctggctaattttgtatttttagtagagacagggtttctctatgttggtcaggctggtctcagactcccgacctcaggtaatccgcccacctcggcttcccaaagtactgggattataggcgtgagccaccgcgcccggccccataccatctatttttatagattttagtatattcacagataacatgcaaccttcaccagtcaattttcaaacattttcatcacctcagaaagaaaccccatacacttta

SEQ ID NO: 49797 - DNA, 1081 bp, Homo sapiens
taatcccagcactttgggaggctgaggcaggcggatcacgaggttaggagatcgagaccatcctggctaacacggtgaaacctcgtccctactaaaaatacaaaaaattagactggcgtggtggcgggcgcctgtagtcccagctactcgggaggctgaggcagaagaatggcgtgaacccgggagacggagcttgcagtgagccgagatcacgccactgcacaaaaaaaaaaaaaaaaaaaaaaagataaagtgggaataatgtttaaagcaggatatagaattaatacaagtaaatgttcttcattttccctattaatttaattatactatattctgtgtttaattctgaattagattttttaattaaactttttattttgagataattgtagattcacacctacttgtaagaaatggcacaaagagatcctgtgtacctttacccagtttcttccaatggtaaactcttaaaaaaccatagtacaatagcaaaaccacaatgttgacactgatacagacaagaggcaaatgagtttcattaccagtagaatcccttttattgtcctttgataacaacacacacctccttcctcccctgacctccatttttgaccccaggaaaccactaatctgttctccatgtctataattttgtcatttaaaaatattatataaatggaatgatatatagtatgtagcctttgggaattagctttttttctctgagcgtaattctcttagagattcaacctaagttgttgtgtatgtcaatacctcgttccttttcattgttgaatagtattccatggtgtgtatgtaacaaagtttatttaaccattcacccattgaaggatatctgggccatttccagttttttagttatcacaagtatttgtatacaggtgttagtgtgaacttcagttttcgtttctctgggattaatgccggaagagtgcaaatgctgagttgtatgagagttgcatgtttaattttataagaaattgccaaagtgtttgcccagagtgactgtaccattgtgtgcttccaccagcaatgtatgagtgatccagtttttcca

SEQ ID NO: 49798 - DNA, 1219 bp, Homo sapiens
ttctgaagaaatgtgtatttttatgattttgaaattattgaatgaatattaattagcagtttcttttttattttttaaattttttgtgtggagatggggtcccactatgttgcccaggctggtctcaaactcctggtctcaagcaatcctcccgcctcagcctcccaaagtcctggtattacaggcgtgaaccaccatgcccggccagcagtttcctttcagccataacatgaatgaccttttttaatggccaaaattgaagtttgtcaggttctaaatcactaatatgtttttgaatttaaaaatttttgaaggtttacttctggaatttttaagaccaaccattagatttataaggctgttaataagattcctaaacctattgttttgccttaaggaaagtatggtttaccttttgtgttatcccaaacaaattcatctccccatatagcaaaatggaatatgctactaaatagttgaaatttagggtaatggagtttgggatatgtttattattcatgaatagtaagtcaaaagtttttaaatgaaaacatttgtgtattctcatgctttgattgttgattctgcaaaataaaatcttaaaaattacaaaaagcatctgataaacttcttaatttaaaagaacactcagaaatttactttcaggtatttaaaaaaagagggaggctatcaaactgattaggactgaagaagaactgaagagataatgtcaccttgttggttttgggtgagggaaaattgaatgagatcatgctttctttctgtcttgctttctcaagataaagcttttccactcttctgtctgcttactgattcagggtggcaggcacaaaacaaaacgttccggttatattttccatcctgtttatatttaaattggctgtttattctttaataaagtgtataactgttggtctataacattatgaatgtgggattaagtggttagacttagcaggaatttgaaaatcagggtccaaatgtactaccctaagtacagtagcagaattacttctataaagaaaacttccctaagttacagcatctggctcatagcattatcattacagtgaagtttaccatcactcatattagtgatgtgttacttcccacttactcctaaccctgcttaggtaatgcaaaactataatttagaaagtgtgatttaaagaagatgcaatataatggtactcattgt

SEQ ID NO: 49799 - DNA, 1032 bp, Homo sapiens
aatgatcgtatcttacagagttagccaatggaacaagagtagatgccttttatccttatttatttgctttgcattaaaaagacaaatgctgaaagtttattcttgactatgaaataaaccactataatatatgacactgagttaattcctttaggatgctatgtcttccacatacatccatttaataaatatttgttgagtgcctactgtatgccaggcactgttctataagctgaaaatagattgctggacaaaacagacaaaaaatcactgccctcttagagcttattaaatacgaaaacagtagagcaatttaaaattatttaatgctatcactcagcttttaaagatcttcactgaatgagttttgagaacttttgcacatattatctacagcttgaatagggaaaaaatgacattttgtttgaaatctagttcaagaagctagaagctgataagtaaagtaaatattttattctgtgatgatcattttcagttttcatttatcagtgttatacttaggcctcttgaggaatgttactagtttaacttgtggatttcctcctgaggatgggcttaatttgtattgggggaggtggtgaaaggacctagtagccctggaatttaatgtaaagtcgtggcatttgtaaaactatcttctgtcatttgaaaaattatagaatacttaaatgtatttaatgctccctgtggaaaatgaatgtattgctcagttatttttgcctatgtgagtagtacaagagctgactcaaaggagatgacatgatggttcctgtcctgaagtgaaataagatgatgggttgtggtggaaaaatgatgtggtcatgcccatatttgctcacatctcttgttcgtttccttttatagagggaaaccagggaaagtctcatttcttattttttgtttcctttttgtattttctttcatacgccatttccctttctttttttcttaaaattgcattatagtgacttccaattcaattggctcaagttgtacttggtaatgacataa

SEQ ID NO: 49800 - DNA, 1028 bp, Homo sapiens
gccagcactttgggaggctgaggcggacaggtcatgaggccaggagttcgagactagcctggccaacatagtgaaacccggtctctactaaaaatacaaaaaaaaaaaaaaaatagccatgtgtggtggcaggtgcctgtagtcccagatacttgggaggctgaggcaggagaatcgcttgaactcgggagggggaggttgcagtgagccaagattgtgccacgcactccagcctggaggatggagtgagactccgtctcaaaaaaaaaaaaaaagtttctaaacaacattgtacatgttatgtcatgactgtcatgataaagtcttgccttttagacatgaacctgattcagcaaaatgtgctttgaagtagataagctgtagatttttgtcttgcctgaattgatattaaagagatgttttttcttttcacagttcaaaagtacagaactcaggttaaaacctagatatgtaattttgttaattttattttcagtttgaaaattcttgttaaaacctgcatactttataggtttgctgtctctaaaattagatggctccttcataaatattactgaataaagcaccagttttcaaaaagtgtggcacatgggctcatgggggttaaaattactttcatgataaaactaaattgttatttgttttttcactgtgttaacatttgcactgatgatgcaaaagcagtagtgggtaaagctgctgaatcaagatagtggccccacactgtagtgatagccactgtattcctcagcaccataccatcacctttagaaaaaaatcttacaacatgcatttcatttacaaatgtacttgatgaagcaggaaaaaataattgtattaaatctcaattcttaggtatgcatctttttaaatattgtgtgtgatgagataagacatacccataaagtatttctgctgcatatggatatatgacgattgtcttgagggaaagcacttgcgcagctgtttgagttgtgagctaaactagctgcctttttaaaaataga

SEQ ID NO: 49801 - DNA, 1042 bp, Homo sapiens
caacaagtttatatacctaatgctgtgcctggtatgaatttcctaaactttccaatatagtcccaaaattacagtagtagtttcttgaatgtaaacttgttgcctgttttatatgttagatccctttgcttctatgcttcactcactatgtttgtttgttcgctttgtttttataagtcatgaagatggaaaaaaaactgtttcatgaaaggaaaatagatgagtgttgttgaggtgtgtcattaagcacagtgggagaggcctccaatgtacgtgtcacacatggaaagtatacctagtactgggtgtggtggagagcatgacgtctggatgaaagttgtaagagactttaaaaatactatgcctagcttttgtgttacaactacatattccactgatacttatgtgaaactcccataacttttcgggttgtacctcttttttccaccctggggtgggagtgtgtccacaagtgcatgtgtgtgaactcttaactttgtgtttgtattttgagatggagtctctgtggcccaggctggagtgcagtggtgcaatctctgctcactgcaacctccacttctggggttcaagctgttctcctgcctcagcctcccaagtagctgggactacaagggcacaacaccaatctggcttttttgaatttttggtagagacggggtttcaccacgttggccaggcttgtctggaactcctgacctcaggtgatccgcccacctcagcctcgcaaagtgctgggattacaggcctgagccaccgcgcccagcccggcctgaactcttaactgtatggtttctgtttgtaacatctagagagagtgacagtgagaatttggtttccgtcggctttccttagcattcattttgatgaatttgggatgcaatttaaaagctgttttcattctgtggcctgctgatgaaaatgtagaatttattgcagaacccttgccaccgtcttgcattcccaaaccagtgttcattacccatagtaaaaaccgagatcctgttcacacacatgcacatac

SEQ ID NO: 49802 - DNA, 1050 bp, Homo sapiens
catgtcacgattagattgatattatactcttcctacgtgagttaaatcaaacagttgtcttagtgtttataatttacaaaataataaacatcactggtgattaaattttgatggcgttattggtacttggcagcaatagtgatttctggtgctcacatacattaggattttccatcacatggttgtcatataagtttaatttccccatatttctggcaaagggaagtatagctagttatacagtcaatcctcactctgagttgagtcacctctcggactggttgtacttaatatgcgcatatgaagtaaaaagtgaagcatgaaacaaaacaaaccagttttttcaattaacaagtgctgtatttgctaacatataagcaaggtatataacactgcaagaggcattttcagtgacttgccgatagctttctgcttcgtgtatatagtgatttgagttgtaggtcacaatattttatggcatttttattttgaattgaagtgaagcatggtaactagtctgatcttgcctagcctctctctctctctctccctccctctctctctctctctctctctctcacacacacacacacacacacaccccacacacacatatccctgaaagttgcccttggcttcactcaaacatatgttaattttcataagaaaggaaactggtggaaatacttcttaggtatgaaaattaattaatttcattagcagcagatttattttcccataaattattcagattttgggggtagatgtaaaagtttacttaggcatggaagacattagaccttttaaaagcaaagtgggctatttcaatctaagaagttagttaatgtaccttagctttctgaagctaggggaaggagaggtgtctttttgttgtgtctttgggtttgaaatagtattcttcatcctaggaaaaagggcttttagactataattgagacttgcattaaatagctgcaaaattcttgcctgagaaacgtttaaatgatgtctttaatctgaccaaattgaattgaatatttctattattgg

SEQ ID NO: 49803 - DNA, 1841 bp, Homo sapiens
tatcccaggcacttgtttattccctaatacaatttagggaatgaagttatggaactctacagacttcttagctttcaaattctcattgctgtgatcactggatattgggaatactgggaattttcactccctctaaacattgcagttggttggagtattttattcattttttatgtttatttttttagaggcaggcaaccatagctcactgcagcctcaaactcctgggcttcagtgatccttctgccccagccttcctagtagctaggactacaggctcaggccaccatgctggctgatttaattttttttttttttttaagagaaggagtctcgctatgttgtacaggttggtcccaaactcctggcctcaagcagttctcccacttctgcctcccaaagcactgggattataggcatgagccaccaccctcagcctcagttggtatattttgtaaaccatgcctgtgtaaccaacatccagcaatgagagtaaaaggtgaagtttagactgttctccagaaacaaacaatcatgaaatgagacttgcaaagcaaagaattacacaagtttttgtgtgctgttcgtgaaagaaggattttcttttattgaagaagattgttctctttgaccaagtttaagaatctatgtaaagaaggtagataaactgaaccaagtaggacaatggaagtcccagttagactgactgtcctcatatccacttatgtaactatagggagaagtctataattaaatttcaaaattttgtggcaagattctaaattctctgggagttgaagagaaagatcagtgggaggtggagtcattgggaaacgtgctttgggagaggatgaggcttctgaaccttgcttgaagggtgagtagaatttggatagagagagaggaaaaatagaggagagtattctaagcatgagacgcagatagagagagaggaagttcttaatggaagacaggaaaagcagaagagaccagaataaaacaaaaggtactgatagaggagaatccagaaccagctgtaatagaaacacagttctgtgagagtactgggaagataaattttatcttgggtgcggacaatctgaagatacttcctgaaataggcttttgaagtgtctagatagatgggtgaagagcattccactggagagacccagtggtctctccagggagtggaagaagcgggaaaatacatggcctgtttggggaataaggtctcttgagagtgttgggttcaagggtgtagtacatataatgggaagtagcattggaaagatgggcagacataaagctagaagtcaagtcagaaaagtgtagggccttgaatgctgtcctaaaaaggtgggacctccttttgcatggaatgtttataagatccgctcttcaggagattatcaggagattagcagtgtaaagattgcactggaggaagacagaacagcaggcagatctgataaaaaaaaaaaaaaacttttgtggggttgggggagggggaagggatagcattaggagatatacctaatgtagatgacgagttaatgggtgcagcacaccaacacgacacatgtatacatatgtaacaaccctgcacgttgtgcacatgtaccctagaacttaaagtataataaaaaaaatatataaaaagataaaaaaaaaacttgtggagtaggccagacatgaggtgataaacagatatgacggaagaatctcagatattgcaaggcaagaatccagagggatgggtggttgactgatcctccctttgttttttatggtcaaactgcagtctggagacagaggaaagtgggaaagttgaaaacgag

SEQ ID NO: 49804 - DNA, 1035 bp, Homo sapiens
ttttcctttacagaaatggcaggcataggagctaaggaggaaacagaatttgggacagatcaaagtgctttgcagatgagcgaattcagaaaaacgtagagactccaggaggttttatttttgataagtattaaaattgctgagtttaaatggaggaaaaatatatctctatttctttgaatgtcagttctctttctctctccctctctctcatcatgtaaataaagtccgcttttgcttggtggcacacatctgtattctcagctactcaggaggctgaggcaggaggattgtttgagcccagaagattgaggctgcactgagctgagattgcaccactgcctgggtgacagagtgtaaccctgtctcaaaaagaaataaacacataaagtccacttttgtgggaagacagactgggaaagaggacatatttgaaaatcagggtttttttccttttgcctgtcaatcacatattgtgaaatcggggttaaacttttattcagcaagtaatactttctcttcacctttttctagtactcatgaaaaaatttgcaaattaggaggaatgtgacaatattgacaagctgttagctattttgaaaagtgatcctaaaatatttaaagaaaaattgttgtttgtttgtatatctcctgtctgctctttaaattgtgtttagaaactggccttacggaggaaccaaattgagtcatggataaaaagtgactgacaggttttcctttaggcccatccttcttaaattactttgactaaagacttgtaatttttatatatgagggagacctattatactctgtagtcagtaattatagggagatgagataacttttcatttatcccatgtaaaaggctattagtagaactaatgccttatatttatttatacagctcttcacaattaacccaagcattcatttattccctattttctttcatgaaggatttgaagttgctatgtaatacttcatagttcacaatatgctgtcatacataccatctgtaatcttcattaggac

SEQ ID NO: 49805 - DNA, 1032 bp, Homo sapiens
aggccaaattggaaagggtgtatactcagataatataataatttacatgcataagaatgtgtatattagcacacatgtgcatttttatatcaaaaccagctataatttgttttgtttcctctttattcttcctttaatgagagtgattgatagatgtcagtatgctatttgaaaatcaatgtcttcacagtgaatgattctaaagtggcttaatgggaaaatgatactttccgtgaatcattggtcacataatattgacctttagctttggctcatataaccaagaatttctattatgtagctttttcctgtcactgctgggtactttggcccttccttaaactttttgaatgtaatttaagattttgtccttagaaggaaaattcagaaatattttttctcaataaattttggtaagtgatgacttctcatttgttttctttattaaagctgtatgtagagacatggtaacctattcagattgttttgatagtttgaaattctgtttaaattatccctaagatgagaacttagcaagagtgcttatatttatcacaattttttaaagtctgaaacgtttttggtttttctttagatctttaaatggatgagatggctaccactcagatttccaaagatgagcttgatgaactcaaagaggcctttgcaaaagttggtgagtattttttgtagtaaaactatagggaagcaatatttatttggtctcaaagttatttctctataaatatcacatgaatggttaatcaaaaacattagggcaagatagttaaaatagatgggataaagttttggaagctatacttaaaattgttttatttcttttttttttttttggtcgagtggtagctgatattatttccaattttatgtagtatttaatatggtcaaattttttagaccacagttccaatccttaactggtgactgttatgtatggttcctgaaattttcatgccaaattttagttattattatattttgtatctcatatctttctgaagaggtttgaaa

SEQ ID NO: 49806 - DNA, 1058 bp, Homo sapiens
agaaaaattcatgtaatgtaaacctttgcagagttgctttagtactgcaaacacttaccttgccttgccttttttccctcctgagcactcactactgaggttttttaaacatgaattcagcacttttgaaataaaagaataatgggtttcttaaatgactaggaatagtatgggtgtattcctttgaggtttcccaccaaactaagcaaaaaaaaattggttgtggtgattgtagctataccagacttctctcatcctaggaagttgagttgtttcaaattacttgatattcgctagtatataaaaaccacatcaggatgatgccacaaaaaaaaacagtgctttagtttaatttactttcagtattcaataaaagaacaccagtgcatatttgtttaattatgccttaaaacaaaaacaaaactatagcccgtctaaaaaaaatgaaactaatcagtgctctttcattgtgccatctggttaattatatatggattattagaagtggaggtctcgggatagtcggaaaaccatgtttcaaaggtgtggaagctagttaggagtacacatgtgtgggtgcatgggtaaaagcaatttttatttttatttttatttttattttgagactcctgggctcaagtgatcctcccacctcggcctcctaaaatgctgggattacaggcttgagccatggtacctggccagccaggtatattttgcttcatgcactagatgcgttcctgaaaatcagcaagccaactgtaaatggattttatgtagtgggatatattttaaatgtaaagagaaaatcttatttttttaagtgaagcctgctttgaatttttttatttttttatttttatttttaattattttttgtttatttattttttttgagacggagtctcgctctgtcacccaggctggagtgcagtggcgcgatctcggccactgcaagctccgcctcccgggttcacgccattctcctgcctcagccaggtggcagactacaggcgcctgccaccacgcccggctaatttttttttttgtatttttag

SEQ ID NO: 49807 - DNA, 1081 bp, Homo sapiens
gtgtactttgaaacagaatcagcattaagttcatataagttctttttggagcaatggaagaataagaaacacaaaattcctatacttacagtagaaattgttctataccatggaagtgttttgtaggtttacgatctattagttctttttttaaaatcctattagcgccaagttaataataattgtattagccaactatgcttccttgaacttagggatgctctttttaagtaaatctacttacacattgcttaaatcacaggatacatgatgtaaaaccttgctttttccatttaaatgtccatttccctttcaaacaactttatgttccccacaataagaaaatattttatgtaagtgagcttatgaactgaacctcaaatgaagggaaatactctaacttctgtctttcaattttttttccttttttgcttgctctccttttttacaaagatctcaacagcaacggattcatttgtgactatgaacttcatgagctcttcaaggaagctaatatgccattaccaggatataaagtgagagaaattattcagaaactcatgctggatggtgacaggaataaagatgggaaaataagttttgacgaatttgtttatgtaagtatgtgaaaattcacaattattagaagtagtagatgttccctcgtctagtgggatgttatagtattaagtactgttatgttaagttcttaaatatatcatattagtactgttataacatttctgtcatcctgcccactaaatgtacttcttttagctgctggaatatcttaacaaacgaattgagaaaaagagcactgcagaaacaaagatataacatgataagatgttaaggtgataagttatataaggcgaacagtctcctttcatgtcatcattaaagggcagttatcaaggtgctaagtgacatctttgaagtgttctctctcccgtggtgaacagtgtgctccaaaattttaataatacaccctgactcacagtctcggaagcttcctgagctgaactttctcattaaaaagttgttttccactcttgtggtaggggtatttaactgaaccatt

SEQ ID NO: 49808 - DNA, 1044 bp, Homo sapiens
gactgtattaaccaaatgtctgtccgcacccatctgccttgtcatcagtgaaacatcttacaaattgtcaaacaaaatatgggtagagcttagttatccaagaaatagaaatcatgttattcctgttagatattggcataaggaaatagatacaaacatgttcttgcttgttaggtttctgctttttctttgaattgttgcttaaggggtgttaattgcaaaccagactacaaacaaaaacagtttatgttaatttcagagaaatgtctgtgtgtgtgtgcgcgcgtgtgtgtgtgtatggcaaaaaacagtcccaaaattatatgtatgtaaactttaaaggtgaaaattaaatttaataccctgctttttaaaattctaagcacttcaaaactaaaaatactggatttttatgcttacaagataatgggactttttttctttgattgttaaactagtatggcactttcagcagagaagtaagctgcccagaacagtcttggacatatagtaaatactatataggtgttagttgctggggtagttctttctttaaaaaaaaaaaaaagaagttatgtttttcaaatattactaagtttaggcctacaagacattccaaaataatggaaaaattcaatcctgcctctttggaaacattttggaaataagccccaaacactggaagccagtcaattctttttttgcaattctttctgaaatctttctttcttaagtcatatgcctctggattgttttggtttggccactcgtcctgtgttgagctaactctggggtcaaaagaagttagccggttgctgagagtctttgagagaaagaaggcgaaacttaataaaaggaataaaaaacatatatattccataacggagactgaaaaagatgtatagatcaagagtggttatggcttcctgaaaaaagtacagcaggagttagctcacagatgataaagcaagtctttccttgtggagagaaaacagcacaaaacagtgagctcattagtatcacaacgggcagctttgaaaagat

SEQ ID NO: 49809 - DNA, 1121 bp, Homo sapiens
caagtgattctcatgcctcagcctcccaagtagctggggttacaggcatgcaccaccacgcccacctaatttttgtatttttagtagagactgggtttcatcaagttggccaggctggtcttgaactcctcctgacctcaagtgatccacccactttggcctcccaaagtgctgggattacagatgtgagccaccgtgcccagcctacttttctagttctagttattagttcgaattcccagacgttctcttttttaaatatgaattaatccttttttctgtgacataaacaaatttggatttattttttagctgaaatcatgatcattgaaacaacctaagttttagaagtaaatgattcttgaagcagaagcactcgtaataagaaaaataactttacatatctcattctgaagctgtaacacttttgtcattgcagggacttgtggtatgttaggcatgaagaaatgcacacctttcagattttaacttattagacaatgaagtagagttcagaaagaagtagactagtgactattgtcttttcacagagcagctgcgttgttatcaaaaggagagctataggatcaaaatgcatcacagttaaggcacagttggactaaaaaatcagattgtaaataaaaatattttaatcatttgaaaactgcctgaagtgtgtgcgtaagctccatactgttgatacttagtgaaagtcagtataatggccatagagcaggaagggtgatttcattggttgtgtttagtatttagagtagtgtgtatgtgtgtgtctgcatacatatacaaacatagacacacacagacatttattctaaaattccacctccaaaattactggtaaagctagcacagaatcacaggtatggaaatactgagtaagcttgattttgtaaaatttaagtgcttactaactattctctcaaacaaaattttatttgtaagtccaaagaaagttaggatttaatttaagaaaggtaacaggaaaaaatgactaagtaatagggccactgacaacacatacagcaacttttctaccagttactaaaagtcactttctctagatggattaattacaaaaaggtaccctcctggaaagacaa

SEQ ID NO: 49810 - DNA, 2011 bp, Homo sapiens
tcctgttttactggctttgactaatttagccacgcacattggtggatcaggaacacatttggaattaggtacattccaatacctcagaaaaatatagacagatagaatgtccaatcagatagctacacagtactaggatgtgaaacttactgtgttataacttgcttttgtacaattagaatgttccttactgtgaagagaagctggacttcataaatgccccaataagacaatcactgaaaagcctctttttggtgtttattcttgatagtcatctattactaccagcttaacacattttttaactgcattattctgtaacttttgatttaatgaattcttaatgagctaccccattatactgtaaaatagttttttggttaaatcataaaattttatctttctttgcattaagaatttttattaaagtagggggattcttcaatgttttctctccaggaaaagaataaagccttccttgtttgtagaaaattaacagatttacctgtgcctttgaaccacattagtttttggcttaaagtgagttcaatgcatgtagcgcttaatgtttttgacaagtgtgtgcaattgacattctggtgcttcattttcagaaggggtattgtagtacttgtttagcatttcaaaaactcaagcccagttttttgtatcttttaacatcagctatggaaaaaatgtaagtgatcaagatataaaagaatataaatatgcttattgtgcatagtttgaaattaattgtgaatcaacaaaattactttaattaatagatttttcaagaggtaaaaagtagtgatattgccaagaccttccgcaaagcaatcaacaggaaagaaggtatttgtgctctgggtggaacttcagagttgtccagcgaaggaacacagcattcttactcaggtaatcattttatatgcaataggttaacacaatgtgctaagtgggatggttgctgtaatgtcaaggacgggctctagaaaaacattaccttctaattaagaatacagtagaagtcctttgtgacatgtatttaggcttgagactaatacttgtcataaaggcattataagtgtttattgtatggctttgttagcttgcaagagacaggatacaatccatgtaatgacaggctttattacagtgcattatacagtaatataaatataatttttaaggaattttgtaacttttctgaggactggttaacgtgttctattctttttcttaattttgtaattcctaataaccactgtgttgcatccaagtgtctgggtttccacacagaataaccacatgtttctgacacattaactttcagcactactgcacaactattttaggctttggagtcaaatatttaataagttagagtatgaactaatgtcttgttatttaacataattttagaggaagaaaaatatgcttttgttaactggataaacaaagctttggaaaatgatcctgattgtagacatgttataccaatgaaccctaacaccgatgacctgttcaaagctgttggtgatggaattgtgctttggtaagatgttagcttgttttatatccagatatccaaaaatagccttccatataattgatatatttgtttctgcatgcttgacaggttcacctcaagaaataactagaatggaaaattatccaggttctgcctttttcatttaatctctaggtctgtccatgaatctaaaattcagccataaatcgacaacctctttatagggaagctctcagcctccattttcttctcaacaccaggccagcagaacattacaactttgttgaacttaagtatgtcagtgtctctttattctaaagtaccacagcttccaaaagaaaaaaagaggctactcttcagttctcactctccaatgacctatttctaaaaaatgcttttgtcactgctgctgccccacagccaacagcatcttggcagacataacacaacattatcaacactgccagtcgatgttcc

SEQ ID NO: 49811 - DNA, 1029 bp, Homo sapiens
gctctgttttcagcacagattgatagaaaatatgagtcttgggtattatttatggttttatatatcttgtttgacaatgtagtgttactgtttttaaggaaagtcaagtcccagcttcctgaaaacactgattacattatttttaaatcattagtgacctgcaagatgccctggtaatcttacagttatatgaacgaattaaagttcctgttgactggagtaaggttaataaacctccatacccgaaactgggagccaacatgaaaaaggtagataattaagttgctgtatatatttgttagagtatttttattctcgattaatttcttttgtttctaaaactcttgacgctgagcttcttgaggacaaaactgtgtcttatttgtttttgtgtgctgatacctagcattatacaagacacacacacacgtatgcagattaaacaaatggaagtctttaaccatttactcttgtgcctttgcagctagaaaactgcaactatgctgttgaattagggaagcatcctgctaaattctccctggttggcattggagggcaagacctgaatgatgggaaccaaaccctgactttagctttagtctggcagctgatgagaaggtatagtacacaattttagctgtttagtctttactatcatacaggtctgtgatttagtccttactgtgtttaataagtggatatgtcgataactacacttttgaaatatgttatatttacactccgaaatgagtttaattaatgaatatatgttggatgttaagtgggagatgcttccttgcaagttaggcagcagaactatggttagtcccttttttaaaaaataggaagcctgacacacagatttcggcctcgtttagtgtcagtgaattaaaaaattgtcagaacaaaattatgaacatcttcatgctcatttgaaaataaagatctctctctgtaatgctgatgaagatcactataatgctgaaaagcattcattatgactgggcaccagccaaagcacagcttatt

SEQ ID NO: 49812 - DNA, 2136 bp, Homo sapiens
agtattcattgcatctgcctaacaacttgggttttgcatctagcatgattttccacctcatatctctaagatgacttgagtgtgtgttattatgtgtgcaatgagaatattaacatggattgtatagacagcctaggtaattatatatataaagttggtgcttcaagcttaattctcacctcacattggagaaaaagagtgaataaatattattagccccaaataatagagcttaaaaacctactgtaacttcaaagtgaaatcaaaacccaaatcaaaagaaaacaaaaagcaaaactgttctaattggaactatcaatatggaatttttgcatcccagcataataattatatatgaggaaatagatgtcttacgtggtgtccttaactgacaagaatttcatcctgattttgtttccccctaaaataggtatgcagtgtcaatggctagaagaatcggagccagagtgtatgctctccctgaagaccttgtggaagtaaagcccaagatggtcatgactgtgtttgcatgtttgatgggcaggggaatgaagagagtgtaaaataaccaatctgaataaaacagccatgctcccaggtgcatgattcgcaggtcagctatttccaggtgaagtgcttatggcttaaggaactcttggccattcaaaggacttttcattttgattaacaggactagcttatcatgagagccctcaggggaaagggtttaagaaaaacaactcctctttcccatagtcagagttgaatttgtcaggcacgcctgaaatgtgctcatagccaaaacattttactctctcctcctagaatgctgcccttgacatttcccattgctgtatgttatttcttgctctgttatcttttgccctcttagaatgtccctctcttgggacttgcttagatgatgggatatgaatattattagacagtaattttgctttccatccagtatgctagttcttattcgagaactatggtcagagcgtatttggatatgagtatcctttgcttatctttgtagtactgaaaatttgccgaagtaactggctgtgcagaatgtaatagaagcttttcttattcttttattcttaagatcagtatctttttacagtattctttctacatgatccttttttgtacatttaagaatattttgattatattaaacaagactgctgattttgctactttttttaaggggtcttcaagtaagtaaaacatacatcgtagctagaagaaaaatgtaccttaaatttgcatcttccctctcatacccaagctgtaaacaattgaaatattttgtcttaaatcacttggttcaatacatgcttatttgttttaaaacctgtatcatcaaactctctctctaaatttaaaatgctgttgaatatgatacttttgaggagagagtgtgctcagaacttagacgggatttggtaggccaagtatgctaagtgtacaatatattttttaattttacacctgaaacaaagaaatgtggtcactaaaaataaaagtatatatgtaggaattaatgtactcttgctttgtcaagctgtttgctatagtttccaaggtattatgttactctaactctgaaaagtgatgtaatctggtagcaatgtagtagttcaaataaaggcatttacataataattagtctgttcttcatgcttttgtctcttaggaagtatgccaatgtttgtcaggatttttttctttttgtttttctgatgtattctgtaaaatggtgtttgttaaatttgagttttgggagctgaattagaggtactgaattaaggacagtacaaatgaagtaaaaaggttttctccaatttaccaaaatttctttatccagttcctgcttttttctttcttttccacctccctcagtcttttcaatgttctatgatatacatatcctgaaacagtggggatctgaacagtcacagaggagaaatggttcatagtagatcttctcaatctcatccatatatgacatttttggctggataactctgttggggtggggagaaggggctaccctgtgcattgtaggaggtttagcagtattaccggcctctacccactagatgtcagcacatgcccggtggtgtt

SEQ ID NO: 49813 - DNA, 1070 bp, Homo sapiens
gccggaaaccttacaagcataggaccaaggcagaaaaggtccagagggttcatggtcctccgttccacctgaatccagctagagagcgagccagggggataggtgtgcccctcgtcgcccgtgcgctgaggcactgtcacgcaaagagacattcaccttccacgtcaacgcacctttaagggcgagagcggtccgccgtgcccaagaggaacgggatgacattcaactgggacttgcctcaccttggcttgggggacctcgagagcggtcccgtgggggcggtgttactcgtggtggtagaagtggagggcgtgtccgggtacttgagttcatgggcatctctcccgccgcctctcagcctatctgcaccatgtctcacacgttcagttgcagctcttaccgttttgaaggcgcacgtgggcaagaagtcctgggcagcacaagaaagtcaatcacgttgagacagagagagcgggagaggaagtgggccccagtagaagtgggcgagagagcgttgggtgggaacgtggcacgagagagagaaattatgagattgacagagagagagagagagagagagaaagagaaagagagagagaaagagaaagagacagagaaaagaaactatgttgtttaaaatgccagcggaaagtccatgggggtgaaagagtccggcaatggccagggagttagcagcttggcgtagtgtcttcccactgttttgtctgtcttgagaatagcattcaacgcgactgtgttcccgcagcagacgttaggccgctgcccacgccttgagtgccggacgaggtcaacataggctttccgtcacagaatatgtttgggcaggaagatcggaacacttggggctgggccatctaccgctcccccacggcacacacgagtcgtcagggaaatgcccgcctctgtgtgtgttgtacgtgcagccttctgggcagagccgtggagagttggacgtaggccaggtgtgaggaggagaggtgtgtttggggtggccactggctcccttcctgcgtgacgtaggctggcgtgggctcttcccccagcccctt

SEQ ID NO: 49814 - DNA, 1046 bp, Homo sapiens
taaaaaatctgaggatgaaatataagattttttgaaacttctgagggaaaacttgaatggtatttttttttattatactttaagttctggggtacatgtgcagaacatgcagttttgttacataggtatacactgaatggtattttctaataggtatcctatacagaacaagccatacctgtaacaagctatctatatctgtataaaacctacttggccactactaattgtaatagactattccagtacaaaactcattgaaccatgggcattcttatgaaccacagatcaaactttctagagaacctataaatagtatgtagtgctgtatgcaaactcactgtcccaggagcaagcatcctgattactaagcaagctcaagagaagaggtgggagtattctttctgacattgttcttgaactggtaagaatagctgtggatgaacttaatatccatagtcctcttttaattctgtgcctgaaagtatttattgaaattggaagactaagggaatcatctttctggttattagcagtactgttaacaattgaattttttttttaaatctgtcttttaaaatatattacctatccatgccaaactaaaatggcaggtggattgaacatttcactcagccccaactccacccctttcactgccagctttttctttcctagcatagtcaatgtcattagtacagagatttcctagtataactacttcttgtcccttaaaactgagaagggtcagtgatggaagaaatataaagggtgggaacttttggaaggagtaagggaaaaattggttgcattggatatggtggacaagttggtaaagactttagtgttacaggtggtgcttagtcattggattagtgaaagatgggtgagcagaatgaacaagtagcttgataaaactagtagctttgtgagtgaaagcaagtagatttgtctgtattttgcaatgggtattttatctttattagcttggcttaagggttaaggttaatgattgagatcagtcctttttcctttaagtgcacctt

SEQ ID NO: 49815 - DNA, 1001 bp, Homo sapiens
gccaagatcacaccactgcactccagcctgggcaacagcaagactctgtctttaaaaaaaaaagaaaaagtaaaagctgagaacaaaaatgggtatctctcttcaaaatcgatataaatgtctaatacatatgaaaattttcatccacactggaaatcaaagtacaaattaaaacaccaatgagatatacttttgcctgtcaacttggtaaaaaaaagtttaaaataacacttatttttggtgagggtattaagaaacaggcattcacagagcagtaggagtgtaaacaggtacaagttggcagtttgaaagtagtgttatgtcatatacaactatatatgtacatatgaagataaaagatactcagatctctaggtgataagattatgtatgaatcactttaattttcttctctctcttttttttttttttttttttaagagatgggatcttgctgtctcccccaagctggagtgcagtggcacaatcatggctcactgcatccttgaattcctgggctaaagcaatccttgtgcctcagcctcctaggtagctgggtctacaggcaatagccaccacacctggataatttttaaattatttgtagagacagggtctcactccgttgaccagactggtcttctccactttttttttctttttctttttgagatggagtctcgctctgtcaccagggctggggtgcagtggcatgatctcggctcactgaaacctccgcctcccggttcaagtgattctcctgcctcagcctctcaagtagctgggattataggcacgcaccaccacaccctgctaatttttgtattttctgtggaggtggggtttcgccatattcaggctgatcttgaactcctgacctcaggtgatccgcctgcctcagcctcccaaagtgctgggattacaggcgtgagccactgcgcccagcctctcttccactttttgttttccacattttctacgtgcacacaagacttttcagt

SEQ ID NO: 49816 - DNA, 2054 bp, Homo sapiens
attctattttgtgaggaaatatctctttactctttattggtaaaatgtgtttttaagaacagctctctaaagcagccttctcaaagcagttctcacccccagactctctaaattggattatctggggatggagctgaagtacctacactttaaacactcccctctccacactacctctgccaatcaatttttattcaccattgaaaaccaaagctctagaatatatgaatattgtaaattgggggaaagggtgtatgtttcctttgccatattgacttgaatatgtttattccatagaataagggatttggaactcaaacacctattatttatgtttaaaaaagttatttcaaagtagtgtactttatcagtcacagctgatacatttgtctgcaaattattggacttttacagttaactgagttgatacttttttcatttttgttaaggactcaactaaagaagtttcttggaaaatcagtaaagagagcaaagcaccttgctgaggaatatggtgaacgtgctataaataaagttaaaagtgttagagatgaaggtgagttaaaacagaacatttcaactaaacattcaattaatttgtaatcgtctaaatttagcctgtagtttgtaagaagcattctatttaaaatagtaaacctttatagctgacatcttagtatttcaataaataaggtactctatgacttaattttatgagtgtgaagaaaaatggatttatacatattttgtgacttttgacagtctgaaatggttgagtgttaaataatcagttatgaattagtttcgtttgtttgtttgtttgtttatttgagatggagtcttactctgttgcccaggctggagtgcagtggcgcgatctcggctcactgcaagctccacctcccaggttcacaccattctcctgcctcagcctcccgagtagctgggactacaggcgcctgccaccacacctggctaattttttgtgtttttagtagagacggggtttcactgtgttagccaggatggtctcgatctcctgacctcgtgatctgcctgcctcggactcccaaagtgctgggattacaggcgtgagccactgcacccggccataaattagttttttaaggctatttggttttgggtttttcttttttctttttttttgagaaagtcttgctctgtcgcccagactggggtggaatggcatgatcttggctcactgcaacctccgtctcctgggttcaagccattctcctgcctcagcttaccaagtagctgggattataggcacacaccaccacacctggctaatttttgtatttttagcagagacagggttttgccatgttggccaggctggtattgaactcctgacctcaggtgatccacccacttctacctcccaaaatgctggaattacaggcatgagccaccacgtctggccaaggctatttttttcttttttggagatggagtctcgctctgtcacccaggctggagtacagtggcacgatctcggctcacttcaacctctgcctcctgggttcaaacaattctcctgcctcagcctcccaagtagctgggattacaggcacctgccaccacacctggctaatttttgtatttttagtagggacagggtttcaccatgttgcccaagctggtctcgcactgatgacctcaggtgatctgcccacctcagcctctcaaagctctgggattacaagcgtgagccaccgcgcctggccagctatttggtttttacaaatacagtcagtcctccatatccatgggttccacatggagggattcaaacaaccacagatagaaaaatatttttaaaaatatataaaaaataacaatgcaacaataaaacataatagaaaaaataatataacaactatttatataacatttacactgcagtagatattataagtaatctagagattatttaaagtatacagggcgaggcatggtggctcatgcctataattccagtactttgagaggccaagacaggagaaccgcttgaggccaggagttcgaga

SEQ ID NO: 49817 - DNA, 1012 bp, Homo sapiens
aatgataatagatacccaaataagaggtaattaaggaaagaaaaaatatatttaagtattttaattttctaatcttcttggtttaataaacactttatcacagtttcagataaggtatcttaatgattttcatttggttttagagctggaaggttaaatataaccaattttaaacctataaagcagaatacacaatattgtactaagttgtcacctgtgttttttgtgtgttgcattaggtaagggtgatataaacaagagaacctaaaatgtctacctgctcaacagtattttcctgagatttcattggctccagtatttgacactacgttttctccttctcctggctttccatggttctgtttccctttgttctcttatactcccactgtttcttcttccatctccttacatttactgtttctcagggtctgttcttggccattttcaatagacatatttatgctcttcttctagtcctgaactggctttagatctgtaattctttgtttactttcagtaactttatgatttttaaacaagaacattattgtgcttgctgccttttcacataatatataggatctctttatctacatgtaatccaaccacatcaactaataggtccaaaactaaactccttcaacaaatgttttctgagtgcctgctatatgtggcagacactgctacatgctataaaatcaaatgagacatattctctgtcctcagggatcttgtgaactagtgaaatgggtaaactcacaattacagtattagatggtgatattctacagaaggtactacacaaaaataggttagccttataaatcacagtgttaggaatagtttcctggaaacttgttatttgagctaggatttagctatatgagagaagaaaggaaggagcgtgtcagacccagggactagcaagtgcaaaagcatggaggctagtatgttaaaggtactacaaggaattacacatggctgggaaaggtgcatttgtgagattggt

SEQ ID NO: 49818 - DNA, 1601 bp, Homo sapiens
aaattaaccaggcgtggtggcatgtgcctgtaatctcagctacttgggaagctgaggcagtagaatggcttgaacttgggagacagaggttgcagtgagccaagatcatgccattgcactccagcctaggcaacaagagtgaaactccgaatctgatttgtatgtaatgagggaagcctgtttagctgtatgtctcccagcagtgctcactagtctggtagtaaaattgaggggggcgaggatggtagtcatctagcattagaagtgcttggcaaaggttacaggagtctgtgttggtggtctacctccatggttgatgtgaagatgttttttataaactgtaaagttctacacgaataatagtggtagtttttaatctatccccatgccactgtcctcattcaagccctcattattcttacttaaacttattgactgcttttcctgcctccatgctctctccaaaccatcttttacattactgcccagagttctttttctgaagcaccggtaagatggtggtggttttttcctttcagaaacctgtgttggctctccatgtctgaacttttaagccacaaatttgaggcctttttattgtttattttattttatttatttatgtatttttggagacagagtttcgctcttgtggcccatgctggagtgcaatgctgtgatctcagctcaccgcaacctccacctcctgggttcaagcgattctcctgccttagcctcccaagtagctgggattacaggcatgcgccaccatgcccagctaatactgtgtttttagtagggacggagtttctccatgttggtcaggctgatcttgaactaccgacctcaggtgatctgcctgtctcggcctcccaaaatgctgggattacaggcatgagccaccgtgcctcgccaaggcctttttgaatgtgatcccaaagtacctttctaccctaatttctgactacatctccatatactgttttctctgtcctcatcatcctacctacctttccctaaatatgcgaggcttagctaaccctctgttcttgctcatgctatgtcatgtaaaacatttgaaggacaaactttggacttacagttagatgacttgtattactgctttggttctgctgttcacaggtggctgtgtggcctttaatatattattttaacctctttgatcctcaggggtttgttgtgtgttttgtttgtttgtttgtttgtttgtttttactaatttcttcatctttatactgttaatacctacctcaaagaattgttagaatttattcagataatgaatacgaaagcacgttgtaactagatgcacagtacacatgtatggcattattttctacctacctctgtcagtatgcttttgacttcaaataacagaaatccaactgaaaatggcttaaacaatgaggaagcaactctggaggtaaggcggttccagggttggttaattcagcagctcagtagcatcgtcctactatctccctgctttgtactctttgttttgttcctttcggctttttacactatggtcttaagatggctgctacagtcttagttgtcacatgaagtcagcaatgttc

SEQ ID NO: 49819 - DNA, 1087 bp, Homo sapiens
cctcttagccgtgacaatttctcagactttccatgcttttgatgaccctgatagttttgaggagtactggtcaagtattttgttgaatgtacctcacattgggtttgtctaatgtttttctcatgattcagctggggttgtggactttaaggaagtgaattgctcttttcattacatcacatcgagggtacgttcttatcacctggctgaggtagtgtccatcatatgggcacaatttaagcaatccatcaaacattcaggttgtgcctgttttttatcactgtgaataacaatcagagatagagaaatatatatcttgtcagaatttccaattattgatcgaaggtggtaggtccttaaaatgaaagtacaaagcatgaactcttaacagtaagcaccagcctgggcaacatggtgagactccgtctctacaaaaaaaaaaaaaaaaaaaaaaaaaatccagacgtggtgatgcatgcctgtggtcccagcgaacagggagactgaagcaggagaatggcttgagcccagggggtcgaggctgcagtgagccatgttcacaccactgtgctccatgtgctccagcctgagcaacagagtgagaccctgtctcaaaaaaaaaaaaaaaaagaataagcgatgtatgaattacaagaaattcctgcatagaaattgggaaccccaatttgtagtcctggttgtggtggccttgtgacttcaggaaagataagtagttctctgcaagtctattaaaatgaagtccttggactaagatttctaactctgatggtccatgtggtccatgtgcttgccggcagtccttcagaaacagtgcagctgaggatttcctcactttctcattcatttattcaaattcctgctgacataacttgtgatcttctgtggcatcagaatggcacaatcagtgactgagttctactcctagaacatctaattacaagatcggtatattgagaagcattttccctgattttttttttctcaaaatatgttcatcaactggatcagtatacactgtctcctctaggtggtacccaacatttaaaatactgcagtgtatattatt

SEQ ID NO: 49820 - DNA, 1172 bp, Homo sapiens
ccataacttctgattcttttaagggacagctgaggtaggatttacacttgtgctataaacccaagatactcacattggggcttcaatatgagttagagccattaccgcagcaagtcaagctttcctctggtgtatctcttgttagaacatggaaaacccaccaagctgtacaaatatacagtatttcctgtttaggttttttttttattttttttttaaggattttggaattacacccttgttggcctgttgctaacatcattcagttttcctcactgtttgaaaaattcagatggctgggcctgggctatatatagcatgttgttgcgtattcaaactgttattcagttattagtacttccacgaatctattaactaactacataataaagcagacagagagactgttccactgttactgcattttcctataagttcagcatttttatgaaggtcagttttaacccagggaaagggataattacagaatcatcattgacagatttctcaagaggggattggggagaaacattataacctgagagtgtatgtgattaagagagaagtgtttacatatgtacttgtttaaaatgcagagttttaaatttttaaattgattttgttgtaattcaggatgtagctactggtgccgcaggggaacaaaggcattttgctaaacctgttgtattatggccgccctttagagaagccactttatcagcctggaagagtcgcctagtagctgtttaaatactgtttactgcggagcttaccctcaattccttgtgcgccaaaagatcgggaaagagttgctagatattaggggttgtagcccctggacgcgccgtaatgcacgcagcgtcccctggctggcatcagccagatttcgtataatagctccagtagagaaaagctctccagaagctgagaatggctgaaaagcgtctgcagctgttgactcccccaacccgccgctcacaactacctttgcatggaatgtttgttatgtttgcatttagagaagcgctgaaacggaaccactcctctgctccctcttcccaagggaatttgtgtaaagtaggtaatataggacaaaacccacagcctcatctctaaggaggtgagaacaatacggaataaaagccagtttcaacttgggcttcttgaccaag

SEQ ID NO: 49821 - DNA, 1047 bp, Homo sapiens
aactcattttgcagtagtatttgcagacatgagagggatgatcaacttgctttgatctttgtagacatgggtctacaaatccaaatttaagacttgaaataaagcataaaggttaggatcttttagatttgttgaacactgagctcattggtcagagtagtttactttaatctttctaaataatcttctacaggaaactctgagatgcccttccgatatggaaattgggtatagctgtgacctgttgtgaaccatgtataaaaactattctcaacttttctatggatgtagtgatactagagactacctcaaatactatgtacaaaaatacaagtataatcccgatgctattataatattaagtcttaatataaattatatttggggtttttatacagtttttattataaaattttaaggaaataatttcatatgaaacatcatcattaaaaattactactgtctgcccaccttggtttagaatagagtgttgagacatggctctggttgaatctgaatatctcaaagttcatcagcaattaatgactggatgtctaccgtgtgccaggtattctaagtgctgggattaaagaagtaaacaaataaaagaaaatccctgccctcaaatagtcagagaggtgaaatagatggtatatcagattgtggtaagttcaatgaaggaaaaaaaatgataggaaggtaaatagtgggatcccattcccagttcagtaccatgcacatgagaatcttggtatatttctttctttttctttccgccccccgctcccccgcagttgcaggggtcaagggctggtggtgtgcatgcatgacagctgtgggtgcatgtacagtagtgatggccagtggtggaagtcagggtcacctcatatggctgtgggggttgaggcttatggcatgcacacctgtgacaatgaaaactagtgatgatagacattgaagtcagttgcatgtgtacacacagctgcagggtcagccatgggtgtgcagaagtgggtgccgtctttgtgtatttctgaggggaaaaag

SEQ ID NO: 49822 - DNA, 1060 bp, Homo sapiens
gtcaaggtcactatgtgtgttagaacaaaaggaagagaaaatattttatttttgatatcttagtccaattgtattctcaaatctaccagactatctcttacagctaacaaatggattgcattcatttattatgcataagattttttcattaatttgttttttatgttttgttttctctcattcatattacttctcaaaaactatttattaggtgcttcatatgtgtcagacactattgggtatcaacaaattcatgaccaaatagataatttcttaatttaattttttcagagacaaggtcttactatattgccctggctggagtgcagtggcacaatcatagctcattgcagcctccaacacctgggctgaagcgatcctcttgcctcaggctcccaagtacctgagactacaggtgcatcccaccacgcctggctaccaaatagatattgaatgccttgttaatacaaggtattagcattgtggagggtagagagaagtgtcagatgtagagcttaaaacctttttgggaaggtgggctgggcacagtggctcacacttgtaatcccagcactttgggaggctgaggtgggctgataacttgaagtcaaaagttcaagaccagcctggccaacatagtgaaaccctgtctctactaaaaatacaaaaattagccaggcgtcgtggtgtgcacctgtaatatcagctactcgggaggctgaggcaccagaatctctcgaacccgagaggcagaggttgcagtgagctgagatcgcaccactgcactccagcctgggcaacagagtgagactctgtctcaaaaaaacaaaacaaaacaaaaaaccacctttttggggaggtgagacacacaataaaaataattgtttaaagatggtacagtgaccaagtgctacatgaatctagatcattgtggcctggggtcagagaaggcttcttgaagaaggcggggcctcgaaggaagtgaatcagaaaggagaaagtgagtgtgccaggcaatatgtataaggcagaatggttaggtgaagctcagtagtcatgg

SEQ ID NO: 49823 - DNA, 1050 bp, Homo sapiens
gtaggtgagatggaaatatgtaatgtgggtatatgtatatatgtatatatatgctttttatgtttattcttggattcgtggtaatagaaaccaaattaaaatgatgtaatcatggtttgcaattaaatgggaaaagaatgctatagtgaaagggtcaggagattcagatatcagaatgctttatacatttcaaagtgttaagtcttaattattgttctctagatatttgattaactgagggtaaatcatgtgattttcattcactatcttagaaaaatgaagataatgataattcctaacatcttgtcagggttgtctgaagattgtccaggcacaattgcctggcaagcttttgaggtttttagttcagagaaactattcaaatgcaatgtatatgtaacaaatgtatcattgctgggttttccccatgtaggtattcaagagacgatatttttacttgacccaacttcctgacggttcatatattctcaattcctataaagatgagaaaaattcaaaagaatcgaaaggttgcatctacttggacgcctgcattgatgttgttcaggtaaggccattgaggtaatccttctctttttctaacagggttattgataaacttttaagaaccccagatggttgggtggggtggcttatgcctgtaatcccagcactttgagaggctgaggcaggaggatcgcttgagcctaggagtacatcagcctgggcaacaaagagaccccatctctacaaaaaaatacaaaaattacccaggcatggtggcacattcctgtggtcccagctactctggaggctgaagtgggaggatcacttgagtctaggaggttgaagctgcagtgagctgtgattgcaccactgcactccagcctgggtgacagagcaagaccctgtctacaaaaaagaaaagaaaaagtgactggtgcggtggctcatgtgtataatccctgcgctttgtaaggctgaggtgggcaggtcacttgaggtcaggagttcgagactagcctaggcaacatggtgaaaccccgtctc

SEQ ID NO: 49824 - DNA, 1057 bp, Homo sapiens
tttataaatggaaaaactgagaccccaggagggaaaggttcatggttgagttcattagtagcactccagctactgtgtatttatgtacatcaatctgttgtacatggcattttgttgtatacccaaatagtgtttattaaatggaagttgctgatgtgatgggactaatttgtggaggaaaaatgtctcaacaatatagataaaagcctccagcattctgtatccctagggataagcatccagccagcatttcgagtctgtttagactctataggcagtttatctccttgtcatctccctgtgcctgtgcaaacagcagctcctgcccacacttagactaattgccttgactcctggtgacttgctccttgtcttgggagtagaaagggcagctgtatccagaaaaaacttctcccaagaatgatgagcatttgcctgctatgtgaagtaaagtacatgttaaaaccactgaacatttttccagtagaggtcttggttcaaagtgtgccctatatctatttcgtctgtcttctgctataagtgacagaagctctgttaatgagaaaatccaaagcctttatgaaatactttggacttgaaaaatggctggctgatgcatgttattctgcttgtggctatttctatatatttttttgagatttttgatgttttgtaatggtaggttggggaaattatttttctgggtgggtccatggcagtttgaacaaatacaagcctatcttcttgtttctgaccttagacggcccagaaggtgcacaggacagctaaacaagtgtgtagccgccttggacaatacagaatgcccttcgcttgggctgccaggtttgtacaaatataatcctgacccgctcactcgtgttcatatgtgaagttaagggctgttatacttaccagcattcagcactgtgtttctggcaggccagttgtatcttgggacacttgggatgtaataattattatttttgttgttgtttttgagacggagtttcgctcttgttgcccaggctggagtgcagtggcgcgatctcggctcacc

SEQ ID NO: 49825 - DNA, 1016 bp, Homo sapiens
ctgggtgattggaaagaaggtattgccaatagcaaaactgtgggtagggatggcaggtttgggacatcagttgagttttaggtgctagtgagacattggagtgatacccagcaggcagcaggactgaatatgagggagttccctttgcaggtagtatggatatgttctttatccccatagaaattgccgttagttcagggtaggggctttgaggattgagaagaaaactggcagaacgatgagaacccatgaccatgtgtacatcctgaaagctaaattactgattcattatccaaatcctagacagaagtggacaagatgctcagcggagcatgaaacagttattccgtgtgccactcatcactttgaactgtgcattctttaagtggcttcccacctttgagccagatggtgtgcttgacattgtacctttatagcttccaagtgctctctatgagttttgaataggggaaacgcttggtcgtgctctgattcatttacagtacaaaaatgttgcctaagcaatcccacagagacagaaagtagactatcggttgccaggggctgggaggagagggaaatggggagtgacttctaagggctatgggatttattttgggggtgatgaaaagttctggaattaagtggtggtcatggagatacaactttgcaaatatactaaagaccactatatgtacactttaaatagatgaattgtgtggtatatctgaatgaggtctcaataaaaatttctatttaaaaatgttgcttaagaacaagaaatagattttcctttcattttcctattttctgggctggaaatcttttctcatttgtcaaatttttagtttaactactttgacagagtcatttctaatggttcttctgctcatgttactttcctctgctttttataaaagaaaaggtctgggtaaagcatttctgtagttgaactagtaaagatgcccgtcaggcacatttcggagtctgagaaagccatttagtctacttagaga

SEQ ID NO: 49826 - DNA, 1032 bp, Homo sapiens
tcagaaagcagtagctttaaaaaatgttctccagccaataccctctctcatatgccaaaactcagtccagagcaagcttttttacagctgagttataaacacttgaatcccagagtaatttctataatggaaatactgacaccactcaacttgagtaacacagatggctctggcttttttagctagaacatgatgagttttctaattgaaagccaaaaggctcttttggggagaactgttaagaaatgtagagattggggaaaatctcttgatggattcaagtcataaacactatttcctgcctgcattctcctacctacacctacacctcttccttctgtaatcaggacaagtctgcctaactaaatgatttatgcctactgccttgtataaatatggagtgtagccgtgactttgtgaccttaattttccatagttccttaccctagggttgccataagaaattttggaacatgtgattgttatctgaaatagtctcagccgtgagactctgcactcttagtgtaagaatggatgagaactatctgagccttttgaaaataaatccaccaaaaatatttcccaaagcataaagataatggtatcgatgcgcttttaaaggtttaaaatgttttcatataatctcactctaggtttctcaataattcttgtagatggaaaggccatgttgctgttcccatttttatggtcaaagaaatagagtacataacttgttagtggccaggctgggattcagagtcgatccaaacccattgttccttccccagtactcagttgcccagcacctgaactcccacatacagatccctggagacatcaccaccctgccctgccccctagcagtcagccatttgtgtagctgattgcatttgatatttcatttctcacagtttgttattatcttggcagttgggtttgcctgggtacctttgctgaaagatggtagaatcatcacatttgagcagcagctgccagtttccgccaatcttcccccaggctacttgaatctga

SEQ ID NO: 49827 - DNA, 1034 bp, Homo sapiens
acagagaagggaggttttatgctttgacttcactgaacacaaaaactcttttggtctgaattattaatatttacataggcaagcctcactttcatcagctaacagactaccttacacttccctttggaagtgggagttgaccaaaatgaggtcaactcgcttgggctttgagagttgaccaaaatgaggaagtgtagctgaatagattacagatatgtatgtgtgtctgtgtatgtatgtgtgtgtatgtatagataaatgtatatttgtgtgtgtggctatatatacatcttgttctgaaaactgtataattgaggcccttcagtcccaattccagtgatgccacttgccctttatctttttctttaaggtcacctgaagctcagaaagttatctataaaaataaaaatgtctttctttttgtgtggaaccaattttgaatttttaaaactttacatttttaaaatttagacttttagaattatgtaattaacccttagttttgttttggtttctatagcgctgtttgacactaatggatagaggatttattttcaatttaataaatgactatatatctggattcagccccaaagatcctaaggtaagttataaggacatgattgtagtggatgtcagacatctgagcataagaccaaagtgacatttattctcttctaggggattaggaactgttgtttttatttaggtagttggactatagacatacgtaaaagcaaggaatactggactgtgttttggggtccccaggaccccccatgtgttcaatagctcattttaaggattcacagactcaacatatagttgtattgatggctgagattcatgagcgtgacataatgaggatactcagctgaatcgggaaaggaaaagacatcaaatggggtgggtagcaatccacatgcagcctttttgagctctttccctcctgtgaagggtctcacagagcacagcctccttctagcagtgaaaatgcacttgtaagtgtgcaatatttctgttcaaggaagcct

SEQ ID NO: 49828 - DNA, 1050 bp, Homo sapiens
ctatgttaactctttcctgcacaggtcgcatctcaaggtatgcttagaatactaagcacttccgttgtgaaaaataatgcgctgtattaaattcttaaaatagcaaatgcctactaaatatgagctaatgtatcatttctttccatttaggttctggctgaatacaagtttgaatttctgcaaacaatttgcaatcacgaacattacattcctctgaacttgccaatggcatttgcaaaacctaaactgcagcgggttcaaggcatgtatttgcattttccatcatttgagtttgtttttttccatgttttgctagcgctagtgtagtataatgttttctagttgaaccagtcaacttgaaggtaatttcagaattgttactatctgaagtccattaatgtttttctgcatttccttcataatatcagtaataatgttcatagtgtgaagaaatcaggtgtgttaatagattgctgcttaaacacagatgtcagatactagtgaaattactttctgtagtagtgtttgggatcttgtatgagactaaattaagaaaaagacatataaatgcatttctcctcaaagcatcaaaaaatgtaaaggtagagtaaaatggtaacatgtttgtgctaaatttatgaaatgccttcagttatctccattgctagttttattgaatgctttgttgtatagcactattcttatgttactatgttttttatttgtcccttttcttttcatatattaattagattttttttcatttgcggtggaccgtttgacttcagtaggtaggtttaactcggttcactctaaattagcttgctgttttagaaaacaattgatttgatgaattgctaagatggatgggggctttgtttgcttttcaaattctccctagccaaaatgaggctttagttaaagtacccagaaaatctaggaggcagtgtgtttgtttagttttaaaataaaactgagtgttgctagagaaatcaactttaaaacattttccctcaaaacacaagttcctgctgcaagccagcatagagg

SEQ ID NO: 49829 - DNA, 1040 bp, Homo sapiens
caaagagcttgatccaaaatatgctcatatacaagttacttatgtgaagccttactttgatgacaaagaactcacagaaaggaagaccgagtttgaaagaaatcataatatcagcagatttgtttttgaggccccttacactttatcaggcaaaaaacagggctgtatagaagaacagtgcaaacgccgtacaatcttgacaagtaagtacaattttacatattaacttcttatttgtcttggtctttttcagcatacacgagtagcagctggccagctggaacatacaactgaaattttaattattatttgttctgctgttcagttacaagtttgcacaagcacgtccatgtgataaaccatcattttcccatatgtcatccatgattgcccagaggtgtctcataaagagaatttctctctgaatcctgaagtactatatgggaccctaagtcatcttctagataaaggatggggagagttaagcacaatagagttttttctttaatttggctgtttgaacaaatgattttctaaagtcagtaaatcaatcttaacattttaatagcttcaaactcgtttccttacgtgaagaagaggattcctattaactgtgaacagcagattaatttaaaaccaattgatgttgccactgatgaaataaaagataaaactgcagagctgcaaaagctttgctcctctactgacgtggacatgattcagctccaacttaaattgcagggctgtgtttctgtgcaggtacgttggtcatccaacatgtattgaatgtttcttgatgtttcttttggttttataagggcacagagcaagcattaattgtaattatgtgttgggcacttactgagtgcaaaaacctgtgcattattttttgttcatttaatgaagatattacattgaattttttaaagttttgtgttatgtcagaggactttaacataagtccgatgactgtagcgaagccctgtatgtacatatcagaaatcactaacttactagaatatcatctttgtagattattt

SEQ ID NO: 49830 - DNA, 1041 bp, Homo sapiens
taagagtgctttatttatcttttttttttttttctaagcacttaatggtcactgtctaaaaacagtgtatctatgtttgttcatctcctaatgggagtcgtggctaagttctaagattttgcctctgtgcatagcattttaaaacttttccaatgttctttttttttgctttgtttttcctttttattgagatataattcacataccatacaatttacccatttaaagtacacaattcagtgttttttaaaattacatccacagagttgtgcaagtatcactacaatttaaaacatgtttatcacctgaaagagaccccatactcattagcagtcactcctaccggtcatcatcctccagcccctggcaaccactaatctactttttgtccctacaaggtttacctgttctggacatttcatataaatgcagtcatacaatatgtggccttttgtgtccagcttctttgacatagcatatttccaaagttcatcgatgttgtagaatgtatcagtacttcattcctttttatggctaaataataatccattatatagatacaccatattttatcttctcatcagttgatggacatttgggttatttccactttttggctactgtgaataatgttgctgtgaacactcacaagtttttgtgtggacatgtttttagttctcttgggcatgtacacagaagtggaatgactggttcatatggtaactccatgtttaaccttttgaagaattgccagactgatttccacggcagctgcaccactttatattaccaccagcaatgtatgagggtcccagtttctcaatattcttgacaacacttgttattatctgcctctttgattattgccatcctagcaagtgtgtagtatctctttgtggttttcatttgaatttccctgatgtctaatgatgttgagaattctttcatgtggttactggccatttttgtatcttcctcagagaaatatctcttttaagtccttagaccatttgcttttttgagacagggtcttgctgtgtt

SEQ ID NO: 49831 - DNA, 1030 bp, Homo sapiens
tggaaagagtgttttactagacatgccaagaaaggctctcccagttcaagtttgcttgtttggttgtttttttgttttgttttttgttcgtttgagagacagacctttttaccaaggtggctaacacaaagaattaacttgtccagctgagaactcacccctgagtcacagaggtttatgttactctggttaactcaaacatagaaccacaactaagcaaaccgcaacaactgcggcattcataaaacaagaatcatgcttaggcagtcatttaagtgggctcatcacaggacagtaaataatgacaaaagaaagcagggtgtggaagggaattgtgatgttaataactcgtacaatgcttaaatgcatgcccggcactgttctaaattaaatccttcaatgatcactacaactttgttaggtaatgacacatatccctcattttatgaatggggaaactaaggcacagcaaagctagataacttgtttgagatcacacaatcggtggcaatgctggaatttgaacccagagaatctggtgtaacagttcacactcaagccaccactttgagaggaatcaagggaaaaagaagagagatctaagagaataaaaaggggaggaaggaggaggaaaaactcagctcactaacacctgaaggcaattgctacatggtacccagcctcctttttcaggcccacacccaggtctttgcagtccccacctctacctctgttatcaagcttcctaaaatgacatgatttggggataagtgttcaaactatttttttcacaaataaatggtgtccagaggaattgatgttgtttcttttttctttttttttttttgaaatggagtctcgctctgtcacccagactggagtgcagtggcgtgatctccactcgctacaacctctgcctcccaggttcaagtgattctcctgcctcagcctcccaagtagctgggattacaggtgtgtgccaccacgcccagctaatttttgtatttttagtacagacagggctttgcca

SEQ ID NO: 49832 - DNA, 1050 bp, Homo sapiens
actgctcaggttcccagctttgaagggattaaagatccaggggtgatggtggggagaggaggaagcaaaatgggtagtggagaaaagaaacagtgaggatcctagaagacatttgtagacttctacccactgaggtattatgaacttcaaattccccaagtgaggtttctctcctgactttacctctctgtctctttcctcctagatgagttttaaaatcccactgcagatatttctgcggagtgttagcactagcatggtggctcttaaccttggctaggcaacagaggcatctgtagtgccttctcaaaatccagattcctgggccacactccagacctgggggagatgggagtacaaagtagagacctagatttttcataagttccccagttgattctgatgcccgctgaagcgaggacccctgccctggtgtggtgtgttagggacactggtccaaggcttcctccctggagttctgccctgcaagctggctccctccccccttcaccctcctccccttcacctgggcacctgtagaaacttaagtagtgaagtcttctgttttatgtcacagcttctccttagtttcttttcaccatcagtcccgggggattctcaggaacattctcccgatatcctgaagctgttggcacctcaccctagattaaaggaaaacgtagagtcaatgactactgaagttaccagccataatctaccaaggttgttacaggtaaaactcaactcacccagctcgctcgtgacgcttcgtttggctgttttgtgggcaaacgtggggagtgagccctccctctcctattttggttcctgagaaagaagaaattgagtcactagtggttctgttctttgcaaagaacctcttaaagatgcaactgtgaatttcaggcatggtcccagagtttattcattacattgaaaaaaaattatgaaacagggtctctttctatcacccaggctggagggcagtgatatgatcatggctcactgcagcctcagactcctggtctcaagagatcctcccacctcagc

SEQ ID NO: 49833 - DNA, 1067 bp, Homo sapiens
tgtgtgtaaccatacacaattttttaaaattgcttacatgtctttgatttcacagctgtgacttactggcttagaggagaggctccctgctctgtcatttactggctgttgacctggatggagcaagtgacattctctgctactgttttcttgtcagtaaaatagagaacagtgtacctactccatagggttgtcatgattaattgagaaaaatctgtttaacacctggaatagtgcctggcatataatagatactcagtaaatgttaactatttttttttccttgtagaccagaggtccagaaggaaactttgggtctatggacctctgaggatgttctatatatggattctaatagatgtattaatgtctcgaagttgtatgttaaagtatgtgggttttccaggacaaggtccacatcctttagcagattcacaaatgtgtctgttttccaaaagagcattaaaaggaggctgagatatttgcacaaaaattaagacggttggcaggctgctgttcgttgtgctggcgggtcctgcggggagggctgtggagctccagatggactaaagaacaaaccagcaatcccgagagggcccacagtccctctgaaggaagcgggttgcttctgcaggacccaggagacaccccaaatactctgggaggcaaatagcctcggtcgagttctcaagtccctctcactctcctcctggaaacagacttggagctgttggggagggcacggtggaagtgagactggcccttcagtttgcatgggagctgggtgaggcctgtgactgctgtatttccccaacttccctggtaacctgcatgactcagcaaaggcagccataatcctcctaggtacacaactccagtgacctgggaatctcacccccatcccccacagcagctgcagcaagacctgcccaaggagagtctgagctcagacatacctagccctgcccccacccaatggtccttccctaccaaccctggtagtggaagacaaagggcatataatcttgggagttctaaggccctgcccaccgctggtccctctccac

SEQ ID NO: 49834 - DNA, 1163 bp, Homo sapiens
aattcttcaaactgaatgacaataatgacacaacctatcaaaacctctgggatacagcaaaggcagtgctaagaggatagttcatatccctgagcacctacatcaaaaagtctgaaagagtacaaacagacaatctaaggtcacacctcaaggaactagagaaacaagaacaaaccaaactcaaacccagcagaataaaggaaataaccaagatcagagcagaactaaattaaattgaaacaacaacaacaatacaaaagataaatgaaacaaaaaatgttctttgaaaagataagtaaaattgatagaccattagcaagatttatcaagggaagaagagagaaaattcaaaaaacctcactaagaaataaaacaggagataccacaactgacaccactgaaatacaaaagattagtcaaggctactatgaacacctttatgcacttaaactagaaaacctagaagagatggatatattcctagaaaaatacaatcctcctagcttaaatcaggaaggatgagataccatgaacagaccaataacaagcagcaagattgaaatgataacttaaaaattgctaacaacaacaaaaagaagtccaggaccagacagattaacagcagaattctaccagacattcaaagaagaattggtgccaatcattttgacactattccacaagataaagagggaaccctccctaattcattctatgaagccagcatcaccctaataacaaaaccaggaaaggacaaccaaaaaaagaaaaccacattaaggtatgtcccttgtatgctgattttgctgagagtgttaatcataaagcgatgctggattttgtttaatgatttttctgcatctattgagatgatcatgtgatttttgttttgatttcttttcagtattatgttggttgtgggtttgtcataatactgaacggggaaaagttgaaagcattccctctgagaactggaacaagacaaggatgcccactcttaccactccttttcaacacagtactggatgtcctagccagaacaatcagacaagagaaagaaataaagggcatccaaatcagtaaagaggaactcagattgtcactgtttgctgatgatatgatcgtttaccttgaaaaccctaaggactcctctagaaagctcc

SEQ ID NO: 49835 - DNA, 1049 bp, Homo sapiens
tttataaatacctcttggatgtgttttctgaaatcgttacctaaagtggtaaaaaaattctagtcaagttctctctgtctctctctttttcagaaggagggagagaggagagagggagggaggaaaatgtgcatatgagtgtgtgcatctacatgtagatggatgatgtctatttggatgcagaaatacatgcacacatttgttgccgcatcatagagtgaagaagaaagatgggcttgagagtcagatctgacctgacatcccaaagccctgctacttaccagctagctgtgtgatcttaggcaagttattttaacctgtctgggtttaaattttctcaatagtataatgaagctaatcataattaccacctcttaatatacaaagttaagtattgacacaccaagaaatacagccagaaaaatatattccatctgttccagtcactttggctgtgcagagaagcagagtagccctaaatatagaaatgaattgagtattgaaaagtgtaatgtattctaagcatctgaaccctgaactatttcaaaggaataattatgcagcatctgtggccgcatttgtgtttgctaccactcagtcaggggcattttaatcacagcttttgctaagagattgctgtgtccttttgtgtgtgttttattcatctgctcactaaatgtcagtatttattgcaattaattagccagctatatctttgttattttagatagattacattaggttacattcttaaatgaacaataggcccaattgcaaaattctcaggaaaaatggttttgcatattagttgtagatacagattcatcaatcatcttcatcattagtaccatcaaataatataaggcattcagattcacaggactaagttaccaaggaaatgagatattttggtttggctgctctgataattagatcacagcagtggttccaaatcacacttttgaaaaacattttaaattgtgaaatacacacagtggaaaagtgcataaaatataaatatgttctcttaacaaaatattgtagagaag

SEQ ID NO: 49836 - DNA, 1108 bp, Homo sapiens
caggattaaaatatcaagcaagccacgtaaacagtggcaaatgtgtgtgtgttttccatttgtttggtaagcagccattttactcttgcactgtaatgaactgaagggaaatataagataatgcttttttccccccatattgctattcaactacctctatatgcttgatttctttttaggattcccatcctccaaatctgtacaaaaacgtttcagctcatctgtgttgtaataacaatgtgatacagacagtttgtgtgaaagttgtttgttcattaaaaaatgtttcctattgcctcactttgtgtccaacaaaactgtattcctaccttaggaaaagaattatccaactagcttcagtatcacttcggtggaagctgaatagaaaggaatgcttcaggaacatctatttgttcttgttcctattggttgtaataccagaagatcctttaaagaaatatacttgcattcagacagcaaactcccatgtatgtgacagcgaggcaggtgtgaactgattaatgtgactgatgtgttctgaaaaactggccataaagtgtttcaaaatgcaccagaaaagcttgttacataaagaattatgttgaagcattttgtcaatatctgcccctactttatatgtaaatccaagcattcacatattgggtttgcttaaagcacaacacactgcctactattttctttggcatcataaaatgttcaagaaaacaaataacacgtttttattttaaacaagcagtttattaacaataggctaaaagctaaggccccaaacatgaaccttttaacaggaaaattggtaacatttgtgacaataagtgatactgaccaagctgatcccagcagaagagcttcagcaacatcccatcttctctacagtactgattttagtcttatgctattgataacttttaaatgagttcttaccgttgagggaagaaggacacaagaatgggacaattaaaaatgaaatgatagaaaattccacttgagcttgatcttattctgtgtaacaggaccttgggggatatagaaaaaaatcagaactcctgtccatctaggccccagaggaaagacttggctctgttag

SEQ ID NO: 49837 - DNA, 2138 bp, Homo sapiens
aggattcctaaaaattagtcattctagtgcctgttaattctgtgcaaggcactgttgtagatgtgggaatatagcagtgagcaaaacagacacaaatctctgcctatggagcttacgttctagtgaatatatgttgcactgaataatatgtatttttaaaagacttttaatgttcccactagagaacatttaattgtttaaatgtttaaatattctatgaggtttaaatattctatgtttaaatattctatgaggtttgcttggtaaagactcactctaccaagccaatgaccataatttctgaaatggtaaggttcaaaccattgcatttgcctattctcaagcactaggtgctgccatttccactaggggtgtacatttatgaaaaatgtgggcttttttttaccttctttagtgaatgtggcagcatgtaatgatgattaaaaataagcatttttctttggaattttacttgcatttaaaagttgtaaaatttgtaaaaaatttctgagtgtattgaggtttcaggtgaacaggccatattgaaacttgatctattctcatacttggttccctacaaacattttaatgtcagggctgctattcaatctgccttgggggaaacaacacattgtttaaagtacactggattctcttcatttagttgtgcaatatttaaataagtctaaatatccactttgtgtacccacagaatgattctctgctctcttagacaaaagttcagtataatatcacaaataatcacattttatagagttgttttatagagttgttttgcagtattgattcagcctcttttccatgaaaattttagtattttcacagtcttctcaagcccaccaaaaaacagataatgaagactgatctctgtgttatctatttattgacagtgaaggttatgtaatgtggatagatttttaaaccaccgatactgttataaaatggttcttctgcagatgccatgagttaatgtttaattgagccttggaaccaaagatctctataagatacctttgtttcattaaaacatatcagaatatattcataaggaaatgtgttttcatgtacacatcagtgcttattatcttaagaaaccataactctcactggtgtagccccaagtgcctagaactgtcaggctcccagttcaatgttcttgtatgattccctactaccactaccccaagagatcactaaccacgtatgacttttttactagctatttggaaaccacaggagactgacgcaaatgtatagcagtttgatttacttttagttatttaaaagttaaatgacaacaggtctttctgtgtctcctacataatgttcagaatatcagcattactatggtttcctaatggaatttgatattcaaaaatggggctatgttgatgaatagggaagccattttctgtgtataaatcacagagaaattgactgtctaataaagaattgatctttggttttgtttttgaagaggggccgtatggggtctttgctggaagagatgcatccaggggccttgccacattttgcctggataaggaagcactgaaggatgagtacgatgacctttctgacctcactgctgcccagcaggagactctgagtgactgggagtctcagttcacttgtaagcatttttaaaattgtgtctgggtcaaatttctaccagtaatggggattcgtggcaggacaatagttattactaagcagcctgaaacttgggtgcattttgataggctccttaatcttggacgcatcaagttcatggcttgaagtaattgtagcagtgctgagtcacttgctatgattgcataccaatttttagccagttctctatggaaacttgggtttctggttttgattttaaaatttttgagagatttgctagattccaaatgaggatttggtgcttggtgtgtcagggaaaggacagtgtccatcttggctacagaaagggattttcataagccctctcttgtagagcttgccgtttaaaagcagcccacatctctgttgaagaatgggagacttgtattctgtgaaacagcttctctttgaatctaattgaacctaactataggcctcatctacaaatgatgcttataatgtgc

SEQ ID NO: 49838 - DNA, 1023 bp, Homo sapiens
ctgttttatatgtctgtcttctgaacaaaacaaattccctgttggcaaggacggtggtataaaccacctttgtatccttcaagaagcccaacacattgctgagtatattgcaggcctctaataaatgctttaaattgaaacgtggtaatgatgttttagaaagaatgagaatgaccatttgtgttttcttctctacctccagtcaagtatcatcacgtgggcaaactgctgaaggagggggaggagcccactgtgtactcagatgaggaagaaccaaaagatgagagtgcccggaaaaatgattaaagcattcagtggaagtatatctatttttgtattttgcaaaatcatttgtaacagtccactctgtctttaaaacatagtgattacaatatttagaaagttttgagcacttgctataagttttttaattaacatcactagtgacactaataaaattaacttcttagaatgcatgatgtgtttgtgtgtcacaaatccagaaagtgaactgcagtgctgtaatacacatgttaatactgtttttcttctatctgtagttagtacaggatgaatttaaatgtgtttttcctgagagacaaggaagacttgggtatttcccaaaacaggtaaaaatcttaaatgtgcaccaagagcaaaggatcaacttttagtcatgatgttctgtaaagacaacaaatccctttttttttctcaattgacttaactgcatgatttctgttttatctacctctaaagcaaatctgcagtgttccaaagactttggtatggattaagcgctgtccagtaacaaaatgaaatctcaaaacagagctcagctgcaaaaaagcatattttctgtgtttctggactgcactgttgtccttgccctcacatagacactcagacaccctcacaaacacagtagtctatagttaggattaaaataggatctgaacattcaaaagaaagctttggaaaaaaagagctggctggcctaaaaacctaaatatatgatgaaga

SEQ ID NO: 49839 - DNA, 1026 bp, Homo sapiens
cggaggtcaggagtttgagaccagcctggccaacatggtgaaaccccgcctctactaaaaatacaaaattatcctggcatggtggcacacgcctgtaatcccagctactcaggaggctgagacaagagaatagcttgaacccaggaggtggaggttgcagtgagctgagattgcaccactgcactccagactgggcaacagagcaagactctgtctcaaaaaaaaaaaaaagaaaagaaagaaaaggaaaaaaaagaaaaacaaaagttggttgctttctgtaaatgtgaccagatttgaatgaatgcatgtaaatctatgctgtactttgctggggaggtttttgtcagggataaggatgggggcaaactatgttaagggaagtgatgacaagaaagccttccctgcgattaagaaattataataatatatgcttaactggcaggggagataccatgatcacaaaggtggttttcccagggcgaggcttatccattgccctctggatgtgctgacccctgcgatttccccaaatgtgggaaactcgactgcacaatttgtggtagtgggggactgtgttcgcgctttcccttgagaaaaaaaaaaaagaaagaaattataggccgggcacggtggctcacgcctgtaatcctagcactttcggaggccgaggcaggcggatcacgaggtcaagtgatcgagaccatcctggctaacacggtgaaaccccgtctctactaaaacacaaaaaattagccgggcgtggtggtgggcgcctgtggtcccagctacttgggaggctgaggcaggagaatgccgcgaacctgggaggcagagtttgcagtgagcggagatcgcactactgcactccagcctgggcgacagagcaagactccgtctcaaaaaaaaaaaaaaagaaagaaattataataatataataataactaccacttattggtcacttaatgtatacaaggcagtttattatcccatttaactgtctttattgaccctatgaaataagta

SEQ ID NO: 49840 - DNA, 1863 bp, Homo sapiens
gcatcgggtggtgccgcaggggccacatccctgtgttttgtgtaccctcttgattttgcccgtacccgtctagcagctgatgtgggtaaagctggagctgaaagggaattccgaggcctcggtgactgcctggttaagatctacaaatctgatgggattaagggcctgtaccaaggctttaacgtgtctgtgcagggtattatcatctaccgagccgcctacttcggtatctatgacactgcaaagggtaagtttgctgtgggctttaacgttgtgttcttaggagacagtttaaaagagcattgtaccaacctaacagtccaagagctaaagagttgtttttttaattgctaaaggaagccaagatcatccaatgcaacccttgtgtacagatgacgtgtttaggggatgtggggaaaggaagtcagtaaaactctgctttttggtaaaagcatctctttcctattcccaggaatgcttccggatcccaagaacactcacatcgtcatcagctggatgatcgcacagactgtcactgctgttgccgggttgacttcctatccatttgacactgttcgccgccgcatgatgatgcagtcagggcgcaaaggaagtaagttccacttgagcagaagataaagttgtagtcgtggggcaatctgctgccacaaactggtgatacatacctttaaaatggctgtctgtccaagtcaagggatggggttgatagcatctgtgtctgttccacaactgcctttgagctggcccttcagatgcctatgaatgagggtgcttaaatggtgttagaggttaagaccaatgggtagtctgtattcctgtggtcatagcattaatatttcagtgttgcccatgctaatgtgtgaatgttggatttaaagctgacgttcttagaggtggggctctgctttatttagcctagtgaatcttaggatttttcatcggccttcagtcactaactccatgtctttattctttgcagctgacatcatgtacacaggcacgcttgactgctggcggaagattgctcgtgatgaaggaggcaaagcttttttcaagggtgcatggtccaatgttctcagaggcatgggtggtgcttttgtgcttgtcttgtatgatgaaatcaagaagtacacataagttatttcctaggatttttccccctgtgaacaggcatgttgtattatataacatatcttgagcattcttgacagactcctggctgtcagtttctcagtggcaactatttactggttgaaaatgggaagcaataatattcatctgaccagttttctcttaaagccatttccatgatgatgatgatgggactcaattgtattttttatttcagtcactcctgataaataacaaatttggagaaataaaaatatctaaaataaattttgtctgcagtatattttcatataaaaatgcatatttgagtgctacattcgaataaatactacctttttagtgaatgctacatttttaataaatgctacagtatctccggagatgaagaactgtctttttaaaaccaattgtcagcagtccgcttaacagaataacttggttgtgccacccacaaacatttccaacacattagcaaaggaattcaggcccagtgcatccaaaaaacattgttccattgcctatggatgatcatagctgaatgagctttctccaagaaatactgtgaacccaccttctctagtcctatggttattaatcatgagccatgagctgaattatccactttaaaatggttacgtttgttgcatgaatatcacctcatttaaacttttagaatcaataccaatttcatccagttgccttcattttcac

SEQ ID NO: 49841 - DNA, 1050 bp, Homo sapiens
aaatatatattgatgtgtttgtcacctccctactcctgtcattacatttactttattaaaagcaaaataactgttgtgctgtttccatcttccttgccaagttttcctaccccttctaccctctccttaaacatcagaaaacaccctctatgaaatcaaatgtactgtacctgggttacttgcaaaaattactaatgcttcagtttttctgttgtatttcatttccagttttcaggcagttatttttattattgtactttaagcttttaagatgaattgttatacaagaggtgcttatgcttagcttgatgaccaggatgttatttttaacaaaatgattgctgaagtgtttcatcctggctggtccttcacttgtgttggatttagaagtgaatgtgtttggaatatggcctacagagaatagaaacaaatccatgtaaacaattttgaaggaggcatgggagctaaaaatcctgtgatactaagatctcagtcatatgaattacaacgtagtatttactggcaagaaggagaaagttgaaggactcagctaaaggagtacagcaattgtagtaactgacacatcctctctttgcaagctgctgactgggcacactcatgccaagtttcagaattattggtcttctgggtttttgctttttaaaagaggtgtgggagcagaggaatggaaacaatcgtgagtttttgagctagggaaagttggagctcctttaatctttttaaaggatcagtgctgccctaagtgaataaactcaattgtccatctttattttagagttttaatgaattcaaggaagggagcatagcatatctgtggcaaactattttccactcaaatcctgagttattgctgcatgctttaatttcttccctttcagcatctgagaaccttaaagccaatgtctgcgatctttttttggatatttatacttttagatatatagtacctttaagtagcagtatgggacaaggcttgtaaatgttttgtctaatgttctattgtcaccttttatgcatttatcacttcca

SEQ ID NO: 49842 - DNA, 1049 bp, Homo sapiens
aatttaaattcaatagaattgtcatgtgtcccaaaatattcttttgatttttttcaaccattcaaaaatacagaaaccattcttagctctcaggctgtacaaaaacacgcagtggccaggtttggtccataggctgtaatttgctgagcctaggcctagataattatgtcaagactctcctctccctcctcaaacctgcaacccttcttcctccattctcacactcagttgaggacctggcttcctagtcactgagaaaatttaagcaatcacaagagaactcccacagcccatccacacatgctatctgccaacacctccacgtgactattcccccatccctctgttactgtgaatgaaacgtttgaactatgtccggcctgtctgctcgcttgtgccctagatccaaacctctctcgcccattcaacaaccctgctctgactagtcttccctttctgtccttgctgttcactgcattattcccatcaacatacaaataaatatgctgtcatcttaaaaaagctgctttttactccaactcccttgccagctacttcttcttctccttccctttacaacaaaaccctggtaaagatttgtcttcattcactgtttccaacttctctcccattctttaagtgagatacaattcacgtaatatgaaaatcaccgtttttttattttattttatttttgagacagagtcttgctctgtcaggctggagtgcaatggcgtgatctcagctcactgcaacctcggcctcccgagttcaagcgattctcctgccccaacctcccaagtagctgggattacaggcatgcaccaccacacccagctaatttttgtatttttagtagaggcagggtttcaccatgttggccacgctggtcttgaactcctgacctcaggtgatctgcccacctcggcctcccagagtgctgggattacaggtgtcagccaccgcaccggccactattttattttattttatttatttttgagatagagtctctgtcacccaggctggagtgcagtggcatgaactca

SEQ ID NO: 49843 - DNA, 1030 bp, Homo sapiens
tctaatggagggtcagaagatcattactttagatacagctactgaaattgaaggcttatcgactggttgcaaggtttatgcaaatatcggtgaagatacttatgatatagtgatccctgtcaaagatgaccctgatgaaggggaggccagacttgagaatgaaataccaaaaacgtctggcagcgagatggcaaacaaacgtatgaaagtaaaacatgatgatcactatgagttaatagtagatggaagggtctattatatctgtattgtatgcaaaaggtcatatgtctgtctgacaagcttgcggagacattttaacattcattcttgggagaagaagtatccgtgccgttactgtgagaaggtatttcctcttgcagaatatcgcacaaagcatgaaattcatcacacaggggagcgaaggtatcagtgtttggcctgtggcaaatctttcatcaactatcagtttatgtcttcacatataaagtcagttcatagtcaagatccttctggggactcaaagctttatcgtttacatccatgcaggtctttacaaatcagacaatatgcatatctttccgatagatcaagcactattcctgcaatgaaggatgatggtattgggtataaggttgacactggaaaagaacctccagtagggaccactacatctactcagaacaagccaatgacctgggaagatatttttattcagcaggaaaatgattcaatttttaaacaaaatgtaacagatggcagtactgagtttgaatttataataccagagtcttactaaactcctttgaaatactagaaagttttgttttggatgatggggcaggggtttcagaagatctgtaaaacaaattaaggtgcgaacaagttaatttgatctgccacattatctgaaggaagtgtagtgggatttttgttgataatttttagaagcaaattttcctgaaagttttgagtagaggtgagaccccctccccaagtatctgtttatatagttagttttcagctcatttaa

SEQ ID NO: 49844 - DNA, 1058 bp, Homo sapiens
aagtgctagtactaaactgtgctagtactaaaagaaaacaggttggaacatacatatagcctagcatttataacagaattgttgaacgtctgtaaatgattttttttttttttgcaaaggaaaaaattgatactggaaaagattgttgtgcatagttattagtcatttgtaaccttgcttaagtatttcttagtccaacatagatattttctttctcctgaccatgtattttaaaatatagtctatttcttgactttgaacttaaagctttaatcataatttctcatgtatacatcgttcttctgatggtaagctggatttgaaggtagtggtttcagtgtttcttaagttggtagctgagggtatcaggcatcagttcatgcaataatacaagaaaaaaaatcctttgcttgccaagaggtagagtgatgtgcatttatctgttttctgttctgtaagtctagaccttcaaaccatttgtaaactaacccctgggaaatttgaaattacctgataacttaagactctgtgatctctggaatcaccatatgtttcttttttgtgtagatattaataacattactctttgactatagtgtgcactctgaaatgtactcagtgaaaatttgttttgagtttcattaatgctatttcaccagttagacataattacttctaccgatgtgaatgatacggatgccggcagagcttccagatctttcagactcaactgctaggtcaattagtttgtcataataaaacttggcagattctacaagtctattatgacaaaccaggaactaattctataatggaaaactatccattctgaataataggtatgtaattatttgctgctgctgctgtgctctgtaaattctgaatatgacatttaaactctgtgcctactaaaggtatcttctggagtttttgggaggagagaaactggaaaattaaattgtatttttgccagaagactcttacttgcatgtgtctcagggtcttcagtttttctataagtttccatatccaaagttcagaattcatgtgaaatactt

SEQ ID NO: 49845 - DNA, 1054 bp, Homo sapiens
gctaatctactgtaaagctttgtttttcttatccaggaaatgggactgaaggcccttgccctttcccatcttctgaaggaagaaaatatgtttcttgaagattaaaaaggaagccctttgtaaagaacttgggcaccccaggggccacgttgaatgctgtgtcaggtattattagcaaccctacactatacatgtggtttagaaatctgtgatatatgtcctagatagagacaagatgcctactattgtagatgtgtgtgtcttaagcctgcttagcttgtgtcagggtctctataagctccacaaaggcagagagaaatcctgtatttatacttctgcaatgattgtctttgagtcctgtttacttatctctttctcctctcattctaaatatctcatacttaatgtggaggactcctgcaaccagcactgatttctcaggagtgcttgctaattaacatatttcgtttctgtgaaagtagcctgaaagaaaagaggtttttatacaggctctaaagactatatgacaccttctttagagattcttggctcccctatagcaatcacacagcaagagatccctaaagaagccaaatagaaacttgttaccatgctggttttgatggacagattgagggcttttcaattcagagagaaacacactacccaccaaatgatgcagagggcatatgtaatttgacctttataatcccaaagacacaaactagtgaggtacctttaatgggagtgaggtttgctttctcaacatctgtattcctgaatcctgcttgaaattgaacattattttataaagtactagaggagctggctatttaaaagaactgcatatggtatgtttcttttgtgctgtctcttggggtgccttgtgggacttggagcacagcacgcactcagtcaagttaaaaatgactttgagaccagtagcagtgacaatagcagcagctgcagcagcttggagagtagtagcagtcttctccccagagatggtgtatttgtctggagagaggatcgggaaaaggggagggactagaat

SEQ ID NO: 49846 - DNA, 1030 bp, Homo sapiens
atttaaaaattttagaacccatttgatgaccaaattagtggtattaattttgtttcagggttaatgtagcactttgatattcccctagtcttgtgacattgttactctggttctatagacccactagttagatcactaaaatcacttttagatatgagctgccacagagtaatgtagtttaatataaacaacaatgtaattgtgatgtcaataagttctttacttgtggcttaataattaaaaaataacaatatactttgaattatatttatcacgagtaagactataaaaatgcataaaagtatgtttatgtgttttttttccttctacagtgagaaagtcaacaaaggaattggcattgaaaatatccattatttaaatgatgggctgtggcatatgaagacatataaatgagcctcagaaggaatgcacttgggctaaatatggatattgtgctgtatctgtgtttgtgtctgtgtgtgacagcatgaagataatgcctgtggttatgctgaataaattcaccagatgctaaaattctgttagcttcagaaattattttaagttttcttaaactcaagttaaaattgggtagcaaacttggacattaaaaggtatctggtaagtaagcaaactcatacaactaatgtcctttcttaggctaatgatataagagtgaagagcaggacttggtcaatggattgccattttatggtagacctctagagaaactgtctagttaaatggggctagaaactagactaggaattttattctattactccaggggacccagcagtgctcattctcgtgtgtgtgtgtgtgtgtgtgtgtgtatgtgtgtgtgtgtgtgtgtgtgtgttttgttgattgtttttttaaaaaaaacttcaatggaaaattctaaacatattaagaagtctggagaatagtataatggacctctccatatccatcacccagtttcagtttatggtcagtcttatttcatctatacctcaattatttctccccaccccccaattatttt

SEQ ID NO: 49847 - DNA, 1736 bp, Homo sapiens
aaaaccaagtaaaggaccacaactccacgagatcaggaatgaatgaagaaaattgagggccagtttttaaatcattgttgagactattaggttcatctgtctgtttaagagtctggccttagggaatataatttatgcatgtaaaaaaatacaggagatgattcactggaatgtctcttaataataccatgttcattaagaataggtcattgggaggaaaaataaataaaaacatctgaactcattagtataattaatacttgcctcttagaatgaaaattaaagaactccaaattttagccttgaatactttgagaaataaaagatgaattagtgaaataatttctacttaaaatcttagttgttacagagaatgacatgcctcactattaatgtccaattctaattaatggattgttttagaaatgtatttgtgaaatatagcaaacatagctagtaatactaacaggtgaaaactgatatttcaaatgactaaatagacttaagattagaggaaggtaggaaaaggtgtgcaactaacagaagcagttaaccaaaaaatgagcttcaggcatcagtcttatttggaagactgtaaatcaacaggctaacgttcaaaatatggcagacatcttaatatcaatatatgctaaattggtttatctttaggcagaaacagaaagcaaaaaattaaactcatccaactcatacatttgttgttgttgttgttgttgttgtttttgagatggagtcttgcttcattgcccaggctggagtgcaatggcacgatctcggctcactgcaacctctgtcttccgggttcaagcgattctcctgcctcagcctcccgagtagctgggatcccatgcgtgtgccaccacacctagctaatttttgtatttttagtagagacagggtttcaccatgttggccaggctggtctcaaactcctgacctcaggtgatgcacccgccttggcctcccaaagtgctgggattacaggtgtgaaccaccacacccgacccaactaatacatttttaaaatcccattttaaaagtaaaaccacagttttcatataacaaatgttattgctcttcatttcattctccaattttaaaatgctttactttcagccaatatgtgaatataggagacttcaaaagcataatcaattactcccttaaagttcattgtaagtgttctcagaactctaccacctagaatttaaagacgggaagatttactttataattttaatttcttatcacaagactcgattgtcaataactgttaacgtccatttaataatctatggtgaaataggtaatttcttcttattttcacaagcgtgtgagtaaaagactgggttttaagcaataaatcatttgttctaactaagcacatgcttggaaaaagtgctatttttccaaacgtatgccttgaaaacaaatacaattcaattgcctttttggttcatgggaagccatactgcggtggcttccaaggttggccaacctgtttttattcttaccacctctttcaaaaagggatgttgtctttgtccccaaattctggtgttgtcctatgctgatgcataatgaagccctgaggcttggaaacttgcaaaccaataagatgatttaatgatgaaacggcatgtcagtttgacactgtctattaatagtccttgagtgagcttaaatttgagacacttttaaaagcggcatgtagttcc

SEQ ID NO: 49848 - DNA, 1027 bp, Homo sapiens
tgaaaaggagtccacaaagtatttctgctttcttgctcctgaatgcaaaggtctgagagaaggcacatcctcattagcttctgggtgttgtcaaacccaatcctctctcaagtaccaaatgcccagatacatttattgggatgcaggaatctcacttaagtagcggtttttgctgatataaagacaaacatcttgattaaagtgtagggagatagaaactataccaatttgggcaattttggctctaatgtctaatttgttgtgaaaggggaagatgttctaagctaatgttcttaaaagtaacttatgaatttcttaaaaatagtttttaaaaagctgtttcaggaaaagctgttttattgcatggcacagattaaatgtacagatgttatcttaaaacaatgaaagagttcccctaatttgaatattcaataccagctgttattcacatcaatattttaacattttaccatcaagatatttaatacaaaggattgatacatatttaactgtttagaattctagttaaacttgtccagatgagtaagagggaaggagaaataacattctccaagtacctaccatgtgcacaagctctacttatatatcttgcttaatcttagcaatgattccatgaggtagattttaactctcattttacaaacgaggagactaaggctcagagaggtcatacaacttcaggaaagttgtatgacctctctgaggtaataaatggcagaactggaatttgaacctaagtctccttgtctgcaaatcctgtgttttgcagaaaactctcctcttgtatttcataaaatgttaaatcttggcccaaattcaaatcaccatctttatgggttattggagagaggtataagttggcaagactctgttccacgatgggaaaaaatgggtaggatttgaatgagtaagagtgggatacttgcacagtatcatatttgtgtggctggagtaatgtttttctgtttccctcttagcaaagtggagtgggagaatcttgaaattg

SEQ ID NO: 49849 - DNA, 1109 bp, Homo sapiens
gttgatgtgccgtttgggggtgctaaagctggtgttaagatcaatcccaagaactataccgaaaatgaattggaaaagatcacaaggaggttcaccatggagctagcaaagaagggctttattggtcctggcgttgatgtgcctgctccagacatgaacacaggtgagcgggagatgtcctggattgctgatacctatgccagcaccatagggcactatgatattaatgcacacgcctgtgttactggtaaacccatcagccaagggggaatccatggacgcatctctgctactggccgtggtgtcttccatgggattgaaaacttcatcaatgaagcttcttacatgagcattttaggaatgacaccagggtttagagataaaacatttgttgttcagggatttggtaatgtgggcctacactctatgagatatttacatcgttttggtgctaaatgtattgctgttggtgagtctgatgggagtatatggaatccagatggtattgacccaaaggaactggaagacttcaaattgcaacatgggtccattctgggcttccccaaggcaaagccctatgaaggaagcatcttggaggtcgactgtgacatactgatcccagctgccactgagaagcagttgaccaaatccaacgcacccagagtcaaagccaagatcattgctgaaggtgccaatgggccaacaactccagaagctgataagatcttcctggagagaaacattttggttattccagatctctacttgaatgctggaggagtgacagtatcttactttgagtggctgaagaatctaaatcatgtcagctatggccgtttgaccttcaaatatgaaagggattctaactaccacttgctcctgtctgttcaagagagtttagaaagaaaatttggaaagcatggtggaactattcccattgtacccacggcagagttccaagacagtatatcgggtgcatctgagaaagacattgtgcactctgccttggcatacacaatggagcgttctgccaggcaaattatgcacacagccatgaagtataacctgggattggacctgagaacagctgcctatgtcaatgccattga

SEQ ID NO: 49850 - DNA, 1033 bp, Homo sapiens
cccatctttctttacatgttcacatttttgatatgttattttaggtgttgaattcaaaacataaaaagggtattttaaggccgggcgtggtggctcacgcctgtaatcccagcactttgggagactgaggcgggcggatcacgaggtcaggagatctagaccatcctggcacccctctctgctaaaaaaaaaaaaaaatacaaaaaattagctgggcgtggtggcaggcgcctgtagtcccagctacttgggaggctgaggcaggagaatggtgtgaacccgggaggcggaccttgcagtgagccgagattgcgccactgcactccagcctgagctacagagcgagactccgactcaaaaaaaataaaagggtattttgaatattttattttatttatttgtttttgagacattgtcttgctgtgtcacccaggctggagttcagtgcatgatcccagctcactgcaacctccacctcctgggttcaagtaattctggtgactcagcctcccaagtagctgggattacaggcgtgtgctaccacacctggctaatttttttttttttggtatctctttttttcccctcggagacagagtcttgctctgtcgcccagagctggagtgcaatggctgcgatctctgttcactgcagactccgcctcctgggttcaggcaattctcctgcctcagcctcccgagtagctgggattacaggcgcacgccaccacaactggctaatttttgtatttttagtagagacggggtttcaccatgttaaccaggttggcctcgaactcctgacctcgtgatccacccacctcagcctcccaaagtgctgggattacaggtgtgagccaccacacccagccttttttgtattttaagtagagacaggatttcaccatgttgcccaggctggtcttgaactcctgacctcatgtgatctgcccgccttggcctcccaaagtgccaggattacaggcatgagccactgtgccggcctttgagtattttaagttataaaagaaata

SEQ ID NO: 49851 - DNA, 1081 bp, Homo sapiens
ggagaagctttgcaaaatctgtatggatagaaatattgctatcgtttttgttccttgtggacatctagtcacttgtaaacaatgtgctgaagcagttgacaagtgtcccatgtgctacacagtcattactttcaagcaaaaaatttttatgtcttaatctaactctatagtaggcatgttatgttgttcttattaccctgattgaatgtgtgatgtgaactgactttaagtaatcaggattgaattccattagcatttgctaccaagtaggaaaaaaaatgtacatggcagtgttttagttggcaatataatctttgaatttcttgatttttcagggtattagctgtattatccattttttttactgttatttaattgaaaccatagactaagaataagaagcatcatactataactgaacacaatgtgtattcatagtatactgatttaatttctaagtgtaagtgaattaatcatctggattttttattcttttcagataggcttaacaaatggagctttctgtatataaatgtggagattagagttaatctccccaatcacataatttgttttgtgtgaaaaaggaataaattgttccatgctggtggaaagatagagattgtttttagaggttggttgttgtgttttaggattctgtccattttcttttaaagttataaacacgtacttgtgcgaattatttttttaaagtgatttgccatttttgaaagcgtatttaatgatagaatactatcgagccaacatgtactgacatggaaagatgtcaaagatatgttaagtgtaaaatgcaagtggcaaaacactatgtatagtctgagccagatcaaagtatgtatgtttttaatatgcatagaacaaaagatttggaaagatatacaccaaactgttaaatgtggtttctcttcggggagggggggattgggggaggggccccagaggggttttataggggccttttcactttctacttttttcattttgttctgttcgaattttttataagtatgtattacttttgtaatcagaatttttagaaagtattttgctgatttaaagg

SEQ ID NO: 49852 - DNA, 1093 bp, Homo sapiens
tggattcaaccaaggaggaattgaaaacactgagaaaaaaaaaaaagaccacacaataaaaaaaaaaaatacaaaataatacaaagaaaaagccaaaattgtcatactgttgttaagcaacagtataacaactatttacatagcattaaggttggtgcaaaaatgcaaaaaaaaaaaaagcaattatttttaaaccaacctaatatattgtattaggtattaaagtcatctggacatgaattaaagtatatgatgccagcctggacaaaaggcaaaaccctgtctctacaaaaaatacaaaaattagctgggcatggtggtgtgtgcctgtagtcctggctactccggagcctgaggtgggaggatcgcttgagtctgggaggcagaggctgcattgagctatgatcatggcactgcattccagcctgggtgacagtgcaagaccttgtctcagaataaataaagtatgtgatgaagatgtgcatacattatatgcaaatactgttttttttttttttaatttaaacagtctcactgtgttgcccaggatggagtgcaatggcacaatcttggctcatggcaaactctgcctcgcaagcagctgggactacaggcatgctccacggtgcccagttaattttttttgtattcttagtagagacagggtttcaccatgttggccaggctagtcttgaatttctgacctcaagtgattcatctcccaaagtgctgggattacaggcgtgagccaccacggccggctaatttttgtattttttagtagtgactggtttcgcggtgttgaccaggctggtctcgaactcctgatctcaggtgatctgcctgcctcggcctcacaaagtgctgggattacaggtgtgaaccactgctcccggccttgtgtgattttatctaagggacttaagcgtcctcaggtcctagggggtcgtgaaaccaaaaccccagggatagcaagggacaattgtatcttcaaagtagacaaatggcgccgggcacggtggctcacgcctgtaatcccagcagtttccgaggctgaggcaggcggctcacctgaggtcaggagttggagacc

SEQ ID NO: 49853 - DNA, 1045 bp, Homo sapiens
tctctccatcccttccgaggcccgacttcggtcagttttcttcgggcaacaattttctaaattggctggggtctggcggtgttggcccccgcgcgcagaccttgccccgaagggggccctgcctgcctggcatgggcggaggggggaagggcgggagtggaaggctgtttgttggggggttttggcgccacttttgttttagttttagtgctgcttttcattcccacccccacccgcactgtctttctcaaggcacgaactgagctgatccttgccccaggtaggcagcctgtgcgttttcactccacacttttattcttgctcggggtcgactttcttttttcttctcccctggatccggagatctgcggacggcgattttgggacgaaaagggtcggatgggccgtgggagagagaaggtgtgggaaacagcatcaagtagttccgcaaaactttgagccccgttcccattttcttttggcctagaattgtgaacgtattgttgatttcggcctttttttccccccgtcgcgagaatgtcttgttttgcctttagttttttataaaccgctgtactttcgacatttagtttccgctcccccttggtgcatatgtcattttatttttaatccttaactgtaatgggttatcgtgtgattttcgtgcttcagtgctcggctttaatttttaatattgtattagtagtttcatccggtttgtgagactttctcttccgtggcctagaatgttttttatgttgttgcctaccacccctcttccctctccctccttctttctcttggatgtagtttttaaattgagggccatggtgttggattaaatggtaatttacagtttacatgatatatctattggaaacttttgatctgtaaggttagatttaaagtaaacgaggcgcttgtgttggtttgcaatggttccttaaaatgcgcgggccacccccttctcccaccataaagccccatcttcccttcacactggagtgtaaattccataccccttttctcccacggaccgccgtat

SEQ ID NO: 49854 - DNA, 1824 bp, Homo sapiens
tctcccttaattagtgcatttgtgaactgctcctaaattctattaaggtaagtgccttttttttttttttttttggcagttctatactgttcagtgtcaggtttatttttttcccccaggagatacattttaaaaatacatgtcacagttccgaaaggaatccaaaacaatggatatttaatttatagcaaaatttcaccccaatctgggaacagacattttgtaactgttaccattagtctgtttgtgtatttcatattcaggattttagctttagaaggatgttaaaggaaaataggtgacatatttcaaatttttattcatatacaaatattcttagtagatggtaaggattgtggcatcagatttattttattgtggtgaggcaatagctaaactactacactaacacatgatgagtttggtaactttcaagtatatttagttaggattttttaaagcccaaatgctcaaataagattttcatgaaatcaaattctacatttctttttcaactgtattgacttctgcggtcacctgaggacttatgaattaaagtgaatgggatgggcttgggggacaggctaaggctcagatctattcctttgggaatttagggttagatgtgaaaatatgcagtttagtaatgcttaatattgtgcatgtttaactgataccacccacagtcatatgtgggaaggtagtaaacagagaatagcataatctttctgcttcgggttctttataatagatggcagacttcagtttttgatgctgcaagttgacttttgaacttaaaccaaaatcggcggggcacagtggctcacacctgtaataccaacactttgggaggctgagaggctgaagtggggggatcacttgagcccaaggagttcaagaccagcctgggcaacatagggagaccccatgtttatagataatttaaaaattaggtgtggtggtgcacacctgtggtcccagctatttgggaggctgaggcaggaggatcacctgagcccggtacatagaggctgcagtaagccacgattgcgccactgcacccagcctgggcaacagagcaagaccctgtctcaaaaaaaaattaaaaataaactaaaatgtacagtttactatataatggagtaccgttttgggagttggggagaatagcgagggagagggatagtttcaggtatgggcatcagtatatactgaagtgtgattgttggagagtaaggaaggaactttaaagacataggctattttaaaagtttttggctgggcaccatggctcacgcctgtaatcctagcactttggaaggctgaggcaggcggatcatgaggtcaggagttcaagaccagcctggccaacatggtgaaacccccatctctactaaaaatactaaaattagctggacgtggtggtgcgcgtctgtagtcccagctgcttgggaggctgaggcaggagaatcgcttgaacctgggaggcagaggttgcagtgagctgagatcgcgccactgcactgtagcctgggcgacagcgagactccgtttaaaaaaaaaaaaagttcttaacatttttctgcattggctacatgttcaggactttagttcgtgtttcagtactgtccctgtgtaataattctttatgtttctgggtatcataaatgatggttattgcgtgttctgattggcaaagatatatgataaagcaaaattatcagtttgatttttcagtctcttgagttgactgctttacgtttaatttacccaaattttatatttcttcagtgtaagtggtgttgcttagtggagtctaatttt

SEQ ID NO: 49855 - DNA, 1956 bp, Homo sapiens
gtgtctgagaattgttccccagtccttcagcttgttttactgagtggttagattcgaagtaaaaagtttaggctaatctttaataattcagcgctctggttctttaggggtattttttgttatttaattgtaccttaaaaattcttttttattctgttaatatctcctgtttgcttatacttcctattttagttcatctttcactattaagttttcttgttcttactgttatcaggtgataaatagttaatatcagggccccaagttattaggttcattagtgatcggtatcttagtctcagttttctttttcctttctgttttttttttagatggagtttcgcgcttgttgcccaggctgtggtgcagtggcatgattggctcactgcaacctccgcctcccaggttcaagcgatttcctcgcctcagcctcccgagtagctgggactacaggcgcgtaccaccacacccggctaattttttgtatttttggtagagacgggatttccccatgttggccaggctggtctcgaactcctgacctcaggtgattcacccatctccaccccacaaagtgctgggattacaggcgtgagccaccgcacccggtcttcctgtttttttttttttttttttttttttttaattgtaactgaagttttttttatctgaaggaattctggttgttggacttatgacctaagataaatttatggagacaaggaaaacaaaatatatatatttgtgcttttcatagccatgagtcaaatttatatgtttatattgatcattcctttaagctttaacatgtaggaaatacttttttcccaggtgatgaacagcagtcttatactcagactctttgttcattgaggagtcttttcatccatatttccccctttgtattccaagaaaaccaagaactggtgttccatgacagaattattccccgaggcatccattgtatattataaattagtttctcccctgcacatctagaaagatattagttaggtatcattcttgggagacttcaggaatagtcactgaagtcattttctgagttctgtagtcaagtcattttctgagttctgtagttaacatgaggaacactggttgagaaaggctgctagaatattaagggacttggtttggcactaaataaagttttacttttcactgtcactttcctgttagtaactctaatatggcctctattaaaattcgtgatacaatgtgaatgctgttgatactgctattgctgtgggataaattggttagtgttgatttcaagcagttagtgctgcttagttgtttgaaagaatttaatgtgggacattaaatgcatcattttatttataagaaggaatattgtgggagcactgttcattatacagttcaaaatctataaaaagtcactgacagtgactaacatgaacaagaactaatactaactgaactcttaccatatgccagatactcttaaaaatgctttgtgtgtattagcttactttatcttagtaactctatgaggtaggatgaccatatgatttattgttcaagccaggatacttttgaacgtgaaagggattgcttcttggccttttggctaagatcaagggaagagtgagtgaaagggggcactcactgaatggcatgctgagataatagcagaaactaggactgtttgagagaaaggatgtgtgatgaccctaattaataccttctttttcagaagaaactgaagcatagggagaccaaataacttgcccacttagtaagcggtaagaagggatttaaaacctctgtagaggctgggcgcggtggctcatgcctgtaatcccagcactttgggaggccgaggcaggtggaccacctgaggtcaggagttcgagccagcctggccaatatggtgaaaccccgtctctactaaaaatataaaaattagccaggtgt

SEQ ID NO: 49856 - DNA, 1032 bp, Homo sapiens
tgtgcctgtaatcccagcttcttgggaggctgaggtaggagaattgcctgaagctgggggtagaggttacagtgagctgagattgcgtcactgcactccagcctgggcaacagagcaagactcttgtctctaaaataaaataaaacctgtagagatttctatgggaatgaaagtgatttaaattattttaaattgccatattctgggagtttgtttacttttacccttttgggggagtttttgttggtacatggtcaatagtaaaaagacaagatagtgttttttaaaatccaggagaatttccacttggatttttttcaagtggctgttagactgaggtgattatattgtcttaatgttgaaaagcaactttcctgagggccacctaagttaaaacaaaactctaagataacgacatctgagtttgttttccgtatgtattattcaggttccctttaccattttcttaggcagaaatgtggattgtagaaatttttactgagaagacagtagaaagaagatgaatacttttgtgactagggagaagtgttactagaaaagaaagaaaaaggtccagtttagagacttttgaaggtaaactgattctgtagcatagtttgagagttaagtcttgtagagattaatatgtcatttcataaaaaatatccctcttttattgtgatttttaaagctattttatatttctggcctgtttatgcttgtgctgtcacctgaaaaaatattactggtgaattcaaatgtggagaaatgattttggcacagttgtggaaacaactatattgtaaactaagatctttttttttcctttgagtgggagtgaatggtagtatctgatcttaaggagacttccagttttgttttcatacttggctattttaatagttcattgagtaatttgtgtttttttttttccctctagctagttgacgtttggaggttttgttggtgtaactatcattttttttttttctttttttttgaggtggagtcgcccaggctggagtgcagtgg

SEQ ID NO: 49857 - DNA, 1043 bp, Homo sapiens
cactcaaaagagaaaaaaaacagtagtaaaataaaataaaaaaaaaatgcagttggattttaaatactatattgctggtttttaagctggggtccatgaatgggatggagatttgtgaaccctctcaaattatgtacaaactgtatacatgcatttcatcagtttctctagggctcattgttaaaatcagctggtatttaaagtacttatgggggaccgggtgcggtagctcatcatgcctgtaatcccagcactttgggaggctgaggcaggcagatcatgaggtcaggagatcgagaccatcctggccaacacggtgagaccccgtctctactaaaataacaaaaaattagccgggcatggtggcgcgtgcctgtagtcccagctactcgggtggctgaggcaggggaattgcttgaacccgggaggctgagattgcagtgagccgagatcgtgccacagcactccagcctggcaacagagtgagactctgtctcaaaaaaaaaaaaaaaaaaaatagactgggcgcggtggctcacacctgtaatcccagcactttgggaggctgaggtgggcagatcacctgaggtcaggaattcaagactagcctgagcaatgtggagaaaccccatctctactaaaaatgcaaaattagctgggtgtggtggtgcatgcctgtagtcccagctattcgggaggctgaggcaggagaattgcttgaacctgggaggtggaggttgcagtgagctgagatcacgccattgcactccagcctggacaacaagagtgaaactccctctcaaaaaaaaaaaaaagtacctatgaaagatgggatatacaatggtaaactagattacatagtctctgcccttaggggaatatagtcagttggactttgtcactacagaagggttaaaaaaatacctattaaaataccgtgtattgggtttacattaaagaatattgggctaaaaccagccatcaatgcagttttggcactgtgttcctaatgtgagattagtgacatactgaaaaattagggc

SEQ ID NO: 49858 - DNA, 1044 bp, Homo sapiens
gctttaatgtagccttggaatgcttcagtctttggcagttgttaataaacaaagttaaaagagcccatgatcatcttttcttttcttttttcttttttttttttttgagacggagccttactctgttggccaggctggagtgtagtggcacaatcttggcttactgaaacctccacctcctgagttcaagtgattctcctgccttagcctcccaagtagttgggattacaggcacccgccaccaggcctggctaatttttgtatagagaaagggtttcactgtgttggccaggcttgtatcgaactcctgagctcaagtgataacacccgtcttggcctcccaaagtgctgggattacaggcatgagctaccgtgcctggccccatgatcatcttatatatgcagttactgttatccaaaggttgataccttctttttttttttttttttttgagatggagtctcgctctgtcgcccagactggagtgcagtggcgtgatctcggctcactgcaacctctgcctcctgggttcaggcgattctcctgcttcagcctcttgagtagctgggattacaggtgcatgccaccacgcctggctaatttttgtatttttagtacagatggggtttcaccatatttgtgaggctggtctcgaactcctgatgtagtgatccgcccgccttggcctcccaaagtgctgggattacaggcatgagccaccacacccggcctagtatttgattttcattacattcactcacccacacactcatcatataaaatgattgaggtttggtatacttgaagtattttcatttcaggattgggatatatgataacctctttccttagatttccaatctttttttcctttcaaaagcaagggtaatttttacagtcaccagtgtgtctactgccttgtacctaatttgcaaactttatggtggctagaatgttattacaaagaacatgtttgatatcttcttactaaaatagaggcattttttgtagtctaaagaaatagtatatatataaagatagga

SEQ ID NO: 49859 - DNA, 1027 bp, Homo sapiens
catcttcttactatatgacaagttgtactaggctccctaacatttaattttttgtttctcacaacaaccctattgaggttgtttactgaggttcagaattgttagagacttgcccaagatcacttagctaataagtggccaagcttactttttgaatccaattctgcctaattccagaacactcctttacatggtgatacactgcctcccagtgggatgatttatagatttcatagtgatactttctttggggaaagagaatataaaggatacaagaactctaaatggaaaagacagaggaggaagttaaacttctcatagtggtcaggaaccttttgggggattaagtaggaggaaagcttattttcagctgagagctgatggatgtttgaagttgcatgtgatatgtgtcatgttttataataaacatcaagtagcaactagaaaaggcttagcggcagggagatgataaagtttcttacactgtagtgatgataaagtttcttacactgtactgatgataaagtttcttatactgtactgttttaatcttgagtaaagtgacatctgaattaattttaaggaattaacctttatagaaaataaactgaaacaaaatgttaatctaaagcattgtctccataggtagtgttcccaccaaagaacaataattctaataagaataatctgttcaggtaaactggtctaagtcaggcagcattatgattccagtttgtgttttggttttcatattccactagcctcccttttctgctgttttttttccccccctccggtatctttacagtttctgtagttcttcataaaaagtagaaatgttttgatggcgatttccttattttacttttatgctgttactgctaacagtagacagccttatttgtgaggcactgaaatagaagtgatttcaaaaattaatccatttcgtgactcagaaacatttcctttaaaaataatgaaaaaaaatagaaaaattagtccatttaaatttccctacaagcctgtg

SEQ ID NO: 49860 - DNA, 1063 bp, Homo sapiens
atagtgtacattggcttttggtgggggtacttagaattaaagagccggagggtcagaggtgaaaacatcatgcttaacttggcaggaggaagaagtaggatcactgataagagtggtcaaagaggtaggagaaaatttaggataatgtagcatacaatccataagcatctcaaatttgaaaagaatccagatggcatgttctcccatctgggagatgcttttaaattgtatacagtataaaaactgttcttccaattatgtcaagttaaaattatctttaaagctgatatgatcaacaattatccttatgtagattgtttcctttgtcgcatctcatgggaattgggttcttctcccacactgggtcccaggttacaaataataggtttaagctgggaagtggtcagggacaggaagggagggcatatttggctttattgaattctacaaagtcaaatagaattgtattggaattattttacatgcaacattggtattagtgtggctgatcaaagaattgattgtacttaaatatgcaaatagtattaggataatacaatactgcaatttgatgtcctcttcaaaatagctctgaaaaatatgattggaatttctggagtctattttgaaaaggaaaactttttttttcttttttccttctgtacttcatgtgaaataagtgtgtaggcaactactttagtttctttaagttttgtgtaaaagctaacttgggtagaaataatgctggagatgagtatcttataaaaatcacttcatttttctgcttcttgagagaatattttacagggaaattattatcaatatgaaaaatgactcataattctacttttctcattccagaagttttttttcttaattttggtaaaatatatataaaatttgccattgtaaccattttaagtatacagttcagtggcattgagaacatttacgttgttgtgcaaccattgtcaccattcatacccagaatttttttactatctcataataaaactgtacccattaaacaatagggccctgttcctccctccctccctcgctc

SEQ ID NO: 49861 - DNA, 1067 bp, Homo sapiens
tcaagtgatccgcccaccttggccttccaaaatgttgagattataggcgtgagccaccgcaccctgccggaatttacttttgaatatgatgtgaggcagggctgtacactttagtctttttttttttttttgcctttttttttgcccttttttttttttttgccgtatcatgaaccaaaaccaactactttccttgtacatttgtctgtttctatatcctcatttttaggtagcaatacttctataagtagctttatctttttccctatctaattgtgtccagcagttggaatcacgctgtcagtcagcatgaacatttttaaagctcttggtaactgaagttatattgttttctaatagggttgtactgattttacagtgccatcagtgctgtgatacgtggtaaccacattttccctgcttcggagatgttaaacagtccgtgcagttcctcagatttctttaatttgcatttctttgattactagctgaaattaatatttccccttgtttttcagcaaggtattgtgaatgtgactgacaaacttaagtttaacctgagagggccttataaattatgagtatacagtagtttttagtaaattactggcacttttttttttttagtatttagatgtatctactttttttaaattgagtttgtgtattttgtaatgtctgttcaccttatttgtggttctcctagttcatttcaatttactacttaggaaacctgaagtaatctatccatcctcttgtttagcctagtagtgctaagttgcattcagtggatagccaattcgtggatgagctgagttcaagtgttttgtaaatagagtatgagagaatcagtgggaagagcccagatttttttttcttactgtagtgtaatctttttagcagtgaagcctatagtgaaatgagatttttattagtaacttagcctgcttcttgatagtaatagttatttatagtcatgagccggacggataaagtaaaattggctgtttgacataattcttttgaaaaataattatataattgtatttatctttatgccaggtggt

SEQ ID NO: 49862 - DNA, 1189 bp, Homo sapiens
atctcaggtgatctgcctgccttggcctcccaaagtgctgagattacaggcgtgagccaccatgcccggcctttaaatttttttgtagcgacgatatctccctgtgtttcccaggctagacatctatcattttaagttcttcataacttttcaaggaataggtgcaaatctctgcattttacaaatagaaaaaattgtagagatgcatcttgtctttaatcaagagccctaaagtaaatctacttgggtctaataatgagaaaataagggataattcaacataaaatctgtacataggaagcgttgttagttattacaatgaagtgttggggtcagtcttaatgtctaataataaatgagtagattatcacatctggtggaatctcataaaactattagaagtttgtattatgaatattacagaagtgcctagaagtgcatatggagatgaaaagttgtgtacaattgtatccattttgtggttatagttttgaaaaatctacaaagtcatacaggcatatacatgtggacaaaggctgggaaggaaaatgaaaataggtgatttttcagggtattataatgctatgtgattgttctgattatttttaaagataattttgtgtaataaagagggagaaaaccaagatgatatatttcccatgtagtgtgcactgaagagcattggcattaaaacagtcaggggttccacctagatgatgtggtttatagtatattgtatcttatactttgggggaattttaatagtcttgactactggcttttaattttttattagtaaacttttagcatactatcattcaacccattgcattttaccatggagtttcactattattttattattttcttcttcttcttgagaattatggccacaataagtagacttgtatgttatgtaaataaatcttaatggactttttttttttgagaatcttcaacttggtgtcattaaagaagcatttttaagcccgagatatatgttccattgcagtattatgagggaaatcatccattataaacttctatgcccatagctttttgtgtagcttgtcttgtcaatcagcaaagcaaatactttactgctctctgccttccaaattacttcatatattttatggttgatatactttatggtatgtgtgttcttttctgtttcattgcttccata

SEQ ID NO: 49863 - DNA, 1183 bp, Homo sapiens
ctttatagcaacagccccactctcttgggaatgaatccatttccaggagaactaatccagtctcaccagagtgagaactcagaatctcactcattaccaaaagattggcaacaagtcattcatgagggatctgccaccatgacccaaacacctctcagtaggctttacctcccaacacagccacgttggggatcaaatttcaacatgagttttggtggggacaaacaaaccatatctaacccaaagcaaatgcctattgctttataataagattgatggtaaagtgcagctgttggggattttctgctgctcaagattttgctaaagatcgttttgtgtacacaattgtaaggaaactattatttttattgcatgtattgaatgaagagtaagatatttcaggggtttctatgtgatagttttagatagttccttaagtacaaaggaaggaaattaagaccttatgtttgaaattgagtgattcacaatactttaagagtgtagtcttatttttgttctgaagagctattatgtggattatcctagtaagacaagtatatatttatgagacaaatatgtagaagatgagttcaagcctagattcttgcctcttagctgtgtgaccttgggaaaagcttttaacttaaaaacaaattcagcgttgattagtatttaggggaagttgatttgctgtagaaaccatgttatgctattacttgcgtaagtattttggtaacacttctggtattaccatggtagtataaaagcatttttttccctctcgtataatacagaaacaacaacgtaaacaaaaaacctctgcaaactcctatttttagcacacttggagacataaaatgtgccgattacaaaaaatgtgtagaggggccggtaggtcgtgcatcaaagaagtgtggagaatagtgagctggcccagagatggtagatcttagaaagcttgactgtaaaatacaataatatcctttgtatgtgacaatgggagcaggtaaagagatgagcaggctacaagataaagcctttatggaaaaggtttagtcacgactagggagatatggtagggcttttgcacaacgaatccgttttagcaggaaatcatctctgtggaagcagtggagagaacttttgacttaagaagcctgaaaggctatttatcctaacatat

SEQ ID NO: 49864 - DNA, 1050 bp, Homo sapiens
tttgcatatggtacaaggtatggaaagaattaactttttttgacatatggatatccagtcattccagcaccatttgttgaaaagactatctttcttcattgaattgccttggcacctttgtcaaaaatcaaatgaccatatgtgtgtaggtccatttcaggactttctattctatttcattgatctgtcttgatcaccattcgcactgtcttaccgtagctttatagaaagccttgacatcaagtagtgtgagtcttccaactttgttctttttcaaaatggttttggttattctaacttctttgccttttcacctaagaatcagcttgctgattttgaaaaaaattttagtagaattttgatgagacagatttctaaaaattgtggtagcatatatataacaaaattttctattttaacttttgaagtgcacagtttagtggcattaagtacattcacattgttttgcaactatcgctaccatctgtttctagcaacttaaaaaattttcccaaactgaaactctggacccataaacaatgactccacagtggaggaccactacacccagcacctggcaaaccaccattctactttgtctctttgaatctgacacctttaggtacttcatcccgtatttgtagaataatagaatatttgtccttttgtgactggcttttatttcacttagcccattgtcttcaaggtttatccttggttggttggttggtttttgtttttttgagacagagtctcattctgtcacctaggcgggagtgcattggcacgatctcggctcactgcaacctcctccgcctcccaggttcaagtgattctctcgcctcggcctcccaggtagctgggattataggcacccgtcaccctgcctggctaaattttgtatttttagtagagacaaggtttcaccatgttggccaggctggtctctaactcctaatctcaggtgatccgcccacctcggcctcccaaagtgctgggatcacaggcgtgagccactgcgcctggtcccttgttgtttaatatgtcaga

SEQ ID NO: 49865 - DNA, 1033 bp, Homo sapiens
accattttttatcttttatatggtatttttactgtacccttttttaggtttatatatgcttatatacacaaatacttaccattgtgttagttgcctacagtatttagtacagtaacatactgtataggtttgtagcctaggagcagtaagctatgccatgtaacctagtgtgtagtaagcctaggctataccatccaggcttgtgtaagtacactctgtgatatttgcacaacgacgaattgcccagtgatgcatttctcagaacttaccccattgttaagcagcacatgactatatattgaggtataatttacatacaatagacatcacccatgatatatactcccttgcaaccatccacaacaatcaagataacatcatggctgggtggctcacacctgtaatctcagcactttgggaagctgaggcaggagtatcgcttgaggctaggagtttgagtcaggcctaggcagcaaagcaagaccctgtctctacaaaataaacacacaaaaacacaaaaatattagctgagcatggtgggatgcagttactgaggagggaggatggcttgagcccaggaatttgaggttgcagtgaactgtgatcatgccactgcactgtagtctgggcgacagagggagaccctgtctcaagacaacaacaacataaaaaccccatctccattaccctcaagtttcttcttgcctcctttctgtcaaggtagattagtttgcattttttgtaatttagaatttcatataagtaaaatcttacaatagtagatacaccacagtcttcatataatcccaactctttgggaggccaaggcgggagcattgcttgcactcgggagttataggtttgaatatatcctaggtgattttgtatatttgttgtatctttcctgtagatacgttagtgatgataaagttaattcctggcttagggtgatgactgtccaattttcttattgtactgctaggttttcaccttatgagtagaaaattacctgtgtggttttacttgggaacta

SEQ ID NO: 49866 - DNA, 1576 bp, Homo sapiens
tttagttaccaattttcaaattaaggtgttaatttagtaactataatgataacatagatttgttcttttatctttttttgaggtttattatagatttttattggtttaatatattttaatacactatagtcatgtgtatttgtttttgatgtattttaaaaatcagtttatattgatactcctgatgaaacattttttgctttaacttttttatggtaaaatacagataacatatacatttgaaccatttttaagtgtacagttcagtagcattaagtgctttcacatttgttgtgcagccgtcaccaccatccatctctggaactttttcttttttgaaaactttctagaggttcatatttattggcatttgacctagagtcttcctcatgggcaaggtgcagccctgggcaggactatcagcatcctgctgtctcctcaattctgttaatccaccaatcctaatccctcctaaccccactcatagtccagagaagataaaaagttcagggacatggtgtactgctctccagatcctttcccagctgaaactctatacccatttagcactaatttcccattttccctagcccaagataaccaaccaccattctactttctctttgaatttgactcctaggtacctcacatatatattcctatttagtggaattgtagactatttatccttttgtgactggcttatttcacttagcactgttttctaggttcatccatgttgtagcttctgtcataatttccttcccttttaaggctgaataattttccattgtgtatatgtaccatattttgttcatccattcattcattgatagatacttgagttgcttctaccttttggcaattgtgagtgatgctgttatgaacatgggtgtacaaatgtctgttttgagtccttgttttgctttcgtgcattctattaaaaatgttaaggttctttgctttttacttttttttctcttttatccaccttttgactttattcttaaagttttatcttggtataataatttatggtatgttgcagaattaggagcaaagtcccgtgtgtccttcactcagtttcccccaatggtaacatttttcataattacagcacaatgtcaagaccgggaaattgacattgatacagtccatatacaggtgtcccttggtatctgtgggggattggttccagaaccctcgatgataccaaaatccatggatgcttaagtttattagataaaatggcatagtgttttcacataacctacacacatcttcctgtatactttaaatcatctttcgattacttataacacctaatataatataaatgccgtgtaaatagttatattgtattgattttatttgtattttttttattgttgttatttttcattgtgttttttccctgaatattttctatctgtggttggttgaatctgagcatggggaacccatggatatggagggctaactgtatttattcagatcttgctagttatacatggactcatttagataactatgtttgcatgttttatgtgtataattctatgcagttttatcatgt

SEQ ID NO: 49867 - DNA, 1051 bp, Homo sapiens
tccttctgagagaatctattctgtccccctctcttagcttctggtggtttgctggcaatctttggtgtcctttggctggtagaagcattacctcccatctctgccttcattttcacatggtgttctccttgtgtgtatgtctctttgcaaattgtccttttttttattagagtaccactcatattgcattcctccctaaggacttcgttttaacttgataacttcagtaaagatcctgactccaaataaggtcatattctgaggtactgggggataggacttcaacatatgaatgtttgggagacacaattaaacccatagcagagttgctttcatgttttggctattacaaacaaaggtcctatggatgtttatgtacatgtttttacgtagacataggttttcatttctctgggataaatgctcaggtgtaaggttactggtggttatggtaagtgcatgtatggtttttaaagaaacgtctaagctctttgccagagtggctgtagtttacatttccaccagcagtgtataagaatcagtttctctgcatctttgctatcatttggtgttgtcactattttttttttttttttttttgagagggagtctcgctctgttgcccaggctggagtgcagtggcacaatttgagctcactgcaagctctgcctcccgggttcacaccattctcctgcctcagcctcccgagtagctgggactacaggtgcccaccaccacgcccggctaatttttttgtatttttagtagagacggggtttcactgtgttcatcaggatggtcttgatctcctgaccttgtgatccgcccacctcggcctcccaaagtgttgggattacaggcgtgagccaccgtgcccgggctgtcactatttttttattttggcaattcttacagatgtagtgatatcatgttgtggttttaatttgtgttttcttctattcagtttaacatgtgttttaaaagtttgtttgctaattatctcttttatacttaatatcttgattcttagggtcattaacaagattgctt

SEQ ID NO: 49868 - DNA, 1050 bp, Homo sapiens
agacagggtttcaccatgttggtcaggctggtctcaaactcccgacctcaggtgatccgcctgcctcagcctcccaaagtgctgggattacaggcgtgagccaccgtgcccagccctattattaattttttagagacagtctcgctgtgttgcccaggctagtttcaaacgcttgggctcaagtaatcctcctgcctcagtctcctaaagtgctggattaggggcatgagccaccatgcccagctgctagttgcaattaatttattaatcaggatagctaagcacagtcatttatggtgggtggagggagacagagggagagggagattgtgtttcatgatgaaaagatcattttgagtatttttgccaaaataataatcatagaataagatggagatccttgcatatgaataatcttctcaatcatgttgttctcagtgttgctacgttatttggcagataactttttgccaggaggataattataacacatttttttttgaaagagttttctaattgagaagtttctttcctgactaatgacttaacaaataaaccattgttacaacaaactgtgtcataacagcaaagttgcaataactatgaatctaagatagtttcaagttctctgtagtagagtgtactttcaagtctatccaaaacaaaaacgttagctctaatatatatttgtttttaataatatattgctcttaatattaaatatatgttgagtcattatttcgcctcctttcttagcatctcgatagttcttttggggatattgattttgcaggatgctttaatgtatttgttgttgtttagaaataaggcagtcttttggtcatagttctagggaaggtttaaaaacttcagtcatcttagagctcagattgagttggtctgtttggatggcatgctaaagtatatgaaatttgcttggttacagggcaaaatgtgagagtcccctaatgatatctggtaccagtaatctaaccaggtaggtaggtaggtaggtaggtaggtaggtaggtaggtaggtaggtaggtaga

SEQ ID NO: 49869 - DNA, 1339 bp, Homo sapiens
aaatgtttaacatttgttaaataggtttcaatgacagttttcatactctatggtgagcaacttaaatgtaaggttagctctggttgttcaagtgtttccatgtttttttggaaaagttagattatttcttttgatattttgctgtaaatttaacataagctttggtgcattttaccttattaaacgggagacaaaaagtctcaaaatattctgagtgtagatatcaatgattagtgtcttaatttacaaaatgacatctcaatagatcagtagttatatggtatgtggtatgcttgtttagtagaaaggtgttcttaaatgatcgatgatttaagtaaaatcctgtgagtttataccatatgagagaagcttgcttgataaaagaggtttcaaatttaattttttattgtggtaaacaacaacatttaccatttaaccattttttaagtgtataattgagtaacgttaaatatatccaactgctgtgaaacagatctacagaaatttttcatcttgaaagccagaaactctatacctattaaacaacaactcccgtttttctcttcccctagtccctggtaaccattctactttctgtttctatgaatttgactacttcagatacctcataagttgaatcatatggtatttgtcttttttgtgactagcttatttcagttagcataatgcccttagggtccatccgtgttgtaatgtagtacagatgttccttccttttaaaaggtgtgtaactcattttatgtatctactacattttgtttatccatatctgttctattccactggtctatttgtctttatgccagtacctcacagttttgattactgtagctttgtacagtaagttctcacttagtgccgttcttaggttcttggaaacttgggctttaagcaaagcggtgtacagcagatctttgaacaatatcaatttgttcagtgttgttttgttataatgttgatgaggaaaaaaattggtttcattcattatacgtcattttgcttaacattggagtttccaagaacctgttggtgatattgaggactttctctaaaatgctttgaaattaggaagtgtgagtcctccaactttgttcttttcttcctaaaattgtttgggctttttggggtcccttgagattctatatgaattttcagcttaatttttttcatttttgcaaaaagtgctattggaattttgatagggattgtgttgaatctgtagatttctttgggtagtatggacttcatgataatattaagtcttcgaattcatgaacacaggatgcctttctatttgtgtcatctttcatttcagcag

SEQ ID NO: 49870 - DNA, 1035 bp, Homo sapiens
taccaagacaaattgagctgtttcttgtgtgatatctaacctactgggagaagtcattaggagtttgtcagtatgttatatttgagcatttaatattaattggatatgtttaatcttacctgctttttctttaggtggccaccgagtactaaattcacttgggaataaaagaaaaacataagaaaattataagagaaaggtacacataagactaagagctttagactttagcttcagcctgttttctccttccttgtttgcttttaggtcattttcttcatttaggaaatgcatccttgactttcaaaacatagacataataccctttctgtctgccatttttacatgtactttggtcaaaaatggcattcatttgttgttcgtatgaaattattggcatttaaattgatcgtaagttccttgagggagaggaatagatcagatctaacattttttcccccttctcttctcaacaaagtttgttattatcatgaagtggttatttatttaataagccaggctttggactgtatgtttccagggcaggaaaatctgttttaaagttatatcttaggttttttttattagctccttttaactgtatgtgcatgataccagcaaaaggttgtattttcaggcatctcatattatggtttaaagttctcatagggatttcaggaccagtaagagtcatatcctgtttctatttaggatgtattaatatatatataaagccaggcggagaatcacaagaaaatttaaaaacaattgttttataagcttctttttcccctatgtgttattactgtggggctgcgagtgttacaacaagtccatatctagattaagcagtcaaggtcaggcacggtggctcatgcctgtaatcccagcactttgggaggccgaggcaggtgggtcacctgaggtcaggagttcgagaccagcctggccaacatggcaaaaccccatctctactaaaaatacaaaaattagctggtcatggtggcccgcgcctgtaatctcagctactcggga

SEQ ID NO: 49871 - DNA, 1026 bp, Homo sapiens
acggggtttcaccatgttggccaggcttgtctcaaactcctagcctcaagtaatctgccctccttggcctcccaaagtgctgggattacaggcggaagccaccatgcccagcccattatttattattattattattatttttttgagatggagtctcactctattgcccaggctggagtgcagtggcacgatctctgctcactgcaacctccgcctcctgggttcaggcgattctcctgcctcagcctcccgagtagctgggattacaggtgcccgccaccatggctggctaatttttggtttttagtagagatggggtttcaccatgttggccaggctggtctcaaactcctgaccttaagtaatccacctgcctcggcctcccaaagtgctgggattacaggcgtgagccaccacgcccagccccaacccattatttttttttaatggcctaaggtaaaaaataatttggtcaaaaatatgctgatgtaaaccatggctatgaggtctcaattttccctgaatttatatagatgccattaaaatacgaagtcttctacccatatggaattcctggttgagtgacctaatataattattatccactttagtggaatgaattattttagttactgttgtctattacaaattttattatttgtgcttgtttcttagaagaataaaaagttggaggcatattcatgtcgaatcattcgaattatgttttctctgcatacttttatgacaatagaagcatttaggctttctaatgttggctaaaccattagaaagtggaataaatacaatactcaaggagtatatatacttaataaagttttaatttaatttataaaagctacaggcaatagtttttttttttaatttcaacttttagatacagggattacatatacaggtttgtacatgagtatattgcacctaggaagtgagggtagtatccagtgggtagtttttcagtccccaccccctacccccagtagtccgcagtgtctatgttttccacat

SEQ ID NO: 49872 - DNA, 1035 bp, Homo sapiens
ttaatataaacaagctgttgtaaatacaacaaagtagaaattaagtaaagttttagaataattccagtcagtctatctgaaccaggtatttcttagatatttttccttgatttatctttattgtgtaatcatagtatcttttttgtacattagattctacatgttttagtcattgtttgtacctggatttcctatttattggtatataacttagaaacatttccctctcccaaccttttgttttttatactagctcttgtttatcatcttgattttatttaatttgctctatttaaaaagttttgttgttgttgtttttgtttgtttgtttgtttggagacagagtcttgctctcttgcccaggcgggagtgcagtggtgcgacctcagctcactgcagccttcatctcccgggttcaagtgattcttctgcctcagcctcccgagtagctgggattataggcatgcaccaccacacccagctaatttttgtatttttagtagagacggggtttcaccatgttggcctctcgaactcctgacctcaagtgatccgctggcttcagcctcccaaagtgctgggattacaggcgtgagctaccgcacccagcctaaaaattgaaaatcagttttgtcgttgcctctcttgccccgaaaggaataaagtattccttttatttttagttctagcctattttcttttttaagaaataaccatattgagatatatttaccatactataaaatttaccctttaaagtgcaaattcagagttgtacagccaccattacaatataattttagaatattttatttatttttattattttttttgagatggagtctcactcactctgttgtccaggttggggtacagtggcatgatcttggctcactgcaacctccatctcctggattcaagtgatactcctgcctcagcctcgcgagtagttgggattacaggcgtgcaccaccacgcctggctaatttttgtattggtagtagagacaaggttttaccatgtcagccaggctgg

SEQ ID NO: 49873 - DNA, 1027 bp, Homo sapiens
tgacaaagttttattcatatgtgaaagttatctaaaaacttagcagtttataattattatgttacttttattagatatatttcccactttcagcatctggttttaggaacaaagaaattgattaagaagggaggaggaagataatgaagagatacaggttcagatgacaggtaatcgtacagtgtagggagttaaaaagtgccatgaataacagtaagtaagcaagcaagcaagtaagtaagttacgttaagtaagttaaataaggtattgataaaatcgacatttcttctaaaaggtaaagaaattttgttgtgtgtagtggtgtctttaaagtgttttcactttattttaaaaatattttgaactgggaaagatgaaagtacaaaatacagaaatttcttccctaagacagaagtatttaggacaaacatttggcagggggacaaaattatgtaagttggggagtcatatatcctcatatggatcaataaatgagccagtcaagattacgggcaggttctgatgtatctggtgtctcccaatacttagctcatccttgaaatttcagatgatgcccgggcaaatacattttatggagatttctgggggtattttttttttttaatgaaagtggcatcaacaacattagagcattagaaattgggagaggaagttgcttaaaaatagatataaaacgttaagatggtaaagaatgatttatttaaacaaatgcagaaactgaattgtaagaagcaattcaattctgcagtattcctttaaagataccgtaatatctttgaaaaacaagtaacattggtagagtttgatcacaacattcagtgtagtatgtgtattaaatgttacctgtctgtgaggcctgaaagatagacaactatattaaattcttgagcctgtgatctttataatgtcactaaggtgttgagaaatttaaaaaattgtcttaatcatagcatatagaaagctgcctagtttacttcatttgcctaaaataaaagtagctttaat

SEQ ID NO: 49874 - DNA, 1409 bp, Homo sapiens
gtatctcttcttactgcacactagaaatttcctttctgatgtttggtctccacctgactaatgttttactacttctaatgtgtaccttttcttttttcctctcccatcctcctgtgtaagattctaaaggtccttatcaaattgtttctctttgacatagttctttattttctaacttataacatgtgtggtttttctggtgggtatggagtggaggtggagtcagagctatagcatttggcatttccacacatcagggctttgattatgtactacttttgacagcttctttttctttttggtattctttagttttaacttttaactagattacaggcgtctaggtgggcaggaactacaatttactacttagctcttttagaggatattaggatgtagttactttacatgcaatagtgcttaataaagagacttgactaaagtgaactctagctattactcttttccttatcttcagcttcatccccaaggttttaagtgttatactagatgctatctcactcttgataacatatggtttatgttaaagagacaaagccaatataaatattacagcatgagtaaagtgagtcaggtagaaatggccaaagttaattgtgttaggaaaaaagatatctgtcagaagtatggggctgttttcttgtgcatactgagaatagatagcatttgtttgtgctttatttatagattagagtatcatggtaaagattattagatgatggttgaagaagtatgccttttattgtgtgaccatagacttcttagtgttagagacttacttggaagttttctttatttttttatcacaccatatattaacttctgacatttgcaaatttcaggagttgtcacagcagaaatgtttagacatatgcagaactctgagataattcgaaaaatgactgaagaattcgatgaggtaacttactaccttaagtgttttgataacttatgcatgtttatcttgacttatttttgaaagtattattaaattgtaagcattaggctgggcatggtggctcatgcctgtaatcccacactttcagaggccgaggcaggcggatcacctgaggtcaggagttcgagaccagcttgaccaatatggtgaaaccctgtctctgctaaaaatacaaaaaaaattagccgggagtcgtggtgtgtgcctgtagtcccagctacttgggaggctgagataggagaattgcttgaacctgggaggcggaggttgcagtgagccgagctctcgccactgtactccagcctgggcaacagagtgagactccatcaaaaaaaaaggaaaaaaaaaattgtaagcattaatgttgtaaataagagctttggcattagatttaatcaaatgatgcctgtgcgacctttggcaggttgtt

SEQ ID NO: 49875 - DNA, 1020 bp, Homo sapiens
gttaccaataaatacatacatagatttactataaattaagcttcttcaaggaagggatttgggtttgtttgggtcacggctgtatttcagcaccagtacttttactcttccaaaatttttcgctgtgggttttcaagtagaaaatgttgtctgatttgagttttatttggtcttttttttcttgcttactctgatgaaggagctttgaactattattctaaaagatagatgagttaaaatggctttgatgatcgctaagtgctattaatcactccccaagtagttgagaagtaattttgaatagtggcattttttacccttttaatattgaatgttttagtgagaactttctcactaaaagggaacaactatttgagataattgtcctgaaatatgatttgaaaatgtcagcaaaccaagttgctaacaattaagatgctatatttcaatatagtcactaaattagccaatcagaaaataccaaaaaaactttttttgtggaatatcaggaccttattctcagatgagacgcaactgcacttacatgtgacatgacttcagattttaaaaaatgttctgttgacaaaaattaatttttaaaatttactgaactgaattaccttacatctctaggatactcttgtcagagaccgttacttttagatgttctatatggtattggtctctgcttttatttctaagtacttcattgtttttaatgatttgtggagaatctcagtttaccctgagactagagaatgccctcttgttgtgcaaaggaaaaccagagtaccagtcttccaaggcaatactagctacatttccatttctttaaaaaattatgattgtttatatctgttgactgtgtgatgtatttgaagctaataacatatttctaatgttttgttgatttatacatcatacattttatttgagagtataatttccatcattttgaatccatttaaaaatataattttggtttggtttgggtttgcttttgctttatatctgtgctta

SEQ ID NO: 49876 - DNA, 1050 bp, Homo sapiens
tttagaaggtgaatcatgatctatgaaaatgattattttagaggacatattatagaataatgggatttaaggatagactggagtcagattgccttggtttgaatcctggtttgactgcttatatgaactgaggcaaattttaaaatttccctgagcttcaattttgccgtgaatgaaatgggtataatacttacctttgagagggccattgtgaggattaggagataattcctgaaaagttattttattttatgttattttattgtcatttgtagcagctgcatctttcttttgttagaagcagattagctcatttctgcttaatatttctatttgatcttaaattgtaaatttttgtgtctgttagattagtttcaccatacttttactctttaaaaatagctatgaagttgatgacagctttggtgaatgtggcactaaatcttagcattaatatggataatacacaaagacaatatgaagcagaacggaataaaatgattggaaaacgagccaatgagaggctagaactcctgctacaaaagcggaaagaggtaaacttttatattgaatatttaggctattgtgtgaccaacttggtcaccattaattaggatataactttgctagtggctcagataattgtttttgaaatatttaaatgtaaataacatttcaaactatttgcccaacaaaattctgatgaatatccgtgccaacaatactgttttcttattttcaacctgcgtggactagtattaagagtggctttaagtaaggggactggggttagtctgacaagttgtcttaagctttagtattattcatctctacggtgaaaaaccttttgtcaggatgaaaagagatttcacaattaaaatcactttggaaaataaaatcactttgaaaaataacataagctgtttattggcatctaaatcagtgttttttatacagtagaaggcatttgtttaacattaatgactgaccaccaaattcaactctgaatgaggaaaataattttttcagccttatgcgaaataacagtaa

SEQ ID NO: 49877 - DNA, 1050 bp, Homo sapiens
ggctaatttttgtatttttagtagagtcggggttttgccatgttggccaggctggtctcgaactcctgacctcaagtgatccgtctgtcttggcctccccgagtgctgagattacaggcatgagccactgcacccggccttctttacagttctttagtggaaatttatgagcattagaaaaaaaatctactagctaaatattaaaatcccaatcaaatatttcaggtattaagggactttatctacctggtaatataactgttaatttttctatatggttactgttgtctagtataattcaaaattccccaaaatactggggaattctgctttttttgtgcttgtaacaacttacaggtgttcatttggttgtcttcctttacaattgaaaagaaatgatgtgtttttttacagcttcaggaaaatcaagatgaaatagaaaatatgatgaatgcaatatttaaaggagtgtttgtacatagataccggtaagttgtgacagtttttttcataaatagcattatgtaatttctactcagcaagtttgcatatttcgtggtgtagggaatctaaattagcaggaagaatgttatagtaaaatcaatgttagactccattagtgccactgagtcactctgggcaagttatttaactcatgtgagtttggtgtttcccatctgaaaaatgggataatgctgtgcttgacttgcagccagtagaagttactgctatttggagttgggctacacaatacttaattgcctttggatgcactatgttagtagagcctgcacgtgctgactcctgactctcttcccttccattgaatatcagtgggaacaattggataggttaaagtgagatattttcttttgctgttttgaatgaacagaggaaagaaatagtaatcttataaatttatgctgtaacctattcttaaattttggtagtatttttattcagcttccacatatcctcaacttggcagttactgaatcaggttaatgcttactttttgtaatgtctccatgtccattcttaccttttcac

SEQ ID NO: 49878 - DNA, 1029 bp, Homo sapiens
ttcttcaaaaagtaatcctcttgataataagtttgtgttgcctaaacccacagaataatgttaaatacttagaatttctctgggcttttaagatgttgttatatctacaaatggatttttcctcttgaaaaatcaatatagtattgttaacattgtgtgcttcccgcccccccacccccaccaccttctgaggcagtcttgctctgtcatccaggcgggagtgtagtggtacaatctcggctcactgcaacctctgacttgcgggttcaagcaatcctcgtgcctcagcctcctaagtagctgaaactgcagtcatgcatctccacgcccactaacttttgcatttttagtagacatggagtttcaccatgttgaccaggcttgtgaactcctggcctcaactgatccgcgcattttggccttccaaagtgctgggattacaagcctgagccactgtgccctgcccattgtgtgctttttatcaaacacttaggaaaaagttaatttaactaaatgttaagcttgtagtaggaacggtgactatattaccatgtataattgctcacctatgttggaagttaaaaactaaactggaaaaaaggcagtatttttagtagaggaaagggatgaatataaaattatttatggtaagccaggcacagtggctcacgcctgtactcccaatgctttgggaggctgaggaaggccactcacttgaagtcaggagttcgagaccagcctggccaacatggtgaaaccttgtctctattaaaaatacaaaaattagccaggtgtgatggtatgcacctgtaatctcagctactcaggatgctgaggcaggagaattaattgcctgaacccaggaggtagaagttgcagtgagctgagatcatgtcactgcacttcagcctgggcaatagagtgagctccatctcaaaaaaaaaaaacccaataaaaataaaaagtttgagatattttaaagtttatagtaataccacaaaatattttccattctgagtttttataaaa

SEQ ID NO: 49879 - DNA, 1032 bp, Homo sapiens
ctaacagaatgtgactaaatgtggtaagatagcttaaaaatccttcctcaactaaaatctaattataaatgtaaactttttaaagcctttgctttcaagaaataaaatatgtaatatatttaaacctagttaatcctctctggaatattttgctacttgaactctaatatcattgaaaattattttggaacttaaatcatttgggatgataattaccaggtttttttttttttaaactaaggttgtttatgaagttatttaacaaattttaaagttttagtcttaggtattctaaagtcacttactagtcatagggacgtggttattctgttatctctgataattgttattgtacgtgtttgaaacacaatcttaaattaggaaaaaatttcatgtgcaatgtgtaatgtaaatgtcatataaacaacttttaaaagttgtttatatgctttccttttaaaagttgtttataggctgttagattctataagccaaattaataaagttttaaactgctcgtggcctgtatacccggtatcaatgaattagttataagtgtaactgagattatatttattgttttacaaagagaattttgtttgtacattttgtgttacttctgaaaatctgcataacctaattgttgttttgactaaaactgaccagtataccgtctttattttaaccaagtctggagcttaatttgattagatcttaactgttttgtatatatgattttactgaagttagggattgtatgcttagaaatgatctttaggtttcagtaacattctttcctgcctttgaaggcataattttggctaaatacatactttgtgacgtgtttacatgactaacctaaaatttgtcttattgtcaagtagttttaagagataaagctctaatttgtacaaatttctttatagtattataatgactatggagatatcatcaaagaaacaatgagtaaaacaaggcagatagacaaaattcagtgtgctaagacccttattctcagtctgcaacaggtaa

SEQ ID NO: 49880 - DNA, 1028 bp, Homo sapiens
cataaattcaagcattacacatcttttttatcaacttttgtcatgatctcattgtcagatagagaaatctttgaggtttgattcctttgtctcaagttttttctttggttctgcactcttactttgtagtgaccttttcccatgttttgatccacacccttctttccatctgcatattttgttgcccttatcaaaattggaagtcgttttattttatactgggcatgtaatttagtgatcaattgcacttttaaagtatgggtacattttagacctttaacataaccaacatttgtgtattaaaaccctttatctgttacctgtgggttaaagaaccttgcttttagattctcggactctccttcatcctcttgctcatttagttataaaagtgctaactgtctctctgaggaaaatatgctgctcttgtttaagttttgcttctactccctcaacttaattattattattattttgttttttgtagagacagggtctcaccatgttgcccaggctggtcttgaacccctggcctcaagagatcctcccacttaggccaccaaaagcactaggattataggtgtgaaccaccacacccagcttcctccctcaactttaattaactctctcctttcactttcttctaaaactgaagtttatttttatgcatccattagatggtaattttacataatatttaaggactacctgtatattattttcagaaataatatctttttttcatgtaatatccttttttccttcttgattccatctggattgttttttactcagttacatatttgatagagttataatgttgggttgttattttgatgaatagaggtatttatcgtcacataaatatagttaaaatgggccttagatggggtttaattttactcttgaattgtttattacaaatgtttgtgaattattttttaacgttctatatgttagagtaggtctcctttatgtcttgaaaaatacagataatgtattgatcattatgtgagagaatttacatt

SEQ ID NO: 49881 - DNA, 1040 bp, Homo sapiens
aaaatacagttgtgttacatcctaattgattttcccaacttagttcaggccctcatctctcacctgaactattgtattagctttctaactggttttcttccctcaaatctcccatttattttctcaccaaacctctcccttcaccccccgctccatcattcacaccaccatcaagaattactattctagaataaaaatcttaccatgtaactcttacttaaaacctttctgtggctccccattgcctgctggataaactcccaacttccttagctcatggcatgcaagatgtttcaaaatatggcccctgccacgttttagtatcatttcctattccctggcagctggtaaaatcatcataaaagaacaagctcaggtgtcactttaactgaagctttggtcatctatgctcccataacactatgtatatccatatttcttatagcacttgccacattgtattgtaaatatttgtttatgagtttgtcccgtttgtctagactgtgagctcctcaagggcagggaccacattcattgcctatcagtgcttggcacgtaaaaggtgctaagtaaatgttcattgaatgaataaatgttcaatgctaaaaaaatgaagtttatcttttaaatactttgtttttactggattatgtatgataactttataaatctttctaaaatcttcattagctttggctctaaaaaacatggcagacaagcagtctttagataatttttttaaatgtcttgattggtatacagggaaaagtgtgatgattatgattaagtttttgagtttgaaagcattgtatttataatgtggtatatgttttactattgggagatagtagttgttaccctcttctttttttaatttatattttgttctgtcttgttggtttttagatgttaagaattttacctgtttttcttacaaaatgatcatttactatgagtggtggcctgcataaattcactttagttatctccatagtggtcttaacctctagagacacaaggtatactctattacacgtata

SEQ ID NO: 49882 - DNA, 1029 bp, Homo sapiens
atggtctcgatctcctgacctcgtgatccacccgcctcggcctcccaaagtgctgggattacaggcgtgagccaccgcacccggctgataattttccatgagtttttaaaatattgtgtcaggtacacttggaatcacatagaccatgtgaagaacttggatattttcagttactatctggtttgtagatatagctaaactaatgtcaacttatttccttttttcctttagccaccatcaaagaacagacgagagagaacagaactgaagcctgatttctttgatccagcttcaattatggatgaatcagtaggtttaatttaaatgtaccctaggattgcaaaatcagaagtataggcagtctctcagtttgaggttgaagacctggggcagcatactgagaatagatgaaaacagctggatgtgagaaaaagaggcaggcaggcaggatttcagtgggaggggaagagagtgctgcaatagtgttgacagattagaaaagtacttttgaatcctggctgactgggacttgaatattaaggaatttggactgttcttccaggtttgtactgttcttcaatgggttgcccattgaaagattttaaataaggtaatggcatgatcagaattgtgtttcagaaagatttccttgacatttatggatgggacaggatgaatgaggggcgtcatataaaggcatggtgaaaaataatgagaacttgaacaaaggctttgataatgaagagaagggtatctagctatctaggatgagagtcagttaccactcccaccatccttaattggttattattgggttttgtcagttatttttcttaagtacctcttatatcagtcccctgtgccatattctccttgacagtgccttgattcgggtcctcctcagttttcacatgggctgttgcaaagcctttaagctgatattgcagtcccgctgctcctttatgcctcttgtggggtcatctttctaaaaatgcagatctgatattctcacttatcgttctaagtctt

SEQ ID NO: 49883 - DNA, 1104 bp, Homo sapiens
taatataaaaactctgaacatattttgtgttgcatatacataaaattctagatttatggtgtagctggttttatatttggacacaaaattggtttataccattttgataacagttgttttctgccagaattgccaaaatacactgaagtttgatattaaatatgtttaagtatttattaatgttaacatcagaaacaggcagagtttgtgttggcacagaaaagaaagtgtcactactctcattctcttgtgttgagattctcttattagaattatttatagtataaaattggtaaagaagggctccatgtaatggagctaatttaatgttctagtaagagaatctacttataacctagtctgtacaaaacaaaaagaatctcaagtgtttgggtgctttctagtcaggcactctgtttggaaagaacttgagttcgtcttcatcccatactcaatactaaattgctaattaagattttgtactttcattcatcatcagaccttttctaccgagattcatagagtgttatggtaagaattggcctttaaacattatctcggtctttttggtggaaacgttctaaccacccaaactctgacttgaaccaaaaaaggagaaccctgaagcatgcgggaaggggagaggacaagggattagtagtgtggtagttactgtgaatggacaggtaagaaattgggtgcacgagtcctctttgttttcattacttgggattccaaacactacttgataattcattataaagaggctgcaatcagatacttgtttctggatctgcaaatacacagtttcttcagctcaaaacaatacatgagttctatgacttttgttcatagaacttataagagatttaacttacaagtaagagctctttgtaatatttcagctcattacatctggctttgatatcagttcttaatagcttattatagtattctaaaatattacttaatgggcataagtgctagaattttaattgaacaacctaacttttagtatatatactaagagtcacatgccattcttgtttagtgaacaagggagagttgctccattcatcatctgcttttacttttagacaagta

SEQ ID NO: 49884 - DNA, 1245 bp, Homo sapiens
tcatttattcatttaacaaatacctatgttgagtgcctatgtttagggtattatctagacattagtggtacatataagcataattaatccaaggttcctactttaattatatgtgaggtaagtagcatcttgattagtcctgatgttatttcattatatatcatggtcaatttaattttagaattatacatctgaagagaggggaagttttcaaagtggttttattagcatgttatttaacataataaagtattaatgtaatatttatggatatatttaaagaaatgaatgacttttaacgagattttctcccctctctctctctcattaggttcttggagtgtcaatgttttaataccagtacacaattaaatctgtggtgaagtcattttctaagtggaagaggaaattttaaagtgtggtagatacagtgaaattctgtacagatttttctctaaggagaatatgacatgcttatgcttaccaagatcaagtgcattgaggggcagttttgtttgcctgaataaacgtaaaggacaagtaaacaatttgatgataagctacagtttttcttagaaagtaaatattttatttatgcgctgttagttggcttttgaatcgattatttcatgcttttttttaaaaaaaaaaaaaaacaaaataacaatctgaagaggcatttggtacagatatgaattctcttacatttatttactggttgtactaaataatgatgacctctgctggatttctgtttacatccagaaaacaatgttaaggatgtatttattcccctaccctgaagaaagtgtaggatagaattgtttttagcattctaaatttaaatgcttaaaacgtcaatcaacaaaactttgttttaaatattgtaattgtggagaaaagtaaacttataagcagaacttttacaattttttcatctaaaagtattttaagatatttttaaaatccaagagcttctctatacttttcagaaatatccagatgcagtgaactgccagaaggtaaccagtctcaaacatgcttatcccattatcaaccctgaaagtttgcttgtcctttaagataaaaatgtaatgttgtgatattccttccagtaatgccactgtattttgtctccaaataaaagaagcttattgtagtatgtttgcagaaaaattctaaacaaaaattatacagcttattagagtgtgggaatagggatctaaattttaaataaaattatat

SEQ ID NO: 49885 - DNA, 1072 bp, Homo sapiens
ctaacaggttacagtacatttcctctgtatgtaaattagatgggataatagaattcataacccataatattctttgaaagctaagctttaaacttcattttatgtcctttcacaaataaattagtttaaaacagaaagtggctacttgccattttgacatcaactcattttgcgaggcttaggcagctagacatcgtttaaaacaaaatattaacttatattacatgtgtatctatctattgtcagtcgtctctcagttcttgaggtatattattttaatcattccatgccttaatatgcttgcaatacaagaatatcttcagatgggtgaataccaaaaggctttcagtttttagtcagaaatcaagcattgggctgtggtagccaaaaaccataggttagctaaaaagatcatgatacaattattttattaagtcatggttaataacaaatgaatccagacttgtctaacagattttccatcaacaaatattgttatgtgcaaaagtattgcctatgttgttttacacaccactgcattaactagaactgctgagaggactgtatatatgattttaaacctaagttgattttttttctcactcttgaaaggagtacttctttgtgaaagcagttcttacagctttgttttcaaccagctaaaaatgttttatatattactctaacctgttgtcctccacattctattgtcctaattgtactgttttctgatttgtatttatgtcttgagacagtaactttttgaataaaaataaacctacagtatgttgtatgttttctcttgtactcaaagggggagggtggctataaatggtttgcaaatttatatctattatcacatcttttaatgtgtttggggaataatttatagagaataccatcagtttatatttttaataaatcatatgtatttacaatgaaaccaaatccctaattggattattactttaaaataggaacctgtaaccattattgctttaattttcatctggtatgagttaaacacatttacaaatgtttacattgtttatacagggtacatttgagtgcc

SEQ ID NO: 49886 - DNA, 1047 bp, Homo sapiens
ggctatataccataccagtttatgaatggtccataatgtaattattcccctatgttgacatttgggttatttttcactagtatcaatagtaatatgatgaacatctctgcacctaaatatacctgcacatctcttatttcctcaggatgtattcctataagtgaaaatactaagctagtggatatgactttttaagaatgcatgtgttaagaattaaaaataacttcaatgaatagtgtccatatttgtatggaagaatgaagtgatagctatttagcctgccctatgtgagagagacatactaaacaaggtagccacgttccatagtaagttgctgtggccacctcacttttcaaggtgtaggccttcacagaggggaagagccaaagaacatgactttaaattaatatcctattagctttgtacctttttactctacctctaggatctcttttaccctgtttctcttagtatttttaataagaaatcaattgctgattgttagatcgtagtgctgcttcttagaacctgggaaaatatgtgcacacatgtaacgtagttccccatgactaaaggaagacttacttttgattttcatctcctttctatttcctgacccctgcatctattttgtaaactgtggccaggcgcgatggcttgcacctgtaatcccaacattttgggaagctgaggcaggaggattgcttgagcccaggggttcaagaccagcctgggcaacattgcgagaccccatctgtacaaaaataaaattaaaaaaacaacatttgccagacgtggtggcagatacatgtagtcccagctacttgggaggctgaagcaggagggttgcttgagcccagcagttcgaggctgcagtgagctgtgattgtgccactgcatgctaacctgggtgagagagtgaggccatctctaaagaaaaagaaaaccggctgggcgcggtggctcaggcctgtaatcccagcactttgggaggccaaggtgggcagatcacaaggtcaggagattgagaccatcctggctaacacg

SEQ ID NO: 49887 - DNA, 1058 bp, Homo sapiens
cacctccacccttttcagtgaataaaatgtaagtcccatgtgaaaacatatttgccttgtaggagaattatagtttaaacaattttacttttgaatctctcatttatttgctaggcttccacgtgaaaaagaagcttctaacaaggagcagcccaaagtgaccaacaccatgcggaagctctttgtaccaaatacccaatctgggcagcgggagggtctcatcaaacatatcctggcaaagcgagagaaagaatatgtcaacattcagactttcaggttagtgtctcttttgcttcctgagtctaaaaagttagtatatataacagacagtggcctgttgatatttaagacattagcctaattaagaatcaaaatatgataaaaaggaatggttgcctgtttcaagctcctgtctctatgctggccaataacatgcatatcagaaataatgcagatgctacagtttcccttggattttctttttttgtgtgtgtgggtcagggtctctctttgtcacccaggctggagagcagatagatcatggcttactgtagcctcaacctctcagtcgtaagcaatcctcccacgccagccctgcaagtaggtggaactacaggtgcacaccaccacatccagctaatatttgtgttttttatagagactgggtttcaccaggttgcccaggctggtctcaaattcctgagctcaggcaatccacccgccttggcctcacaaagtgttaggattacaggcttgagccaccgtgcttggccttcccttggattttctaactactaataatgccatgtctactaatgtctctactgagtcctagagaaccaaatcaaggtcacatgtactagagaattttcccctagcacattccataagcaagcgtgtttatatatctggcctgttaagtttttttttttcagccaatattagaaaattaaagtccatcattaccactagctcttaacttacttactttggtaaataaagaaagtttcacccagtcctcttgattgggaggtctatcttgggttcttttatctgta

SEQ ID NO: 49888 - DNA, 1026 bp, Homo sapiens
gatgtgttaattgcattgtctccctttgtggggctctcagcacatctaagggcctgttgctgttattgggagctgaggatcccatggaatgccagtctccttcctgcctgtaacttgggcaatggtagaccaatcaggcttcactagagagccctggacctacttttcttagtgggtcctgcctcggagagctgtcactcagaccatgcagacttcagtggagaacctgcaggacttcaggactctgagaggcagaaaacgttcagattctcttcccctaaagacctggctagcagccaggcaaaattttgaagcttgtccagcaaataaactgcatgcttctcagtccattaactccttggcttctaaatcccatacgtaatatttcccagtttcattcttcatgtacagagtcctcttctcctacctattttgtaatccattgtctctctcaggtgttgatagtagttgccctcaaaggattagttacaactttaaaccccttgtgagatagtggtgagtgagcccttatcaataatctacccatttttcttctctccatccttctctgttttttttatgctaatcgctacttctgttcatacatttttttgatccttagggttgtcatttggttgggagatttgaattatagactttgcatgcctgatgccaatgaggtgaaaagtcttattaataagaaagaccttcagagactcttgaaattcgaccaggtaagtaaagtttcattttataggaactttcctagatgggagatgagattgttagagttatgggaggtatatcttactctagggagtgatggaaacgtcttactgtcttgtgaaaacagtgtgactagtgatgcattgactacatacaagatttgtagtacttttattaagtgcttggatgggaggagggaagataacattagtgataaaaagtaaatacaacatttattcaaaacgtctttatcattaagagatttcagagatttgtctaaatgagttggtgaatgggtgg

SEQ ID NO: 49889 - DNA, 1033 bp, Homo sapiens
cacagaaaaatacttttagacttatattgccaagccaaagttaccatattttggtgtttttgtgttttctctttataaggcaaaaagatctgtatttacactccttcacctagggatgtgtttgttgccctcctacccaattgtcatgattgtccttagtaccctaggcctagattctgagatcttcccattctaggcctacaagcactacttgctgtagctgagacttgtctagagtcctttgttttgcacttttgacccaccccttcctggatcactcctttgcactccactcccctcgttctgtcactttgaacgaagtctgagtgaggctagtgactccttgggtgtcctcaacagtgaattcactgtctgcgtgcagttattacatgcatttgtgcatttctactacaatggcatctttatgtctctgtaacattggccttttcatggctccacactgggtggaaccatattctcttagatcacatttagtagcataactgtagggactattagagatggcatctcatcgatgagagagaatcacaatcagaatggaagcactttgagtatctgaagagtgagagcattcatgtttgacaggtcctgcttcccactatccttttcctgttattattcaaattttacacaaggactaatcctgggtgtctctgagacccatctcctgcctagacatccacctccagagcaacactggccccacagtaaaagaggaagtcttgtacctcaggcaggcccatctagagctattgctccttcccacagcaaaggtattgtggatgacccttagaatccattctctggtcttctgaaataccaagggcagatgtcacctccttcctcagcaggactgactctgggctctacaaccagctccttcacataaagggtttagagactccccttggctcccagtcaccatatccagtgttgtgtaaagagactggccaacaggaccaaccaagcaccttacctctcccatacaagatgaccctctgagcttttcatt

SEQ ID NO: 49890 - DNA, 1028 bp, Homo sapiens
atcaaacccaaatgtcacctcttccaggaagccttttcccacaacccctgcccaccacccccctcccccgaactcctagaacctgccctctgtaccactattttaacacactacataccaaaggatgttgttgcccctttgggactggaagcttcaggagagtgggaaccaagctgggcgtattttagtttccccacaatgccttgcagagagtaagtgttcaatgatgtttggctaataaataaagattgtctgttaaagcataagtgtatccaataagtgttcctgaaatgtatatacatttaattattcattctgagctctattaactttagaggagttcatgtggtagggggggacttactgaattatattaatgtaatccaagaagataatagtttttagcaaccacacagtactgttattttctattgttttgtaggcaacaaaatcagccttgttaaatttgctttttaaaattgattctcaaagtttattaaaaaattagaactagaactaccatatggttcagcaatcccacttctagagatatatccaaaagaattgaaagcagggtctcaaagctatatttgcacacccatgttcctagcagcattattcacaatagccaaaagatggaagcaccccaaatgtccatggatagaaaaacaaaatgtgttagttctctacatacaatggaatatgattcagccttaaaaaggaaggaattctgacacatgctgctacatggatcaaccttgaggacattatgctaaacgaaataagccagtcccaaaaagcactgtatgattctacttctatgaggtccctagaatagtcaaatccatagagaaaagaagcatggtgttaccaggggctggggattggggaaatgggcagttgtttgatgggtatacagtttcagctttgcaagatgaaaatgttctggagattcattgcatagcaatgtgaatactcctaacactattgaactctacacttaaatatggctaagatgatcaatttta

SEQ ID NO: 49891 - DNA, 1050 bp, Homo sapiens
cctgagcctgggaggcagagatggcaccactgctctccagcctaagtgacagagtgagaccctgtctcaaaacaaacaacaacaacagcaaaaagatcactttggctgtttttatttttggctgttatgtgaagaatgaattgcaatggggcaagagtagaagcaccaggagaaaagcaaatgagttttgaataaatattttcccctatcttctaccccctaacacgtttggggatgaatgtagaagagtgatagtgttggcatggctagaaataggcaattgaagtaagagaattattcttgcttctctgcacatttgccatctactggcattttctactgaggcttctccctacattatattgagatcttgtctcacttcttggtctgaccagaaagtttgacctttccacaggatcaggagaaaagctggtccttgcagatctgcttgagcctgttaaaacttcatcttctttggccactgtgaaaaagcaactgagtagagtcaaatcaaagaagacagtggagttacctctgaacaaagaagagattgaacgggtaagctacagagaaggtggtctattaagggaaagaaattgaattgacaagggaaaatagggtaatagaaagaagggaaagacctgaaaaatgggagaagggggagttgtgatttccccactatggataagattaaaaataatctaggagtgccaggcgcggtggctcacgtctgtaatcccagcactttgggaggctgaggtaggcggatcacctgaggtcaggagttcgagaccagcctgtccaacatggtgaaaccccgtctctactaaaaatacaaaattagccgggtgtggtgtaatcccagctacttgggaggctgaggcaggagaatcccttgaaccaggacgtggaggttgcagtgagctgagattgcaccattgctctccagcctgggcaacacgagtgaaactccatctaaataataataataatctaggagaaattgcagtcctgagaagcaagaggactagcatcctgattctttcatcc

SEQ ID NO: 49892 - DNA, 1017 bp, Homo sapiens
tcattttcattttcactgccctaatcgaggccctcattgaacctttcctttggaactttacatatatcctctacacaatcagcaggattttcttgctgaaacacagttgatcattgctctcctgcttaaaatccttcaaaggctgttcacttacagaataaaataaaattacgtagcattttagctatgctggacaacacgttgttctattacataccactcctttccctgtgtctgtgttttttgcttatgctcatctgtttggattttttttcctcctgacagaattgtacttaggcctcaaagcctaattcaaaaggtcacttccttccctaagcctaacctacctcccaataatatttaatggtaatttcctctgtgattacccctatagaataacgtagcagttatgttatttaagggtaacataaagggtatttaacccattatgttatgctgtttgtgttgtatatgtctctgctctcaaaggctgtgagctctatgaggacaggaactatcttaatcaattgtgtattcctagcaccccatacaagtgcctggaatatagctacaatcaataaatgtttgtaaattgaattgaattgaagggacattacaacattgtagtataaatcactttgtagcctgagattgatcactactgcaaatactaaaagtggaagaacatatacctttactattcagtagaatagttttatggttaaatcaatagcatcgtgtaacatgtgatgatgtgcgtttatgcatttatccaaatatttgtaagtttaatactgaccacgatgtatatggctattgaagaaaaccacacataatatgtgtgtgaggtttgaaactagctctgttgcctagggctgtctttgtgccttgccagaatgtggaccgtggcatgatcggcctgaatatttagccatcctcatgatagcatgtggaataactggtttacagttcattcgtttcatacatactctgcctagcatgtaaaattaactggaa

SEQ ID NO: 49893 - DNA, 1019 bp, Homo sapiens
agcagcccaggagacgggctcaagcttcccgcatctgacagcgccgaggccagcaacagcagggccgactgctcctggactccactcaacacccaaatgagcaaacaggttgactgctcacccgccggagtaaaggctttggactctcggcaaggtgttggagagaagaatactttcattttggcaactctgggaactggagtccctgtggaggggaccctgcccctggttaccactaacttcagtcctctgccagcccctatctgtccccctgctcccggttcggcctctgtgccccactctgttccagatgcattccaggttcccctctccgtccctgccccagtcccccattcagggcttgttccagtccaagttgccacttcggttccagctccttcccctcccttagcacctgtcccggctctggctccagcgccaccgtcagtgcccacgctcatctctgactcgaaccccctttctgtttcggcctcagtcttggtgcctgtgccagcttctgctcccccttcaggcccggttcccttgtcggctccagctcctgccccgctttcagtcccagtttcagctcctcccttggctctcatccaggctcctgtgcccccttcagctccgaccttggttctcgctcccgtccccactccggttctggctcccatgccagcatccacgcctccagcggcccctgcccctccgtctgtgcccatgcccactccaaccccatcttccggcccaccttctacccccaccctcatccccgcctttgctcctacaccggtgcctgcacccaccccagcccccatctttactccagcccctacacccatgcctgctgccacgccagctgccattcccacctctgcacccatcccggcctccttcagtttgagtagagtgtgctttcctgcagctcaggcaccagctatgcaaaaagtccccctgtcctttcagccagggacagtgctgaccccgagccagccgctggtatatatcccgcctcc

SEQ ID NO: 49894 - DNA, 1050 bp, Homo sapiens
tgggctggggaaaggaacccgctcagccccctctgggcttcgtgggagccctgcaggcagtgaggtggcttgggaaagctgcagctagagaaggacaggtgtttttaccttgcccttgtctgctgatagtatcttcaggcttccatctcccaacagctgagcagctcatccttgacgtcaccttgcttttgccagttggaggggggagtgatataataaatctctggccacacaatgatttctttcagtactagaactttcatgtgccctctgaaggatgtgagccatggaaccggcaaaccgcatccctgactaggggcctgtggccttgtcatttacctcccaaccaccacccctccatgcccctttatctgcttagcgcatttcttttcttcggttttgtacatgtatctgagtcctaatcccctatatgctccccttacagaggaaaaagacgggtttgcctgtgacctcctacataatcctcctgggagctcagatcaagaaggagacgatccgatggaggaggatgatttcatgtttgaactctcagacaagcctcttctcccttgctacaacctccaagtgtcagtgtcccgcgggtaagtgtccgagagatccacggtgactgagtgtcaggatcctggcactcagtaggaaggtggagttctccacgaggaagtgaagacctggcaacgagtgccatcacacatgacaaaggctagcctgcccttttagcccagagtagtcatgttcaaactagaggctgcaggctccatggacattgactatctgcatttcctgaaccttaaatctagattctctctcggaaggctttttttgcactattactgggtataaaagataatctgagagatacttgggcctatgaactgctagaatctctggaacatttttgtagtttctgggggtaaacagatagaacattagaaattgagattgctggaaaagccaggacatatggttgccatagccatggggccactagggtccttcagtaatccacagcctagtttctcagtgctgtaa

SEQ ID NO: 49895 - DNA, 1033 bp, Homo sapiens
agcactgctttggctgcatctcatacattttaataggttgaattttgttgtcatttagacctgtgaattaaaaaaaaattcctttgacagacacttggtctgaccaatagattatttagatatatattgtttaatttctaaatgtttgaggatttttcttattgatttctggtttgattccattattgtcagataacatattgtatatgatttcagttcttttaaatttgttgaggttggttttatgacccagaatgttcagtttcttgctgagtgtttcatgagtgcttgaaaaaaatcatattctgctgttgttgggtagaatgagatgggtagtccaaataagtaggctatctagatatgtataatctgaaaatgttgagaataactttttacttttttttttttcagaattgctcctgcgttgctaagacaagcatcatatggcaccattaaaattgggatttaccaaagcttgaagcgcttattcgtagaacgtttagaaggtcagtatacttaccctcttttgaggtgatactcaaagggattgttgaaatcatgcttagtgagaaatgttggtcatgaggtgcctgagaatggaggagagtcactgcaaagacaaagtgagcttgttctaacttggaataaatctttgcagaggtgatatatgaattagagagacctgttcttcaaatttgtcccttttcctatcaacaaaaaaggcatgtgatcatcccaaaagaaacatggaacaatcttgtccagaaaattaatgctatcttcatcaataagaggacttcaactgtaaggcattttctagctggcaattttgataagcttttattaggcagaataattttaggctgttttctaaattctgatgtacctttggctaccttatgcatattcagcattatcatatgtctgtttgctgctgtagcattttccatcatgatactacactaaatggttattttaccacaggcctggggctgttggatgtttggggacagctggaaagcctttcggttag

SEQ ID NO: 49896 - DNA, 1065 bp, Homo sapiens
tccccactgatttttgcttcatgattttatttataacagctttattgggaaaattcacatattataatgataattcccaaattctttattgagataattcacataaaattcaccatctttaaagtatacgatttaattgtttctagtatattcacagattagtgcagccattaccactgtctaagtttagaacattttcattaccaaaaagaaacccttaccctttacccatcacttctcatttcccccagccctcctagctgtggacaaccactaatctactttctgtctctatagatttacctgttctaggtatttcatgtaaatggaatcacgcaatatgtagactttcgtgactggcttcttccatttagcatactgattttaaggtttatccatgttgcagcatgtatcagtactttattcctttttatgggtgaatattaattccattgtgtgggtataccacattgtatttgtcccttcatcaattaatgagcatttgggttctttgcacattttggctattatgaatactgctatgaacatttctgtacacatttttgtatgaacatctattttcagttctcttgggtatatacctaggtgtagaattgctcgctcatatggtaatctgtgtttaactttttgaggaagtgccaaattgttttccacagtggctgccccattttacattcccactgacagcatataagggttcctatttcttcacatcctcaccaacacttgctcttttactttttctttcttaatttttttaaatttttttttgaggcaggatcttgctgtgttgcccaagctggaatgcagtggtgcaatcatggctcactgcagcctcagcctcccaggctcgggtgatcctcccacctcagcatctcaagtagctgggactacaggcacatgccaccatgcctggctaatttaaaaaatttttttaagagatagagtcttactgtattgcccaggtttgtctagaactcctcctcaagtgatcctcctgcctcaccctctcaaagtgctgggattacaggcatgagcccctgt

SEQ ID NO: 49897 - DNA, 1045 bp, Homo sapiens
attttttgtatttttagtagagacagggtttcaccatgtcagccaggatggtctcgatctcctgacctcgtgatccacccacctcggcctctcaaagtgctgggattacaggcgtgagccaccgcgcccggctgtcaggtggtgttttagaaaagattttaaagcagatgcagcttggaatagcatagactaccttaatttaagagaatgcgatgctaattttagaactagctttggctttcgatatcaacctggtgatcttccttgacttactcctcagttttttattacatacgagcagctaaagaggcttcaaatctaagaactgaattatatgtgagcccagccctgccagcctttctactcctttgcccttttcccgtgttctaatgtattttgacaatgttgtaagtgtttaccaagccgttggtctcctaagggcctcctgatggaagaacagtggggtggttcaaagttatttctatgtttgtgttaccatgttaacttttccccgagagaaagtgttaacattgagactctggccccagattggtatcttctatgaagatggatactgatgggtgacattgaaaacggcctgctttccaaatgtggttaaatgtaattggttagccccagacttgggctagagcagaaggcataggccagggtggttattgctatatgtgttacagacctcggttctcattaaagtatttattggcagaatcactttggctttgtcttcatttactattttctcctttgccaactcttgaagttacattctccagagaataataaaggaagataactatgaaattgagactggactcttaaagtgcacttttatgagacgagaatgagtgcattgtgctttcccactgccattcattgtcataatgccactgctaaacgttgggcaggtggttctttcttaaacatgaataaacaagcaagtggctcatttggaagttcctacaggtaaaaagctaaaaaaaggcttaaaatagaagcctgttcccagggttctaatcatcttaca

SEQ ID NO: 49898 - DNA, 1030 bp, Homo sapiens
tacaaaaatgacaacagactactttaaaaaatatacctgaagcatttacaattcatgaagggaaaagactagaaattggataaggaatcttaacagaaaaagaaatataaatacccaatggatataaaaattctgctcaaacttgcttttaattgtttaaagacaaatcaaaacaatgagttataattttcccctatcacatttaaaatttgatgaagttttatagaacaaggtttctgaggctatagggatgcagtaactctcatgcacagtcaaagtaaaacttggagctatatatttggagggcaatttgacatatttatcaaggttgtaaaaggccataatctttaacccagcaattccagttttaagaatttatccctagggcacatttacataaacaagcaaatatacatttataaaaggatgttcattataacattctttctaatagcaaaccaaaacaaaacaagcacagcagtaccaaaccaaaacaacaatagaaaaaaaagacagtctcctcaataggtaagtgaatcacagtacatccatcctttgaatattatgtagcaaattaaaaaaaagtatatatatatatatatatatatcctctgatatgggaagcgctcctagatacattgaatgaaaaaagcaaggtacagaacagtatgatctgatctatgtgacaacaaagcatatgcagatattcttgcatatgcattaaacaattctggaaaaatacacaagaaactgttaacagagagcttacctctggagattaagactgtggtgggaggctccgatatggacatattctacttttcaattcataatctactgtactgtttgcatattttaaccatgtgcatttattattattaccgttctttatcactaaataaatactattttatatgtaagtgaaatataataccaactccaattataacatatataatatgtatacatatatagatagaaagctagactactatacaggctactctaatagcataggagatggtcacct

SEQ ID NO: 49899 - DNA, 1008 bp, Homo sapiens
ctcttacactgtgctaagcacataacatccttattgcactcataagagtttgacactcattattctcctcctgcagatgaggacgccgaggcgggagaaattaagggacttgtctaaggtcacaggcttgtctgcctcctgggctggggactttaatctctaccttaagctgcagtttaaagagaaagaaaaagaaaacaaacttgaagttgagcaaacatggggcagagacagctcaaggttatttctcttcatatttcaatgataacctcaggttgtgatttttagaatttttctcttgtattttccttttaaatttgttatggctttgtagcctttaacttttgtttgcagttagtatcctttgaacttcattatctgttttctctatgatttctaagagaaaaatctgcagaaaaaaataattacagctaccatttatggattaccttttgcatgctaggcaatttacagacatcatagcgaatcctctaacaactctcaggattaggtctattattattcacttcaactttacaaaaagagaggctgagactcagaaagttttcatggcttgtccaaggacatgcagttggtaagtggctaagtggaagattcaaaccctgggctctttcgctccaaagctcatgttcttccccatactataaaactgactgtttgtgtaccacgctacctcaaaagggtttatggcttgtttttggtcagacaaggaaaaaagaaaagaatctctgtgtgttagccttgggaggaggatgagtgggagctgtttaacagagagcacagaacaatgcccagggcccatggaagacagaggagaatggtgagctgttggcagagtaagaagcatccccaggaatttgtgtcaacaaacccctcaccccgaagttgttgccttcagtagtgtgacccttcaaccactgagtggcatctggaactaagatgtgataccagatgggttattttccctctctctctgacacaactagg

SEQ ID NO: 49900 - DNA, 1046 bp, Homo sapiens
ttgaaaatgtacaataccttaataataaatttgatagcatgcagtgtgactcttgaagctagactatttttattattgttatgtagcaaaatattgcagatgagatgcagaaatctatcgtgagcttgtaaaattctcctagagttttatgaaggcgttaggagcaacttttagacctttagaaaacttcagttagccatgtgttcttgaaattactgtatagtgtttccacaaatcagggtgaggtagccgaccagcctataactttttaacagtttattttagagaattatgaagattgatgggaaaaatgatttttccagaaatacaaagaaaattactttatccacaattattttctccctctgaggagagacgtgaagtagaagcccagctacctgttctatcacttaagatttccagcattcctgactttcaaacaaagaaattgctgttgccactagtttaaaatagaaaagaaacttggagtgaagaaagaaaacccaggatttcgtccagttcaaactcttccttatgaattagttattcaaactcatattgttgatatttcttaatattgtggtaacgaacattttttgccacgttacaccaaatgttgagggtatgaagttttttgtacttaatttgtgcttacttctttagtgtgtaactagaggaattttccataccagtagctgaactcttgaaaatatttaaagtacaacttaaaaaaaaaccaataaacctgtttctttccactcaaatatttactctttaatgattcaaaccctgttttctttgaagttttcagttataaatcatacttaagtttaagatatttccccttagagcctacaatagtatttttgaggacaagtttcatttagaatattgttgattgttaaatctttcgtaagatgtaggtggaagaataaagttaaatgttgagttagagtactaaatgttatgctttatgctgtgcctcttgttaaagaacttttaaagcttctgctaaagaactttaaaattagccttcatgtatcttt

SEQ ID NO: 49901 - DNA, 1066 bp, Homo sapiens
atacacagaactaaaattttgaccccttctttttttcttttattttagttgacatgtaataattatacatatctatgggatacagagtaatatttttttttgaggcagggtgtcactctgtcacccaggctggagtgcagtggcacaatcacagtttactgcagcctcaacctcccaggctcaggtgatcctcccacctcatcctcctgagtagctgggattacaggttgtcgccaccatgcctggctaatttttgtatttttttgtaaatttggggtttcaccatgttgcctaggctggtcttgaacccctgggcccaagcgatcccccatgcttggtctcccaaagtgctggattacaggcatgagccattgtgcccaaccgagagtaatatttcaatatatggatatgatgtgtaatgatcaaatcagggtaattaacgtatctatcacctcaaacatttatcatttttttgtgctgtgaacattccaaatcctcccttctagctttctgaaaacatacaataaattatggttaaccatattcaccctacagtactgcagaatagaatttactcctatctagctgttaattttgtgttagttcaccaatctgtccacatcttcccctcctgcttcccttctcagcctctaatactcacaattctactatctgttttctcatatgagtgagaacatgcagtatttgtctttctgtgcctggcttaatataatgtcctccagttccgtccatgttgctgtgaataacaggatctcatccctttttacagctgaatagtactgtcttgtgtatacataccacattttctttatccgttcttaaccctatcttctgtgcatttcttacttggtcattcgccatttcagactaaagtgttagatggcaggaaccacatctttgaattaatgtttgtagaaatcaaatatttattgaagatattaactaatttctctcaatactcctataacatagagtgattctgtaggaaaatgccttcaaatttggatttaaacattaaactaagggcacattgacagccaactct

SEQ ID NO: 49902 - DNA, 1048 bp, Homo sapiens
tccccctcaggcttttctggacttgttccagccttcccctgacagcagcctgctggcctttcttttcctccatttatcatagcatcgtggatgagagtgatttgtgtctcaaaatatcaggttaaccattggtatgtcttagctttggatagtctggcaaaattagaacaaaactgtggttcatacttcctgggccccagagtaaacaaaattgtagattgcttagatgaaagagttgaagatagtctaattatcttttttatatgttcactttctcttttttggtcaagcatcttaaaaaatgtgccattgaagaaatcgaagccattgtgtttttgcattttccccatgaaaaatgtttacagaaaaagttttcagcctttctttgtgatccttgtaacagagattgtgtgttgtcagcagtgttttaaatttttccctctccttctattacctcttaaagaaaaagtggggaaaagaaatctgtacaagtacaaccctattaacttaaaatacaaaggactgaaatgcattgagttcaattcaaccatcaatggggtttttttcaatttgtttattatggaacaatagggtgtctagccaaagaattaatggttgctttgaattatggaaaaagcttcccagtatcaacttaatgaagttttactgaatttgaaatccacaccacactagatgtgttaggaaatttctaagcatgctagtgaattactctaccaggtttcaatagtgcctggtaacacaatcctaggagtgaatttttggcaggtggaggaaatacttcaagaacatctagaagcatccagatttttctttgaaaatgcatttttgagttgctctgttagtccctttttaacccttcttcccacccccagctttccactaaaccatttgctttgggacatatcaatttacagtatattatattaagctaggtttgactgcttgatgcactatagtataaataacagagcagtgggtggtgggggtgggatgggcaatatagataatcaggtggagcataagctgt

SEQ ID NO: 49903 - DNA, 1073 bp, Homo sapiens
gtattgcacatgaagtatattttacatttgaaaatacttttaatctgtcttgtaaaaataaggcttgacatttgcctatagagtttttaataaactatactaatagtagttacaactattttttaaaagtagaaaaatgcattgtcaaaataaaaatgagtaacaggatggtcactatgttcaaggagcagaaaaatatcatttgaaaatgtcatttaagaaggtcggtgaattaagagaaatcaatgtaatttatgtaaaaaatatgtattcagtaaaaattgtggtgtccatggacttgctaaatatttttattatatgaaaatgtatggaaaatatgtagaattctttacctcatttaaaaccttgtttactggaaggtaaaaacctgtgagtatgtacctatgtctaaatatataatagtattgtcaggattttacacatgatgcacttttattgtaacacatgttgcacgtttattgtggctagttctttctacctttgatatttaaattcttagtattcctgaagaaactgaactcacaacagtctgtaacatacagagtacagacaatgggaaatggcttttaatgaaattcaataccaatattaagcagttttagcgaattaggattgaattgaacattatctaggattatatttatcaagattttcaattctttgcttaatttttcctgtagaatagttttacagaaaatcattgcattaaaggaactgcttttgatatatattaatttgtttacctgttagtaaaatcagagatatgtgggcagtaaacgagtgacttctacttcacagaaacttgtcatcattgtctaagctcttattttgaagctcaagttgttataagtacttaacactatagattctaagggatagagaatggaagggaccaggcattgaattctgtttctgtgacaaacaaagtcttgtaaccggagagctgctttttttttttttttttttttttaactatttatctcttcatgaaaaatggtgactgtcactgaaagatcttttttactctgtcacaggcttctcaaagggcacac

SEQ ID NO: 49904 - DNA, 1594 bp, Homo sapiens
ttgactacctcagtagcaagagatgccagtgtcctctgcagagcaggccactggggaccatgatggcttctactgtgtagtgataccaatagcctccacctttcatctttgttcctagacatttcctggcctctcaggtatgctgatctcctcagtgatccttcctgtggagttattctttcttttttgctccactgtgttgctgcagattgttaaataggcccttgaatccttccagagttacttgggtttgtggatagctgtctatatttgggggctttttatgtatatgtggagggaggggatgattaaaactggtatctcctctgccgtcttggtgactttgtcatcgctttccatctatctgtatctatattggttaatactgatatagaaatttatcacaaatttcactgcctgtttacaaaacccgacttattctaatattggatgtatgtggtatgaatgcatagtagaatgaatcattaagcagccaaacagccactatatattacacactgtattaggtgctgaagatataaaagtgaacaaactcactactgctgtcaaggcactcacagtccagttttgcactgaaatgatgccaattttatggttaaagtatgtacaaggtatagatgatgcacaaattagtaagtagtcacttctgtccttttcaggagtggcatgaataaaaggcctccaaaaggaggtgataatgctagtaatttctatccaatttcagcatttacatctaagtgttagctattactgtattttactacatacataattatttgctcctttgtgtgataattttgctgtcatatttgttcctaaaaagctaattcagcccatcatattcttttttagagatctcatgagtgattacgcagtctcagtagttttaggttctcctcctaattcccatacaattccttggtggtacatgtgtgtgtgtgcgtgtgtgtgtatgtgtgtgtgtgtgtgtgtgtgtctgtgtgtgtatcatttgctcattctggtttactctttctggactgaatcccggtatttccagactcactctagggcaaaactgaatccttgctacttttaggcacctgtgacaaaaacactatttttggttgctgacctaaaatattaaatacgccctatttaaaatggctattccataatatattgaaaattggtactgatatggtttgacaattttattggttgcttatttattcatattcaatactcccatggaaaatgagtgacagctctatcttcttttcctaagatttcatatagagtgttttttaagttgcacagtagtatacatgtactagtcacccagtatttacttaatctttaaataattaaaaactagttttttgtttgtcccaaattttgattgtaaagtgtactcagaccagccagtgctacaaaaccatcgtccaagatagcttcttaagggattaaatcaaattatttttatctccttcacccatcattaactaaactctatgatataaaacactactttgaagaacatgttgcttcatgataaaattgtagaaatgtgcagctggcttatgttgattat

SEQ ID NO: 49905 - DNA, 1023 bp, Homo sapiens
gagacatatgtatatacacacagagaaagaaatattctataatcttacaacgttttcataccatgtatttaaatcactttcttaaattgaccaactcatttattttccatttatattacaacatagtatgactgtgtgggtttgtatttttttctaaactaaaatcacgtcaaatataacaggattctgtttcatgtagtcaacataagtcaaggccacatcctctttgtgccatcagggaactgtgttatcagtcaacttacatacttattgtggcccattgttccatttcaggtgacatggaggattttgtgagtcaagttaattgagcaaactgggaaatgggttgttcttacacaggatgtcatccataactaagacctcactgtaagctggaggaaaagtttattacatttgagagaaaattatatgttctttgaaactgtatgcagttgtagtgatttccttgagacatgcaaaaaatgtactaggtattcattttgactaagctcactgtataacttcatttttgaaaacaagagttaaaaaccagacaaacacatcagtatgaccacagtgttttcctttaattttagttcactgggcagattttcttgacaaagttagtctttatgaagagtgctaaaataagcaaacccttcccttctgatctcataatattggaataatcttttataatctttaaatatttttctagttcagtgtaaatcttaaaatgacactcaggcattgaatagaatttgaatcatgcctttatttgctgctgaaaattgcctttagatttctgtgtatgttaaggaaatattgcctcccacccaccatcaccagtatttatgaaaaaaaaaagaattgaatgaagtaaaatatttcagaatcatctgtacggctttgtggccttctccttatttttcactgaaactgtatgtgcttacagccagtttatgtatgctcaatgcctctggaatattcttttattgttaacatttgttttggagttctctt

SEQ ID NO: 49906 - DNA, 1026 bp, Homo sapiens
tgtaaatttgcaacacccttccccccatgattcattattctcttactatgctttgttattttcttcacagaagttagcaccgtctggcaccatattatttatttatttattgtctttcttattagaatgtaaaccccttaagagcagggatttttgtctggcttatacactactgaaatcctccattccgagaagggtacctggcacaaagtatggaattcattatgttttacataaatgaattctactaataaaaatttattaacaccacattttcttgagagacaagtactgtatagccattaggttccacagactattttgtggtagtatattggaatggagtttcaaggtgatatacatacatacacatatatatatatatatatatatatatatatatatatatatattattttctttttccttttacgttaggctgacatttggtcattgggaattactgctattgaactagccaagggagagccacctaactccgatatgcatccaatgagagttctgtttcttattcccaaaaacaatcctccaactcttgttggagactttactaagtcttttaaggagtttattgatgcttgcctgaacaaagatccatcatttgtgagtatatattgctattattactatttgttttctattattagatctacttatagcaaaggcagcttttcctgcagtagggaatacagtgtatgtgagaattgtctaagatccatccaggaacctggttcgtccttctgtattgctatttctattgagttcttaaccagattcttcattctttttctccttacccttcgtttttttcttgatcctcagcttcctccttattctattcattatttcctctttcagggggaaataaatttgagaaataaagttaactttatattatgtcattattaaagtgtatgtataaatacaatgatttttgttcaactgttttcatttttcatgaaaagttatatttgggtttaactattttttttttttgagatggag

SEQ ID NO: 49907 - DNA, 1034 bp, Homo sapiens
aataatagaattagctattttcctacagcattttagttgttcttatgtctacagacatacctttatacctttcagcttaataattcaaatgattttttttaccattccttgtaatcataagagttcaacaattgtcatatgcagccttgatctttttatccttagcgtcctacagcaaaagaacttctgaaacacaaattcattgtaaaaaattcaaagaagacttcttatctgactgaactgatagatcgttttaagagatggaaggcagaaggacacagtgatgatgaatctgattccgagggctctgattcgtatgtacaaattatttaatttttatgtaggcagcctatttaaatattgtatatcttttagctatgctccagtgtgcttgttctagcataaaatataaaccatattttgaaatttcaccttagaaactgtaaaaatctttttcaatcacagtctgtggaatacaatggagttggaaacatgtttttcttggaagtgaatagctctagttttaaatggtcttggtctaacccctagtggatacttgagtatattacaaaattttggaacaggattcaattaaaggtgttatattagtttgctcaaagtaataaggagctgtgttttctcatactttgatggcaacctgcaaaatccctctaaagaactgacctccaggcttttcccacctcttggccatgtaccaaaccaagatcagactgatacatttaaatattcatttatgcatgatttttatttcttgaaaaagttgtagggttttataacagcagcgtttacattaaaaattcagcctctaagtctgtcaattaatttagactaggaaagtctgtatgctatgccagaatttagtcctccaccagctgaactggcacaaaggcaacaccaaatttctttagatactactctgagattcttccatttatgagaaattgtccaatgttggaaagggataaaaaatatcagaataatttgtgccctattctaatgggtgttagccttag

SEQ ID NO: 49908 - DNA, 1506 bp, Homo sapiens
ggataggtgtttggtaatgttgaaggagttagtctggcttcatgttttacatcttcaactaaaatcccatactatctgcttggatttggagagccaaaaaataaagctgattgtcatgtgattaaatatctgatcaacaggtatgaatataacttaaatcagcatatttttgccatggtaataaattgtcctataaactatttatatatttttgttcttcataattatcactaataagcatcagtttgttgtttttaaaaggatatttaagtgagcattttctagttcatatgaaaataaccatagtacaggatgatttctgtccacacaaaggttaaattagattgcacagttaattttcacttatatttatggtactattatgtgggtgatgcctttttcttttaagcccagtacatatattatgcctgcctaagttctgaactggggctgtatttcagtagttgtagaattattgatatttagttttgatagctaatgtttaattgtttggatctgcacagtttggtttttgcacaaaagtcatttaaaaaaatctgagtaattgtcaaatattaaaagaaagatattcttcctgtaaggaatacagtttttagtcaaagtggccattacatcctctttttaatttacataatacagatacttgagaaagttgttgtggtgttgtatgccaagaaaattctttttattggtgcctatattgtaacaattatttttaatgcattgtattttgaagtaacggttcagttaaatttttcacctgctgtgtaactgaaacacaattacagtttataatcatctgtagaagtctggagataattttgcaactcatgttatgggttaaatgaatatttttgtaaaagtaaaagcaacaaatttataaattgattatttgaaactttacaacacaattgcatcccaaatacaaattgtattgcttattcattatagctattcgtcctgtaatctgtttctaggtgaagcatactccagtgttttaggggttttgaaaataaatatttaaatttcacagtcctcaatgtttgttttccttgagttgggggtgtggtatgggacttcaaggactcctttgtcctttattgttcaaacactaaaatcgaaatttctgttggaaaccagaagatacttttcacatttcattaagcattaattatagctacaatgaacatctgtcctgatttctaggcctcctgtcttgaccaaattattaataaagtcccctttcacttgaaagtgtcctgggttgaacaataaattatatggtcaccctaattattatattattaagagatcatatacagatataaacttagtaaagatttttagaaattgatatgagaaatagcattaacataaaggagtttaagtttttcctagagaagaggttgagggtgaacttagcattaaggatctagggtattaatatgtattaatatattagtatattaattatataatatccta

SEQ ID NO: 49909 - DNA, 1050 bp, Homo sapiens
taaatcagtataaagagaaacagggtaaaaatttcagatgccagagataaggcattcttaatcctgtccaaaaattgatattatgggaaaactccccttgagtttcagtttagttcactatttgaaggtggaaaagaaatacatatggatttggttgggaatttgtttacaaaatgtttgacacttggataaaagctgaaaaaaatctatcaaaaatctaatgggacatgaaacctgttctcaagtagcttataacatagttgaaaagataagacttccacacttggcatcattaaagcttgcaatgatgagtgaaatgcatataacttagtgtaaacctgcatgatacagacacgcatcaaaagctatggaaattcaggaaaagaatcaaaggattaatgaggagctcaagtcttaggaaaagcttcatgaggtatgtgtgatttatgtagactcagaggctaggcacagtttggctgcacagaagggagagagaatgagatattctgattgaaaagggggaagaaaaagagcaaaagcatgagagatggaatgaaattggtgggcagaaggcaaagaaaaggtcagactacctagggtagagtatgtgacaaggctggcatggctgggtagactcagacttggcaatgcaggctttagaagttagtttgagttccagaggcaaagagccatcaggatccattgagcagcatagtgacatgatgaatgcagtgttatgggaaaattagaccaggatttatgggattacctatggccatccagatggcaaacacaccagttgcaaagattcttacttgccggtacaatgaatgtgaagggaaagaggctgaaggctggcatgaaatcaggctatgatggaggctcagatcaaccagaatgaattcagatggagggtacagatagtttccactggcatatgagagaggtgagatgaaatattctgatatagagtacccaaaagaaactaagagggtaaaagaaactaaggagaattagagagctggaatagtgaaggtccattattatcta

SEQ ID NO: 49910 - DNA, 1045 bp, Homo sapiens
ttttggatctttcttgctttctcttgtgggcatttagtgctttaaatttccctctacacactgctttgaatgtgtcccagagattctggtatgttgtgtctttgttctggttggtttcaaagagcatctttatttctgccttcatttcgttatgtacccagtagtcattgaggagcaggttgttcagtttccatgtagttgagcggttttgagtgagtttcttaatcctgagttctagtttgatggcactttcgtctgagagacagtttgttgtaatttctgttcttttacatttgctgaggagtgctttacttccaactatgtggtcaattttggaataggtgtggtgtggtgctgaaaagaatgtatattctgttgatttggtgtggagagttctgtagatgtctattaggtccacttggtgcagagctgagttcacttcctggatatccttgttaactttctgtcttattgatctgtctaatgttgacagtggggtgctaaagtctcccattattattgtgtggaagtctaagtctgtaggtcactaacgacttgatttatgaatctgggtgctactgtattgggtgcatataaatttaggatagttagttcttgttgaattgatccctttaccattatgtaatggccttctttgtctcttttgatctttttggttgaaagtctgttttgtcagagactaggattgcaacccctgcctttttttgttttccatttgcttggtagatcttcctccatccctttattttgagcctatgtgtgtctctgcatgtgagatgggtttcctgaatacagcacactgatgggtcttgaaggtttatccaatttgccagtctgtgtcttttaattagagcatttagcccatttacttttaaggttaattttgttaagtgtgaatttgatcctgtcattatgatgttagctggttattttgctcgttagttgatgcagtttcttcctagccttgatggtctttacaatttggcatgtttttgcaggggctggtaccggttgttcctttcca

SEQ ID NO: 49911 - DNA, 1033 bp, Homo sapiens
gctggtctcaaactcctggtctcaagtgatccttctgcttctgccttccaaagtgctgggattatgggcatgagccacggtgcccagccagtcattatcttttttaaaaacagaaatggtacaaaaaatgttatcacagtatacttcttggttcagtagtgaacaatattagcatagtcataatgatgcaaattttaaaatgtgatatataactctattggtagaacagagaaggggaggggatttgtaagcaaattgactcctcatctaccattacaagatggcaatagattaattataatggatcaaaagacaacaatgcctgcttgttatttaacaatatgaaagtaaatgtcagaagaaacatttaaaaaattgaaagtaagatggggcaagtgtgagggcagagggagaacaaggagacaggagtcttgctttttgttatagcataaaccttttatactagggtaatataacattgtaattcagtatatattatttagttaaaaatcatgatcagtttgaaaaagagtcaatggtggttaaacataaggtagaggttatattcacccccattttctgaactgtctgctcccatacatcctgtggtttcctcctggccataattggagaggaaagagcctgaaaagctctttcacactgagatcttagtctactacaatccagcctgggcaacagagtgagactatgtttctaaaagtaaaaaaatatttatgaaataaaataaaataaaataaaataaaagtaaatgatttaccagattcattttttcctttgcatagtttatttgaacccatgaccctaggcacttaagggtctatcccttcaagaagagggtactggaggtaaaatctacaatttttttaaaaggagtttggagcaggtcaatgctaagcaagaaataatttctaaatatggatatacaggcatttgtacatgttctgaccaaaatggggtttggtggtttggttttaatgggtgggcaggtgacatactttctttctttcttttt

SEQ ID NO: 49912 - DNA, 1054 bp, Homo sapiens
tgagaggatcgtttgagctcaagaggtcgaggctacagtgagttgtgatcatgccaccacactccagcctgggcggcagagcaagacccatctcaaaagaaaaaaaaaacaacttatttgtggaatagccttttgttttgagaggatttattacattgaaactcttaatggcttaacaatttctatttcatattcttctcagagcaaaagtggatccaaaagagctaagtagtcataaagtaaggaagaatgaaaaccccattttccttctatcttgttggaggcccttgagaaatagattttggaagatttgccacagggcttccatagaattgactccagaaaaagttttcattaagcctggcacacaaatactgaaacccaaatgagaaaatggattaaagtgataaaaaatgttcaaatgttgtatgcatagatgtttttgtgtggatgatgtgtgatgtatccttttgtttataaaggtaaataatcgacaaatacagactgcctgtctagattcaggaatagtcaaagactttaagacaaactcagtgatgtttggctctgagcctcacacattttgcttactaaaactacaacctcttctctcaacctaggcatctcatttgcccttataccccaagaggctctttctgtcatgaatcgtcgttctctgtagcttttgctcttgccctcatgctttggtttcattttcagtgttctactttatcactttcaaagttggagaacaattaccatactgaagtgatttcagatttcctggccaaatacagattatctagcattcaagagaccacagttcttaaactcttgctctccacccccatccccaagagaatcttcgattttgagtaatgtaggacaatttcatcatgaattgtttgaagggacattttagtggcacatcttcatgctattctgggaatactatttccaacctttcttccctggaaccacagtacaggatgttttgactttttgactccacaatccgccattccttcctctttccagaggtcttcttgaatatttt

SEQ ID NO: 49913 - DNA, 1119 bp, Homo sapiens
ttcgtcagggttcaaatgggcataattttcatgtaatcaaggcagctaatgaacatatgggtatctggtgatatgtgaaaaattatgtctattaatttgtaaattttgatacacacaggtgataattataggcattcctgagcatttattttcccaatcattttctgcaattaaagcttagaatttctacaatacgtaatcttaagtactttaatttcaaatcaaatacattatataacatggtttctaagaaattttatccattaatgagtatttacctacctaagtatttaataaaaggtttaatgtttgtatttccgttttcatagcagcattattcataaaagccaaaaggtagaggcaacccacatgtccatcagtgggtgaatggataaacaaaatgtggatatacatgcagtagaatattattcagccttaaaaagaaggaaattctggcacatgctgcaatgtgaatgaaccctgaggacattaaagttaaataaggcaatcacaaaaagacaaatattgtatgattttatttatatgcattattaagagtagccaaattcgcagaaaaagaaaacagaatggtggttaccagggactggggggagttggtaaatcgggagttgtttaatggggatggttttagttttacaagatgaaaaactgctggagattggttgcacaaaatatgttaatatacttagtgaactctacatttaaaatggccatgatggtaaattttatgtttgtgtgttctattatgtttacaacttaaaaatgagttcagtgtttttagaacttcaacatgactgatttgtgtgatagaactgtgaccatataaaaaatactgatgtgaagccaggcacagtggctcacacctgtaatcccagcactttgggagaccgaggtgggtggattgcttgaggccaggagtttgagaccagcctggccaatatggcaaaaccccatctctactaaaaacacaaaaaattagccagctactcgggaggctgaggcaggagaatcgctggaacccagaaggcagaggttgtagttagccgaggtcatgccaccgcactccagcctgggcgacagagcatgattctgtctcga

SEQ ID NO: 49914 - DNA, 1050 bp, Homo sapiens
tagtctaatgacttatctttcttcttttctcttttcttgaataaagataatttgaataagtcattgcacatctagtttaaagagtgctatcttaaaattgtatttttttctgaaaactctattgaatttgatcaaaactttagggctttgagctttctttctttaagttcatttagaaaacaacttttaaaatgccaacaatgtagaaaattgtggcaccaaaaatacagtggccctaaatacccctcacggaaccttttactttaaggtaagtcattgttaatgtcttccagtgcttaacgcaacatgaaaacagctgtactgtaggtctattatctatggtttatgtatatctttgcccaaagttgaaaaagttaagtgagacagttcactgcatgcagatgtcaaactacacaaaagttcattttgcacaaaaaagttcttgtctcctttaaggaatatatccagactagctcaggtgcatccctcctggattcatgtaatcagatctgcccttctggagaggcactggcacggatcatacaaaactcagttccatacatgatgaatttcaaaaaggcatacactactttcttctatagcaatgttaagatttcagaaatagaaattaactggttcaaagagtccataggtaaaggtcaggacaactcttgatctctaattccacgcaacattgtcaacagctgacaatgactcaatacaagcaaggctgtttagaaagcactgttgatcaggatttggatggataattaagatcaacagagtatcaattcccagaaagctaattttgctctcttatattctgagccaaatgggtctgctttggaagagagcatcaaatgttctgaagcaaaaacaatgtgaaaaggaggaacaatgggaagcaggagatatttctgggtcccacaatggctaaggtagccttgggcaagtcatatgcccctggattcagttccatcaactataaaaaggattttgctaattccattgttctgtgattcaaacacttctagccagcttaaggtatcc

SEQ ID NO: 49915 - DNA, 1031 bp, Homo sapiens
acttgaaattgtcacccacacagcattccaagaagactctgttataaaccatattcagcttagaaggaagcactcccccattagcattctaccttagatgagtttatcaaattagctgattgggacattaggaagggcagaaagaatctggcaccaaaaaactggcaagactcacgagggtgagtaggaaagacatggttgccaagagccttaagtggaaagggaacgccaggtgccaggaaagatgatggtgtagtcaggagaaggactctaaagtctgggggcaaatagccaagggctgacccagtctaactagctcttatgatgtaatagactacaggaatacgggatacttgtcatggaatgagatgtgaagctcaggaactagctgatgtgacatgattttatataatgagaaggaaatcttctggaaacagccacccaggcatgcttccgcaataaggcagactttatcaatgtaatgattcatagttgtctcaagatcaccaagaatctctgatgagaaagagtccatttttgaagcacacgatagtgctcttcacttgacttttcgttgtctctgactttcctggtaaatttctcactgaagccaccagcccattctcctgcatactttttgctcttgccttttacaaaaatgagcaggaccattattgtatctattaatttttgaactgaaagaaagacctggaggtgggtgaattttccagattaaaaagttattaatcactaataaatgctgatcaatcaacaatattgaagcctaatgtatttgaaagcaatgctttctgtttatggtagctttttacttctgtaatttttttcttttcttttttgaggtgactcaccagggaaattctcctagctaagttctgctttctttggaatacttttaaactttcttaggtttgttatatgctccaagtgtatggaaaaaaaggctataaattaatgattggtctacatataaaatgtaaagggcttactgaaagtatttagatttttctaag

SEQ ID NO: 49916 - DNA, 1189 bp, Homo sapiens
tgcagcctgggtgacagagtgagacccttctaaaaaaatcactataaagatgtattttattcttttgctctgccttgtaacactaccgttcatctaatactcagacaaactgagggtagaagattcaggcttaattgtccctcctctccaccaataccccctgtactagtctgaaatgacaaggtaggagctcctcttagcaatatttacagaccattcttcacataaaagaatataagaactctcaaaaagctaaataaacagagtactctaaacaagccctcttcctgtccttttctcagaagtctgctgcaaaggctcttggtcagtgccacaggctgttcttttatctcagtaaccggagtgcctttgcaaagctggcctggaggtcaggtctcaggctcactccccggtattcagtgaattcttagtcaagtccaagcttgagtcagctgcctccattgtaactcttttgcaattcgatggatagcttggtccttatgtcttgaggattggaatctcctgggcagggattggatttcactttccatgtctacagtgtttgcactaaggttattaatatattctctacaggagggatcatattgagagcaagctgaaattcacataacaaagcctgtggcttgaaactacgctgggccaagcccccagggggatactgggtaactctgagcagccagtcacccttggagaacattgagaagcatctgagtctaccctttctgggacacagcatctttctatattagacccactctcccagacttcccaccatacctggaggtgccctgcaacgccaatgagggaaaatgtaacctgaggaacactcatttccaccgtggtgtgagggactcagaggattccctttcccaaagttccatttagaatgaaatgaatgaataatttataccagggtaagagtcaataagaccattaaaggagcaggcaactgtaatacaaagagcacaccctctaggatcagaccaggatttgaaactcagttctgctctttactaactgtgtggccttaggcaagcagttagcctaccagtgcctcagtttcctcctctgtctctgtacaataggtatgatactaatcaacaaccttgtaaggtatgcatgtaaagctagaggataatatacataaaaggccttttacaggccctta

SEQ ID NO: 49917 - DNA, 1033 bp, Homo sapiens
tctcaattactctaaacttcatttagctgtctgttatctatctatctgtatttattacggaggcatcttaggttttaatgttaatttatgtatactaaataaccatttaaaaatgtatatattaaaacctatgtcaaacaaacaacttacatgagtatgtataaactgattttaaaacaaaatgaactttgttacccttcttattctctgtagcatttcttggggcttagagtggcttaatttgtctatactaaataaacatttaaaaatgtgtatattaaaacctaggtcaaatttttaacaactttcatgaatatgtataaactgattttaaaataaaattaacattgtcgcccttcttattctctgtagcatttcttgagacttaaagtggcattctaaaggcaatttaaaaatcatgtcaagctcagttgaacagaaaaaagggcctacaagacagcgcaaatgtggcttttgtaagtcaaatagagacaaggaatgtggacagttactaatatctgaaaaccagaaggtggcagcgcaccataagtgcatggtaagtataccggcagcaacagagaccttgaaacgattcatgagactcttaataacacatgaatgttcctgaatactaaaaaaaaaaacaaaaaccaaaaaaaactcagttaaattttaagaaatggtttatcactaatgctatgccatttttactagaaaattaccatttaaatttgacatcttatttactgttttactgtgattaatttatatatgaaccttaattttttttaaatgtaatttatagctcttttcatctgctttggtatcatcacactctgataatgaaagtcttggtggattttctattgaagatgtccaaaaggaaattaaaagaggcacgaagctggtaagttggtatttctgcctcttgagaataaaaattatttaaactcattaaagaggaaattgcttattttagagtgtattgcattattaactgagtataattttaaattgcaggcttttctttttt

SEQ ID NO: 49918 - DNA, 1073 bp, Homo sapiens
aacagcatacatctgtcaatattgcgaagttcagtggagatttaatttatttggacctttttttttttttttttgacagagtctcgctctgtcgcccaggctggagtgcagtggcgtgatctcggctcactgcaagctccacctcccaggttcacaccattctcctgcctcagcctcccaagtagctgggactacaggcgcccatcactgtgcctggctaattttttgtatttttagtagagacggggtttcaccttggtctcaatctcctgacctcgtgacctacctgcctcggcctcccaaagttctgggattacaggtgtgagccaccgcgcccggccttggacctattcgttaaagcatcagaactttgtatgagttttactattataaattgttttgattaatttttagtgttatagtgtagggagataattttttccccaaatgtagtgtgttacaaataacgaaatttgttccttgatctagggaatggaacaatactgggaattgagaacacaagctttagtgacagacttgagtttgaatcccagctctgtcatttactagctaggtgatcctgattaagttatttacttctccaggccatgttttcctcacctgcaaaaggggttagataatgacagtacttgcctcccagaattattgccagaattaaaagaggaagtatataggatttaaggtggtgctgggcacatggttaggacttgataaatagtagccaccacttattgtttttgtttgtttttgtttttgagatggagtcttgctctgttgcccaggctggagtgcagtggtgcgatctcggctcactgcagcctccactgggttcaagcaattctcctgcctcagcctcccgagtagctgggactacaggtgtgtgccaccatgcctggctaatttttaattttttttttatttttagtagagacagggttttgccacattggccaggctggtcttgaattcctcacttgagaccgtctgtccgcctcggcctcccaaagtgcggggattccaggtgtgagcactgaggaatagtggcagaaggg

SEQ ID NO: 49919 - DNA, 1064 bp, Homo sapiens
gttgcctaggctggattgcagtgacatgatctcggctcactgcaactccgcctcccaggttcaagcaattcccctgcctcagcctccccattggctgcaattataggcgcccaccaccacgcccagctaattttttgtatttttagtagagacagggtttaccacgttggccaggcaggtctcaaactcctgacctcaggtgatccgcctgcctctgcagatagctattattctaattggtaccggtgtcagattatatcacagattacaagaagagaaagagttcagaaggccatttagttcacctgtcttacccctatgcaagatttcctacaagccactcaagataagatttttggcctaaggattggctgacacgtgtaatcctagtgctttgggaggccgactgggaggattgcttgaggccaggagttgaagaccagcctggacaacaaagtgagacccctatctctacaaaaaaatttaaaaattttgaaatgtggcatgttcctgtagacctagctactcaagaggctgaggtgggaggattgtgtaagctcaggagttcgaggctgtggtgagctatgattgtgccactgtatccatctagcctgggtgataaagtgaggtcctgtctcaaaaaaaaaaatttttttttgccctgtttttaaatatatcaagaaattgtaattctacccaagtaacctgaaacaagaccagtaatatataacactcttcagagttgagaaattcatccttctgtataaattaagtatttctcttaatttaaagccattttagatctgtctccttccattaaataaatatttgagtttttttttattattaaaaaacccttcatatacttgatgactgtcctcaggtcactcctaaacgttcccttttttcacactaaattttactcatgtcttatgaaatcctctgaacagttttcctgctttttctagtagtagaaatagaaatagctaacatttgttagacacttaacatgtgctagggactatgctaagttttttaattatatgatcctttttaatgctgat

SEQ ID NO: 49920 - DNA, 1035 bp, Homo sapiens
gggattacaggcgtgagccaccgtgcctggcctcccaggtgatttttgatgaacaaccctggttatggaccattgccttgtgtcaggggttggcaaactttctgtaaaggaccagacaatatttaaggttttgtaagctatgtggtctcagttgaaatcacagacaatacacaaagaaatgagcatggctgtgttttaattaaactttttatttacaaaaagtttttttgtaaataaaacaaagtttgtaaatcccgtggattaggcccacaggatgccttctgtagggaggaaaagaggtaacttttcttcctgaagatttattcagtggcctcattgtcatctgtgtagctaagcgtacatgcattgtgaatgtattcatataaatgtgattttttttaaaagctccagttatggcatgcagattaattttaatgtatgcagatattttaccagtcatttatattaaaatgaactttacttttgaggtgataaaggagaatgaatgtaaggtcaaagagaaacttggaagtgtaatgatggaggaaattgggtctttggctattactgaatacatttttttaatgcataatttttttatttgcctccatttaatactttttggtaactgggaatactgtcaattaatttcattataaaatcctcatttatttttgctaatggaggagatccaaaaccaataatataaacaaaatgtattcttggtgttgggggctgtcttggtacttatttgagcataggtgtggatgaggtgttcttcacagactaaatatagcaagcggcatagcagtttagagtaccctcagctggaaaaacccatacacgagaaaagcttggacataaaaatctgagctcagaaaatgtctgtctgaatctttcagatacacaaaaagaaacttcagaaactccaataagataatttatattcctcatcaatcatgatgcagaaagtcagatagagttggagtatgtgatattctgagcaaggtcaggagatgaggttaaggcttagtt

SEQ ID NO: 49921 - DNA, 1052 bp, Homo sapiens
ttcaccgtgttagccaggatggtcttgatctcttgacctcgtgatccgcctgccttggcctcccaaagtgctgggattacaggcgtgagccactgcgcccggcctcgtttcttttctgttttctttttcttttttttttttgagacggaatctcgctctgttgcccagagtgcagtggcacaatctcggctcactgcaacctctgcctcctgggttcaagcgattctcctgcctcggcctcctgagtagctgggattacaagcacccgccactacgcttggctaatttttgtatgtttagtagagacgggatttcaccatgttggccaggctggtctggaactcctgacctcaggtgatccactcacctcggcctcccaaagtgctgggattacaggcgtgagccactgtgctcggccagctgcgtgtttctttaaggatgataaatgggatccttgatactgtcatattataaatgatgtgagcttggtaatagtagtacattttgtgatcaccaggctttctgttatatttttattcacatctgtagtactttaaaaaatgccaatgtgttaataagtaaccaaatttaaaatacaaactttaaaaattatttaatagtttgtttctacttaaatttatataaaaccaggttagtcatgtttatatatagttagccaagttgaacttggtctgtaaaaagtatgcgaaaactctgatactgagttctgacttgtttcaaaccttttcaaacagatggttttgatacttttactagcaatataaaatggcttagatgtaatctgcgattgttctatcccttcatttagattagagatctttaaaatttttgttcgcttttgagaatatgttgcttagaattataatggtttgagcactgttgttttaggaagctgtttcttttatgaagatttacctaattattggtattcgcatgttaaaattggtggccctttttgatctctagatcttggcttttataatacaaaacaatatagtttccacttctggactcgagattagtccagatac

SEQ ID NO: 49922 - DNA, 1051 bp, Homo sapiens
tttatatttattgatttctggcttttatcacattgatctagctcaaatttagttgattttgagtgctttgtcagaaacagaacttccaattattccattgttctaatgggaaacatatgttctcctttacgatcatggtttatgatgggaggttataggattgtatttcagggactgtcttttaagaattgtactgcactaaaaaaaaaaaaaaaagaattgtactgcactagtctccagaacaaagatgaattaatatctatggtaatgtcttggtcatttgccatctgtggctcaatacttactttgctaatacttaatatgataaatgctattaatatataattcattctgccatgttagctttatataaaatgagctgttttgaaatattaaatttgagaataattgcataatatagcaattcaattttcccatcacaaataaaatattattgaatattaaatacctaaaacctatgtcatcagttttgcttcaggaaaaaatggactgtgaatttgaaaagcaattttaaaaatctatatggagtttataactatcattatgtcactaggttattagaatgcccgtcccaggaactgtatgtatttacctgttagtggtgatgggcttagataagttgcctataaaatgattcgaaacatataagaaagcatttctgggctggcacggtggctcactcctgtaatcccagcactttgggaggccaaggctggtggatcacctgaggtcaggagttggagaccagcctggccaacatggtgaaaccccgtctctactaaaaatacaaaaattagctgggtatggtggcacacatctgtaatcccagctactcaggaggctgaagcgggagaattgcttgaacccaggaggcggaggttgcagtgaactgagattacgccatttgcactccagcctgggtgacagagcaagacttggtctccaaaataaaaagaaagcatttctgataaaaaaaatatctcccctatcaatggtgacagttaactgaggacagagtccttccggaatt

SEQ ID NO: 49923 - DNA, 1073 bp, Homo sapiens
ggtaaaggaaaaaggattcagcacccaagcaaaacaattggcctgtgatagaagggcatttccactgtaataagagggaacgaagaggataagtggctcctttctggtctgccttctctgtgaaggagaatgtagcaaaaggtgtgagggttggaagctgaaggaaagagaaccgtttgaaagaatagctctgaagactgggagaggaagtttgcctggagaaatgtaaggtttccagaataggttgagggccctgttgaggttagtacccatgagtttatgtagtggttcccaacagtcaagtgatgtgacttttccaccagtaattcaggatcctgtatgtgcatagagaaagtggctagttgggtaaataaaaattgggatcttgccaagtgagtttaacgaagtaaagggatatgggagtttaggatatttgcaagagagcagtttgagcaagatagggagggaagtgacagcaggagaacaagaaacaagaaagcatcagtggactggaggtcctaatagggttgaagaacaatgagaatgaaagtacttaggaaaacaagcatttgtggtcccagagtgtgacatagggatgtcagaaatagaaccattttatgtgattataaggtttttgagtgtggtaaattggagagagtaatgcccaacttaccagtacaccaacgctcctcctagtattctaaagccctgtctgtcccttttctgattgtcttctcttcttaaccactgttttcctcatcttacatcttcctagtttatgctccatcttcctcctcctaagttctcacatcatttaacagtgtgaagtagaaagggtatctggacagaaagtctgaaactgccacccactaggtcttaacttggttaacttattcacaaggcaaagtgtcctcatgtatcaaatgagactaataaatatataatttttgtttagggggagtgggggaggacataattaagtgacagatatgtgacaaacattaaaatacagtggtgacatcatggctgcatcttactcttaaacctttcaggaaaaaatgtgtatggatatt

SEQ ID NO: 49924 - DNA, 1029 bp, Homo sapiens
ttctgtcgcccagactggagtgcagtggtgcgatctcggctcactgcagcctccacctcccgggttcaagcgatcctcccacctcagccaagtagctgggattacaggtgcctgccaccacgcccagataatttttgtatttttagtagagacagggttttgccacgttggccaggctggtctcaaactcctgacctcaggtgatctacccacctcagcctctcaaagtactgggattacaggcgtgagccaccgcgcccggccgactccatattctttctgattcacccatgtgcagagtactgtgttaggcattgtgtatgctcatctgtgatttagcacactgtacaagctttcattataggaaatttcaaacttaggcaaaagtagaaataacagcataacgtttcatctttaccccccactcactttcttcatttggattatttcgaagtaatcccagacatcagatttcattttagcacactttagtaataatatattttgggtgtatgttacaaatttgtatattcatgtgtatgtatatatgcatgtttgtgcatgtgtatgtatatatatataatatcaagtatatcaagtaaatgatttatatatataaatgatttatatatatataaatcatacctttcctgaaaaagcaggaagctgagttcacaaatgactccgcacatacagagtaaatgcacatcacatttacactggaaaaggcagggcgaatgtcctccagttttccttttgcagcaaccatgaagattcaaagcagaggtggtgatgcttgcctcaatcttaatgcctgtcctttttctttttctttctttctttctttctttctttctttctttctttctttctttctttttttttttactctgacaaacatttattgagtacctacaaggtgtgagcaccttggagaattaaagtccccatgtggacaaagagcttagagtctacacaagatatgccaagagtattaactaacaattaaatagaattttatagtttaca

SEQ ID NO: 49925 - DNA, 1434 bp, Homo sapiens
ttagaaaggattttcacactggcatttctaggtagtgatattttcttccacttacctgctgaagcacatttatgcatttctttatggcaaaaccaaataactttagttgtggtctgcctgatactaccatagcacctcagtaccaaggggagggattttgactagttgaattattaagccaccacaataaagcagatttttaaataagaaataataatgttaacttgactgtacattgagatattctgcagctgatagagcagcattttaaaaatgtaacaggtggaaaattacactgtgcttaatgactgatttttttttaaactgcgagtcccttaagatcacgtttgtcaagtgtgtattcacacatttacttaaatcaagggactcaatgcttgcttttattttaaccatcttttactatttttagaaggaaactagctttagtagtgggttgccctgtatgttttctctttttgctcttaatatgccattgggtttttgtgtgtatgtgattttcaaaattcatgacttgaagtgcaaggacagatctagatgtttgtttaccaagctatgtgacttctcccaaaggatctgtactttctttccttacaacagcttgaaaatcattattttaaaatccttaaatcactgtgtctagatcattttttacattgtgtgccatagacttacccatgggacaacagagctccttcatttttggacaactactgtaatcattttttttttaggaaaaatggaaggtgccgggggtaatcatggccagtcaataattatataaaggagttcaaatactatagctgtcagttgatgaatttgttatgtagtaaaatgtatgactttgtatgggtttcttcagccctttttctgccactagcaaccagaatagcactttaccttttggttggctagataagtggctgactacctgtttttctcactgtggtgtgattggctaaacaatctcgcattaaaaattcaaatgtaaattgaattcacatgaaaaatcatgtttggttgtaaacctccaatgttttgattctctaatcatgttttcgtcacatgctgagtaaaagtgccttacaatgtaaaaattgtacagtacttatgttcccaagtagcatcatcatcttctgggtagtaattacattgtggtattaatatttagaaaaatggacctcagcagtgtatttactgtacatctcttaagtccttaactgtagttttaataagcatgacattatttgataagtatataacatttacatcatttcaaaaaatactgccgttactgtcttttatgcatattttagcctgaaattttgaagcgtcttttttctttcttttttctttttttgttttgttttttgttattgatattaaacagtgtaatctttgcaagcgtatattgaa

SEQ ID NO: 49926 - DNA, 1050 bp, Homo sapiens
ccaggctagagtgcagtggcgtgatcttggctcattgaaacctctgcctcccagattcaagtgattcttctgcctcagcctcccaagtagctgggataacaggtgcccaccaccatgcctggcaaatttttgtatttctagtggagacggggtttcaccatggtggccaggctggtgtcgaactcctgacctcaaatgatccaccagcctcggccttccaaagtgctgagattacaggcatgagccactgagcccagccaaggcttttaaaatttctaacaaatgggccaggcgcggtggctcacgcctgtaatcccagcactttgggaggccaaggtgggcagatcaactgaggtcaggagttcgagaccagcctggccaacatggtgaaaccccgtctctactaaaaatacaaaaattagctggccatggtggtgcacacttgtaatcccagctacttgagaggctgaggcaggagaatcacttgaacccaggacgcataggttgcagcaagccgaatttgcaccactgcactccagcctgggtgacaagagtgaaactccatctcaaaataaataaataaataaataaatttctaacaaatggtggaaaataggcatagtcttaattatacagtacacatagtctttattagcattatattcatgcagatattattcctttaaactggtttcttatgaaggtatttccaaatatatccatggtgacttatgttcagtagtatccatttgatgtagcctgtggacctgggtgtagtagatgctattggtgccctgcccggctctcttcaccggctagcaccccatcccacatctgtttcaagtgcagcttacttctgcgacctctgattatctgcccttgcctgatgggaacctaggaagctatactccccttatagccaatgaatgattctgggatacaaaatccctggcccctgcctcaagcaggactactgcaaatgtttcccgctgtggacgccaaggctaaactgtatctaagaccatgtcctttctcagttctctaccgttc

SEQ ID NO: 49927 - DNA, 1070 bp, Homo sapiens
tttctgcccattccagaagtttggaaatattactcattactaggaattaaataaaatatggtttatctattgttatacctcttttaattcacatagctcatttttatcttttatttttgtttgttttttttgagatggagtcttgctctgtcaccaggcaggagtgcagtgatgcaatctcggctcactctagccaccgactccctggttcaagcgattctcctgcctgagccttctgagtagctgggattacaggcaggcaccaccacgcccagctaatttttgtagagacaggatttcaccgtgttggccaggatggtctccatctcctgacctcatgatctgcctgcttcggcctcccaaagtgctgggattacaggtgggagccactacgcctggcccacatagctcatttttagactcacttccattaagtcttgtttggacccacgaacattgtctttttttttttaagatggagtttcacttttgttgcccagactgtagtgcaatggtgcaatctcagctcactgcaatctctgcctcctgggttctagcaattctcctgcctcagcctcccgagtagctggaattacaggcgcccgccaccacgcccagctaatttttgtgtttttagtagagacggggtttcaccatgttgggcaggccaggggtgatccgcccacctcagcctcccaaagtgctgggattacaggtgtgagccaccgcatctggccaacatgtcttttttttttttttcctttttaaccacaaagagacttaagcagtccttgtcacagatgatgaattgatgttgcaagtattgtcttagcttggattaattttcttgcttactgtaattttagataatatagctttgtaattagagattttatgtgtaaaccacaaaaatgtttacatgaaggccattattacagatgtgacgtgcataattattagtaatttgtatgtttacatgggtcagtctggcaaaaaattatgaagttttaaaaattaaaaaaaattataatgccagttttactggaaagtaaaattatttcagtaatcga

SEQ ID NO: 49928 - DNA, 1029 bp, Homo sapiens
tatgttgtgctaaatggtattttttatttaattagagcaatgctgttcaatagaactttctttgaggatggaaatcttttatgtttctgctatgtggtacagagccactagtgacatgtggcttttgagcgcttgacacatcttgtgcaacacaggaactgaatttttaagtaatttatattgccacatgtggctaccgtatgggacagtgtagtactagatgatctgtaagggctgtgcttcatcagtgtcgttttttaactgacaaaaacctttagttttttttttagtaatgtgtttatttaaaagaattcataaaatacaagtaaacaaattaacttgttacctgagcatatgtcctttcatacttattttttctgcatacatattttggaaaatggaatatctgccctttttttttatctgagatacagtctacctctaaaaatacatgattctaacattctcacttttgttggcatttgatcagggtatagaaaaacagttaaaaggacagagaatggttgagagattatgatatgaagagaaaatgtgattgagtgtggtagacttggggcctgcttgaatgttgagagaatgactgttttccgataaaaaaaaaaagtccattctaggatcctaaaagaagggtctgaagttcactgcagaaagcaagctacatagtactaagccactaaggggacatggagcccttagtaattcctaccttagtaatagtctcatcatgccctcttgggaacccagccttgttgattagcctctctgctttctctccttatagttcaacctccctgtttgttccaagcagttcttttcctgcccatttattatgcatttctatacagctttcctcctctttttctataccatgctgcagttcttattgctacctagaggttttcaaaattcctaggggcggataagtaggcataaacaaagttcttccctattatccttcctattttttcacctagactgaagaggtagacaaaatagaaataaagacat

SEQ ID NO: 49929 - DNA, 1057 bp, Homo sapiens
ctagtgtgaaccattggttttggtatattgtgcttccatgtagtttaatatcaagatgtttttagatttcccttttaatttatttgttgacccattggttgttcaggagcatgctgtttacctgaaaataatggagatattaaggtatttgaatatttatcttctagtacattgaaaaactttttgagagtaaccaataataaatgatggaatgctactgctttttttttttgaagctgccagttattgtttacttacactatgccaaatataaaggcattaatctcataaaagtttcacaacaatcctgtgagggagacgatatccccattttacaaatcaggaaattaagacttaataaggttaaaagacttgcccaaagtcacagaaccagtaagtggtagagcttgaatttgaatacagacctgactctaaagctcttttctttctttagattttagtgttcattgcttacttgaatgagtatctataagaaaactttaacatgtaaaacttctgtgaaattatcttgtcccatatcagggtcatgtcaaactaatgtcctcctcagcatctttggaaaacttcagaggagaaatgagctttgcccctcctgttcatttcatataccactgttagacctgtccttccctttcagcatgctttgtccatatttagaagctgttgaagccattacttgtctggtcagtttttagtgctggaatggacctagccttttaggccttctgagatttagtttgatctcgtctttcccacctaatggctctgttctactacatagatttgatctgaaacagttctctgtttctaaaataactttcttttcatgatagtcacagtaaagtacatttattatggaaaaatcaataagtataacgagtgaaagttatttcttggtggtaagattatgggattatttgaactttctgtttcattgtattttatttatttatttatttttgtgatggagtctcactctgctgcccaggctggagtgcagtagtacgatcttggctcactgcaacctccccttccc

SEQ ID NO: 49930 - DNA, 1139 bp, Homo sapiens
gtcttctcttttgtaatgccctgtagtctctctgtatgttatatgtcacattttgtaattaacagcttgctggtgaaaaggaccccacgaagtgttggatataagccagactgtaagtgaattactttttttgtcaatcatttaaccatctttaacctaaaagagttttatgtgaaatggcttataattgcttagagaatatttgtagagaggcacatttgccagtattagatttaaaagtgatgttttctttatctaaatgatgaattatgattctttttagttgttggatttgaaattccagacaagtttgttgtaggatatgcccttgactataatgaatacttcagggatttgaatgtaagtaattgcttctttttctcactcatttttcaaaacacgcataaaaatttaggaaagagaattgttttctccttccagcacctcataatttgaacagactgatggttcccattagtcacataaagctgtagtctagtacagacgtccttagaactggaacctggccaggctagggtgacacttcttgttggctgaaatagttgaacagctttaatatacaataattgttgcattattatttcagatgataaatgtggtcataagtaagaaataaatgatcgagtttagtcttttaattcactgtcctttgaatacctgcctcttactctggaggcagaagtcccatggatgtgtttatgaacatggttgaggaagatttaggaagactgcaacagtacactacctaaagcaggttttttactccatctttttttgccacgtacactggcctcccactttgatatgcttgaaattatctccttgatttgtctttcaaaactacatattgaggctggttgcggtggctcacacctgtaatcctagcactttgggaggccaagccggacagatcacttgaggtcaggagttcgagaccagcctggcaaacatgatgaaaccccacctttactaaaaatacaaaaattagccaggcgtagtggtgtgtgcctgtaacccagctacctgggaggctgaggcaggagaatcactggaacccgggaggcagaggctacagtgagccaacatcacgccactgcactccagcctgggtgacagag

SEQ ID NO: 49931 - DNA, 1027 bp, Homo sapiens
ctgaacataagtcaaaggtttgattatttttcatgtggcttcctctgcttggaactttctgccccgcatcttcccgttgccccctgtgtcctcttgtcatgcccctacccttttttgagtgtgtctattttctggcactacaagacataacaggctcatcttgtgttttccctaccctgacccagaatcagccattacttcaaggagccctggttccattattggagaatactattagaaaccaggatctggtgctaggcatgctcatttctattggagtgtcatacaaacaatttgtaaattgtttgtaggtcctcccagtggataggattaggaaataaaacatgcatactaaccatgcatacacacacatctacgtctatttctgtatctgtctgtatacatattaaaataaacatgggttgataactaatgtttctgctgtaatccacagccttcatcctagcctgccactcttcttctttttagctttttcaacagtgggaaatgtggctcttgttatgtacactttattcacttatttgtttgaccctagtatcataaagtagttccgtatgcctgtaacagatcgactaactagagtccattatttgcggaaagatctttttgtccgaagcgttaccgcaggggtgtccaatcttttggcttccctgggccacactagaaaaagaagaattgtcttgggccacacgtaaaatacactaacactaacgatagctgataagctaaaaaaaaaaaatcaaaaaaatttcatgatgttttaagaaagtttactaatttgtgttgggccacgtttaaagccatcccgggtcgcaggttggacaagcttgccttacagtatccagtcaaaataatgttttccaaaattacttcttttctttttcatccctttcagtgtggccgttatttataatgcagtttggttcattagtgtttttattacaaatacaccctcagccttcatatcctagttttaatgaattattacggtgaaacataataagag

SEQ ID NO: 49932 - DNA, 1034 bp, Homo sapiens
agctgaatcccagagagcataagaagcttgtccagagtgacatctctgatgcataaccagtactcaaacctatttttctgacaccaaggcctgtgtgtaaactgtaaaggggctgcttggcacctactttcctaaagttgtcctatcccttctctgtctgggtcttcctgaagcttggcacttctgaagtcacctctctgaaaacattctggtaactgttaaatcccttgttctagctattcatgtgttctgtgtggttaaacaaggttcacaatgggccacctggcctttggaacttgggtgaagaggctgccttcagttgatcctccccactcccattttcaaaacatgggtttacatgagttatttgtgaattaggaaacataaccatgttttgagccttcatagaaaacaaacgtctggggtcatacaggttaaaaggagtaaccaaattcggcactatcattgttctattcagtagacaattctggggcctttctgtgtctcaggttctgtactagttgtttcaggactttgggataaatacaaactatccctgccctcagggggcttaaggtcaggtgtacaagtgactctaatgtgaggcaaggctggattcagtgctgcatatctaatgctatgggaattcaaagaggaagtgatcagaatgagaagggagggatggatcattccaggagaagcttcagggaaaagcaacatttaaaatgagacttttgagagtgagggaaatttggacaggtggatatagaggatgcaaggctagaggaaaggttttagccagaaagtctgcttgggcaaatgcctgggtaaaaaaagaaaatccactttgggaggacaaggcgggcaatcgcctgaggtcaggagttcgagaccagcctggccaacatggtgaaaccccgtctctactaaaaatacaaaaattagctgggcgtggtggtgggtgcctgtaatcccagctacttggaaggctgaggcaggagaatcacttgaacccaggaggcagaggtttcagt

SEQ ID NO: 49933 - DNA, 1086 bp, Homo sapiens
acctacgtattaagccccacatgcattagctattgatcctgatgctctctctccctgctggctccccagcaggccccggtgtgtgttgttcccctccctgtttatgagaacactttcttgacataaagatttcatttattcccatggaattctaaaggcttttcatacttgtgaaggaataatagtttagaaataaactgaactttaaaagataccattttgaaaaataatatacagccatcaaaaattatatttatgggaactatgcaataatattaaactctatcatctgttgactgcctcctatattccagaaactttacatacaccaattctaatccttacaagaacgctgtgtaggctttagcattagatggaccaggtttcaccaactgtatggtcttggataagtacccaacctcctgtccctaagtttcctcacctgtgaaaacacggtttctaccagctttcaaataagatgatcaatataaggcacttggaacagaacctgacacatcataagcactctataaatgtctattatcaccaaataattccaggtgccttgaaaatttaaatgaaaaacaaaatcaaaccatgacaatactagaagcaaatttaggtgaacacttttctaatccgggggtgggcgggggctggggggaggcagggagaagaccttttttttttctttttgagatggagtcttgctctgtccccaagctggagtgcagaggcgtgatctcagctcactgcaacctctgcctcctggattcaagtgattctcctgcctcagcctcccgagtagctgggactatacaggtgcacaccaccacggccagctaatttttgtatttttagtagagatggggtttacaccctgttagccaggatggtctcaatttcttgacctcgtgatcccatccgcgttggccttccaaagtgctgggattaccagcatgagccaccgtgcccggctgggagaagacctttctaagcatgataccaaaggcagagacaataaaggcaaagaattgacagaattcactatccgataaaaatcacttctgtggccgggcgcggtgg

SEQ ID NO: 49934 - DNA, 1048 bp, Homo sapiens
ctacccccatggtgcaggcattctgcttgggagttggaggaggaacaggtaaaaaataattaaatattcaggttaacgatatattgtcaggtttgaggattgaggaaagggcgcagagagtggcaagggctgctgttttagatacagtggccaggaggcctccgatgaggtgacctttgaggagagacatgcaggagatgaggggacagtgaagaggatttctaagaacactccaggcagacagaacagcgacagccaaggccctgaagtgggtaggggcctggtgtgtgtgaggaacctcaggattgccatcatggctggagcagagacatgaagcaagaaggccatggagatgagggcagggagatcccggagtggggagatcagatggggctctgtgtatcatgcaaaggactttgcattctgttccaagagctgggaaggttgacataattaggaaaaaagcccagaaaagcagaggtatccatttttcatggtaaagatgataatttcaattaaaacacgattcctggatatatgtaatttgtaggccaaatggtgcccaatccctacctccctcaccccctcacttccctatccctaaaacctgtacctcaactcccgttcgtaagtgatgggagttaggaatagagaaatctcccggttgggttttctgagcaaagaggtaacatagcagctctgttatttctttcacgtctccaagggaaccatgactcacccttagctatcccccgggaatgtggccctcagagtgttcttttactgattcgtgattttgttatgtacacctggagtgatggaacataccataccagcttgtcagggttgctttgtgcaaagatcgatgacgtgtgtgaacccggatccatgcttggggtcctgagtttcaggtgccatggccagttgctagcaggttgtatgtgtgtgaccagcccctatgtgagtctctcagaccctgaaactccaaacaggcttccctgggcagagacattctgtccatgctctgtggcttgctgctcgagaggga

SEQ ID NO: 49935 - DNA, 1050 bp, Homo sapiens
ctcactctgttggccaggctggtcttgaactgctagcctcaagaaatcctcccgctttggcctcccaaagtgctgggattacaggcatgagtcaccatgcctgatgtatatatttttccagctcccttcttttctgtatcatttgctattactacctcttagctattagtataaactgatcttgagttgtgtaaatctttctggtgattcactgtgatgggatgattgtgtcctctcaaaattcctatgttggagtcctgacccatggtacctcagaaagtgactgtatttgaagataggtctttaaagaggtcattgtaaattaattaataaggtcattagggtggactctaatccgatatgactggtatccttataagaaaaggaaattagcacacagacacacaatcagagggagaagacagccagtcatctacaagccgaggagacagacctcagaagaaaccaaccctgcctgcaccttgatcttggacttctagtcgccagaactgtgagaaaacaaatctcatgtttaagccagaacctagcacgtggtacttgttaaggcatccctagaaaactaatacactcactgaatgaggcaggtagctgtttcttttattttttgagacagagtctcactttgtctccaaggccagagtgcagtggagcgatcacagctcactgcagcccctgccttccaggctcaagccatcctcccacctcagcttctcaagtagctgggactacaggcatgcaccaccacgcccagctaatttttgtattttttttttttttttgtagagacggggttcaccgtgttgcctaggctggtctcaaacccctgagctcaagcaatctgccctccttggcctcccaaagtgttggatttacaggcgtgagccactgtgcctggatatggtaactttttcatatgctatttgcttgatgattatttttctgtttctgatataatgctttttattagagagttatctgtttgtttttattttttaatgtttgaatttaaaaaattagtataatttgcat

SEQ ID NO: 49936 - DNA, 1034 bp, Homo sapiens
taattatttaaattaattgacccttccaacatatatttatttttccccatttcttcttactgtggttatatttatatggcatacaattgaccattttaaccatttttaagtatacagttccctgacattaagcacattaacattgttgtgcaaccagcaccaccatccatctccagaaccttcccatcatcccaaattaaaattctatacatattaaacactaactctattctccctcctaccccagcccctggcaagaaccactctactttctgtctctatgagttgtgctactcatatggggacataactcttataagttgaatcatgcgatatttgtccttttggttctggattattttacttagcataatgtcctcaaggttcatccaccttgtagcatgtctcagtttccttcctttccaaggctgaataatattccattgtatggatatttggttcatccattcacccatcaatggacatttggtttgcttccactttttggctaatgggaatcgtgctgctatgaacaccggcatacaaacatctgttatagagcttaatatcgcatcagatttatgctacaacaaatgataaatccacattggcaaaatgtcatcaaaatgtatacattaaatatgtgcaattttgtatatcaattatacctcaataaagctgaaaaaattaatacgggcaagagggagtgttctgcttatcaattgtgacataacaaaccacacccaaacttagtttgttaaaacaacaatgatcatttcttttgctcacaaatcggcagtttgggaggggtgacttgcgatatccgggatcttaactggaatgaccttcaccgctgagggctgaaacagttaggggctgcccagcagctccttctctccaaatcgtagtctcaggacctctccatgccattgcttcatgtggtttctccagcatgatgcccgttgagtaggtggatgcccacgtggaagctcaaggctccaagaagccagtggaagctactaggccactttggc

SEQ ID NO: 49937 - DNA, 1031 bp, Homo sapiens
agatttggccccagattactggattattttccagctcccctttccctgtttcagtgcacaaagcccataataccatcttgtaatcctagttattagtcctccaactcttgcttcttttccctctctccctttcacccctgtggcatggcttccctaaggtcagcttatccactagcaagaaagtatggtaaaaatggtttttttcctttttttttttttttttttttttttgagacagagtttcgctctgttgcccagactggagtgcagtggctccatcttggttcactgcaacctccacctcccaggttcaagcgattctcctgcctaagcctcccaagtagctgggattacagacgcctgccaccacgcccggctaatttttgtatttttagtagagacggggtttcatcatgttgtccaggctggtcttgaactcctgacctcaggtgatctgcctacctcggcctcccaaattgcagggattacaggcgtgagccaccgtgccaggctgttttttttactttttagtgggtaaaacttgcttttactcctgtctttgtatgtagctattttagaaattcttaaggaatgaaacaagttcaaaggagtaaagtgacctcgtgtttatctgtgcaatatgtttctttgcttctcctaaattaaaccaaatatttgaaaatgggttatgtgttgctatttgctggtgaagcttgatataaatcctaatttacactggttaggaatataagtttaatgcagtttatttccatagtaacataatatgtattataaatatttaaaaatgaaatataagtagaaaatgaatgagatgggaaaagagaaaaacattaattttcaatctggatactgattgaatggaaaattaagacttattttcagcagtttaatggtctgatagatatcttaagttgcatatttcttttttttttttctttgtttttgagatggagtctcactctgtcacccaggcgggagtgcagtggtgctgtctcagctcactacaacct

SEQ ID NO: 49938 - DNA, 1044 bp, Homo sapiens
atgtgtattgtgaaaaatctattaaggtaagaaagaggagtaagaagaataagaggagagaaactgaaatatgctttaatgttctttgtatattttcgattaattaatggcagtcttcctaacaacataactaactcagcatgtactttttgtattctaagattaagggctagataaattctggaaaatactcttttccaaagtaagcacattgttttatgaagatgcttcggttactaagcttaggggtcttttacctgtgctgtgaaattcgggctagtgttgaaaaaatattcaaatatatcagcagtttaagagctgttagaagtcaagggtcaattgagtatttaaaataaagtacgcttaaattgaggagtgttttaccagattaaaatagttctccttttgagacatgtatacataaataggttatcacatgaaaagtatctcgagttttcttagaatttatgattgaaaaattatttttatagatcaattttaacataaaagatgtagtttctgcccagtgtcttcggagatgtgacctgtctcacacttggttttcagctgctctgaaagacgactgccttattcctttgaggtgtccctgagggaactccaaagcgaattctgtatataccacctagtccatattttcagtcataccccaccctccaaagcatgccctgtacaaatgtgctgaaaattcatttggccatttttggccagatacaataacagataaacagaaattgaaatttattcatatattttggaatatgcatattcatttgggaaacaacaaactatgtcctatttggaccccattaatacaaatgaaatgtgggagaaaggtaccataaaaataaaagagaggtcctgaggcagggggcggggggaactaaaaagaatgatgattatgtgaagtgagatcaagattagagtctccaaagcatatgatgtcatattttatggtgagaagcagcagtgacttccattaggaataagcaagagcatgggccgggcacagtggctcatgcctgt

SEQ ID NO: 49939 - DNA, 3495 bp, Homo sapiens
ttcacagaacctcatacgagtggcgtctagggccaaggctccttgaatgcatacccaagggctgatgagaggtggggacgagtgctgccgaaggactcctcaactaccagaactacgtagggcccctaacatcccctcggagcgagctccccgcgccccgtacaccaccaggtctccctggttcctctcctgctccccgtcccgctacctcaggaaactttagcccagcctctccgatacaagccggcctccttgagggctttaggcccctcttcgccagtgtataccccacgacacgcctgcgtactagggaccacccggctttgtgggcggagtccatgagagggttggagccccgctcgtggccccgcccacccaagcctaggccggccttcgtggacacgcatttccggcgacgcctcggtactgacctctgcagagccgggtggagcccattgacgtccagcgaagcgaggagcagcgatggacggtcgggtgcagctgataaaggccctcctggccttgccgatccggcctgcgacgcgtcgctggaggaacccgattccctttcccgagacgtttgacggcgataccgaccgactcccggagttcatcgtgcagacgggctcctacatgttcgtggacgagaacacgttctccagcgacgccctgaaggtgacgttcctcatcacccgcctcacagggcccgccctgcagtgggtgatcccctacatcaagaaggagagccccctcctcaatgattaccggggctttctggccgagatgaagcgagtctttggatgggaggaggacgaggacttctaggccgggagaccctcgggcctgggggcgggtgctctggggagggtccgctgtgttactggccgccgccagggtcgccaccggcgccctccctccgcgcctccctccccctcgagccgccgcgatgtcccctgcgctcctgttccctcccgcgtagtgcttgcctttgttccaggaatagcgctccaggctcctgctgccgcccctgggcctcactctggagcgagccgccgccctctccttccagccagccagcccctcccatgtacatttggacgctgtcctgcgctccagctgcaagctgggctcctgttacacactggacagaccacccactgccgccgctgccaagccctctcctccccaccagactgccagacgactacatcattctgcccacagacctgcgctgccacagccatcgccatccatcgcatcccaccgacagactgctgctcctagtgatctggactcacctcggaggtatctgggctggccacagtccctggacagtgatccagacagctggccgccccccaagggatctgtcaccttcagcgagacctatttcctccccacccccagaaacctcttgtgttcttgcctaggcccaggtgttcctggcagccaaatcgagtctctcattttctcttgtggaccagttagttttgcccataacgcagtattctgagtttgcaactgtctctctgatgtgtgccttttgttcaacacagtaacccctgcattctgctctgctctaatacactacctggagaaagtcttttccttattttcaataaatgtcagacattattgaaaagaaatggtctcaatgaatatggcacttttccctccctggttctgtaaatggggtccatatcttgttcaaaagctatatgccctgccatgctatgactgatgttgacacagagtcctgtggtgtcctgcaaatggagatcttaccagtgaccaatcccagacgattaatgttgtaaacaagcagttttgtgcctcttaggaaatgaaccttaatctgaatgtggccaagataaggtaaggaatagtcagaaagggtgctttttcttccctcatttccaaaaaactgtctaaaagcatataccccaaatggttacaagccatacatctcacacatttgttggtgaacacctctcacagttttatttaacgcattatcagggaaccagctaagtggcttagatacttcagaaaaagcatttacatttatattgctttaattgggtaggtagtggagaaaggaatgcagaactgtagttaatttaggtacaaacttgtttaatgaatgacctgaaacacaatacaattaccaccttccctaatgggcagaaaaaaaaattatcttcaacatatctctgcatgctaatctttgaaatctactgtgctaacatgcctctgccaccccatctatctctgggaaaagctcaatatcccgatagattatcctaaggtgggcttgcagggcagcactcagtcaacaactctctgccttcttttttttttttttttttttttgggatggagtcttactctgttgcccaggctggagtgccgtggcatgatcttggctcactgcaacctctgcctcctgggttcaagcaattcttctgcctcagcctcccgagtagctgagactacaggcacgtgccaccacacctggctaatttttgtgtttttagtagagacagggtttcaccatgttggccaggatggtctcagtcttctggcctcatgatcccccagctttgccctcccaaagtgctgggattacaagtgtgagccaccatgcctggcctctctgccccatttctaatatgtgttatttttccagagcatacgaatgaggaataaatcacaagagtgttttttttgttgtttattttattgcttctctctcttcatttaaataggtgaaaatttgccattcagcagtgattcatagggcggtatgtggaggtggaggtacattattatctgtattaggtatgtgataatatttgtattcccagaagtagtggaaacatcacgaatttgtagtttgtcatataataggtcaaaatctttttgaaatcagagataaaattcaaattgcttaataaaataaagtttttatgatttacagggctcttaaaacactgaaaccgggctaatcatgaaggccaattcaaggtgctgacagccttcctggatgggtatgaagaaagattgtgttaagcatattcactgtttagttttaaacacagattctgctgaagtggttggaaaagtgcttggaagcagtttacattactgagtaggtccagcatattccctgtgctctctgtccactggctctggaggtaggtagaatgggcagggaccttctaggtatcctttgaacaatgtcagtaacccccaacttccctcaacaacgatgccccagcagttttcttcctcctacaagaatgagacttattccttgatctatgctagttttatcatctcaagggtcctcttttgtgctgcaaatgtcttgggtagggtaataattcacagtcatgaacatcttcacaggattccataaagggacaaaggaatggcatttgtaagagtagaaggggctcttttgtattactttgcagtctcaccttttcagtt

SEQ ID NO: 49940 - DNA, 1038 bp, Homo sapiens
agaagttaacaggttctttggtaaaaaagaagttgaccgaggtaagtaagccctcttgtgaccactcctgtttctcctttctcatttttttctgtccttagctgtaggtggctccctcccaccccaacgatttcagagagaaacaagtcggaatctgagaagtgaggctccagataaactgtaaactgctggaagggggcgatggctgtggccctgggttgtgcaatccaggcatccttgaatcaaggctctgtgtttcaagaatatgatactgactgtgaagttttccgtcagcgcttcaggcagttccagtacagagaagcagctgggcctcatgaagcatttaacaaactctgggagctttgctgtcaatggctgaagccaaagatgcgctctaaggaacaaatcctggagctgctagtgttggagcaattcctaactatcctgcccacagagatagagacctgggtgagggagcactgcccagagaatagagaaagagttgtgtcactgatagaagacttacagagagaacttgagataccagagcagcaggtaagaaaagaatgtgggatctttgtgattggtccaaaggaagtagctgaggcagctgggactagaccacacatttgtctctatgtcattccccagcctcaagatttctccagagtcctcttcctttttctcttctgctgaactcagcaaatgagtcagtgcttttaactctatcagactcaattccccttctataacaaatagtttataatgtccactttactatgcacaaatgaaattgatagacaacataatctacccacatacatcaacccaaagcatcagtaaattgctccatggcctgaaggccaattctagccataccctgtttatctgtatactctgtatgtaatggtttttttatcttgttgaaaggtcattgaaaaaaagaggaaggagaagaactgacagtgaatgtgccccacagtgcctaaaatatttactatttggctctttataaagtttgccaaccctgaatcaagt

SEQ ID NO: 49941 - DNA, 1063 bp, Homo sapiens
ataataattttttcccgtggagacatccaggtgtctcagcattatttgttgaaaaggctattctttttatattgaatatccttgaaacccttttcaaaatcagttgaccacaggacaggtatatggatttattgctagattctcatttctattctgttatgtttagttggtttatagtattttctatgtcttgtattattgatcttctgcctagattttctgtctattagtgcaaggagttattgaagtgtccaactactattgttaaattatctggttcttgtactatttctgttgagttttgttttatatattttagtactcagaaattaagtgcatacatgattataattgttatatcttcctgatggattgatatttttatcattataaaatgatcctgtatatcttagtaacaggggtttttttgtttgttttaatgcctattttgactggctctcttgtggttgctacttgtatgatatatctttttccatccctttacattcaatcggtttgtatctttgaatctaaagtatacctcttataaacagtatatagttggatcttttcaatccagtcagaccttctctgctttctgattaagtcatttaatgtatttacatttaatttcatttgtgatatggttggatttatatctgccattttgctttctgttttctatatgcctcaagtcttttttgttcttctatccctcttttactgctttctttttcattaagtaaatatttctcatgtaatattttacttactttaataattttactacttttatttctttagtggttgctctaggatttaccatgtacatcttatcattggtttcaaagttatactaacttaatgccagtgagatatagaaatgtttctcctatgtagctctgttctcttttccccctttttgtgatattactattatacatgttacatcaaaaatgttttaaacccaagaatacattgttataattattgctttatataattttaagactcttaagaagctgaaagaagaaaggaaaatacatatatattataacttttg

SEQ ID NO: 49942 - DNA, 1052 bp, Homo sapiens
agtgcagaaggcaaatgctagacacttatcaaacaaccagatctcctgagaacaccctcattatcacaagaacagcatgggggaaactacccccgtgatccaatcatttcccatgaggtccctccctcaacacatggggattacaattcgatatgaggtttgggtggggacacagagccaaaccatattatttcaccccagcccatcccaaatctcatgtctttttcatatttcaaaacaaatcatgccttcccaacagtctcccaaggttttaactcattccagcattaactcaagagttcaagtccaaagtctcatctgagacaaggcaagacccttcttatgcttatgagcctgtaaaatcaaaagcaagttacttacttccaaaataaaatgggggtatcttgggtattacagttgggtaaatgttcccatttcaaatagaaattggccaaaggggtccaggccccatgcaagtctgaaacccagcaggtcagtcattaaatgttaaagctctgaaacgatctcctttgactccatgtctcatatcaaaagcatgctgatgcaaggggtgggcttccacagccttgggcagctctgctcctgtgactctagagagtacagcttctgcggctgctttcatgagttggtattgaatgcctgaggcttttccaggtgcatggtgcaagctatcagtgaatctacctttctgaggtctggaagatagtgggcctcttctcacagcctcactaggcagtgccccagtggggcctctgtgtgggggttccaatcccatatttccattccacactgccctagcagaggttctctatgagggctctgcccctgcagcacacttctgcctggacatccaggcatttccatacatcttcttaaatctaggcagaggttcccgaagctcaactattgtcttctgtgcacctgaaggcccaacaccaagtggaagccaccaaggctttgggcttgcaccttctgaagcaatggccctagctgtaccttggccccctttagccacagctggagctggagtg

SEQ ID NO: 49943 - DNA, 1044 bp, Homo sapiens
ttgttctgtacttagatgtcagggaaagtaggcttaaattaaaatgaaatttgaaaaatttattaaacttataaactaatctaacaagacatatttgtgaagtgaatataggcttaccatgaagatagtgcaggttcaattcccagaccaccacaatgaagtgagtcacaagaattttttgctttcccaattcatggaaaaattatgtttacactatactgtagtctattaagtgtgcaatagcattatgtctaaaaaacaatgtatacaccttaatttaaaatactttgttgctaaaaaaatgttaatgatcaactgagctttcagccagtcataatctttttgctggtggacagtcttgccttgatgttgatggctgctgagtgatcagggcagttgttgctgaaggatgggggtggctgtggcaatttcttaaaataagacaactatgaactttaccgcatcggtgaacgcttcctttcaggaaagttttctctgaagcatgcagtgctttttgataacattttacccacagtagaacttctttctattttcttttattggagtccatcctcaaactctgccactgatgtataaactcagtttatataatattgtaaatcctttgttgtcatttcaacaatgttcacaacatcttcaccatgagtagattccatctcaggaaaccactttatttggttattcataagaaacaactcattcattaaagttttattatgagattgaagcaattcagtcacatccttagcttcacttctaaatctagttctcatgctctttctaccacttatgcagttacttcctccactggagttttgaaccccttaaagtcatccatgaaggttggaatcaccttcttccaaactcctgctaatgttggtattttgacctcctcccatgaatcacgaatgttcttaatgtcgtctagaatgttgaatcattcccagaaggttttcaacttttcccagacgcatcacaggaatcactatctatggcagctatagccctacaaaatgtacttct

SEQ ID NO: 49944 - DNA, 1034 bp, Homo sapiens
tcctagacacagcatgaagttggggcactggtggtgagaggcggaatccaaaaaaattcagaaatgacttggcctcattttggatttcataatgtgaagtattcatgattttgaactggtaatataatctaaatcaagattaccaaaataatttcagaggttgatgtggtaacctttaagcgaagtttctagaggtgaaaaggcagaatcttaaatggtaccattggtgtcactgggaggagaaattggggtgtgttactgtttaccatggcagtaatggggcaaacaataaaatgcaatgtgaaatgatttgatgatttgggaaataagattgaacgcaatttacttgtttgaatttgctgttacttgctcttcttatcccactctcttctgatttttttttactttctgctccttacttctctgctattttcattgccactttttaatgttccatgtttggttttatgtgcagcaccttgacttctaagaaatgaatcatgtccctttgccccttataactgaactttgagtattttaagatttattctattcttactgttgtgtattttgtttccttatagccattaaagaaagcactaaggatgatgggagctccaaatctgatatcagataatttagattgtggacttagttacagtgttatctcttaccttaaaaaactcagccaacaggtagtattggtaaaaacaaacaaacaaaaatcctttgccctcagaagtgcatttccttattctttagtgtaattgtaatttttcaaattaaatgtgtatatatctctacactttatggattagtaataatgtgattctctatggcttctagcttcaccattaagctgcagttaagggtctgtcagtatcatttgatgctgtgccatttctccttttgcctgccagtttgtcctacccgcaagctggttgatatggggcagaggtttaatagacttctctcatgggtcacattttgtctatcttcaacctagttcctcctcagatcactctgggctacag

SEQ ID NO: 49945 - DNA, 1023 bp, Homo sapiens
ggttaaatgccaaatgagtattataaagtaatgaactgatcagagatacttcttttatagagagagatagtatgatgtggtaattaaaggtacaaggctttagaccagaggtcagcaatttttttttttttctgtaaagggccaggtagtaatgattgttgatcttgtggatacgtagatctctgtcgctgttgcattttttttctttgatttttttttctttttataaagttttacaacataaaaactattcttagctctcgggccatacaaaaacagaccaagggctgtagtttgccaacccctgctttagaatcagacctagattcccgtcacactctgcccataggtatgtgtgatcttagacaagtcccttactctcttttaccatcatctatatgttagggatgatgatagtaggattactgtgaggaagaaatgtttttagactagtaactgacccttaagtaaatgcccaagaaatgatagctgtgctattattattattattgctgttacaactgcattttctcagattaggcccagaacaactcttttaattggtcagtctcataagtcaagggacaaatacagtctttttaagagaatcaaataggggctttgaattgccctggaaatattttctctttggtagctggtatcattaacctcatctaactctaggactgaagtagaaaaggattaccgattgcattttgtgaggtttctaagttaataaaaagtgatagagcaccttggtgttagtattttttgaaggaaaaacaagggtatctcttgtggaatgtaaagtgcaagagtgttagtctgggagtcaaatctggagttgacttggcgttctttagcctgtcctattttctcattgtgggcaatgggtgctgtggaccaaacagcctcctaacttaactcgcaagtccagttcgagaatagatgggattgggtcaaagtttctttctttctctctctttcttttctttctttctttctttctctctcttttctttc

SEQ ID NO: 49946 - DNA, 1033 bp, Homo sapiens
tggcatttgatcttgccccattcaggttggggagtgaagtgtgaggacccttttcccccgcttgctgtgaaagcacagattcattgactacagtacactgttgttcagaaaagaaggctgcaaatgacttctgagactttatgtcttttcttccagaccaagaccgtagaaggagtcacatctagccggcttagccaaagtacaggtgtatatagttcagggcacttgatttagatttggaggggctggggtgggcagagagcaagaggcgagtaaagagaatggtggtttcagagatctctcttcccaaatgtgtaaatattctataccagataagtttaaataagaaatttaattgctgcttaatttttgattatgtactttatctgtatagcaggctttgtcgtcagaagtttttatatcgatttaaattgctgctctttagcagccaaacaggagcaaaatgtaaaatttttgaacttactgtgtctaatcatcatttgttagtctgtagttaatgtcaacagttaatttatgaacccacgatcgttccacactgcaccaaagtcagtcataagagaaatcgaatattctggagcactgattgcagcagggtggctcctttgtgtgcagcaggtgtagtagtcttcattttcatggtacgttttaatattaattacctaagctgccatgcatttttttttttacagttctcaaggaagagcacagaacaatttctcatttcatatttggagtatgaaagtagattctattttgtaatgctgataatacctaaagatgcattgaatgcttggaagaatgctttttgatgttgattttgacctgttcatgattcagaagaaaaacaaacttttttggattttttttccctcaggtctgagtagcattgccttaaatcttatccagttagaacattgatttatttacatgatgttcagattttccagtgaaaaatacccttctgaacaaaacatgtacttactctccgaaaggcatctatctgtgctattgc

SEQ ID NO: 49947 - DNA, 1029 bp, Homo sapiens
tctcctgtgactgaaccctgttttcccactctccacctcctagttcccttcttccccatgcctctcctttctcccccgtccggtgccagcaacattggcttttataaccttatgggagttgaaccaaatattcctgcttgctcgaacttgaggccttatctttttggctgctttccccagcttttgcctactgaacttttttttgttaattgaactatctagttgtttggatttggggtaaaagggagtagactgtaattgttttttcttaaaagatcttttcttttagctcctgtgggacaagagcagagaaaggttcttttttggtcagtggtgtacttaattaagcagaatatatgacttttcgtttattcaacaaacatttgccgagttacctcctctgttggaggctccatgctaggtgtggagttatttggttgataagaaatggcttccacctttctggtgaagttatgaaaatgaaaaatagacagtgaatctgttgtgagtaatcaagaattgtctggagttttttggacagacaaaaaagatttcttgatgtttacattcagctttgtattactgtatagagtagggagaagtggatggccagcatcccttcctgcgacttaatgcatctctgatggcaaattgggcctccccaaaatatttttctggggtcaactttgaattatggatagtaatggatgatggagcccagaagagtggatagtcctaaatagtagctcgaataaacctttgaccttctacagggttgcttcctgagtgcctggagaaatcccctctttgtggatagtgccacactggtggttttcagccagggcgcttttgccccccggggtcactcaacaatttttgctagatgcactccactggcatccagttggtagagacagggatgctgcttaaatatccaacagcgcatagggcagtgcctggcggcaaacaaaattatccagcctgaaatgtcgatatgccgaggttgatgtaatttcctctacataatgt

SEQ ID NO: 49948 - DNA, 1026 bp, Homo sapiens
aagcccattgcaaaacctccaacttatatagtgtgttatttttttttaaatgactagattttctgaacgactgctacatctctagatggaagtcatggtcataacccatgaaaagggaaagctgacaggtagttggagaactatgctatagcctcttcctggcagctatgtaaagaagcttaagggtagctccttcaaatttctcctcttccagcttgaatgatcaagtttcaatgctaaaagaggctgttagtacccaccccccattattttacagatgaggaaactgaggctcaaaggggtcaagcacctaatgtgctaacgtcagagttccagcttgaatttttagattgtcttcataggtaggtaaattttttatttcctaaagattcttcacagtcaaaaactttttcatggcctgaccctcaaaagaacaagctattgtggtgggagtatactataaaggatactaaaaggccaagtataataacttgctaatttcagaatatgttccgaacagctgtgggcagtacaggaatttttcatgttatttgctttattgtaattgaacatttagtgatggggaacctcttggatgggtctagctctcagtttaattttctctagcctatgaggcaagtgccaaggcatatgaagtatgcctataggtacaaaaatgaaagatgacattgaaagagtctttagacatggtagcctggaagatcgcaattagggcttttgctccatgaaagtatttttttcctttataaagggagatatctgttgaaattgtgggatagagattttaaagattgcatctgcttccaaactaaggtcaaaagttaaattgtagtaaatgtgtgcagtgtggtatcattaaactgtacacacatacgtgaaattgttgttttaatctggcatcttttttttttttttgagatggagtctccctgtgtcgcccaggctggagtgcagtggcgctctctcagctcactgcaacctccgcctcctagcatcaaccgattc

SEQ ID NO: 49949 - DNA, 1050 bp, Homo sapiens
agtaaccaagaaacatgaggactcctgtctagagcctaaacatggggttccagtgctctagttccttctcgcttgttgtgtttcatcatccagagcccccatttctctttcttccgtatttggtggttggtagaggcatcttggtatataccacatgacaccaagtataaatatttgtttcagagcttttaatgaatgtctagcagtgccaggcagggaatgaattttcatgtttaaaggtccagtgtccacttaaggaacatcttaatggagctacagctcaagagcaagcccatttcatcttctgatttccattagataagcaacaaaaattggctttaaggtcatgagcctccttacagcagtccctctcaccttcagctgtattccctatttcagatatacttgtttctctgctgtaagtacacttttcttttctaattaggtcagttacttcatgtctgtttttcttttttgacatggtttcttctggctttggcaccacatattttccccatatgtcattgcctctggagcttcatgttgcaatagtttttcaaggggaacggagagcacattgctaagggtgggggatggcttttgcctcttttgcctgccctttgcttcagtgagtgttcgtatttctgttgggcctagttctgtttggttttgtagtcttcagagtcagttatgtttggactgaaagatacttaagtaaaaataatggcaagtcagagatatgtctggcaaaggtgcagcacatttgttaaggttactggtttatttatctcccttgtctctatggtgactaaatctgggtctgggatttaatggacttagttttgacctcttgtaacatctcctaacttttcccagcctctgatttagaaagaattcattttcacttgaggagagaaactgtctcacttagaaaaggggtcctaactggactctcgaaaagtggaatctctagtctttgattcttacacagtcttcaaccagagtacccattgtggttgtaaagaaagctaagaagtcatgtagaaatac

SEQ ID NO: 49950 - DNA, 1031 bp, Homo sapiens
gccaacaacagatgctcacttgtaagagagaaccatgcctgggagatgaatgttggatgctccttaacttctgagtttgaaaccttgactcacttgtcttataaccgtggacgtagaatatttgttagattaaggtcatagctaagtcatacaaattttattatgatcagtacagtaagcatagctggggtcaaagcttttatggaaatcacaatgttaaggcctgaagtccttaataatgcttgagaaagaatggcacttttatcatcatcattatcattgtcatcatcattattatcatatcaaccttatatcacatgttgaaagcccagtgtggtgaactgtgctaataattgttataatttatgtatttcattattgatatttcaattttgtttgaacaactgtagggatcaatttaaaataaaaaggaggaaatatataaaaatgtatttagaatagtagcctcattgtcttgtcttatcagccagataagctttgtgctttgtagagcatctctcactgaaggatacctaattattggataaacaattagttctttaacagttcttaggctgggtgcagtggctcacgcctgtagtcccagctactcaggaggctgaggcatgagaatcgcttgatcccaggaggcagagggtgcagggtgcagagatcgcacgactacactccaacctgggtgatagagtgagactctgtcaaaaaaacaaacagacaaaacaacaacaacaacaacaacaaaacccaaaccaaagaacagttcttcacctaagtagaaaagcagaaaaacaatggtttgaggtctttgtgagtctgtggacatctcttaaaccatgtgtgagaggaccatttctttttctattctttttttttttttttgagacatagtctcactctgttgcccaggctggtgtgcaatgacgtgatcttgcctcactgcaacctcttgctcctgggttcaaatggttcttgtgcctcagcctcccgattagctgggactataggcgtgtgcc

SEQ ID NO: 49951 - DNA, 1033 bp, Homo sapiens
tgtttatctgtaaagacagggaggtgcaatctaagttaggaaattggtgacaaatagtcatagaacatgggtcacctggcttcaattagttatgtgacctttaagaaaacaagtgcccgtttcagaaaagactgacctttgaggctagagacatcaagctactcctctacttttaggaaaaaacaatgacagggttaatttaaaactctgatgcagacagagttgaaaaatccatgacagatttatataacgaacgtggatggtgttttgttttcccagaatgcagttttaaggtcagacctatgactcagagctgtgcacttccctggtggtatgcatcagtgacatgttgccagtctaatcgtccagaagggcttgtgcccagctcggcttgctccattataatccccagctgagaagccacctttcattttttttaaatagataaggaagacagcatgaacatttgaaactcaaatactatatgtagtttataacttttcagcctgaagacttgatgcacactaagttgcctctttaattttgagaagtataatctccattgccactaatccatcatggtgtggcactgcatgaggatatgttgtgtgcattgtcagtatcggcgttttgctgagtttactgttttttagttcattggcaaggcatcgtgggttttggtgcaaagagcatggatttggaatcaaaagccacttcctctctgggtggctgattagctgagggtaaccttcatatagctggcatgggatttccagatggcatcctctctgcatgaacaaaaacaatgtgccatttcagtaaactttggtgggtgctccctcatccactccagatcttttcatctctttccttttattccctccctttccttgtaaatcaaaactcccattcctttagtgctgctgatctcttttgggggttagaagaaagcagtctgattaaactaacttactactgtttttagttggttcatcctatctttaaaaaatgtatatatttcaaggctgggtgc

SEQ ID NO: 49952 - DNA, 1068 bp, Homo sapiens
ttgaaccataatgcagttttccttctcttcaaaacctctacttctaaatggcattcattgtgttttctagtgttttttctttggtatgacactagttaacctgtatttcttaccataaagctaggactcaaatactaagaggtttgactcaccttaggtggaactttatatagtactttaacttagaaatatttggaatcaatttctgcttataaaggtatcaaaagcaagtgatactaaaacgagtaggttcaaagttgtatactaaatagagaccttggtaagagagaatgagggattttcaaatatggtccagaagatagtctctgaaaggctaaaccagcaatggttactagccatgcaggaagccagtgctgtctaatcttacaaattctgttttcctgccaaatggcatttaggagcaactgataatttatttcttgccacttgccgttactggagatttatttggtttctcaactcagcccttaacaagaaagcaagtctttgttgagggcacaatattatcagtatggcaaagctaagacgaggcttctgtgtgacactggaaagaccaacaagaatggattaaagagagtgattttccatatgctgtcactgggacaggtacttttctctgtagacacacaggctaaaagcagtttaaaagcttccttacctaaacagtacatagttcaaggagataggccctgtgtccattgcgtctctagtttttgtttctaacccattatataaagaaacatcccagtttgctttttagagaaaagttcaagttagaaccattctctggtcttgctaagtctcttaattgtgacacaactgtcctaagcaactgtccttgcacaagaatgtcactcatctgcttcatctgccagctccttagagatgaggggggtctgtgtgtcagcaggaggcagaaggccctgtggctcatccagtggcctgatttcctttgtttggaggcttggttctgagtgagagttcaacagcctttgcccaggcggcttctcaaacacagggtgtggtttccttagctcactctctgct

SEQ ID NO: 49953 - DNA, 1056 bp, Homo sapiens
gatttgggaagtgtagaaagacctgagaaaacgagcctgtttcagaggaacatcgtcacaacgaatacttctggaagcttaacaaaactaaccctgctgtcctttttattgtttttaattaatatttttgttttaattgatagcaaaatagtttatgggtttggaaacttgcatgaaaatattttagccccctcagatgttcctgcagtgctgaaattcatcctacggaagtaaccgcaaaactctagagggggagttgagcaggcgccagggctgtcatcaacatggatatgacatttcacaacagtgactagttgaatcccttgtaacgtagtagttgtctgctctttgtccatgtgttaatgaggactgcaaagtcccttctgttgtgattcctaggacttttcctcaagaggaaatctggatttccacctaccgcttacctgaaatgcaggatcacctacttactgtattctacattattatatgacatagtataatgagacaatatcaaaagtaaacatgtaatgacaatacatactaacattcttgtaggagtggttagagaagctgatgcctcatttctacattctgtcattagctattatcatctaacgtttcagtgtatccttacagaaataaagcagcatatgaataacctgcctcctgtcttttcattctgcctggtggaatcgctataaggtgatactcctaatccagaaacctaaatgacttattttccttccaggatatactcactttagtgcaggcgcacagaacataggaattataaacaaacctgtaaaaaccacacttgattgataaataaataattaaaaacaaacagaaaccactctgacctaaaatagtatttcccagattttcacatccctgaaaaagaaagaaaacgatgaattggtttgatttggccaggggattagggagggaatccctgatgaagcatggcactgagaagccatcttggtccctgtttgttgggtgcttcctcggtgtgcctttccccttgtgccctctggagcctggggtccaggttga

SEQ ID NO: 49954 - DNA, 1102 bp, Homo sapiens
tccctcccttccctctcatctcgtcttcttccttctccctctcggctccaacgcctactgtttcggccccaccttcttatcttggctcctccccttcccccccttatcgactccttacccagtctctttttgttctgccagtgctctctcggctcctccccctcctcctttctcctggatgctacgccctctcccatctccttctctttcccctccctctcggctcctctccctacccctccctctcttctcctttaccttcctcctcactgctgctttttctagtctcttcccctctgctcttctgttttcctttttactgctcctcctccttcctctaagtccttcccacttccctccctattggctgctcctccacctcccttttggcttctctcctgcctcaactaactcctcccctcctccccaacgccttcggttccctctcagcatctgtaacccttcccttccctccaccctttccctcgtgttcttacacaatcttccattctggacacatacactcattgtggtctttcttaaatacatccccaccatgctgtgttacccctcactcatatggtctcacactcttacccccctaattcttgttaatccacttgggtctcctgggtcctttctctgcaaacatagtgttatttacttctagagatttgtgagaataaaatgagatagtacatgaaaagcacttacgacggcaccttgcacatagtaagctttcaataaatggtaactgtcatcattattacttttctttagccagggattcctggcacaattcctcttcagcgtgtccctcaaccaccagtaatttcttggctcccttccttagtagcctcgttgttttcattgtaagctgactcaaaaggaatttttcttgcaagtaatcaattcaaaaagtattaataaataagacttatgttctgatctctagttgcctaatctagggtgtaggggggtattctggtagaaggcatcacaaatgcacacaaagttgagaatggtgctggtgccatctgactatagacttagccaactttaaggttctaggagtttttaaaggctagttctaggtgcagca

SEQ ID NO: 49955 - DNA, 1055 bp, Homo sapiens
atttctcttgggcaaatacttagtggaattgctaggtcatatgaaaagtatgtttgactttataagaaattgcctaggccgagtgtggtggctcatgcctgtaatcccagcactttgggaggccgaggagggtggatcacctgaggtcaggagttccagaccagcctggccaacatggtgaaaccctgtctctactaaaaatacaaaaactagctgggcgtgatgacttgtgcctgtaatcccagctactcgggaggctgtggcaggagaatcgcttgaatccaagaggcagaggttgcagtgaactgagatcgtgccactgtgataagagcaaaactctatctaaaaaaaaaaaaaaaaaagaaacaaactgtccgattgtttttcaaagtggttgttaccgttttacatttctaccagcaatgtatgagaatgctagttttgttcacatcattgtcagcacttcgtattgtcagctttctcttttactcattcaaataagtgtgtactggtatttcattgtggtttgaatttgtatttctgtaatgactaatgatgcttaacatctttgcatgtttttatttgctatccatgtctcttctttggtgaagtgtctgttcaaatcttttgcttgttttttaattgggtagtttgttttcttattgagttttgagagttctttatatattctagacaaaagtcctttgtgagatatgtgatttaaaatattttctcagtgcttatcttcttaatatcttaacagggtcttttgcagaatgaaaggatttgatttggatgagtcctgtttatcaatttttttcatttatgggtatgctttctgtattgtatttaagaacgctgcctaatccaagatcacaaaattttcttctgttttcttgtaaaagatgcatagttttatgttttatgtctaggcctctgatccattttgacttaattattggatatatgtgagttgtggctcaaagttttttttaattttgtttatgggtgccctgtggtttcagtactaattgtagaaaagactgttctttttc

SEQ ID NO: 49956 - DNA, 1047 bp, Homo sapiens
ttgtatgtaactgaaggatccttcctgggactagctcattgcctttacaaaagataaaacaaaaacagaaaaccagaagaataaaatgagagtccagtgttccaaatcaactagatacacatcaatataaatccacagtgtcctggcaaacagcatgctttcattttctgtctcatcctagagctcgaatcctgattcatctcagcagagactccacaggcaacaggaaagattatggcattgaaatactcatttatacttttatggtagttcaaaatggtggtcttatttctgggcaagcttacagaccatacaaggtcagaagcataacttaaacgggtgctaagactcaaatgaaaaaaatgtaaagaaaaagaaaaacagaaaaccaaaaccaaaccaaacaaaaaaaaaaccctctgggaatagccagggcatttaaaggaaccataaaaatgctaatagtatttaaacctccctttttaaaaaggggattttttttggcttaaaatatttcactctgaatgaattatgtcaactgtcaatgaaagaatgttgctaatacagtgtggacaacttttgcaatgtaaatccatgccccttgtttttacatggtgaacttcaacctagcaattattacaacaaatgttagagtctaaagctcaaacacattttagcaattttgaaattgaactgcctacaaaccaaataaaatttacatcacaacaaacatttccgcctgactgtggggacacttgggccttcctcattgatctcaggaccttttcacacaggtgcttttcttttttatttttatttttcggagacggagtctcactcttgcccaggctggagggcagtggcgcgatctcagcttactgcaacctccgcctcctggattcacaccattctcctgcctcagcctcccaagtagctgggactacaggtgcccgccaccacgcctggctaatttttttgtatttttagtagagatggggcttcactgtgttagccaggatggtgtcgatctcctgacctcgtgatcca

SEQ ID NO: 49957 - DNA, 1055 bp, Homo sapiens
acataggaagaaatatttagaatgtgaaaacatgaacttggaggacagttacagatttgttaaacacatattaacattctagagtgtactttcaaaagggaaattgttgagacgggttaattgagtttatatataaaaagggaggttatgatttgtcaagtgagaagtaatttttctggccaaggaatgataacagctgaaacgaatctctcaaaagctaggaaatttggcagaggaatattgtggctaaacaaattcattagagcagaaaggtattaaaaacattttgagaagtggagttaaatcatggaaaaccaggcttccttattaagatgccagaaactgatgagacataaggtggaggttttgttttgtttgaaagagcttgaagctacatcaacaggagcaaagtatgagcctttggagagcagaatagctatacctactgaaaaagttgttagtagacagaagaaattgtaaacacaatttacaatgtaaacattgtagaaatagtaaaatgaaagaacaaatgactgaagttgattgagtaaaggccaaatcacttgtaatgagagatgaaaaaccatccaaaacaatgattgtaaataaaaaattgagaagagatgacaaatatgatggcataattaaaatgatagacttggaatggaccttgggagaacttacaacgaaagagctaaccagagattccctgaacagtagacctcaaagcctaaactggtaatatcgtagagtggctattaatacagtctctctctctggtctctgacaaaatgtccaggaggggagaagacagatgtaatttgtggagtgggttcagggataattttctcatcatagaggcttatttatttatttgtttttgagacagagtctatgttgcccaagctggagtgcagtggcgtgatctttgctcactgcaacctccgtctcctgggttcaagtgattctctagtctcagcctcccgagtagctgggattacaggtatgtaccaccactcctggctaatttttgtagtttagtagagattgggttt

SEQ ID NO: 49958 - DNA, 1096 bp, Homo sapiens
ttgtgttttattataccaagttgttgctagctctaccttattaaaatcttcagttttaaaggctgaaagatcaaaaagagataaaaatgtattaatgctgattgttaaccaaccagtaagtatttattaagcatcttctatgggcttggtaacatattaattgagaataaggaaacattaagatataatactatttttattgagttgattatgtgccagctatttgcacacatttatctcacttaatttttacaattgccaactgaagcccagagagattgacttgttcacagtcactcagccagtaagtggtagagccatgattcattcaaacctaggtttgtctgacctcaaagctcattctttcaaagtacaactctctatgtcctcctcaagaggcactttctcgagctagagccaaaccaacaactaaagggtgcctccaaaatctgctctgtagtcctctatttgaccaagtggactgctcttaactgggggaactaagactggtgcatgtaaagcaatacaatatcaccctcaggaataaaggatgacaatagaatatctctggtctttcccatgccccttcaacccttctttaaaaaaaacatcctttctgttttactacatgattctgggatacagggagtcaaggctagtgtaacctctggaataattccattacgttcttaattccagtttattttgatctcagtttacatttatggaccgaagaaagtggtaggttctgtaggagaacaggacacagtcatccctattctcaaggatacagaaaacttctgggtcctgttcttttactcagtgcaagtagttatagactaactatgggccttgtggtgttcagtattcttcgagttttgagtatcatactaaaaagtttcaacagaaagtctcctcttaaagaggtgttctattcccccagaggtaatcagaagctgcattctctggcattcttgtgttgtgcatttcacgtcctctggcatctcatgactgggttggtctctctaccttttcctgtctaactgctgcttgttttttgaggtctttctgcacaaagtggtttctggtcacgtca

SEQ ID NO: 49959 - DNA, 1031 bp, Homo sapiens
gtggaaaacctatctcagtacttaaaataatacatattttcctaaagaacagaggaaataattaatttttcttggttttgacatgtgggtcaatactaggagttgagtaagcactattaccattattccaaggggcttcactaagctctccatttttacactatcactacaatgtagtgataatgtaagtcactccattcctcctctccttctccctgcctgcctccctgctcagccccctcttctctaagagtagatgcaggtattattagagaaaaatgattatagttgtagacagctgctaatgctggtccatgtggcatttgacacagtcccaaaaatgggagaagaaaaaaagccaaatagagcacttcctttgaccagtgagttttatcatcaataagtagttggatgccttctgtgcaaataaagggagaaatgtttgccgagtacatttctaaactgacaatgaatagtagtattaggaatgtcatcaggctgagaaatctcttagcaacaactgaaaaagcgagactatattcactttatattgactttactgaagatgtactcacatcttttcaatggttccgggctgggaatagatttctggcttgtctcagaatcataaaaacttcatcaagtcaaagtgtgtattcagcaaccctcccagggctgtacccataaccattactcacaaagtctttcatcaatgcatgctttaaatggttaccaattgatatttataaatttcttactcctcctaaagaatggcgcagggagaatttgcagcaatatccaggcaggatattgaactggtgaagcattttacctaaatgggtattattaggtctctgctgtagtacaaaggaaaggaattctctaaacaagtctacaagggctctgcgagtggctcttataacttgactttggggctgctgacaggttatgggaatgccattagaagctgtttcactacttgattttctaaactaatatgagacattttgaagagaggtgcagggaaaaaa

SEQ ID NO: 49960 - DNA, 1025 bp, Homo sapiens
aaacacaatgttagtcaaggcaagtaaagcatatcagttcaaccaattgtctggtgtagtgacatcaaggcccaaggtcagtatcctctggtgtttgtgccaaagtatgcaaatcatgccgggacagtccagtttctctggtgggaaaccctgtggcttcctccctgctgctcactaccattctcgccagcagaatggtgacaaaccagtagcaataaagaggtgggaggacttgagcctgagctcccatggctggcaggcacagtatgcaagggaaacctttgttgctgctccaaccagtgttcattcagcattctcttccccaaactgtgacccagcacaccttggcacactcctttataaaactgccaaacgccagcataaagaaaaccagtggcagatggactggatactaacttttacaagcagtcattttggcattatgcatccagtctttgagtaattctcctccccaagattaatgaggtcaccatgggagtttgtgaatagacataggaggtgaaactgccacattcctttaactcctcttttttggctgtcaaatgaaattactcagtgtggctttagtagtgcccaaggcaatcacaaatttagcacacattacacatatccattgcatctcctctactgtgccccttattcaaagtggcatttgattgtattgagaaaatatttgttcttatgtaagcttccttagaccttataaaatgtactgtcacttgcaatataactgatacaaagatgtttacataatgtgacactgatctttttgaatttggaagtggcattaatgcataaccttttttccagaatggcatgcaagttttcattctacattttccccaaaacataaatgttcaaaaacttatctgtgcagttaataaactttatcatataggaaactttcagtgaaaagtaatacagcatgtcacctattttctttcctgagtataaggactcatttgtaagttttaaaattctcaagccatttgtctccctaaata

SEQ ID NO: 49961 - DNA, 1082 bp, Homo sapiens
tgagtggagcttattaaaaggttttgtgctgaatatcttgaaaaaccaccaattgtacctgatatatattttttaatatgtagggctcttagcttgattagtgtagggtacactcttgggatttctatgagagaggaaggtcaaaatcttcaagtaagtgactttcctattggcaaagtgaggattattaattcacggttaatttgagctttgctcttagatttgtacattgaatccagggtactcaaaagcggacagaaacacttttatttttcctgcatccccccaggtagatccaagtagacaactttttaactttcctttttctgtactatattttgccctactgaaatgtggtctcttttgcaagtacataaaaaaaatcaaactacttaaatcccctaaagagagagtatgcattcaggcagtgattctatatcctgagatttgttcatattcatgtaggcagaaaattccggcacgacaacaaggtatccctctaaaatacgtatatggaaagcaattagtgtgactttgagctgacaaaacactcggtgaatagcagaaagaatatttcttggtaaggccttatggtagaaggtgatagagagagagagagagagagagagagagagagagagagaggaaggaaggaaggaaggaaaggaaaggaaaagggaaagggaaagggaaaagaaaagaaagtggccaggcgcgtattggctcacacctgtaatcccggcactttgggaggccaaggagagcggatcatcagagatcaggagttcgagaccaggctagccaacatggtgaaaccccgtctctactaaaaatacaaaaattagctgggcatagtggcgggcacctgtaattccagctattcgggaggctgaggcaggagaattgcttaaacccaggagacagaggttgcaatgagccaagatcacaccattgcactccagcctgggcgacagagcaaaacgctgtctcaaaaaaaaaaaaaaaaaaaaaaaaaaaaaaaaaaaagaaatagagatttatatctggtaaaatgtcaggtatttgttattaggtcattttga

SEQ ID NO: 49962 - DNA, 1058 bp, Homo sapiens
aggagaccagataatttttgaccttgtaggctaggctaaagagcgtaatttttattctgtatacagtggacagtcactagaaggtgtagaatagagtagtgataaaataagatttactttctttttgaaaacccaatatttatttcttccagctttattgaggtataattggcaaataaaaattgtataaagtatgaaacatgtttttataaatgtatatattgtgaaatgattaccatagtcaagttaattagcatgtccatcacctcacatagttacctttttttgtggtgagaagatttaagatgtattttcttagctaattttaagtatacaatatagtattattgattatagtcaccatgatctacattagatttccagaactgactcattctgcataactgaaactctgtaccttttgactaatatctccctatttcccccatatccctgcccctggtaaccagcattgtcctctttgcttctttgagttcacctttttaatagaatccacataaaagtgagatgatgcagtatttgtctttctgtaccttgcttattccacttagcataatgtcctccaggttcatccatgttgactctaatgataaggtttacttattttttagggctaaatggagtggaatatatatggagtggaatattattcacttatgtttctccagtggctactgtggggcatatatattacatatatatatatacacatatatatatacacacacatatatatatatacacacatatatatatatacatatatatatatatctagcattgtgctctttgcttttgcttttttgcctctttgcttctttgggtatatatatatatatatatatatatatatatatatataaaataaatgtataaatgtaaggtatgaaatatatatatatgccacattttctttatccactcatcatggagggacatctaggttgattctatatcttggctatttttaatagtgatgcaatgtacatgagtgtccagatatctttttgacttacttatttcaatttctttggaca

SEQ ID NO: 49963 - DNA, 1049 bp, Homo sapiens
cacctgggaataaaactcaggtctcaaggcaagttcattgttccattttattacactgcctctgtctgtgccctgcctttgagttatctagagactgacactgtgttatggaaggttatttcctaagtaggaagactgcagctacataatgccagtacatccctcataggtcaattgtgagttttaagttagatagtggttgtaaatgcctctcacattccttacacctaacacatattctataatctccttgcacatcctagtactgatcatttatcttattttattgactctctgttctttattttgattcactttattacaaagtaacaaacatctctttttaccttcatatctttgatctcattccttagtcagtgctactttccttagctttctactttcactgactgctaagctgaatttactgcatgaattctaccagttggaaaaaaaaagcatggaataaagccctaatgaagagataaagcttgggagcctggaggacataagacatcaatgacaggaagtctgaggagttcctatgagtagcaatgagcagagttcagagccaaggtgaatgctaagcagacctataacactaatatgataaatgatgtaataagaaagtaatgatcatcttttccaaattaatacatcctgcaaagcacctacactataaagacagcaattccattcttgaggtttatacctgaagcttagatggggtctatgatagtccattttaattgccaacttgactgggccactggctgtccatatatttagttaaatattatgctggtttgtctgtgaaggtgtttttggatggatttgagtgggtagactgagtaaagcagattgccctccctgatgtggatgggcatcatccaatcaattgagggcctgaataaaacaaaaagagaataagaattgtttctccaccttactgattgggctggggcatcagtcttctcctgcccttgtactgggacttacatagtcagcactcctggttctcagatcttaaacatggactcgaatttaca

SEQ ID NO: 49964 - DNA, 1028 bp, Homo sapiens
atgtataaagttttgtatatacaaatttatgtatataaaaggctttatatatataaaacacttgattgcttcgttctttaacaaccataaaagtaccccaggacatcaaaatagttttttccacagttttggggaaaatgggtagtatacttaaagggctttggcagcatcatgctgctaaatgtttacctgcatggcagttaaatggtctcaggtgaatttgcttttaccccctccagaagcaggacaattgtaggaattttcactgcaagcttcacaatatgcagcacagtatctgagcgcagcagaactgtcactctggagtggatctgaagagcagtcaaaggaaagctaattgctttaccttaggcttgttcagttaactttggagaatatttccatatttgtgtttgaaatcacaacttgtcctctggattgaatcctgaggagaaagtcattccccagtctgtttttgctgacaatatgctgactcatgacagcttcatatctggacagtattttcatcccatgtggctgaatgggaaaatatgaagttcaatatggtaacttttaaacaaagaaaaattctggaaagcattttgcttctgacacttggattcacttaatccatcatccattcactcattcatttccttcaaaacacatttgttaagtaccaattacggttcagattttacacaagatgttgctgatatgacaaagaatacaaaaaatcctgccttagtgagctcagaatctagtgaagaaaatgaaatatagagaatattaatacaaagttataactacagcagcaatttttaaaaacacaacttaaaaaaacaaacagttatccgaagctggatcttcaaggttcttcacagaaaagcagagtaaggcccacagaggtttaaattgcttccttcctggaagtgaaatctcagggttaagaacatttaaaggagggatagattagtctaccttgggtgttcaggagatggaccgtctatgaggagaaggaattacacaaa

SEQ ID NO: 49965 - DNA, 1020 bp, Homo sapiens
ttgacaccccagaaaaaagtctatgcatattaatacatgatgtggttggcattataactacatgaaaaaattggcttcccttgtgataaaagcgaaagttctttttctcagtatatctaaaatgaatgaaagattcttagctgtatgtatgtttaaaatataatttataattattagaagaaaacataagggatatctttgtaacctcatggtaggaaagaagctcttaaacgtgacacaacaaagcacatattagaaaataaaatattgatggagttgactatatcaaaatgttaaaataattaaaaaacagaaagttataagacaagccgaacttggagaagttatttgtgacattcgctttaaaaatttatttagcaattgcaatataaggaaaatcaaattcatgagacacaatagaaaatggccatcttgcagaagaggaaattggaatatctaagaaaaaaaaaacacaaaatatgttgaacatcactagcggtctgaggaaaagaaaccaacacaataatctatcagatttgaacctgcaccccacaagtgtttatgagaaggtggttaaacattgctagtataagtaaagaagagcaatgtaataatagacccccaatgctaaaacaatttacattttaaatagaggcaactactatcaagtaaacaaaattaggtacttgattgatttaataaatttctgtttgtgattgtttcatgttagaaaaaaagagaaattagactgttcaggaatacaaagggatcagctcaacctacagttttccttttattaaaaaaaaatatctggaaacatccctgtctgacagctttgaagagagtagtggttctcccagcacggagtgggagatctgagaatggacagactgcctcctcaagtgggtccctggcccccaagtagcctatctgggaagcacctcccagtaggggctgactgatacctcatacagctgggtgccccccgagacgaagcttctagaggaaggatcaggcggc

SEQ ID NO: 49966 - DNA, 1023 bp, Homo sapiens
gggatagaaaagaatgtaatagtatacacaatatctgaggcctttacaaggttttaggagagtggtaattataaggggtatgaaattggatggttttgtggttattaatgatgcaccggagaaaaacaagcaaaggctgagtgtaacgaattcccaatttaaggcaaaatagaaaaatctgagggattcttttatataaagaacctctcatctcctgcagctgaagggcagaaaaagctgaggttatgaatcagaaattatttacaagggtagagtagctcaagaagcttgaatgcatggatgtgagggtggtctggctgtgacatctgtcaccccattgattgccagggttgattcggttgatatggctggctaggtgggtgtccccttcctgcctcaccactccatgtacatccctcctgaagctgcttgcttggtcaaagaggacaaccatccctgatagaggaggaccggtcttcagtcaagggtatacgagtagctgcgctcccctgctagagcctccaaacaagctctcaagaagattgaatgtttaatcctgattatgttagacagaacaatcacagagaagaagaaaactctgaatcttgggatggggccatctgtgtcaatatatctgcaattcttgattcctcgggttcccttgaacccactgggttggcccagtgtctcactgttgtctgtcaaaatagcatacattcttttcttgaagaaagtgcacaggtttttgctttgtacgacaatttagagtcacaattaatctccacccaccttctggccaacagaaaaataactaaggtgaagtcataacataacttggctagggaaagtactgggttggcaaaggagggaaagggagcatatgctgaatgaactggagatactaaaagaagggtataaacagggctagaccctggagatgatgactcaaagggagggaaaatgcagatggaaggggtgagtttatcaatatggaatggatctcttaggattaaggatttaaaa

SEQ ID NO: 49967 - DNA, 1050 bp, Homo sapiens
actgtgttttctcccaagagttttataattttagctcttatatttaggtctttgatgcatattcattgatttttttttgtatgcagtatgaggtaaaggttgaaacgtattctttttgcatgtgggtgtccacttgtcccagcttcattttttgaaaacactatactttccccattgaattgtcttggcttctttgttgacaaaggatttattatttctgccacaacccagctgtttctcactgtctaaacctttatgcctgctgccccgtaggcttagtggaatgcctctccatcctccactctcttttgtttagctagtacttccttatcctttaaggggtcagtaggaacctcaccttcttcagtatgttttcctttgtcttatcaacctaccaccatcacccacacacataccttttccctaaggctgggataggaacctcttaggcaatgatctatttgataagtactcactgagttcatactagacactctgcagtatatccgtaaatgaagtaaaacctgacaccaccctcagaaaacttactgttagtgagaaaatgggctataataatagagtggggtaagtttattgtagggataagcataggatgctatgagaatgcagaggacaggaatttaacctagacttctcagttctcccgttgaagttgacatctgaactgaaatctggaagaccagtaagagatagctatgtaaaaagaggggaaggacaataggaaagaaggaatggagagaggcccagaaactacagagtatggcacaagtagtttagcattgttgggtcacaaattctaaggatatgaaagataaagttgaagaagtggtggggctggggaggacagctcctgtagagccttttacagcgggagaaggagtttggctatggtcctgcaggcagggagaaaccactgaaggggagaaacatacagaataaatttgagtaagaagcttaaatctccccaagcccttttaaaataaattaagatataaagcctttgggtttctttatgctttgtcctattct

SEQ ID NO: 49968 - DNA, 1475 bp, Homo sapiens
tttcttaaggccatggaggtctgtttaattggtctttgctctcattctttcttgatgtccctgtgttcatgattttgtggttccttcagtgattctctcataacttttagcccagagctgcctccttactttgattgtgagtattatgaaaatatactcatatgcctcttaaacatcgaattattcttaaatgatctatcatacttttggctaaccatttatcagtgaattatcaatgaaaaagaacgaaccagattaatgaaccaggactcaaaaaacatgacttcttgaaaagtcctagaattattttatagattttattactctagtctaaaaaaaatgggtattgcacttttaaattatttatgctagttgtattcattcattcaaattatcaggtctgttgaacaatgagaaactagtatgcatgcctatctttcttcactactaatattaaagagatttacatgttcctataagaaattcccatttttcaacatgagccactaatacgtttggttttcattaatggcatgctagaactgaacactaaattttgataatggtatttaaagacagtggttatccacaagtttgggatgtcagtgtaacttagtttcgtcatcactggatatttacaagtgctcatcataattgtggatccagatcacaaggtcttacggactctggtctcatgttagctttcagatgcttactaagtttttaatttttgacattttttgattattcagtttaactactgtaccaacaatttttgattccttaggttttgagggaggtgtcattttaatgtcatttcaacagaggaatgtttagaccacagtacctaatgatgttataaaaaatggcactgtttccagaaaatatatactgataccttttaataaaaatgaagcgaataaaattttctataaagatgatatttaaacatttttttacctaaataagtaacattgagtttgtcagaccgagtgagctggtttttactggggaacatttgacctgcttcttagttattatattgctgatgtcattggttaactaaggcagccttgtgataagttttcagcagttaccttggaaaatgtcaacaagttctttcctattaacaaaaacatataaaatgtcatagacctttagtaacctaaaaagtacttaggctgtgagaggtattttctaaaacctgttagttttaacctaaaactattaataatttatggacccctcatatacagggtcaagataatttacatggctggcctaaatacagttgtcgtaatagttgataaagtgtattcatcagacgtccatttctcttcagagttcaaggcagcttgcctcgagatttcatgaacagtttatcgtaagagaagatctgatgggtctagctattggtactcatggtgctaatattcagcaagctagaaaagtacctggggtcactgctattgatc

SEQ ID NO: 49969 - DNA, 1025 bp, Homo sapiens
tgcaatttctttttcagggtatggtaccatttgtttttgtgggaacaaaggacagcatcgctaatgccactgttcttttggattatcacctgaactatttaaaggtgagaacagaaagaactttaacttctaatccttttgtactaaaatatacaaactttatagtagatctttcagcagttaggactcattctagcctgtgcaaaacactgtatgacttgtcaaaggtaatagagaaaatacgttgtttggcttataatttttttaaaaatggaagtctttataaatttaagtaccaatataccagttttcaataaaattttatacttccctttattcttctcttaaacccttacactcagtttaggcaatcctgtacatagcctgttaatccatttgatcctttctagcattttggttttttccagacaaaaatctgtgtctataactcttgcctttattgttccttttatgtcatttatcaaggaaatctaagcatttcatgaagttctttgtttaaatgtttaccctatttttctctttactgttattcaaaatacaaactatttgtgtcttctcataaatgttcagtttagttagtgtgatgcggttatgcctccttaaaatttcaaactggaagataggaacgaggaggctacaaggtgtagtggagcaagcactggatgggcaatgcagcaatttacttataagacttcagcaaatgaactagctgtgtgactttaggcaagtcacttccctacactagatgcttcttgaaattccttttggccaaaatgttctatactttaatgaaatggaaactgatctacttcattttcataatgttttatttgtatccatacatatcaaaattataatgtagctggtattaaatgtttttaaaaagcatttcaactctatttatggcattaagaatttttttgctgatttcttgaaagaaataaaaagtacatgatttctgcttgtgtgtaaataagaatgaaaggaagaaaaagtgtaatact

SEQ ID NO: 49970 - DNA, 1048 bp, Homo sapiens
caaggcgggtggatcacaaggtcaggagatcgagaccatcctggctaacatggtgaaaccccatctctactaaaaatacaaaaaattagccgggcatggtggcgggcacctatagtcccagctactcaggaggctgaggcaggaggatggcgtgaacctgggaggcggagcttgcagtgagccaagatcgcgccactgcactccagcctgggcgacagagcgagactgtctgggaaaaaaaaaaaaaaagatacaaatcaaagtactgaatccttggtaacgagacatttaaaacacatgcacatacccactacttaaacatactttgaaattacaaccatttggggatgtttttagcatttgtgcttgaagtagatcaatatttgtagttgttttagttccatttgtcactgttaactttcatttgtacctctggaattagcagtgctgtattcagcattggcacttaaaatattttatagctcttagaacactattttttaaattacattgatctttatactctcctaggattccagtccttccacaaattattatatgcagttttctttatactgttccattcttcagacagagttcaggttgtaggatcatctgaattttcttagtgaaatacaagccagtagaaaccaaagctcgtgtttttctactgtatgactatgggagctctcagtatagagaaacttgatcatacctgtgatagatataaagatgtaaattaaagtctagttagtgagttatttgagggtaaagccagaataggaaaacattttgtttctcttttcctgggcttcacaatctttggagaataactaattttattttaactctagtgttagaggcatgtatgtcttctggtaatcagtaatagtaattcattttacctgtttgtttctcactgttttattctacttagaagaagacatgataggattgtgagtttttctctaactttggatgcagtgagatgaccagtgtgttccagttaaagaagaagagtgttttaaaatcataaaccaaataaaga

SEQ ID NO: 49971 - DNA, 1032 bp, Homo sapiens
cataataatcctgcaaagtacaggtactttgtctaagaaacattggaagcaggttaaatgttttgtaaactttgaaatatatggtctaatgtttaagcagaattggaaaagactaagatcggttaacaaataacaacttttttttctttttttcttttgttttttgaagtgttggggtttggttttgttttttgagtcttttttttttaagtgaaatttattgaggaaaaatatgtgaaggaccttcactctaagatgttatatttttcttaaaaagtaactcctagtaggggtaccactgaatctgtacagagccgtaaaaactgaagttctgcctctgatgtattttgtgagtttgtttctttgaattttcattttacagttacttttccttgcatacaaacaagcatataaaatggcaacaaactgcacatgatttcacaaatattaaaaagtcttttaaaaagtattgccaaacattaatgttgatttctagttatttattctgggaatgtatagtatttgaaaacagaaattggtaccttgcacacatcatctgtaagctgtttggttttaaaatactgtagataattaaccaaggtagaatgaccttgtaatgtaactgctcttgggcaatattctctgtacatattagcgacaacagattggattttatgttgacatttgtttggttatagtgcaatatattttgtatgcaagcagtttcaataaagtttgatcttcctctgctaaattgatgttgatgcaatccttacaaatgattgcttttaaaattttaagctaggaaaagaaatctatagaaagtgttctgttacaaaatgtaactgttaccattggaaatttcacgtcataggaagttagcctttatctaccaactttcaagaacttgtttaataaagcgaaaaactcaaccaaatggtacaaaaccacagtgtaccattaaaatatgcactaagtctcttttttacaaaggctgtattcagcaaggcgctaacttgcttaaatgtgaat

SEQ ID NO: 49972 - DNA, 1033 bp, Homo sapiens
tcccctcaaccccagtcccatttcctagagaagctacttttagcttttttaatgattctagaatatcataatactaaaaatctggtgttctttcttgctgtttcattgttagatagtacatattgacagtattttctgttgctcttatatatgaggaatttaggaaactacactcactgttttccagatttcatctcaacttcctgattttattagttatattatttttaaaacagccagtgatttcattttcaaatttgaacaatgtatatccagctgtatttcgtgtttcatcaaattttgacactatttatttactccctactttgtaaacaaaataaactaacacatacacacatatcccacgtctccttctctccttctgcctcctgttgtctcctacatcattactcttatgttgtcaatgtttgtaacatttacagcgtattctgtaactactgatttgaaccatatgaaattgtaatttatgttcgtcaaaaatagttaaatatcagcaattttatgtggttcattccatgtttgcagatgatataatcttatatttggaaaaacccagggtccaccaaaaaactattagaactgataaacaaattcagtaaagttgcagtatactaatacaattatgttttctgtgcttgcctatagcttgattctaaaagttgaaagccaatagacattcgtagtattagatatatgtatgtttctcatgacactaaattttcataagatctatggttttaaatagcatttaatgactttcataaataaattcccagtctcaacctgttccctgtaatacagactgctatctaactacctacttacctgtgcattctaacatgctatctcaaacttaacgtgtccaaaacatctttttctctttaattttttatttataatttttgtgggtacatagtaggtatatatatttatgggatacatgaaatgttttgatacaggcatataaaatataataatcactgtctggggccaagatgactgactacaagca

SEQ ID NO: 49973 - DNA, 1133 bp, Homo sapiens
ccctcctctttcactatcttttaaattcctgacatttattcatataaacagttcagtagttactgttttatttggttccttgaataggtctgacagcatttggaaaaagacagcttatgatgtgggcatcatggtcttatttcactgtcatccttttaattgtattacttacatctgataaattttcagattattttctaccttttattactgatctaggatacttatggcagtgttttgaaaggtgagaaacacaacactgctttctgaattttttctaaagactatggtgcattttatgagataaatgtttaaaaggttgttatgaatgagacagcctacactgaatgactgaggagactggacagaatgaaaccttattttaaaggaaaaataagccatttttaccttccgtaagtttactttgaaaggtaataaacaaattgtttcctcactggaaaaaagggaggaaataacatattcgggaggcagaggcctttaatatcttgcaggctgtttgactgtattctgaatttcatgtccaaaactgtcgttgctaatgtagacttatgaaccatcatttaaaaaaatccaaggaggcatcttgcatttaaattgtagaattattagaccttaattttcaatgaaatgaaaagacactagcaattctagctgttttgctttagctaataaagccatacttgtttctatttccagtgtcttatttccaggaagactgaattttcataaataggcaatggataagcaagccttcttagctttagtactgatactttgtatccctccattatttattaactggacaattaaggccctctgtgagatacattttttttcataatgatagtctcccatttaaaaatagagttgtaaaaatcataaaagctataacgatataaaaagaaatgtgatcaatttttatgaatcagtgtgaactaatttcagtggtgtgcaggcaaaatggtgaatgcagctatggctcagttctcgtgcaatgtatgatgtgtaaagaagaaaggagaatctcccattggttctttgcaatggttgctcctgattcatgtcccagcagtggtataggatcttagaacttcagatctgtaaaggtcctt

SEQ ID NO: 49974 - DNA, 1092 bp, Homo sapiens
atccagtataaagctgtgaagcagccacagttggtgtctttcgttagtaaaaatcatggacatccttcaggaaagcaaaactaccctctcactgctagtttccttcttcatagccaagacgcgagaaaaaataaatgtctaaaaattagagatctttcagctacgccagatgcctttgaaaagaaacaactcagtcattcaaacagcctgattttatgaggtgacattttagattatgatatgacattgcagatttgacatgattgtgctaattgtgagaaaatatgctactttgatcaaactagaatgaaggaaataaaaaggcactgtggctcaacttgtaataaagagcagctcatcctcacagctttgtgattgttgctatagttatctattcaacatgggatgcacaatacagttaacgtttcattaccagtagcctgttgcgtgcttattgttaaaaggaatttaacatacaagtttttgtatgttttgttcgcctaattctgattcctcgtgctgactggcatgagacagggagctggattgtattaaactggttttattgtgatgtgactatgatggatgtgacaagggcctctattattcgctggggagtgtggccattaatgaagccattagctgagctaaggcaagtgaagaaaatagggaaattaccactattctgaagccattaagttgtaatccaccactttctctccttactcaaaaaggcatcttctttttaaggcctccctgactgtcctttaaagattcattaattcattaactttccaaggagatgggggtggatagcatagttgaaattttaatcagttcagtgtatcatattattaacattatggcagtgtctgtgctcattgctggaccacatcaggttaattttaaacaaaccacattacagcagatgtctttctgttctatgcataacagaagagcttccatttgtagagtactttagatttcaccatgctcttttatgtttggttgatacccagggcaggcactatgtacctctgttatacagatgagtgaactgaggcttagtgaggctaaaataacctgagggat

SEQ ID NO: 49975 - DNA, 1041 bp, Homo sapiens
atagtatttctttctgctcacaaatatacactcttgatcaacaagagaacatttattgcaatcttgccttgcagttggcagagcagaatgaatcgttttgaaatataaacttcctcagatctaaaatatatcacaggaaaacacaagacataaggggagtggattatgaaataaaaggagcatatttcgtaatctataggttataatcattaaagattgccattagtaagatgctgggccaaatgtgtaagactacatttggtaagcaggtatgaaaagctcatgatttccttgaaactgttctttggaagcaacactgcattgtggaatggtaagaagtggccccttactggctgtgtgaccttgggtaagtcactttccctctctgacttcagtttcctcatctgcaaaatggtagtagtaaaaatgatggtgatggtgataatgatcatgatgatgaggaggaggaggaggaggaacagaagtaggaataggaggaagaggatttctctatctagggttgtaaaatttagataagaaaatctagaaaactctgcatatagaagatgtacaatgtgagtcatattcctttctactttccctaagaacaaaccatgttagtacttaacatttcgcttttaccaagcttttagcggtcgtttctttgctattcaatgagaactgaagttttgctgaaatatgggaaaagtaaccaaacatctctaaaaaacaaaacaaagcaaaacaaacaaaaatacaaggagtaagaaatatgccatattttctagacacattttatttcagttttttcccctgggtgtagagttagggtgcaaaatctatcaaattcttctattaattttaaattaagaaatgtggagatttgctatgttagaaccaaagctttcctgattctctgaggataactgtgtgtgtgtttgacctctagagctgaagtcacggtgttagccccttgtgacattagtgttcagaagctctttctatgcatggataaatcttggttgtctagcacaggttgtg

SEQ ID NO: 49976 - DNA, 1037 bp, Homo sapiens
agagttttagagtttggtaagattgaacgattgactgccaatgccttccacacacaaaaaacaaaaaagtattatatgtttgcatcaacactcgttcaatgctgaaatacagctagtcaaaacccatgttaaagtttttcatatattacataacaccgctgtataatacattaaaatacatactggattggagataaattactgaagaaataccagatttcgtttgtaggttttaactgcaacataattcattgtgtgatttacataggtagacataagtacatttctttccaaactatatagcaatatacgtataaaagctataaagtaaaaaaagcaaaaccatactagatgactgctaagaaaagatgaatgttaattttttaaatagcaatctgatagtaattttaaatagcaatctgatagtaaacatgatacaagaggaaaggttttactaatagacatttaaaaattatgtcttcataaatcaagaggatatattacttagagctagaaataacagtgccgtgcttcctgttttgaataagccattatgcatttttgtctttgcatccctatttaatttgtacagtgttatttattccaataattagtgttaactttcttggcagtaggcgttataattacctttaaaatttaaatgggataaaaatgccttgagaacatggtttaggaaaactcttaatatttattttcacttgtctctttaattattcatttatgtagtatttgaaagaaaatcttgagaaatggaaggccactgacagaattacttcccagatgagcagacttggtttttcagttggttgggtgacattctggactgttgaggcattagtgatgccaaatggaagctctactacccattcaacattgccaatctaaatacatttcacttagaacagcacaggccactttttcttattctctttcttctgaaagtaagtcattatttaaaataagccattattctgaaaataagccattcacatgacttctgatttcaaatatacata

SEQ ID NO: 49977 - DNA, 1110 bp, Homo sapiens
aaaaagaaatctttttcaaaacattatacttgtgatttggtttaccaatagttaacattctatattttttagcaaaaacatattaaaaatgttcctaacttgtattatttggatgtgttttttttcttgtactgagaaattccaaaaactttacttggatagataaatacctaaacctcatgtctttggtagagtatatcagggaattgtggtgctcaggaaatggcagatactattctcattattattattgttagaaggacaaatagttctagagtatcaggaaatgagagtggatatagcgtggtaacactcttgtctgaggtgacctgagtagagagatcaacagaggactttgccatcatctagctgatgagttgtgtggtcttggattttcttgtgttggttacacatacactgagcaggttgcgtctaccctctgagctgactttctcagctgtatcagagggagaagtaatctttgctttttactttctttaaaaggctgtgtgactatgtcctgaggttgtggattgtgagtgctgtgtaaactgtgaagtgtttcgtgcttgcaagatgagggcttcatacatcttcagtagagctccccagatgcttttatctgtgcaattaaaattacatatgtgttcttttcaatttctatggttgcaaaaatgaatgtatcagtctacgtagtactcaatgacagaatggatttacttttaaaataccatgttttgagctctagctttgcatatttatgaacttctggagttgtccatgtggatgtttcctatgctaccctgctttcttgcgaatgaagaggtctgaaatgcttctggagtacttctatgtcagttttgcttatatgcatttaacatgttggtcttacaggggagacatgtcttttttaagtataaagtacatatttctggcctttttcttccttctctattgataagttgtaactgcagtttttgtttgtaggctttccaagcctggtgatttttcatctgattcaacctttctcttgacaaaacaccagcctcaaatgctttgcccattcctggtcaaggcttagacttgcacccttccctagtggcaagagac

SEQ ID NO: 49978 - DNA, 1183 bp, Homo sapiens
tgtaggagaaagcacattacaggataagagtgtgctaagcaacctctagtagacagggcttgttctctggagaaatctgcctattgtgattgtgtgggcatgtcagtggacatgaggagtttctgattagaaagcccatcttgtcctgggtagccaaatagcaggtgcttaaaaaatggtggtattgacagccatcaccatttcttaactaggcctcatggattctgcctagttaatttgcctgctttctctgacatgatttatttgttcactctccgtgcatgttgcttatttcaactggggttgctgtaacaaagtaccgtaaactagaaggcttataaacattaggaatttatttctcacagttccagaggctgagaagtcccagatcacagtgccagcagatttgatgtctagtgatgtcctcttacattcttagtatcttcttgcggcaatcctcatgtggcagaaaatgcagaaaagcaaggcagctctctgaagcctcttttatcggggtaccaatcccattcatgaaggaggagccctcatgacctaatcacctcccaagggcaacatcttctaataccatagtattgagggtgaggatttcaacatatgaatttgggggaatgtaaacattcagactatagtacatgtactattcccactgccaggaataccatcctattttccctgctaataatcgactctacctttgacaacagagcaaacaagttataatatgaactttgttagtcattgtcttttatctgctgctgggcttttcacctacctttgtatccagtacttaccaggatgtcctgaacccaggatgagctctcttaatgtctgcagaaggaaggaagacaagggaggagaagtgggcaatttagtcaaaccactggggaatcaaacaacttgttaataatcccaactatggagtttgtccatctagtcctagccctgaatagcatcccaattttttaaaaaatgaatttcaagtgagagaatgtcatgttcacattagtattgaatgagccacagcacgtccctgatttatttatgttgtgtgaaaatttaagtagtgatgtaagaacatatcactttggggacatttgctgttttttaatttaacctttgtggcagcagaaaccatctcctcaatgaagacccctaatgaaag

SEQ ID NO: 49979 - DNA, 1029 bp, Homo sapiens
attcattaaagacaggagagtaaataggataacatataaggttaatagaataacattggccttcatattcccaagattgtatttcccatttggctatattagcacagagactagattaataagaaactgcttagggcttgtatgatgtggtttttaatatgcttgagacaagtctgtgactgtttagaaacctgtgtgctgaatttttttattacaattaggtcttctccttcagtaccaatttttttgacttgtaatctatatacaatagaatgctttgagcatacagagatgcatagaagtgtaatgtttttatgtattgtgcttatctcatggtcagtaatgaccaaatactggctagtgtttaataaactttatgaattatccaactatgagcatttcagttgcaaagccaatagctcttttgcttagcttagcacttttccacaatgaccttaagtcagacactggtgagggtatgttgtttgccccaagatccaaacagaaacaaaaatggatatgatctgtcatttcaaaatagataatgctcatatgtgacagggatgaccacagccttttcacccacaaagagcacacagcacatatatggttctgtaaagagtgtggcagtgagagagcagccacctctggaaagctggggaccactaagtacagacttcagttgaagtgcctggagaaaagagtcctcatcatgttgccctttctgggctggaggaagtgactggacatcactggtcctttcttcactcaaaccccaccctctgtttggtccaagcacattcttttccttaagtctcttcatcatcccaattagggtcctaatccattcttgcagcctggaagtttcactctggagtcatccataagtaagtcccaggaaatgcaccatgtgtgcctaacttcattggtagtttccaagccttgagtttaatcagggttctagaatatacctagaacagtatgcacatctcaagcaaaagttatataatgaaacactttgccactttg

SEQ ID NO: 49980 - DNA, 1032 bp, Homo sapiens
ctccttccttctctgcccgctgcttttccatccaaaccactatttttttttcatttcattgccacccaaaatctagccgttgctaaaattagccaaatggcacttgagatgacctaattagaatgtcattttaatagagtcagctttggctcccagccaggcagaagagtacctgtccagtggcttctgggcctcacttccagggatattcacccttatctctcagaaaacacttgcaggtgatgcgtatccatcacctagctcttgtgctgtgttccacctcactggaacaggagcacagaatgctttccattcctgccccagatggaaactcctctctgctttatccactattcaaaaggaactgctgagcagttttctattccaggcttttctctcatgcctgagaatctggctctggcaccacacagcttcattacaattagctccccgagaaggaactacagtttcccaaagtccaaaaggttttggctcagggcatgtacactcaactattaatactctcacctgttgctccacaccctcaccgctctcttattttccctccagatcttagaagacatctagccactttaattatgtgactgcagatcctagactctaccgccctaaggttaggggtggatgtggcttaccttagcatctctactattaacctaagccttccaaatagcagatgctcaatgaatcttttgagaaaaaatgagccagtgagcagggggacctaattattcatatgtaattctcttgcatgatcaaataagccaagcaaatctggtaagacttcaggatagtgggttccctcctggcccaggacaggtctaaaaatgccgtccaaaagccaagttctgaaatcaagaaccccaaaagacagcttggttgtcttctccactgtgggttctaagggccctcactgaaaccagttatgtgaaaccacctggtagttttcctgaaccaaatcttgtggaaaataaacttattaggctgtccgccaggcacaagaattaccct

SEQ ID NO: 49981 - DNA, 1145 bp, Homo sapiens
tttaggatatatttttgagatatctttcaggagtccacaggcaattccatatatttcccagtttttgccagctgccctttattggaatagcttgcaggaatacttctgctcactgtgctgatgcatccagtgttaggacaagaggggtgaggctgaagggtacattgtaatgtcactgtgacttgcagcacttggcatcaggggtatgttggcagtggaggagaaccaagattcacaatgtacagcaccagaagctagtctgtggaaaaatcttccagtcatcaatcagatgtgtaaaattgtaagtgaaggattccattttcactgaaaagcaaaagtgctctcttgtcagaaatatacccagcgtgcagtgtacgcaattgtaaatacaagatacatttatttgcacatttggaaggggattttgtgaaatggcatttttcagaattcctgtgattgtaggacatggacctgtagaaggactagaaacattgagtagtatgcagaagagttttgctgggcaggcacagaattaaactgcgcaaaccaggagccagagacagctaagaaacacaacctcttaaattggtcgggactgaattcccaaacagtcacagcatcaaatgtgtcctgagctagaaagggcacagtcatagttcctgtgactgctacccttagaaagacctgcttggaagttacgctccctgctggcatctggaaacttgactctcagaatttccctagtcaacagttaactgataagatggctcactgtgccttgactgttgatacagaaaacgtagtttatgctgaatatctgctttccttctgggagtctggaattttggtgcatgctaggcagaggaagtctctgttaccaaacaccagtgtaaagtgtgggcaatgagtctgggcttctctggccagaaacatcacacgtgccactgcatatttgttgccgagagaagcatgtgctctgtgtggcccctcatgggagggagagagcataaggaagtctgtgcatgggctcctccaaactttgcctgtcttttctgcttgtgatctggctgtgtgccctaactacattgctgtaataaatcttggttgtgattataactatatgctgaatcctgtgtttccaacta

SEQ ID NO: 49982 - DNA, 1032 bp, Homo sapiens
cattttcctgagggctaatgatattgaacatcttttcatgtgcttatttggcatctgtgtatccttttcagttaaatgtcttttgcctcttttctaattggattttttttttaatgttgagttttgagagttctttatatattccagatataagtcctttgtgggatatataatttgcaaatttttctctcagtttgtaatttgtcttttttcatctccttgaaagagtttttcacagagcaaagtttttaaatttgatgaggtataattttcaatttttacttttatgggtcatgcttttgatgccaaatgtaagaactcctcacctaatcttatgtctgaagattttctcttgtgtttttttgaaaagttttacatttttacatttcacactatgttccattttgagttaaagtttgagatttaagtcaaggctcatttttctttttctttctttccccccctccgccatgtatgtccagttgcttcaacaccacttgttgaaaaaactctgcctcttcctttgaattggttttgcacctttttcaaaaatcaattgggcatctttgcatggatctatttctgtctctgatactctttttcgtctctttttaagagtcagtgtctcactccatgcccaggctggagtgcagtgatgcaatcatggcttactcctaggcttaagcaattctcctgcctcagccttctgagtagctgggactacaggtgtgtgccaccatatgcagctttttttattattattattttttgtagagacagagtctcactctgttgcccaggctagtctcaaactcctggcctcaagtgatccttccaccttggcctcccaaagtatatgtttgctattctgttctgttgttctatgtgtctatacctccttcagtaccatactgtgtggatcattattactgttgaattttgagggttttttttttattctggatacaagttcttcttcagatttatgatttgcaaatattcttttccagtctgtggttagtctttttattc

SEQ ID NO: 49983 - DNA, 2124 bp, Homo sapiens
tacattagctagtttgctctccaagttgaatattccaattaaacaatatttttgtggttttgtgtttatttttattttaacctttctctttacaataataaaagacaggaaaaaatccaggcttgctcatgtgggtttggtaatttgaatatagattttctgtgactagttagtgtaccagtgcctaagactggggttttatggattcttggctatgtgttagtatgggtgtgtcaggtccacataaagggtcccaaccctccttctcaggccagggcgtatgaatgattgcttggtaggaggtgttattgttcagtgtctgatgctgactaccgacacgcaaggtggaatgtattctttctgagaaccaaacattgtagcggagtagtaaaacaccatgtaaatgtccgtggaagggcgcagttgtattgaacattgatgacatgtcattgtgaagggtctcaggaggtagtgttccagtttctggcatgggaggtgatcgtgggagggatatataggctttgaagcagggacaaattggacaaatggtgtctcccacttgactgtctttctttgttgcccagggacagcatacttttaatacttctccttggcatgatgaaaggtaaggccactcctgactttggtggcctggggcaagggtgcaaaatacagactcactgcaaattcccacttctcttcaaccttctcgctctgttccttcccctaagaggacttccacacattatatttgaggagccttgcttctcaaagtgtggaccccagtccgcagcatcagcattacctgagagcttgttagaactgtggactctcaggccccactctaggcctgctgaaccagaatctggattttaataagatgctaggtaattcacatgcacattaaattttgagaagcactgccatagcccacgtgttcaagctccatcaacactgagtggaggggcaacagctgccctgtggccacccctcagtcactcttcaggcctagggtttagtccatccttaggaagacagaactaggaaagaggatcacacaggctccaaaggcaggcttgaggcacatgggcagaggatttcaaggtcatgggtatcctgaggatagcctctaagagggaagcatagacttggggttggcaagaccccttggccctctataccccttgccctgtgaggagtgtggctgcagcagggccagagtaaggccctgccaaccatgaggcctagggcaggatctggttgtcccagtctaagagtgatactgttgaaaggtgtcccaaatattcaaggggatgaagatttgagtgggagtgattcatagctccctgaggtactggccagcagccagggtcttggtggctctttggagtgtgcggaagttatggtggtgggaccattactgctttaagagggaatcagtgtgaactgttataagcaaagtctttggtagctagagacgtatacattgacttatctgtagaaggtatacagcgaaggtgcctcctgtagtgcctaataacaatttgattagattagctactagcctccgtagaagacaggtggatgtggctgtggagggctttgaacaacttccttcaaacctaagaaacgggccacttttctcgaagaattgagagcagtgtctggtgtggttgggatgccgtggctgttggaggggcaaaatatgccattttgtgtccaccaccacctgtatgatgccacggttgtgggacagaggcaagtctgaaatgaagatcaacagattgctgtcccagctcccacaccccacctcttcctctgtaaaatgggtctaacagtccttgtcctgcctaccttgcggaggtgttgggtggctctagtgagacaatggatggaaaagtgctttgcagcctgtcaagtccgtgcatgaagaaatgatgatcattctgccatttgttgtctttcctttgtgagtgtgtcttcacctgcacttgagttttagatttaggttgccctctccttagcactgcagctttcaggtcacagcaacatacaaggttctgtgcaaagccatatctgcccctcttcctgacaccttccagcctcttccatgcagatacactg

SEQ ID NO: 49984 - DNA, 1022 bp, Homo sapiens
tgttgttgttgtttttgagctcatatatggggtatgtaggcctttggccatttgaagcattgcagggaatggtatgttttagttggtgcatttgttactgtaagaaatcagcaaatggtttgtggtgccttttaagatttatttagcacatatttttcctatgggctaggtgctgagctggatgctggggatgcacagatgagaaaggcacagcgcctgttctcagattgtctcacagtctagtaggaaagagagagacacatcaacagctaactctgatacctaacgatctggatagaaaatttcaggtcagggcactggcatgaacagagattgagaacagataaatgcgtggtttgttcagggaatcacttatgtagtaatatggatattggcagaaaatgactagagacaagatgtaaaggtagattcaggtcacattttgaagaactgagatttttagcttttagaagattatgttggtatcccttgaactcaagatgttgggtccaaggtagtgattctgtctacattcttagaacttttttgtagagtagcaggaggtagaagaaaaagttattgaagctgaaatagtgatccttagccttagggacagtgtgtgtcagaggttagagcatccagcatggctggtggccagagctttgcatcagtctgagatgtatgtgatgtatctttagctcagggaagagagaggacttgatttttgaggaaggcttgggaaggagggatagaagagctggatagttttgctgctccccagccagaaatttatagtttgatttcattattgccttgaaatattgggatgtcccagaacacacagccattcatatttaaaagtaagcatggcaacctcacgtctgattcggatataaagggctgatttggcttatttatatgatttcaattcacaggcagccataatcaagtgcttactaggcttgtaagagcagccagaggtcagaccatttaggaacacactggggatgataggagctatt

SEQ ID NO: 49985 - DNA, 1047 bp, Homo sapiens
acttctcttgaaaattgagtaaaagaagcccttaaataatagtagctcaaaatggaaagctgtgagctgtgtagcccaaagtgatgactctatttgaaagcccttattttttcctgtccaggaatcctcaaatggtatgtttgtaaaaggaattgacaaaagcatgcagctatacgaggcagcaagattctctggatgagcagatcacagctttcacatattagcatgtcctgaacatgtaactcccagttatagatctggaattacttgcatcatcaattcaatactttgggacttagggctccagttgtattggtgccagatggagaattaatatgttgtctaactcagactagttaaggggttttgctccttggagggagtgggagagaatgtgactgttttgctctcattttcctcatcctgcattagaaacaaagcaaaaagttggctggaatcagtattagcattgcccacagctgctgaactctgatttaaccagatgccatagctatagcaacggggaaatattggaattttgaaattaacatgctactgaaagttgctaaatatatcacgctttgtggaggggttcatattgtaggtatttccattatttctcaaatgacaaagtaagtcaggctttagacagaaagttaatttattatatatggtggttgctgaagtctcccctacttgatctatatctataaatgtgttttttgaagccaaatgagataaatcagtttgattgtccaaggcatagatggaaattggggctgtcataaagccatcttcagatgcgtgtgggtgtcagaatattcatctttggggtttagtggaaagaacctcaggctaggagtcaggaaacctaagtctcagcctctatgattaaattattaggtgatcttgggcagatctcaggttccccattttttaaatgccaggtgttgaactcttctgccttccaattctaggattctggaatagttagggttctatttcccccggctgtggctctagggggtacttactgacatcctgtga

SEQ ID NO: 49986 - DNA, 1814 bp, Homo sapiens
tatggtgagagagagaacaagagagagacggagaaggtcccagtctcttaaaaaaacagatctcatgtgcactcaaagtgacaactcacttatcaccaaggtgatgatgctaagcagctaaaggggctgaccagtcacctctcaccaggtcccacctccaacattaggaatcacatttcaacatgagatttggagaggacacacattgaaaccatgtcacatgtgtatctttccatgctttccatgtcagcacatgcagtcttgctgactcccttaaaggctacatggttgaaatgtaactttaggaaaaccctgaggttttgataagttttgtatatagggcactgaatttgattttgaatgtgtaaattcagtgttcatttgctgtcttcaggtttcttttactttttctctatattgagggcactacccagttatgcattctgacacttgaagacttctggtggcttgcaaatgctccatggagatgaaaattaacttgattggttttccttcctgagcaccatgtgtccactctggccttgggcgactctcaaagtgggtttcaaaccaggcttcagagtttgtcccaatactttctaatagtttattttatccttttcataagttttctcctaccgcttcagtccatattttctggtctggccttatcaactataaagttcttgtttatttggaacttgaggtcagtgacttctgacctcactagctttcattctagctcactcttatttaggcatttactatatgcataatttcctttaatcctcatgacaaacccatgagggaggtgcagtaattatctccaaagtgacagatgaggcacaggaaggctaaggacattgtctacggtcacacagctggtagatggaagaactagaatttgaacccaggtttatctgaccctaaaaaatatgcttttaatcaatatatatactgcctcccttaaatcagtatttctagcttttctatgagcctgcgattctctagtggcaagccacaataatagccacactgtgaacataacactgcatgccagactccataccagagggtggagctgagttttctcatgctggaacagcattttcttacaagctaaaccatgggagggatcttgggtgggaagaagcacttcctgcttataatacaagccaaaaagagattcccacagtatgaagcccacagtttttcctgtgtaatgacattatgaagacctcaggcagaatctccagctattgtgcatttttgtttaatacatttatactgtaaattagttagagctatggacttgcaactcctactttgacccaaaacaccaagacacaagagggaatggtcttttattttattttcctgatcagaactctctagtttccttatcagtgttgctcaccctgggtgttgcctctgaattcagatttgtgtgaatggggttttctaagagaaaccttggtaaccaagagacagtttctgtctctgccttcttctggtggactccaatcctggctctccagctgccttgccttcacgttttagggattcagaatcaggatgcgatcatggcccaatcacagaattgaacatttctaagttcctcagtatccaaaaggaaaggcatttcagatgttaggtaactgtcctttattcactgtctgatagaaatttaatggttacaaaggggtttgtttttaggtttttagttttattatttttagtttatttccagcactggaaaattagcctgaaaatctggaaagggaaaggccaaaccgatcacagttggccctgga

SEQ ID NO: 49987 - DNA, 1395 bp, Homo sapiens
gttgctgaggcaacccgcctgctacagttgtggttaactctaaaatttactgataatgctgacctgagacttgagtcttatcttcactgaatgcagtacaggtgtattgtaggtaggctgtaggaggaccatagctacctctaaatctttacagaagattttgaatgtggcttttgttgcatagaaaataaataaaataaaataaatctctacagaagactggcaagagattggtgcatatttaatagcaaacagtgggatgctttgaaagggatggataacatagaacattgaacagcaagagctttagtggggtttaggttttagtagttgtccagccaagactctgcctgttactgaagctagggatatgtggagtgaccaatttacatcagtcatagtagagaagtaattgcttttatctgacaaaagcagtctggacccagtcaacaacatgctgatgctacagtccctattcttgatgttttattggaaagtggtaagacttctttttctctctgagctggtaccaccaatttgcagtggtatgttctagaagcaaatcatatttcagagctctttggttgtgtaatttttttcaataggcatgatgagtattctggaagctgtatcatggtgccttttgcttggctgtgtgtcattactataatgcataggttttttacttgtttgtgtgattgtttttattccaaagactgccatccagggccatgcagcaaacaagcaacagggaaatatcccactatgcaatcctattttgagatgatatttaggatgagagaacatgcattagttacctaccagcttgacaggaatggatttccaaatctgacacaccatagcctgaattctcaccagtttgctcctggaaaggcccgctcatggtaagctccttagagtttgttagtagtggggaagccttgagtttcaggagaacgtgtttggatggcattttaagaagccattccatttttggtagagtagaaaaagtctgcatctgagtctgtagtacagtctgttctctggatgaacacaatgtctctctcacatttttctgatatttattctgcaaatcagcagcatgagcccctgccactcttctaaataagcttccaggcattacctgcatgctgtgttcctgtggtgggatggcagtaatctctgctaagataaacgggagcttctgtggataaagcataaacgcagtgaagtgtgtgtggctggaagatttaatgcctctacaggtaatttttttagagggggatctggcatttgatcaaatccagagtcattatgtaaatttaatcaccttgcaacacactagtaattttattatctccttttcatttgacagtgcttagatacaagttgagc

SEQ ID NO: 49988 - DNA, 1026 bp, Homo sapiens
cacaatgattattttttactctcgccgacagacccacaagataattttactcagatctttactgtaagaacttgttggatttttttgaaggtaaagacaacaaaatgttggggttttccctatgcctgcagtcctcaatttgtcattctcatagtagtctacactcagcctgcagcaatttgttaaaattaccagttttggtattcctagtttgtgactccagtgactctggtccaagcaagcaaattgcagctatgtctctctggatgttcctgactctctagatttcagggtggtggtttgccctacaacctcatttgtctgaaggattcatgaaaagtcattgattttaagtttgtccagcttcttcttgtaaggatgggagtgatgatttccacgatcttgtcagaacttaaatcagagtaatattccaaaatttatatgaaaagacacaggtcctagaataactagaacaattttgaaaaagagtaataaagttggaggaatcggtctacctaacattaaggctaactacatagctgtggtaaccaagaccatgcagtattgccagatgagttagatatataggtcaatggaacagaatagagaacccagaaatagacccacataaatattcccaactgaattttaacaaagatgcaaaggtgattcaatgaaggaaggatagacttttcaacaaatggtgctgtgttggaacaactggatattcataggcaacacaaacaaagttcaacttaagccttacaccttatgtagacatttactcaaaatggatcatgtaagtttttaaaacataaaactaaacatattttagaaaactggaaaaaatcttccagctctaaggctaggcaacagattcttagacttgacaccaaaagcatgatccataaaaggaaaaagtaattggtaaattggaactcatcaaagttaaaaactttctgtggaagtttttatgaaacatccttttaaatatgaaaatacaagctataaactggaagaaagtat

SEQ ID NO: 49989 - DNA, 1034 bp, Homo sapiens
cagtagggtttgcattcctatgagaatctaatgctgccactgatctgacaggaggcagagctcaggcagtaatgctggcttgcctgctgctcgcctcctgctgtgtggccagttcctaacaggccacggactggtattggtccatggcctgggggttgggaacccctgttttaaaagaccaaaaactctgtcaatacaatcaaccaaatctagagggtggggaattctgcaggaaaaatggcctgattttttactaacttaactgcttaaaatataacttctattgttattgcaaatttgctttctttgattaatagtgagactgaaatgtgtgtatttgtttagcagttatatttcttcgtgtgaggaagtgaattgagtattcctgcccattatccatttactcagaatgtgttttaaagcaaactggatcaaaatgtttcatggacttaaatgtaaaatataaactataaaactttttagaggaaaacataggaaaaaatttcagatctaggatttggtgaagaattcttagacttgatacccaaagcatgatctataaaaggaaatgtttgtaaattagagctcttaaaaaaaagttttacaaaattaaaagttaaaaaattttgctctatgaaagaccctgttaagggaataaatgacaagttacagacagggagaaagtatttgcgaaccacatatccaacaaatgactcatatctgggatatacaaagaatctcacaactcaacaggaaaaaaatccaattaagagatgagcaaaagacatgaagagacatttcaccaaataggattcacagatggcaaataattacatgaaaagatgttcaatatcattaggcatcagagaatgcaaattaccataatgagatgtcactacatgcctattagaatatctaaaatgaaaaatagtgataacaccaaatgctggtgaagatgtggagaaactcaatctctcatatactgtttgtgggaatttaatatggtacaaccactctgaaagaaagtatggaaa

SEQ ID NO: 49990 - DNA, 1028 bp, Homo sapiens
tgcagtacccaccatcctcctcctgactctgacagcccctattgcctctctgctggtatgtcctctagcctccctgtctctgtttcctcatcttcaaagtagtctaagttaagtttgttaaaatcagcttctttttggaaactccctagaggtggaagaaaacaaggaggaactctgctgagctatgaagttaacttaggaggcaggaggtggtactggttgataacctaaacatgttgaaatgaaggggaggttgggccagggcaggcaactggcttgtcccgccaaggcatcaaccttgaagtttccttgtcctcctaccttgccacatcaaggcccctctgcccttggtgattgcctgcacacccagaatgcagcatgcagagaccactccatttgtcatgggaccatagccaatttaggcaaatctgttaacctttccttgtaattcccaggagcactgaggaattgttcggggatgatatccttggatgcacttcagacttcatggattttatgttctctctgatatttcttgtatcagggagctgagaggaattggtctctgaactgatattaatttctttgtttatttcaagtccagacaaagaagagcactgattggccctgtcctcacaaagctgcagaaggtatttggcacaacctcaaatctgggaggggcctaccagttccaaaatcctatgtccagttcaggaatcccctttcaagaattaattttgtgtttaaatatctctaggaacatgctgctcacttcttcctaaggcacctgtgccagtttcagacagtgccaatcatttggaaagttttccttcttctgagctgaaatttatctccccaaaatgtctaacccacatagtcctggatctgtcctctgtatgcactttccaaatacggctaccatggacccctcatcttcttgtctcagggcttatcattaattcgtcttatgtcgtgattccaagacccttcaccatcctgttctccctctgttttttaccagtttcttc

SEQ ID NO: 49991 - DNA, 1026 bp, Homo sapiens
tctgagtaacattagttagtcattctttcaagtaaatatgatgttctatgaaaaatcggccagtttagctcacaactcaaaacacgcagtagtgctttgccttgagtcaacgactacactttgattccagcagaactgctttgagcatagttctcattgtgtctcaccaaattttaaaaataaggggactcaagggctagtatttaataaagttaattttcactgcttcgctaagaacattcgtaagtgaagctggcattttttaaactgcaggtgtgtggtggtgaagaatccaattgacaactagtacagttggtgccatggtcccaattcatgctcaggaacctgctcttttcacctacctctgcttttgcaccagcagtgcaaatggaaagcatgacagtggaatatcaaagaacatttcagtattattgggaaaatagttttcaccttgaggatcctctaaaagggtcttggagacctccacgggtccacagatcctactctgagaaccattgcacatggctatgcatggtgccacctcccttacttaagagctttgatggcttactatcatctgcagaatcggacctgccctcacccatgatgtcagcccaggacacagggacccagccaaatgggctccttgccattttccaaatgtgtcctctcatgcccttgtcactgctctcccctctaccaggaatgccttcatcaccaactctggccattgaaatattacatatcctccaaggcccaggtcaaccactgccttttccagaaagctttctcagggtttttttgttttttggtttttttttgagatggagtctcgctctgtcgcccaggctggagtgcagtggcacgatctcggctcactgcaagctctgccttctgggttcacgccattctactgcctcagcctcccaagtagctgggactccaggtgcccgccaccgcacccagctaattttttgtatttttagtagagacggggtttcactgtggtctcgatctcctgacctc

SEQ ID NO: 49992 - DNA, 1032 bp, Homo sapiens
gaaggcgcacggagcctcagccccggccctcgctgcacgcccggcctgccagccctggacaccctaaatcctggcggccgggacggccgagtggactgcactgcgagctggcgggcgcgcgcagaggccctaggctgcaagcgctccgcggggtgggcagacgcgactcgccgatgcgctcgccgggctcgggcatagggggcgccctttccttggtttcgctttgcagcgggcgcccctcgccgccggagctcagggcagctgtcgcgcccgccggtggctaagacggaggcggcagctcggaggcttaggccacccgcgtctggctacacgcctcatttcttcccgcgccctcctgccacaccctccgccccaccacacacaagggctcaaactctccgagcgccctttgtttggaggcgcggaggcagtgggagccgccacctccggggttcgtgtagcctaggcgggcagtgaggatgagcgtgctactctggactgcgcgctggcctgctgcctctgcacctaacccagcgcctgacactaaagctgccagctttagttagattgaccatttagcgggtccttgtcccttataactgcccccctaaaactttcgagaaccagggcttgcactgaggaatgtcaaatataatgttagaagtaacctttcgccattctgttggcctgctccgcccctgtgccccaaagtggtcggtgtctctcatagagtttgttcgggaagggaatactgaaaagaaaaaagtgacaaataaggaaagtgggcggggcccaggctcaggctggtgggtctcccaagcgaagtcagattccacccgctctctggccgcctccgcccctcctacttccatttaatctgatgtcgacgttttatttgtgcctttttgcatatctttctcctactcccctcccctcccatctctggaggttattgataagtgctgctcaaacatttgttttctgcgtctttggagtagaagatgaagcgttaacacccccaacgcgcataca

SEQ ID NO: 49993 - DNA, 1047 bp, Homo sapiens
atggtcagagcagtgttgtggaaaggtttctctaccacagtatggaggacaaatgggaaagccaagactggaggcaggggaagccccctgggaggtggctgtggcaggagtccagggaagagatgatgaggataaaccggggcagtggaaggacacagacctggcagacggttgagaggcagaattaacagatggctattactccaaagacagatttgaatgatgtgtcactcatacagagatgcgggctggaatctgtgatagaaatattatcatcggcaactgtggatggtattcaacacaaggacttgaattgggctgtgagttgaattgtgtcccccaaaacaatacattgaaatcttaacccttagaacccgtgaatgtgagtttactgggaaataggatctttgcagatgtaatcaagttaagaagaggccattagggtaaaccttaatccaatatgactagtgtagttataaaaagagggaaatttggagacagagaaggacacagagacatacagggaagagaaagccatatgaagacagagggagagataggagtgatgcatctttaaggaacaccaagaactcttggaagccaccagaagctaggagagggcaatggggcatggaggcctcagagcctccagaaggaatcagccctgctaacatctggatttcagacttctggcttccagaactgtgaaagaatgaattgctgttgttttaagccccacagtttatggtcatttgttatggcagccccagcaaatgcatacaaatggtgcgaaagaacaattgagcaggctttcagaggctattgaggggctgatgaggagacattcattttgtaaaactctggcattggtggtactcaatcatcttatatttaggacccagcctgccctgttttcttgcagggaggttcgctcattagaataaaaagttgtcacatgctgttgtcagagaaacaagacggtggcctaagagatctacaaattcactctgctctagggctgaagtagctccctcttggtcacagact

SEQ ID NO: 49994 - DNA, 1046 bp, Homo sapiens
gtcaggtggcagcaaggtagatctagctccaactggcactttgagatgggcattagggatccagcagggtccatggtctgggagctaaaggtcccagataagcaagaggtcgtagataatgtaaggaggggtaaaccagtgataactctggggttactggggtgccttcagagcccagcacagagggtctttgctctctttcatatcttcttctgggtatgggtggctaagggctcccaggtgtgtacttagagcctgatgtgggaaaagagactgcccacaggcctctgtttctgtgactaaggtgtgagtacagtactcactccactccacttcctgggtccacaagtaacaaagccatagagcaacacatgtccctggaacaaccatttacttgaggacgcaggcattttttcctatattaaagcaaacatggatgtaatataaaatcgaaagttgaagacccacagatttatttgactaaactccaaattgcatgtggcagatggctttggagttcctctttatccctggattgttcatgagtgagaaacattgctgaggatttggtttctttctatcagaggcataggcttcctgggcaggtgctcatgaacattgccatgggaagatggtacacagccaggcatttggatgcaaaaggtggcttactcctgctttggacagaaaggtctgcttaagggctatttcataggcttggattcatgtagagggaaagaagaaacaaagctgtgtccacaggctaatgtgctgaggttgtgagatacctttcaacttggaccaaagtcaatgtacaggcagtgatccctctccagtgtcccttccattggccctgcttcctgggtccagccagtacctgatgaagattgtggtggtgagggagtaggcagctactgcacaccagagaattgagcctttgtgtaggaagttttggccactacctcaccagtcccctttacattggctctgggtgtcacaaagggggaaggcataaaatcaatagagtggagtctttgaaagccaaa

SEQ ID NO: 49995 - DNA, 1055 bp, Homo sapiens
tgggctgtgtgttctaactctgaggggctggtatcaagtcctcagttttgttctctggcccttcaaggttagaaacctgctgtgctgaaggggctgaggtgttcctggactgctggtcacaacactgcaatggatggtgccagccaaagcactccatcggacagtagcagcaggatccatgctcattcacatgtgccagcagcagtagcagaacggcagggtgcactttctttggttggggtgggtgccggtaggtgcaggggttgccagcctccatgcagatgttcacagtgtcagcgatggcaatgtggcatggaggcagctacttcttcttttttaaaatgtgtgcattttatttcattttcttgccttattggactagctagagcttccggtattatgttgaatatcagtgtcaagagcagatagccttgccttgttgccactcttagaaggaaagcagtcagtctttaaccatgaagtgtgatgttaactgtagatttactgtaaatattctttatcaagttaaggacattcccctctgtgcctggtttttatcatgaatgagtgttgaattttgttgaaggctttttctgcatcacataataggatactatgattttaattatttttttgagatgatgtagattcaaatgaagttgtaagaactaatacagatagatgctatgtactcttcagccatattcccctaatgataacatctggtgaaatgatcatacaatatcacaaatgggatattgacattgacacagtcaaaatacagaacatttcaatcaccatgggtagctctcattttgctcacatatagacatatctacttcccttccatacccactctctccttaatctctggaaaccactaatcagttctccatttctatagttttgttattttaagaatgttacataaatagaataatatagtatggaacctttggggatggtcttttttttttcacttacaatcattctctacagattcatccaggccgttgcttgtatcaactgtgtatttctttgtatcgctgagtagt

SEQ ID NO: 49996 - DNA, 1025 bp, Homo sapiens
ccctaacaaatggtacccatttcaggtagaattacaggccctcatgcggccacgtgtttagcttcccctcctgtgccaaagctggccccaactccacactcccaattccacccttctcaaaagttcttgcccctaaaagtgtttcttttccttccatttctcctcccatcagcatccagagagaactttttcaaagagatgaagccaatccttcctctgcttaagtcccccgatggcttccctacaaacaaaatacaatccaatccctttcccatagcctgcaagaccctctgcaaattcacgactacttccctggtgcattgtgtgacaggcacactggctgcctgcccgtcactggaacagtccaaaagccccaccccagggccttcccacttgctgccctcctgcctgggatgctctgcccccagtccttctcctggcctgctcagagccacctgccattctatcacatcactattttttcagtctttgaaagaatactgcacacactcttaacttgttcttgttgttcacttaccgtttgtcctactagaattccagctccttctctctggttccccacttctctccctggcctgtgctcattctaatggaagtgtcagttctgggccccctaggcagccctgcctgccctttactgtcatatgacttcatctctatagtggaggggagcccagtgccactctgtaggtgcttctttcctagaataagcttcaggccctaaagttgtctagccttagggctgcccatgtgatgctgtcagcaaaactaaacatgttcttgcctcttttcctccctcaagtcaagcccttagagtttagaacaatgaacttggcctatataaaatacctccaggaaatcagtcctcaaacaccaactcccaacatctgctttctgaatatatggcttcaaacagctaagtgtacagtatctaactgctgtccatccttttgttttttttagccacatgacatctaaggaacttagaaaatgccttgcccttt

SEQ ID NO: 49997 - DNA, 1026 bp, Homo sapiens
cacttgattgagtggctccaggccccctcttgattgctgctgaaatagaactgcccacactgtcggggtatcttccgccgctggtcatttccatgtgccatctgcagttttttctgcctgatggactactgaggcactgcgtatgttatgctgatggggggtcctgtttcttgacccatcactaatatcttgcaagtcacaggaagctaccagggattcctgagcaaaagcttaaaatgcttcagttctctacaaataagccccattcattgcttttagagtgtgttatcatggagcagacaagtaatcagaacctgagtaatatttgcatattgaggtcttcaaaactccagtgtggctataaaatggtatttaaagttatcaaggagctaggtatgcaggcagaaagaactgtccattgcagaaagcaatgcctctgctcatgtcccagataaccttgctccaaggacaaactggagcttgataacatgaagctgcagatggccggtgagctcagctctgtactcactaaccaccccatgggaggggcactgagccctctatggttggcataaatcccattagaatggtaaagaaatccttttcacaagtacatagaaatcgcttgctaagatttcatgggttttcttgactttgttgtttttgtttgggttttagagggtgggcatgagtcatctctaaaactgttcaggtagttaggttgtcttcttattcccatttttaagtatttataattagttcttaaaaatttgtccggaggtccacacctccccttggaaaaccttgcctgtacttttcttaatggcacattttaagtttctatgtttcaaaacttgcttatcatataacatgctaatgactaaacacatgcacacctccacaccaatgcaaacgacatgtgggcttgggaacgaggcaagcctgggtttgcatcctgctctgccactagtgggctgtatgattttgggcaacttagttaacctctctgggcctcattggcctcat

SEQ ID NO: 49998 - DNA, 1030 bp, Homo sapiens
agacttaacacagagatgttggtttggcagtcagctattgggcaacaaacgcaagcaaagccctttaatgtagattctgagagaggatgtgtggggaaaagatcagaggactttgagtggagctttgggcctgtttgtattcagggcaggaggtgagaagtggagctcagtgaaggaggcataccagagaaatggacatcaaaggaggatattggaaggtaaagaaagggtcttaagaagaaagggtcagtggtacttgaaggaggtttattagcgaggtcctttatgaccttgggggtgtctagtgatgtggtgggtgtgagtgagaaaatagaggtaatgaatatcaactgttcttttaataagagagagagttaaggaagggggaagtgttgaggatcatatgactatgagaagggcttttcaagtcatgggaagcttcagcctgttttgtagacaaagagaaaagatttacttcaggaatttttttaagggaaataatcacacaggtctgaaaatatgaatatactagaatgcttatgatagtggaaaaacagagccagcatggtggctcatgcctgtagtcccagtgctttgggaggtcaaagtgggaggatcgcttgagcccaggagtttgagaccaccctgggcaacgtagtgagaccctgcttcttacaaaaaactcagacaaacaaacaaaaagacaaaaaatagttgtagttgtgcacaactgtagtcccagctactcaggaggcagaggcaggaagattgtttgagcccaggaattttcaggctgcagtgacctattaatatgattgtaccactgcattccagcctgggtgacagaacaaggccccatctctttaaaaaaaaagtggaaaagcattggaaagaacctaaatgtacaagaaaagttatatatatatacatatatatatacatatatatacatatatatacgtgtgtgtgtgtatatatatatacacacacacacacacacacacacacacacacacacatacatacagaa

SEQ ID NO: 49999 - DNA, 1053 bp, Homo sapiens
aacaggatttcaaggagaatacttaaaatgcttgaagaaataaacggctctagtcattttaggagtaatggattttgtacaactaattgatgtacatccttaggtcccttaacctttccttcttggcactactttatccacttatctttagttacattgtatatgtaaaactaatgaagttacatttctttatttttatttttgtagattcaaggggtaaatgtacaggtatgtcacatagatattgcatagtaaggtttgggcttctagtttacccatcacccgaatagtgagcatggtatccagtaggtaatttttcaaccctaatacatcagatctttcacttggtctgccttttctgtgaattagttaaaataagcgaatttccatttccttgaattgggtaaaatgactataatacatgtctgttgcatggctgttagaatttggaagctccgtggaagaaatcttttaaaaaccaacccaaaattacataatatatacaaattgttgatacgcatgtgaaaagatggaactctcatacattgtttctgggaatgtgaaatggtacaaccacttttgaaaatagtttggcagtttctttaaaaaattaaacatatggccaggcacagtggctcacacgtgtaatcccagcactttgggaggccgaggcgggaggatcacgaggtcaggagatcgagaccatcctggctaacacgatgaaaccccatctctactaaaaaatacaaaaattagctgggcgtggtggcgggtgcctgtagtcccagctactcgggaggctgaggcaggagaatggtgtgaacccaggaggcggagcttgtagtgagctgagatcccgccactgcactccagcctgggcgaaagagcgagactctgtctcaaaaaaaaaaaaaaaaaaattaaacatatattcaccatttgatccaaccgtttcactccaagatattttacccgagagaaataaaaacactgtgtcccttcaaaaaatgtgtatgcaaaagttcatgccagcactattcatagtaaccaaat

SEQ ID NO: 50000 - DNA, 1040 bp, Homo sapiens
cccctacagtggctgtaccattttacattccctccaacagtacacagaggttctgatttcttgatgttcttgccaacagttgttatttgtgatgtttgtggtttttgttgttgctgttgagacgtaggagttttttaatatgttctgggtattaataccttgccagagatgtgatttgcaaatattttcttatgaaattttggggatgtattccaaccatagcaagtataaatctaataagacatgaacaggactcataagctgaaaactatcaaatattgattaaagaaatcaaagaagatctaaattaatggagacacacagtgttgttcatgtatttggatgattcaatatagggaagatgtcacttctcccctaattgatatacacatttagcacaattcctatcaaaatcccagaaagattttttgtagatacagatttaaaacttatatggaaaggcaaaggaactgaagtagctgaaacaattttgaagaataaagtgggaagaatcagtctaaatgacttcaagacatgctgcatagctacagtaatcaagactatggcagaggtacagacacatagatcagtggaacagagcagagaacctagaagtcatcccacagaaatatgctcagccgattttttttttccaccaagacatgaaaacaatttaatggttgaaagataggcttttcaacaaatactgctggagtaattggacatctatagacaaaaaaacaaaacaaaacaaaacaaaaccttgatctaagtctcacatcttatacaaaaattaactcaaaatgaatcacaaacttaaaaatataaaacttttacagaaaaaagaaaatcttaaggatctggggctaggtaaatcattcttcttaaactttacaccaaaagcacaatccataaaaggaaaaaattgatcaaaatttaaaatcttttgctctgtgaaagactctgagaagatgaaaagacaagctacaaagtggaagaaaatatttgcacacctcatatctgacagatgactagtattt

SEQ ID NO: 50001 - DNA, 1046 bp, Homo sapiens
cataatcaccgaaaactggaacccacccagatgttcttcatcaggtatattgttaaacaaattgtagtatatccatgctatggactatattactcaacaataaaaagaaataatgatacacacaggcaacttggatgaatcttaaaggaattacgtgagtaaaaaaatggcagtaccaaaaggttacatactgtatgacttcatttatatgacattcttcaaatggcaaaatgatagaaataaagacagatgagtggttgccaggggccaagaagagaggaaagcagggagggagtaagatgtggctataaaaggtcaacagtagagttcattgtagtgatgaaatttttctgcatcttgattgtaatcaatgccaatatcctggttctgatattgtactatagttttgtaatatgctacgactgagggaattgggtgactggtacatggaatctgtattatttctcacaactgcatgtggttctacaatgatcccaaaatttaaagtttaattttaaataagtcaagatttttagactgctgaatgattctatattacatgtaaaaatttgtatcattgtatttataacaactgaaaaatatagttatactaaaaaagatgttagaagttaactattgtgtttcttatgttagatttatgtaacaactgaaatatatagttatatttcagttatatatatataactatttaacaactgaaaaatatactaaaaaagatgttagaagttaactattatgtttcttataataaatttagttaacgacaagatgatgcagtatgcttgctttcttaaatagattaagatcactatcaactttttttgcaccttctcataggttcttgacatgtttaggagttgagggaggggatgtggggcatgtgaaaatagttgtggcacaagttggggcagctgagactcatcaactgaaaaaggttacttatccaccccaggtacaattatcttaactgatttaaccctgccaacaatctgcaagggaggtgctctcgacatctcccatttaga

SEQ ID NO: 50002 - DNA, 1034 bp, Homo sapiens
ggaatggcattgaatctataaattgctttgggcagtatggccattttcacgatattgattgttcctatccatgagcatggaatgtgtttccatttgtttatgtcatctctaatttcttcgagcagtattttgtaattctcattgtacagatctttcacctccctgggtagccatattcctaggtattttattctttttgtggctattgtgaatgggattgcattcctgatttggctgttggcctggctgttgttagtgtataggaatgctagtgatttttgtatgctgattttgtatcctgaaactttatcaaagttgtttatcagctgaaggagcttttgggtcgagactatggggtttttactttttagaattctattttatgtcctgtgattgcatattagctataattgtttgttttgttatgtaactagttattttacatctttatgtctaccttcaaatgattgtatgctgcttcatgtacaggataagaaccttatagtagtatactcccatttgtcccctcctaccctttatgctgttgttgtcatccattttacttttacatatgttataaaccccacaatatattgtttttgtttttgtttaaacagttatcttttaaggataatgataataatgccttagtctcctacagaagcacttgccaatccactccctgccaacttctctggcctcatattcgactgtcctcactgcacccattgatccaggcatactaacctctaacaacttatcactgtgcccttcctcccttccttctcttactccccctacccactttcctattgagttaagttgatccttttctgaacttccattgtaatactttgtgtccacattgttattttagcttttgtcaacctctagtgcagggatccccaacccatgggccgtggatcagcactggtccatggcctgttaggaacggggctgcacagcaggaggtgagcagcgggctagtgagcattatcgcctgagctccgtctcctgtcggatcagcggtggca

SEQ ID NO: 50003 - DNA, 1074 bp, Homo sapiens
ttgagatacaaagatgtttttaaaattaggagacaaggtaaaattagtcaatcaaattggaatggggctagattttagtaatagtttgatttaggatttgtttttcttagaatcatagaatattggggatggaaggggatttttagagctcatgtagtcagaattgtttcatcctgaccaaaacattgagtctgatggccactacaatgctgtgattggcctgcccactctcacttttgaagaaaatatgtataagagaccgtgcttgagaagggaacttgtttttcctaccaggtaattagagcatacattctttaggaactgtactaatatttattgcttaaaaacactaggtgttgtcatggattcatccggaaagtcaagcaacgattacccgttgcagccagccacttgtgggtcccaatgataagcgctgcaaagaggatgaaaaatacttgcaaacaataatggatgctaacgcacagtcacacaagcttatcatctttgatgctcgacaaaacagtgtcgctgataccaacaaggtatattcttaatagcactgcagaaacactggatattttcatgtcctgtctgtaaatcattatgcagttggaataactcattgatttcctcaccacctgaagttagaatcatttggagtcccatagctattcctccctggtgtatgctccttgggctgtgtttggtgtctcacatgggttgggatcttgtctgtttcattgcttctctacaatatcctgtctgctaaatcaattaagtaaagacctagaaagacaattatcatctaaaggatttagcattttaatgaaatgatcgtgaggtccttggaagtccgtttaaggaatatagtggttagttgattaattcatgtctggtctgaatttcttttagaatggaatcagccatgtgaaatgtgtaaatgtacaaagtttccataaatctcatggagcacctgtgtagtgtacctcgggtggcagtgagacatggttaaaaacacctccgttcccatgactttcatgatatcacaccctgagtttctctcgctcttcagcc

SEQ ID NO: 50004 - DNA, 1043 bp, Homo sapiens
tctgtgcctcaggttcctcttctgtaaaacaggagataatatcagtgtctcatgtcatgggttgtgtgaggattaaaattcagtgagaagaatgcatgtaaatgacttagcacagtggtgagtgcatcctcagggcacagtacatgatgctgataagctcgccacccctgtggtcaagggtgttgcccaggtgtctgacttgagggtgaatagtggtgtctgttactgagatggggaagactgggagaggaacagggcagggaggaagatggggaagtattagttttctgaggctgtcatacaaattactaccaatttgttggcttacagcaccagaaatgtattgatcacaattctggaggccaattctgctccctctaaaggttcaaggggagaatctgttccttgcctcttccagcatggggtggctgccccagccttcctgggcttgcagccacatcactccaatctcttcttccgtcatcacatgaccctctcttgctctgggtttctgcgtctcctcctttctcttctaatgacacttgtgatgacatttaggttccacctgaaataatcctggatccttaaacacatctgcaaagaccctcttttcaattaatcttggaatccttaaacacatctgcaaatctcaggatccttaaacatctgcaaagaccttctcttcaaataaggtcacattcaccattgccagggattcgatgtggatgtctttggcggggccacttttcagcctaccatagggaggcatccctcagtgaggcccccttgctccccacatctggatcattagctgtgtcagtctttctacatctctgcctcccacctgtcaccaccatatcccaaggaattacaaaatgtgagaaaagccatattggtggaggccatcttcagactagccaacagggtgagggcagttcattgtgttttatcccatgcaggagagatagagacaggacactaaattgtatatctagaataattttaactatggcagtatatgtgtctaggaaacagtattttct

SEQ ID NO: 50005 - DNA, 1033 bp, Homo sapiens
tctgagccttctcttgctagtcattcaccaggagctctggccttggctgcttcagtcacggggaagggaagcagccaggacactgccggtgatctgcggggatgctaccaatagccctgctgctcttgattgatcctcccgcagccttatcaccatcagcccagggccttttcagaggacatctgcctccctactgcagaaagtctgtgaaatactaggcctgtttccccactgagagctactgttactgatggcagtgtgtgttggggcagaaggaaggttgatagtcatgatgctgcctgtgctgtccggctccccagcagctctgccctgaggaggacctggagaactcagaagatggctctccaccttgagtgcacacagccagcccctgggaaccttcttcctgtgagcctggagacaggcttaggtgtgtgtaaaagttccccaggtgattcagatgtgcaaatgagtttgacaaccagtgatctagcttagtgctccaaatgtggtcctgagaacttgttagagacaccaaacttcagcctcactgatgaccttccagtgctctgggtgtggggcccagccctctggttccacaagcccttctgggggctgatggatgctcaacttggagaccattgctgtagactaacattgctcaaaccttaatgagcacacaagtcccctgggactcttattgaaatgcagattctgattcagtggggctgaggcagagcctgagatgccacatttctgataagctctcaggtgatgccatcgggtcacagatcacattttcagtggcaagggagcacagagacatacctctagaaataaggaacaaaggggagggagtctgaatagccaaagtagatttcatggagtcctcaggccctcacttagaaattaacactgacttttacacccagcttcaacaaactgattggggtctcacatgatctgatggccaggtcacaggtgattaaagatagcctgttagagagctggcctgggtaagaggggctggtcc

SEQ ID NO: 50006 - DNA, 1047 bp, Homo sapiens
ctgctgccatcttagctgtggacaaaggggggtcagctggcatgagaatattttttttttttaagtgcggtagtttttaaactgtttgtttttaaacaaactatagaactcttcattgtcagcaaagcaaagagtcactgcatcaatgaaagttcaagaacctcctgtacttaaacacgattcgcaacgttctgttattttttttgtatgtttagaatgctgaaatgtttttgaagttaaataaacagtattacatttttaaaactcttctctattataacagtcaatttctgactcacagcagtgaacaaacccccactccattgtatttggagactggcctccctataaatgtggtagcttcttttattactcagtggccagctcacttagggctgagatgaaggagagggctacttgaagctactgtgtgattttgtttgtgtctgagtggcattcagatgaagtctggaggagttaggagaacgacataggcaaggttcagcagccttccaaggtataggaaggtgggtgattaggactgaggctatctaggtttaacttttgtcccacctccaccccctattttgtggggccaaatgcattgctaaacagcaatttcagagtgtatggtgtgtcaaaaattaaggccttattgtttttctctttcacccctaccccccgtgctcctggcacatatcacattatttgtggtgcccaacatttggggtcttgagcctgctgctggtctcctggatgccagtgagggtatgtgggatggggtggtggggtaggggacggtatcctttttttgctcctacttggaaacaccaaacaccccaaggaagatgataggctccatcttgggccacctgagctatagggcaggctaatggaatcaaccatttctgagcactaaatgtatcatgaaaagttgaatggcctgctcataagtttagctcattcactggaaatgtagattgatgttcaatgttaaactggaaggagcttggtttgtgtgtcagtggttatattagtgggtagtgt

SEQ ID NO: 50007 - DNA, 1030 bp, Homo sapiens
tagggattggcgggagggcgacgggagagctcagaggcggcgatgggggactcagagaggctgcaaagggctggggtctgggagccgcaggcgggacttcccccgctgctagccactgccgagcgggaggaggccgggggccgggggccggcggcgagcagggcaggagggaagcgtgggaggatgccgggcgctgcgacctgtgctgggggtgggggcggcagacactgcagagcagctagtccggcttacaggttgggcgggagagggctctggaagggaggggaaggggcaaaggcgcccaaactccgagttcaggccgggggagggaggggcggcgcctggaatttccaccgccagattctcgatcggctggggctaggagtggggaccgaagggggtctgagagggtggggagaccagctggattctcccgggcagggcgtgggggagaggtggcggccggggtctgggggattactttgcttgggcaaggagtcacgaacactgaacaagtttaaaaacgcactgactggcacacagtcattaaaagttttcttacaaagtctggtgggtgtctccgatttctccttcgtctcctggaatcgtggggccatacactaggtcttcaccttcacccccgcggtgcggtcccgaggtgcaaacccacggaatcctgggggcgacctgcgaagcccattttattccctttagatttcttttctttctttttctccttctccttccttccttctataattcaaataaaggcttttatggttgttgtggttttgtttttaaggctttgccccttctcttttcggctgtatttccctgaattcattactctgccggaaaaccatagaaagaacctcttcggtagaaagtgctgaggccgagtgctgacagcgctggaggaaggaggaagaaggagccatacctttgcccttttcaaaagcgctcattttctcctagtccaagatgaagtgcaatattttgccaaaccaatgctaattagcaacgaggtgtc

SEQ ID NO: 50008 - DNA, 1047 bp, Homo sapiens
ttctctgtctttcccctttctccctccctcgatatgtttttcaggcaacatcttcgtggtcagtctctctgtggccgatatgctggtggccatctacccataccctttgatgctgcatgccatgtccattgggggctgggatctgagccagttacagtgccagatggtcgggttcatcacagggctgagtgtggtcggctccatcttcaacatcgtggcaatcgctatcaaccgttactgctacatctgccacagcctccagtacgaacggatcttcagtgtgcgcaatacctgcatctacctggtcatcacctggatcatgaccgtcctggctgtcctgcccaacatgtacattggcaccatcgagtacgatcctcgcacctacacctgcatcttcaactatctgaacaaccctgtcttcactgttaccatcgtctgcatccacttcgtcctccctctcctcatcgtgggtttctgctacgtgaggatctggaccaaagtgctggcggcccgtgaccctgcagggcagaatcctgacaaccaacttgctgaggttcgcaattttctaaccatgtttgtgatcttcctcctctttgcagtgtgctggtgccctatcaacgtgctcactgtcttggtggctgtcagtccgaaggagatggcaggcaagatccccaactggctttatcttgcagcctacttcatagcctacttcaacagctgcctcaacgctgtgatctacgggctcctcaatgagaatttccgaagagaatactggaccatcttccatgctatgcggcaccctatcatattcttctctggcctcatcagtgatattcgtgagatgcaggaggcccgtaccctggcccgcgcccgtgcccatgctcgcgaccaagctcgtgaacaagaccgtgcccatgcctgtcctgctgtggaggaaaccccgatgaatgtccggaatgttccattacctggtgatgctgcagctggccaccccgaccgtgcctctggccaccctaagccccattccagatcctcctctgcctatcg

SEQ ID NO: 50009 - DNA, 1330 bp, Homo sapiens
ccactggccacatcaagccagctaccagccatgctgagcccaccactgctgactatcccaagcctgccactaccagccaccctaagcccactgctgctgacaaccctgagctctctgcctcccattgccccgagatccctgccattgcccaccctgtgtctgacgacagtgacctccctgagtcggcctctagccctgccgctgggcccaccaagcctgctgccagccagctggagtctgacaccatcgctgaccttcctgaccctactgtagtcactaccagtaccaatgattaccatgatgtcgtggttattgatgttgaagatgatcctgatgaaatggctgtgtgaaaaatgctctcgtaggtggccaggcagtggtcccctttctagtttgttttgcatatgtaatccaaagtgagatgccttactgcatctagacacagacactgacacatagagatggtgtaagctacatccacctttcaggcgtactcatcctttacttaatgtactgtattaaagtgtgtgcgtgggtgtgtgtgtgcttgctattttagagaccttaatttccctcaagtttgacatctgttgttccaaacctccctttccaactatggtcgaccttcagtcctcagtgatccttgaaattttagactttgatttttttcccactcctctgtccctcctcccctttcctcatttcctctgccttgttcctgctttcttctcccattccccgagggggttgggagaggggtatgtgcgcaatgctaaaggtgtgttgtggtgaacgcttccgttaatgtgactgcacagctttatgttcttcaatgtgtaactctatattgtacttttaatagcagtcagaaaagcagttgtgatcaagtacaagtactggaaagtttctttcctaaatttcagcaacaacatatgacccatatttgaagaatacaatttgataagctcttattaaaaatacattttttatgcctatgagatcaaatggcaaaaggaaagatatgggcacaccaaattatttctattttttgaaaatttgaacattggtgctttttatagtcaaacatggttgcaaatgataagacgtttttaccttatttgtaattatttaccttttttagcatttgccgggattttttttcatttagttccagagaaataaatccattcataaactagtttcttctcctaaaatccaatcttacggttgctaggatcaattatggtaatatttttaatattataagtcataactactctttactgaagattttgttttttaaacagcctggtgtttttacagtttttgc

SEQ ID NO: 50010 - DNA, 1048 bp, Homo sapiens
acagaagctttttagtttgatgcaagccgctttattttttcttttgtagcctgagcttttggtgtgatatccaaaaaatcattactgaggccaatgttaaggacctttccctctgtgttcttttatgtcttaaaactttatatctttatgttttagttattttatccattttgggttgatttttgtttatggtgtaagagtccagtttttttctttgcatgtagaaatcctgttttcccagtaccacttattgaagggactgtcctttccccattgtgttcctcttaacacccctgtcgaagattagttggccatatatgtttggatttatttctgggctctattctgtttcattgttatatgtttctgtttttatgccaataccatattgttttgattactataactgtaatattttaaatcagaaagtgtgatgcttacaactttttcaatgttgctttggctatttggggctttttgtggttctgtatgatgaattttaggattgtttttctattttaatgaagaatgctactgtaattttgatagagattgtgttatatctgtatgttgctttgggtgctgtagacatttcaacagtattaattcttccaatccatgaacacaggatatctttacatttatttgtgtcatcttcaatttctttcatcagtgttttatacttttcagtgtacaagtcactcatcgccttggttaaatttattcctaagtttctttttttttgaaatagagtcttgctctgtcacccaggccagagtaaagtgccccaatcactgctcactgcagccttgacctctggggctcaaacaatcctcccacttcagcctcttgagtagctgagattacaggcacgtgccaccatgcccagcgaattatcaaaatttttttttgtagaggtggggttttgctgtgttacctaggcttgcgtcaaactcccggcctcaagcctcagccttcccaaagtgctgggattacaggcatgagccactgagcctggcccctaagtatttttttttaatgctattat

SEQ ID NO: 50011 - DNA, 1286 bp, Homo sapiens
cattctgctgcctcagcctcccgagtagctgggactacaggcgcctgccactacgcctggctaattttttttgtatttttagtagagacggggtttcacggtgctagccaggatggtttccatctcctgacctcgtgatctgcccgtcttggcctcccaaagtgctgggattacaggcgtgagccactgcacccggccaacataatgttcttaatatatagaaggtactcatatcttttagtgaatactttattcattaccacccaaaatattactttttaattgcctgactagttaaataaatacatcataaaaattaggatgctttgttttttttttttgtactttggtaaattttgcaataaaatggaaactgttttttttctcttgataggcgcccttgggatgtccaatagggacagctatttttacgctgctattgttgcagtggtcgccgtccatgtggtgctggccctctttgtgtatgtggcctggaatgaaggctcacgacagtggcgtgaaggcaaacaggattaaagtgaacatcacctttttatagcattaaattcattttttaaaatgataaatgctggagggggccatctgatttgaataaagttgaaagaacatgttaaagtcagtcttaaggagtcacgtttgagtatgtaaattttgatctttctaatatgttggtttgtatattcagttttaactgtatgaatctgatttgcaaatgagaatttggaaaagttagttacaaagaaatatgttaatttaattagacaatactctggaaggaattttatcttctttcaacaaaacatgttttatagtattctgacttacggttgcttttgagttttactcatttggatatattaagatgcacacagtgaagcaaattaaactccactttacgctggaatgctttctttagcatgaaaataccaggtccttggatttgggattttaatttcctatggaaagttgcttaaattgtggacactggaattaatctgaatgtcactgaggaatttcacatgaagtgtaatccctagtcaataagaattatccattacattattttatgggaaaactaggctaaattacatccattcaggtaaaaggaccttagcttactgaaggatctaaagagcaaagcaaagatctcactactcaaacactcagcctgcttccttcaagtccccttgcaggccagctttgtgctttgcagaccaactttttaatgagatactttgcttcctcattcaacattgaagctaggc

SEQ ID NO: 50012 - DNA, 1569 bp, Homo sapiens
tgcaatctaaaaacactcccacaagtatttgttttttaattataaaatcatagtatatgttctttgtagaaaactggaaaaatacatattcaaacaggaaaaaaaatcaaaattccccataatgttgccatctaaaaataacctctattttagttgatatcccgtattcatttttgaaagccattccttaatgctagtttgatacacactaaaagtttagcttacaagttcaaattctgccagcttttcctgacagctatttgcatttttttcagatgagtgattattggccattttctttttctttttctttattttatttatttatttttttgagacagagttttgctctgttgcccaggctggagtgcagtggtgcaatctcggctcactgcaacctctgcctcctgggttcaagtgattctccacctcagcctcccaagtagctgggactacggatgcctgccaccacgcctggctaatttttttttgtatttttttgtagagacggggtttcaccatgttgtccaggctaatcttgaacttgtgacctcaggtgatccacccgcctcggcctccgaaagtgctgggattacaggcgtgagctaccacgcccggccttattgaccattttctaaataagcacattctatctttattctcttaaaattcaaattttctgttactgataatcctaatactaggattcttgcttaagtatgtgaaaccattaccgatttgttgttcacatttattttttatgttgtgaaactggactaaaggaatagagggatgattagtcataaaagtcaaatagcatttgtgtttaactgttgagaaaagtgaaagatcagtatgattattatggaactgtttttaattcttgcttaaagactacaattttagtataatgacatttgagtctagggtagtatgtggtagatttctagatggtccctaattaagaagtattgttgtatttagaattgtccacctaatttctttttatataatgccaaggtatttcttgtgcttttgggatcttatgctgtttgtaaaatgttactgtccaatgttggattattgttttggtttcaggcatttgctgaataggtgatgatacatgggtatttttctgcaagtatttaaaccaggggcatatgcaaaggcagttgtaatttcctcttggaaaaagcgccaaatgtttgaaggttaaaatcaaatgctagggttgatatttaggcttataacaaaataggcttgttttcaaagcagttttttcctagagttttaactgttaactcactagtttgctgctgtttttaactatgttaaataacatatggtatttggcaaatagatttatttttcaaaatgtctcactagtttccttttacacaatgtatatacttcaagatgtatagaaaggaaagctacagttgagcccttatacatgttttaaggtagaaatatgttccctattgtttgaaaactgattgtaagaataacctcagttaggagatataacttgaagtgtcagtccaaactactgatttaaccctatttacg

SEQ ID NO: 50013 - DNA, 1100 bp, Homo sapiens
ctctgtgtcacccaccagattagtataactattaattcagactgtactcctatgtttaagataatttttacaagagctggctgaagcagcacattagtaacctgacaagatttctttttcccttttcagggggaaagggtcaccttaaaaataaattattttcagggactttgggaatctaatgataaatattacacataatctatgaatagcttaatcctttatatattccttaaaataggaattcctcgacatcactcctggccacactttccttgcctgtgttgttgctatgtgtatttgaaagtaatatctgcattccttttaagatgttctgtaagtcatatttgtcagttatacagagtagtcttccttttccccacgttcagtgtaatctcactgaacagtaataatagcaatagctaacaacatctgcacagcaccttacagtttgcaaagaacgttcacacattctcatttgagttttgcatagtgaacctgttacgagatgtctcttgacgtcgatgctaaaagtgttagaatctttacatcactagagtcattgaatatgctgtagtattgaatagtgccctgactagggggaggatttggatgtgctgcatttcaagccgtgtataatcatcaaaatggggggcttgagttctttagctacttgaatccgatttacttctgttaagtgatgcttttctaaccgttttctggatggattttgtattcactatattgtagcttgtaatttgtataaatgtaccatctgatgtcattaaaaaaagtgtttgtagtgctactttgctgtgtcctgattcaattaatgttttattaaccgctgtgtttttaaaaatttgtttgcctgcttctcattttataacatgtagaatatgtacagagctcactttaaaaaatttgttcgttggcctctgtttgtgctatgtagattatatagagagctgtcaaggataagtttttatgcagtaaatgtcaaccagaaatgctcaaactgattgggagtgtgggggaggggtgttgagctgtaaagggctggttatacttcgtctggggtgggcttcaaatgcccctaa

SEQ ID NO: 50014 - DNA, 1030 bp, Homo sapiens
tcccgcctcctcttgagctgttgtaatgaagtttcctagcactagtttggaaatcagtgaagtactctgaaatactttaatatcttccagatatcaatgatcttgaaaatgggttcaactttttttctaatttcacgtggacttgaagtaatttgagggtaagtgctctaatcagccacaattcatgagaagttttgatttaagtattgtcagttgatttctgccaaggtggtattttgaaatcagtacattatttcaagtgccaatagaacacagggctgtactcatgtactctaccatcaggggaagtttaaaagctcctaatggatcagctgaaacggaagtcattaaaatctttatgcaaaaatggatcagaaaataatgtcatgattgtaactgagtcacttcactttattttccacttctggcttctttcctttacttttgaaatggctttaaaatctgcttggataggtgaaataacccatttcagttggactcactgtcaggcctcacggatacctagaaatgggatgagggtgggaaggaggacatggggggaggcacaacagcttggaaaagatacttatcttgctgtcttccccatggcctctgcctagggcttctggcacctctaaggactgagtctcaactaaggcactgccttgtgaatttggaccagtcctttgtgggaccagatggtttctaggagcccttgcagccctgaaagtccataggtccaagcctcaaagtttcttaccagtaataggctgcccaatgcgggaatggtgcttttcccagggaccagattatgtgcttggcgggtgttatgggctgaattgtattccccccaaaaaagataaattggagtcctaaccacagtaggtgactcagctcagaatgttagtttatttggagatagtgtctttatagagataatcaggttaaaatgagggtattagggtgggctgtaatccactatgactggtgtccttatagaaggagaaaatctgcacacagagacagacat

SEQ ID NO: 50015 - DNA, 1050 bp, Homo sapiens
agctgggcatggtagtgcgtgcctgtagtcccagctactcgggaggctgaggcaggagaattgcctgatcctgggaggtggaggttgcagtgagctgagattgcgccactgcactccatcctggtgacagagcgagactctgtctaaaaaaaaaaaaaaaagagaaagaaagaaaagaaaagaaagtgggctgtcatctgagcttacttctcttcaagttactaatgaaatgctagccccaagggcttggcattcacatggcatagtccttttctatacacattggcagtcaagtacactggcagatgacctggttgggtagacagcagcaatggcatgctactgccgcttacttgctcccaaactcagcttctctacaaccgttctcttttctatcccacctgatgatttaccagtcctttggcttatgttaaaaaaaaaaaaaaggctaattttagagcactcttaggttcacagcaaaatggagaggaagatacagagatagcccatatactccctgcccctgtacatgcatagcctctcccacagtcaacatccccaaccagtgtggggcatttgttatgatcagattaatttttaaattatgaaatatgttagacatacaaatgagcaaaaaaagagtaatgcaaccaaagcttacatacccactgctcagcttttgtaatgaaacagtacaaatgcagttgaagtctctcatccacccaactctgatttcattttcctgcctcctccccaaagtaatcactattctgaatttagtggtcttcattcccatgcatttctccatacttttactcaaaatttatgtgtccataaaatatgtaatattattttaagtgtttttaagcctcacaaaatagtatcatgctataaattacccttctgcaacttgctttatgtcactcattatctgctcttaagatccatccatgtagacatatatacttttagttcatgtattttaactactgtatagtattccattgtaggaatgtaccacaatgtattatatattctcctcttgatgga

SEQ ID NO: 50016 - DNA, 1332 bp, Homo sapiens
ctaaggctgagtttagggaccgagtgcatcagagcagccagaaacgattaccttgcgtgttggagcagggactgtactcacggggcaactgagacccggagaggggaaggggtgtgctgagtgttgtcgcagaggtcggacggctgggacctaggaactgaatccagccgaggctcgctctttgagggtggcccttcgagagcacccctagactgacccagatgtataggccccagaccaggttccaagagaggatcactttagatcttacctggctaaaagcagcccaggacggtgaactggggcctttgggaacggactttgaaaggagtgagggggatgtgagcgagcatgaggggcggggagaggtcatcaaaatatactctttttgacacccacacaatgcagataaggaggagcattccaggccgagacgccctcatcagcagagtcacaggagttttggaagtgagaggtatgcttggagaattaaaagggagcgtgtgcaagggctgtggactgacatagacctgcagaagtggagctggaggtccagtttgccctctttagctatccccgtggcttttagccttcacctgtttttcctccaggcataggggcagtaatctagggagacagagggcagagagtaagtttctcagacagagaaaggcccgaggcttattagaaccttttaaatggagctgctgccctttgccctcttctctcttcagcagtgaacagattcctgacttttgggtcatcatcatccccccaagtagtacgagccagagttctcactgtgatctccaaagcttggcacgacgtgtccccttccatcgctccacaactcttctctcgtctggctcactccagccccagaacactggctttgtggttgaacctcatgtgccagccacactcctgcctctcatctttgtctcagttgtcctctccgcctgcctcctcttaggcaccctatttaagtattgcagcccccagtacaaacaagccactcaccttgctctacttttttttccaacagttcttatccccttctgacctactgtatattttgcttgtttgttttgctctttgttgtccctccactagaaggcaggctgtctgagggcaggcatctttgttgtattcactactggtactccaggacctagaacagagaggggcacatattagacaactgatgagtagctcccctgtttcccagctctcacctagctagtcctccctgctctaccaggttaatcttcgtagtgaacggccctggtcagggcatctccctgctcttaaaccttcagagcctgaaccgta

SEQ ID NO: 50017 - DNA, 1033 bp, Homo sapiens
acatcttttcatgtgctttttagccatctttaaagtagatcttctttggagaaatgtctattcagtcagagctattctcaatgtacattttaacccaagcgtatatcacatggtgaatttaggtgagtaggcaggggacgggggttgcctatgggatctgactcatttgcgcggctagctctgggtactccaacccatagagacagctaagctgtcaccaaaattcttatctgactcatagtatttacaaactttaaaataattggtatataatttgagacaaaggagattttgttttgacaagaggctggtttgcaaagaattgtgtgattattgtttcagcagtacagctccgttggggtgagacatgtttcttctttgacctcctacatcctcctctagcaaacgaggagaggaataggctctaaggcttcttgcttttgctagtcatacaaggggacttgtggaattggcagctctgctatttggatttcggcactacaaaggatactcgtatagtttgctgggtctgctgtaacagatgaccacaaactgggtgacttagaaaagcagaaatgtgtctctcacagttctggaggccacaagtccaaaatcaaggtgttgacaaggttgtgttccctctgaaggatccaggggagactcgttcttcattgtttccaccttctagtggctccaggtgttcctttgcttgtagccacatcactctaacctctgcctccatcttcacatggcctcctcctcttctccctgcctttcccctctgtatgtctcttataagaccacttgtcattggatttagggcctaccaggcctccaaggacctctattggcccattcttttcctacttttcatgcaaaacttaaggctacgggagcagttaaagttactttttggttcaagaagaactgaatgaagcatttggtgttagtcattatgctattcattgaatgaggccaaagaggaaatgattctttccacccaagtttgcttgcgagtcccagtctttcttta

SEQ ID NO: 50018 - DNA, 1064 bp, Homo sapiens
gctgcagcaattaggcagtgagaatgcgatctgcacgggcttaatagatgcttcaactttgggcaggtgggggtggtgtttctaacttcttgttcttgttctcccgccaggcatttcacatcaccaatgatgagcccatccctttctggacattcctgtctcgcatcctgacaggcctcaattatgaggcccccaagtaccacatcccctactgggtggcctactacctggccctcctgctatccctgctggtgatggtgatcagtcctgtcatccagctgcagcccaccttcacacccatgcgggtcgcactggctggcacattccactactacagctgcgagagagccaaaaaggccatgggctaccagccactagtgaccatggatgatgctatggagaggaccgtgcagagctttcgccacctgcggagggtcaagtgagggacactggaggctgggctctctcgacacgttgctcagccagtcactccttcccctgtggattgatgaaataacatcctttgaatgagtttgctctgagcctgtgactccttctgctaggcagagagcgcaccctactctttccgtgacgatgagggcggcaaaaacagacatttcttccttcatggaactggatttggatttcttgaagcaggcagcttcatattataccgatttgttctctgtctttttgtgtctctctgtttaccccctcccttgccccctcttctggtttatacatttcattccagtgtccttgtacataatcaaggaagctgtaggaagctacaacccatttgttagttctgatggagaaccatttccatgcagaccaatactagagtgaagcctctagactttgttcaagatactctatcttcaaaatatcccagaagaaaaacagaagctgttaacacacaggtgagactttacatatacatttcatactgacagtgagcttagagcaaaagctgaaagctgaaatgactgtaattcctccccagtctctgttgcttgttcaactccttacatgttccacattctctttcaggtacgttgccg

SEQ ID NO: 50019 - DNA, 1046 bp, Homo sapiens
tcctatctctgtaagaggctgcagtggtacttcctagtgcactagtggatgtggctctgccattcatgggtccatgcctgggaagccagctccagtccgtgaaggccgggcctgtgagggcattcctgtgttactgtaaaggaatacctgaggctgggacatttataaaggaaagaggtttaattggctcacagtttggcaggctgcacaagcatggcaccagcagctgcttggcttctggcaaaggcctcgggaagcttataatcatggtggaagccgaagtgggagcaggaccatcacatggcacgagcaggaacaagagtgaggaaggggagggcccggactttgaaacaaccagatcttgtgtgaactaactgaatgagaactcacttttcactaaggggatggtgctagctgttcatgagggatccccccatgatcccgtcacctccctccaagccccacctccaacactgggaatcacatttcaacatgaggtttgtctgtctctgtcacatgcccactgcttcacctgcattcctggccacctgtcagggtgcaggaagggatgtcactgcaggaaggctgctcagtgaggtgtgtgtgttgggggcgggaggggggcatatccaagggggcctctgcagacatcaggtcagcaggctggagtgtgcagcatggaaatgggggaaaatttggggccatcctgagcccagcatgatgcagaccttgtttccagtcctgcagaggccagtccaggatgaggcaacctctaggcctctggactctaggagtgagaatggagaggttagatgtgaggtggagattgcacagtagctgagtaccttctgggaagtgctgagtggtaaagactgacagtgtaggattaaggcttggaggatatcttggttgtgggtagaggggaaagacgacgcagccctaaagtaggggtggaaagcccacaggactgaagtgtagaagtatagaagcctggggagaagatggggtcaccgaggtctgcatggaggaggacagcacattgtcat

SEQ ID NO: 50020 - DNA, 1056 bp, Homo sapiens
gggactattgttttaaggaatccccgtagtgagtcacgtcgctgagtgatgggcccttctgaaaggcgggcccttgcttggtgggtctgtagggagcaggtgacggacagtctgccttcaggagggcccacggtggagggcatgtgcccaggtaggcccccaggcgtccacctcctgccctctgcccctgagttctgcttccttcttgcttcggggccacggcatcctgggcctggctctggcttccagatggtctgaatgcccaggagccgcatgttctcatcactgagggtccagtgactagggagtgactcgggagctgggacttcctggcagtacatgccccatcatccctgtggggatatatgtccacgcagaccccagaaactgaaggggtgctcgactggggtgcagtggggctgttttcaggaaagagaatggcgtgaatcccgatgcgtgcatcacctgagatctggaggacggtggtgggatctcgccctccatctgttctctcctccataaaggcggagcaggtggccgagtggaatgcagcctgggcctgctggggaggctttcaggggtgtcatcagagcgtcccagcaagggcggccatgacccacctcaagtcacatggaaggcagggctgggagaaccagggcaaaagcaggaggcttcctgagcctcagtttccccctctgtaaggcagggagagttctcctggccctcgtagggtgtttccaagggtgcagtgaaagaaacatgtctgtcaagagctggcatgcagatgtgggctcaaaactcagtgtgtgccatggggtcctgagaggggccccatgggagcgggggtgccccctacttagaaagtgccgagccttctggagcatgctgggctgcccagggcctggaggaagtccatgggggactaagctggaggtgccagcagagcccccaaagccagggagggacaacataggggaaagaggacccctgggtctctggtcaggtgggtttgagtcactgggtggggagtaggcactctgagcctagttgggaggt

SEQ ID NO: 50021 - DNA, 1012 bp, Homo sapiens
tggtgttcctccaggagatgccctctccaggagagactaggccagagctccagctgtcctctcccaggggagttgcgcaaacagcgcctgtgtctcccagcaacggtgtggagcgacatgcagggagtattgtcaaccagggcagctcacccaggccccggtgtccagggcttttcttgcggtggttcacagagccatgctgtggtcacgtggctggcctccatctccagccctctggaggtccagctgttagtgtagcctacggggcacggtccccagccccctgccccactgagccatgctgctctcaagcaggatgttccaggggcttagcgatccctcccaggagcccttgctgcaccgcgttccactcgggccactccctgggccctttggctgaatggagctccatggaggatccgcttatctctgtcttcatcagctctgactgccatagcaaaataccatagactgggaggcttagacaacagacacttactttctcgaagtcccggaggctggcccagagctccacgtactcctgaaaatgcatctcagccccccgggggaacactacgccagttctccaagggctgccagttcccggggggactgctctagctttactccctttgcttagtcacaaaaacaaatgacatcctttggaagaaggaggccggcgtctccctctggagagggaccttacaccaggcagatgctgctcagcctggctctcacggccacttccgtgtggctcccccaggtcattgccaccatccccaccagccagctcaagtgcctgaaggaagccgggcacgggcccgggaaggacgagatgaccgacgaggagctggccgaaggcgaggaagagatcgaccatgccgagcgggagctccgcaggggccagatcctctggttccggggcctgaaccggattcagacgcaggtaagccccgactcgctctcgccctggcacttccaccccaagagggtagaggcaagctggccagca

SEQ ID NO: 50022 - DNA, 1027 bp, Homo sapiens
cccgcattagcctctcaaagtgctgggattacagacgtgagccaccacacccaggctgttgtcattcttgattatttttgttgaaaatgtttctatttcacccttattcccaagctaaagttgagttgcgcaatggagtctaggtggactgttcttttctctcagccctttcacaatgtctcattgtctccctgcttcttctgtagctgctgacaaatctgtagctgctaacaaattgtcctccctgagtaccctgtgtttctttttttctgggtactttgatcactttctttctttttggcattctgcagtttcactatgacatgtttaggtgtcagtttttgttgattctgcttgagacttgttatatgtcctttgaatatttgagtttttcaatcattctggaagattctcagctattagcttttcagatattgcctgactctcattcttttttcctgttcttctagaactggcagccagtgctggacttctgactctcttcgttgtgtctttcggtttctgtttactgtttcccatctcacactgtctgtgctgaattctggggatgccctgaggccttcctgtttgctcattttccagttcaccagttttctctttggccatgtctaattggaattttgttcacatttcagtggctgttttgtaagttctatttcattctatttcaaataggaatttgaaaatggacatttcctttttcaagtagaaatgtcaggctgtttctgtgtcttatttgctcatctttttgactgctccttttatactgtgtatcaggttagtcatacttaccccaccgtctctatctgatggtttggttagcttcagttcttgggagtatcattcgcctgtcttctgtctgctggtcttcactcatggtggatcatttccttgtgggttttgcaacagaacttctatggggattggtgtggcctcaatggagggtgtaagtccaaatgtccttctgttttggccaagcactccagggtaagcagttggaggccat

SEQ ID NO: 50023 - DNA, 1333 bp, Homo sapiens
ccagtgcattgcctgcctgcagcccccacccccgatgtctctgctgaggatgccttcagtaactcgtccaggccgtttgtggctctgaattgaggctggcgtggcccccgggcctccgtgtcataggtccaagtgttggcatgtattgtccagtgaatccagcccccacctgtccccagttcgctcttcctgcacacctccagaaagccggccttgcccctccccagccttccttcacagccatcccgcctacgttgccattgcatttgtgaccgagcacttggatctgtctcgcatatcccacctggaaggggcaggaagagcgcatgggtccccagctgatccgtgctatgaggcagggccgggccatcctgccctcagaccgggatactcgagctggccttacccaggcatctctccctcttccccgcagccgaggcctgcctggagccccagatcaccccttcctactacaccacttctgacgctgtcatttccactgagaccgtcttcattgtggagatctccctgacatgcaagaacagggtccaggtgagacagtggggtttcagacaggagggcgggtggggggtgctcctcactgctagttgatgggggacctgtgtcgatagagggagaatcaagattccaactcttggggtgccggagagatcagggcacggtgatgccagatcctagccagtgttgacaggtcaccttcctcacctgctttgtgtgctgtgcctacacgaggtaaccctgggctcaccacccgctgtttcctgaatgagtatctggaccgggagaaagggccaggagtcagcccaccccggttgccattggccagtttgtctgtgtgggtgttttgtttttgtttttgttttttgtttgtttttttgagatagggtctcactctgttgcctcagctggagtgcattggcacgatcttggctcactgcagcctccacctcccgggttcaagcgattctcctctcagtctcctaagtagctgggatgacaggtgctcgccaccatgcccagctaagttcccataagtccaaagaaggaaatggggccttttttgggtatggccctcttagggtaaagcaccccttgggcagcccactgggcacccctgaccccagcacctcccttgtagactcaggaaatcactcagcccttttgatcatcccgcccctgctcacagtcaacagggttcctatgcgtccagttaggcccggccatggggatctggccttgtgcccccgtagggaagaccaatgcagagggccagtcacgggattggtgagtgttacttggtacctcctgccag

SEQ ID NO: 50024 - DNA, 1036 bp, Homo sapiens
agaccccagacccaggggccagtgctgttgaggtgttggctttcccatgccaggcgctgggggaagctgtgacgagatttgagtgtcacataataaggatcatggcaattcaaaggtacagggaagctaggctataaggtaaccagctcggttttcctgggggtcttggacaggtgctttgattacatggtcactgtcagcccgtacccccggtcagatagactgaacccctgcagccggaaagaggagttgctttccatgcccttcctggagttcttcctcgatcaagttgacagtgtttgactcttgttccagctctccgccctgcttgctggcaggcaggagggtcagactagcatgggtgccatggggccctaggtgggtgcagggaaggacctgtagacgccatgcggggcctcagctggtgtctcagctggagtcaggagctgaacggggaagtgcctgagaggaaatgacagctgagtcaagggcaatggccaggcgaagtgggcaaagggcttccaggacagagctgggcctgaggagctcacagggctggatggggatggcactttaagtctggccaagactttgggacatgatccaggacatggaatgggaagctggtcatggaagggtggaaagccagggcagacatgatcccatccagggctgctcaaagatgctggggctgcggtgtgcacacccctggacccagaggcttttttgactgggaggacggggcaggaggagttcgggtgccccatgctgagatggcaggcttgtgtgaagcaaggacgtatggagtgatagtgaggactgtggttcctgtgtggcaacaccatgcttcagagggcaatggggcacccacatgccaagcctggtggccctcctcagcaacggaactccaaggcaagaaggctgagaatgaggcccaggaggatgcggtgggccccaggacctgcttgagaagtgaaatagcaaacaggactggtaaaagggagcagaggtgctggctttgttctttaatataatt

SEQ ID NO: 50025 - DNA, 1532 bp, Homo sapiens
ccagctctcagggcacggccggtctgtgccggctgctcccgcggttaggtcccgccccgcgcagcgcgcgcagcctgcggagccagcggccgtgacgcgacaacgattcggctgtgacgcgacaacgattcggctgtgacgcgagcgcggccgctcccgatgcgctcgtgccgcccccgccgtgctcctcggcagccgttgctcggccggttttggtaggcccgggccgccgccaggcctccgcctgagcccgcacccgccatggacaactacgcagatctttcggataccgagctgaccaccttgctgcgccggtacaacatcccgcacgggcctgtagtaggtacgcggcggcgggcgggaccccttccgggccccctcctcgtgctccgcctcgcgacctccccgctgccctccccgcgcgccttccccggcccgcggccctgaccgccccgtgtccggccaggatcaactcgtaggctttacgagaagaagatcttcgagtacgagacccagaggcggcggctctcgccccccagctcgtccgccgcctcctcttatagcttctctggtgagagcctcgcctgtggggacagcctgggacgcggggaggatggggtcgcgagggtgtggcaggggggccggtcgagagcggcactggagaaaggggagggaagtctgggggggcaaacagttctgtctcctcctttcaatccagacttgaattcgactagaggggatgcagatatgtatgatcttcccaagaaagaggacgctttactctaccagagcaagggtaaggcaggggttgggtgggcacgctggcaccttcacccgacttcgtcagggaccccgctcacagggaggacctgagacctcagtcccaaccactccagcagccttaggagggagaaactgttacaggtcccgaaatgggattcagattagggccatcaggccaggcggggcacaccgatgccccctctgctaccgctgccccccttcccaaggctacaatgacgactactatgaagagagctacttcaccaccaggacttatggggagcccgagtctgccggcccgtccagggctgtccgccagtcagtgacttcattcccagatgctgacgctttccatcaccaggtgagctggctggcaggcgtcctgtacttgggtacaacctaggggatcgcggctgtgtttggataaatccaggggggcactgggtacaaatggtggctcttgggcctccggggagactctgtgtgactagagcaccctggtctgggatctaggctcagactcttcctgagagtcctgggggcaaaaggggatgctggggcatgagcacaagtggcaaggccccatggataaagggctgaacacccagagccattcaggagggtgtgggttcctggcctctaaccaaaggtcagaggggactggctggggaagtttggactgagggacatgacagggccatggtggccctgccagccagtcccctcgccctgactctcttctgcaggtg

SEQ ID NO: 50026 - DNA, 1049 bp, Homo sapiens
tgtgtcctgcaagctcaccgcattttcgggcgctagatacgctcttggggcctttgtgtgcgttctctgtcttatttccgggcgacgtgccgcgtgcgttgtcggacgtgaagggcagtccgggaaaaacgggtgcggccgcctcctgtgtcctacagggggcgccagacgcatttccactcggcttggaggtggatttagtgccacgtgcccgaaagtcttaaattgggtgacctgagctgtgcaatgataatgcggcgattttgtagtacgcagtgtcttgaagagagaatttttaactaggaaagtttgttgcaaagtgtttataggaagcgtaagacaaagtaacggaagatggtgtctgttgtttctagtcttgggtgttgtctgtgttgcagcagccaactgttgctttgtagtttatttccccgaatggaaacggtttagaagtggacgtgcattccccacccttttcccgtccctcgtttgggttgttccttgaggggcaaagtgcctgttgggctttctgtgaacctcacctaacctgtgttttttcactcccctgcagttaccggtattgtaagaacaagccgtacccaaagtctcgcttctgccgaggtgtccctggtaagtagtggaagagcccctgcactggttggctctgcggactccgcgtccgtctgtgacaccccctgcacacttacccaatccttttagatgccaagattcgcatttttgacctggggcggaaaaaggcaaaagtggatgagtttccgctttgtggccacatggtgtcagatgaatatgagcagctgtcctctgaaggtaaggcaggattctttgttcgtcaccccccagtccttcctccgtgctccctcaaccccacccacatacactgcactggaattgggagttgatgaaacatgagccttacaaaactcagccaacacagttcccctgagctggagatagtcgtggtgaatgtttctctattatcttctctcactttgctgcttttcttctccctacctagccctggaggctgcccg

SEQ ID NO: 50027 - DNA, 1085 bp, Homo sapiens
cagtcccagctcctcaggaggctgaggtgggaggatcacttgagccctcgattttctttttccttgagacaatgtctgtttctgttgtccaggctggagtgccgtggcgtgatgatggctcactgcagcttctgtttcctgggttcaagggatcctgtcacctcagcctcctgagcagctgggactaaggagtgtgcccagctaattcttttttttttttggtagagttggggtcttactacattgccagggctggtcttgaactcctagactcaagcgatcctcccgcctcagcctctcaagtgctgggatcacaggcatgagccattgtgcccaacccagcccaggaatttgaggccagcctgagcaatatagtgagaccccaggtatagatagataggtagatagataggtaggtaggtaggtagatagatagatacgtaggtgggtaggtaggtgggtagataggtaggtaggtacgtaggtagatagatagatagatacatacatacatagatagataagatagatagattgattagatagattagatagccaggtggggtggctcacgcctgtaatcccagtgctttgggaggctgaggtgggtggatcacctgaggtcaggagtttgagaccagcctggctaatgtggcgaaaccctgtctactaaaaatacaaaaattagctggatgtggtggcgcacgcctgtaatctcagctactcgggaggctggggtgggagaatcgcttgaacccaggaggtggaggttgcagtgagctgagatcatgccactgcactccagcctgggccacagagggagacctggtctcaaaaaaaaaaaaaaaaaaaaaaaaaagatttttgtatttgactgtgctctctcatccaggtggtgacatgcttgtatctgtggttaagaggtagtatctgccgggcgcggtggctcatgcctgtaatcccagtactttgcgaggccgaggcgggtggttcacctgaggtcaggagtttgagaccagcctgaccaacatggcgaaaccccgtctctactaaaaatataaaaattagccgaggctgggcgcggt

SEQ ID NO: 50028 - DNA, 1080 bp, Homo sapiens
ggtaggagatgacttgagctgatgctgcctggcacataggggtttagaagatattaggaaggaagccccacagcgtgcccaagtgccatgcaggccctggagacggtcattggagggcgtctgtggatggcgcagtgggggatgggaagtccctaatctgctggggctttcccagcaagcagggactgagggggatagtccccaacacatgggccccagggagaagggcctgtttcattgaggtttggagagtgttgagggtaagctaacctgtcaccccacgcccccgagaatggttactgatagggagaggccttttccttgcaggagatggcgtctaccagaaggggatggacttcattttggagaagctcaaccatggggactgggtgcatatcttcccagaaggtcagcagggctgactgggtcgagcccccccagtatgagcgggatgggctcccaagcctcgcctctgtgctctctcaccagggaaagtgaacatgagttccgaattcctgcgtttcaagtggggtaagggctgctggtctctggccacagccatcctcccggcccagagatggccctgtgggcccctggctcccgccccctcgggctggcttgtatgggggtagatgggcgtgtttgtagcgccaggaaggggacaggtgctgagactaggcctgcctctcgcaggggcttgcccaagggagctgaattgaactggaggatgtcgggggtggcagtggccagaggctggcacagaagcttggctcagggcccagcttatgctaacatttctacctcccccctgggcaggaatcgggcgcctgattgctgagtgtcatctcaaccccatcatcctgcccctgtggcatgtcggtgagcctggggacggggacagagagatggcatctggggtggggggcctgggactccctctggtcccaggctgccctgctccaccccacgtctggccttctgtccactgtgctgcaggaatgaatgacgtccttcctaacagtccgccctacttcccccgctttggacaggtgggtggggactgctgaccttcggctgtct

SEQ ID NO: 50029 - DNA, 1092 bp, Homo sapiens
tcagcctcccaaactgctgggattacaggcgtgagccaccgcgcccggcctgtgagggggaattcttataatccacataaaacatctagccaggatcccccagtcttagggcattcacccattcattcatttgcccaatatggaaagcctactatgtgccaggtattgtgaagtgttggggatatggcagtgagcagaagaacccaagcccccaccctcaggaagctgacattcttgtgagggtggccagtaaatactaagtcggtataggatatgatgtcagtgttacggcctttagggaaggaagcaggctaaggggacagagtgactgggatgctattttagataagggtggtcaggccaggcctcattgaggaggtgatatatgagcagcgatcttaatggagggagggagccgtttggggaaggacattcctggaacagcaaattcgagggtcctgggcgaggtgtgctcttggccagctcaaggaagagctggtgtggctggagcacagtgagtgagagaaaggggtaggagatgtaggagatggtttgcaggtggctaggcgatgaagtaggaccttgtaggccatgagggggaaggtcagttgcagttcgaaatgtgtgagaaagccttgggtaacgtggagcagggagtggtgtgatttctcaattaaagaaagcccacaggacccaccagcagttcctgggctttccgactgagaaccccggtggccaaacagcagcaaggtcctgcccacaagggaggggaggctgggcgagtgtgtataccaaacaggttagggaagctgattaaaatctcctcagggcctaactgggaagggccagaggaagctggggatgggagtggagggtaggagcaaaaggacaaaggacatctgtaggttgtggagaaaaagggatggggtcggggccactgtggtcctaagagctcaaaagacttcaatgctcgatgcttcctccagcatgttctgagatcctcacctctccccttccgccaaaagcaggtggggggagggtcccgtccagactggacatagccgactctccttttctctggctgggaggcct

SEQ ID NO: 50030 - DNA, 1025 bp, Homo sapiens
ccaaccgcctctacccagtgtctgcccggcactggtttaccatggagcgcctcgaagtccacagcaatggctccgtcgcctacttcaatgcttcccaggtcacagggcccagcatctactccttccactgcgagtatgtcagcagcctgagcaagaagggtagtctcctcgtggcccgcacgcagccctctccctggcagatgatgcttcaggacttccaggtatggagcgggcgtggcccagcttcaggtgggggagcccaggctagtggttgagagacgaagagaggcttgggcttgggcatgtagttgagagtcctgtccctgcgctgcccctgtcccagttcttgctgggcctcccaacggtcctttctgacccgtgtctgtgtgtctgccagatccaggctttcaacgtaatgggggagcagttctcctacgccagcgactgtgccagcttcttctcccccggcatctggatggggctgctcacctccctgttcatgctcttcatcttcacctatggcctgcacatgatcctcagcctcaagaccatggatcgctttgatgaccacaagggccccactatttctttgacccagattgtgtgaccctgtgccagtgggggggttgagggtgggacggtgtccgtgttgttgctttcccaccctgcagcgcactggactgaagagcttccctcttcctactgcagcatgaactgcaagctcccctcagcccatcttgctccctcttcagcccgctgaggagctttcttgggctgcccccatctctcccaacaaggtgtacatattctgcgtagatgctagaccaaccagcttcccagggttcgtcgctgtgaggcgtaagggacatgaattctagggtctcctttctccttatttattcttgtggctacatcatccctggctgtggatagtgcttttgtgtagcaaatgctccctccttaaggttatagggctccctgagtttgggagtgtggaagtactacttaactgtctgtcctgcttg

SEQ ID NO: 50031 - DNA, 1039 bp, Homo sapiens
cctggtgtttgtggcaaacttcgatgagaatgaccccaagacctttgagggcgttgacccccagactaccagcatgcgtgacgtctaccggaagtttgatctgggccaggatgtcatcgatttcactggccatgccctggcgctctaccgcactgatgagtgaggggaagctgggtggtggcagccccctcgcccggcccgcccccacccttcccacacctgcctgctgtccccctgccccgcatgtctcttgtactcagccacaggctcacctatcaccctttccatttcccccttgcatttgatcctcatcttccccaggccattcagggtggtgggaagactggcctggtacctgggtgggggtaaatcaggggtgctgctattcccccagctacctggaccagccctgccttgagaccgtcaaccgcatcaagttgtacagtgagtccctggcccggtatggcaagagcccatatttatacccgctctacggcttgggcgagctgccccagggttttgcaaggtgaggacatgggttttttcagttggcatagctgagtaggactagggccaggagtggagatggccgccttgagcattttcttggtagtatttcctcctttccaattcgtgctcttcatttacttcactccatccttgggtgatgagggcacaaccccagtgcactgaagtacagaagtctccacacttgaaaaaacgagtctccacaaatgtgacttgctcagttcccggcagcaccaggactgggcccagggtcccagaaccttgagtcagggcttagctgggagctgacctatctccagagagtccattctggtccctcaggctgtcttggtgcggagcactgatccctcatgccccctcccgctggcccttggcagtgtattctgagcagaagctccagagaggaaagagcccgcggagatggggccagcgttcacggcagtgacagagctgggatgaatcccggcgtctcctacctgctgcctgcctggggcagccttctttgcacttt

SEQ ID NO: 50032 - DNA, 1317 bp, Homo sapiens
cttctgggactcaggaactgccggcctccatcttgcgcctgggagctttgactctcacgggttcctcctctgtttcaccagcccatgcagatcaacggcaacttctgtgggctggtgttgaaccagcctctgggaggcctgcatgtgatcgaggggctgcccctgctggccgacagcaccgacggcatggccagcgtggccgcctacacctaccgccagcactctgtggtcttcattggcacgcgcagcggcagcttgaagaaggtggcccccagagccctgggcatgtgggggtggggacagtctcagatatgggacaaggctggtggtgggaacacacgggagagctctgaggacaggacaggagaggacacggctggtgcagggagggagatttccctggctgggtcccaggcgcctggccctgctcctcgggtcgccccttggccgcccaccctcaccattgccagttcccactgtggactgaattgccagcttcgtatggctctggggacagagaacagacctattgtggagtctccctgccacgagagcaggcctggggctgagccagcattgctgggtcctctgttgaatgaacaagggagcaaatgccttgcccctcaagcctccctatgcctgggacagacccacttgcccctgccctctccttggctcactacttcccatccttcccctcctacccatgggcccgggggctgaagctgcttccattggggatctgggggtagcttggcatgaagggggagatgaacttctgggcactcaggtacgtgttgaataggtaggagtcgggggactgcagtgctctcatcctgcttgcctcgtagatgcagtgccatcccccaggagggcaagtgttggtctgggggcgcagggaagggtttgtggagaaggatgatgaactctcctggcccacctgctctgttcctgggaccctcttttcctttgtagcagctttgttgaacgcgtactatccaattcacccattttaaagtgcacagttcagtgggtttctgtggatctgcagagtggcacaaccatcgccactacctcattctcctaatcaatgccatcttctagctcttcccctcccctgcatcccctgaccttgggcaacacgaatcactccgtccttctgtttgctgagggcattttctggcgtctgcaccctcctttttttggcctccgggctgtgggtgtgagtgctgaaccccaccaggtcctgacgtcagctcagccacaacctccaaagtctttggctggagaagacagtgtcccaggtgcaggaggctg

SEQ ID NO: 50033 - DNA, 1019 bp, Homo sapiens
cagcccctgccattcttccccctcaccccctctccctgccactgctctgcattgccctgggttagcctggcggggccaggtggcacccgccatatactcttgcctttctgctgcgggggccttctaagcctcgggtcccagagctgcagggaggggcggcatagactccccacatggctcactgggtgtggtggggcctgtagccctttttgtttcatcctttggttcctgctggggactcaggcctaagtgtccaccccatcgtggaggacaacaccccttccttgcaggagtcatccctgagctggcagcttcaattggctctccgtgtcctggctggctggcagctcctgggcgaggtggcatgtgccgtgactactagagatcgctgtcatgggcccactcccccgccttctttgctggactgtggtccgagatgttatgtggggctctgtgctgacaagtcacatagtctgtaggcttcagagagtggctctggctgacaccccgtgggcagagacaagacccatgcctgcgatgtgtctcctcttactgtcaaggcaaatcacctttccttccatggaggaaggggtcagtgcagtcagcttgctgtcagggggctgcttggtctcctcgacggtgaggctgaattggagaggccctgctggagcatggagacccaacatgacctgcctgttccaggacagggtcccccacctcagtgccatcggcacctggggctggagaattctcttgtacgttgtagggtgtggagcagagtccctggcctgtacctgctagatgccagtagcacctgtcctgttgtgacaactaacaatatccccagatatttattgccaaatgacccctgggggatacagttgtccctggtgagacccactgtattgggatcttcagagcactggtgcacagagaggtgacagttagactgggggcttctgctcatccccaggagagtgctctattgagggggacttgagggtgagtgttgcaggcca

SEQ ID NO: 50034 - DNA, 1077 bp, Homo sapiens
agtgcactcaacactgttgtagaacacatgtccccacaatgttaaattgctgagtttgtcaacagttctcagtttttgtacttagtccatcttgcagacctatgccagtttgtgggccacatagtggtactgactctttttttacatgtgctcacgacatggtattttgttttgtgttgtgtcgttgctttgtagaattttgataagctgaatgtaaggacaacacactatacacctcttgcatgtggttcaaatcctctgaagagagagattggggactatatcaggtaagtgttgggaggaggcactgtgcaaacttactttcttttgaaaatgctttcacatcagctattcaggaaggcagtggcatgccagaatagctttgtcttgaatatataacctgtacccgcagtgaattatttttctttttaacttttcagatttgttgtttcactggagcattaagagtgggtgatacattaattttttttttttccattccaggacaggtttcattaatcttgacaagccctctaacccctcttcccatgaggtggtagcctggattcgacggatacttcgggtggagaagacagggcacagtggtacgctggatcccaaggtgactggttgtttaatcgtgtgcatagaacgagccactcgcttggtgaagtcacaacagagtgcaggtatgtgggagagggagggaaggactggctagagtgaaaagctttctgtatttcccttctatgttttgtctgctggaaactatttcttcattaagaaaaaaaaaaatcctaaagcaaggatattgttttggtttctgtgtacgttctgtcccctgccagatcttggtggtccgcgctttttggaattccacatactaagcatgtattcatcaagctgactggatccatttgtccgggttcagctctcagcttgtcactccaggcttctcactctgtgctaccgcttctgcctaaagtatccttcgttcatttttatctgagaaaagcctgcttatcttgcaaggctttttccacgcagcttctacactgagtactcccaactgtccct

SEQ ID NO: 50035 - DNA, 1052 bp, Homo sapiens
tgatcagcattgagcactttttcatatgcctgtttgccatttatttgtcttcttttgagaagtgtctgttcaaatcttttgcctgttttttgatcagattattagattttttttcctatagtgctgagttccttatatattctggttattaatcccttgtcagatgggtagtttgcggatattttctcccattcttatgcatatggatatctagttttcccagcaccatttattgaagagactggtttttacccagtgtatgttcttggcacctttgtcaaaaatgagttaaatgtaggtgtgtgcatttgtttctgggttccttattctgttccattggtttatgtgcctgtttttatgccagtaccatactgttttggttactgtagctctatactataatttgaagtcaggtaatgtgattcctccaggtttgttctttttgcttaggatagctttggctattttgagtcttttgtggttccatgtaaagtaccagtgttttttaacttgtgaaagcttagctactgttggattgtctcttaagactttaaatgctctgcgcaccctcttagtgaatgaaccttagagctattcatttaatgggtctaatttgtaccagaagtaagcatgtcatcaggattccttagctctgtgagcaggcaaggcagccacggcttatggacagcagcagaaaaggaatccttaaaacttcaaaggttctgtggccccaaagggagtgtgcatgccgttcttatagacgtcttgagctgcaagcctgttatgtgtatcgttaggtgctttggttaggtgttttttaacttcagaagtttaacgtcatttcaaaggcctccttctcataatggagtatttcctccatatgcacatcctgagcaaaggtaaccccaattaaagtagtagctcagagttttaaaagttttaaagtggcatacaacagtagaattggggctcatcaattatcaattctttcacccttcaaataattcttttctttattcaatgcctgtagctattgcattaatgaccacagc

SEQ ID NO: 50036 - DNA, 1733 bp, Homo sapiens
tgggttaggtgttggtgaagtgaagaggggaggggagagttcagggcattgggagcaagcagcatgtgcaaaggcaaaaaagtagagtggctgcggtggggacgttatgtctgcagaggctctcactaataagctttgtgatcttcaacaagtcctgtgtgtgttggagttagtgggcaaattctgaatgctctggagaggagtttgaggccctgctgagaatacaccagggaggaaccttgttctattctttgtagtcaccatgcccgcttccagcattgacaccattctaatgttgacaccttgatgttccaccaggcaagtcagaagaagctgatgatcaagcagggccttctggacaagcatgggaagcccacagacagcacacctgccacctggaagcaggagtatgttgactacaggtgagggcaggatgtttcagagccggggtgggtagagacggcacacttgctgccttgatgcaggagtatgtcaacaacaggtgaggatgggaaggtagagcccacttgccatctggacgcaggagtacatggacaacaggtgaggaacaggtgagcatggaggttgtagagcccaggggagggggagtcacttggtttggggcaaacttgctaaatgcaggaccacaggaaccagctcttcagctcccgtgagattttggctgcccaggccagttaggggtgtgggcctgcacggcagacagttatccctttctagtctggctcgtgggactctagagggagtcagtctgcaacagtaagtggtgagttcttctgtccagcgtcagtattttgatggtggctttagacttgccagataacactacataacatcagtactgccctggaaagccattcagtgaatttgacctattgctacctctttttcagtgagtctgccaaaaaagaggtggttgctgaagtggtaaaagccccgcaggtagttgccgaagcagcaaaaactgcgaaggtgagtggcatgctgtcctcagtttggaatgtgcttagggagataatcctaagaggcactggcattcgtcttactttgtgactgtccgcagtccagccatatacgctagcatcagaggtgcagcgcatacacaggtaatgctgcctcataccctggggtgcttgtttgggctctgcaggctcctctgatttgtattctctgtcctatctgctgggaggaggaatgtgggctcaggaatcagatgggcctcgactcctacctcagctatggcagcaacacagtgatggaatgggtggtggtgtgtgtgtcaattctggcccccgccctgggtcaaatggtaggacagatgtgttgaaatcagaggccatggctgttggacattcgaggccatacaaaattcagcagagagcagaattgcatcttaacctggcaccacccagtgttgaaagagtcagtcaagcatgggttggcaactccaccccatggagctgctggcattagagcacagaatgacaggtctgcactcagaaaccgggggcggtactgagtatcctgcacaggctgtgtgggaggagcttctgacttgtcagatgtgaattcctgctttgcctgctttctgtgagaggtccttgcagtcatgagagaaacagctcctccgggcctttccaccccaagccccgtgctgctgctgtgctccttctcttgtgcctgcctcaaggcttcttggatttgggggatgagac

SEQ ID NO: 50037 - DNA, 1071 bp, Homo sapiens
tagtcttattctccccacaccagccagtagtcattttcatatgtaagtctatttaattattattaaatagactattagtgtaagtccattgccctttgggtaaagtgcaaattacgtaaccgatgaggggattgacattgttaagactggcataggtataatagagatgattcttaatattattaacatccttagcaaaacaacccattgtactatcttctgttttcaggtggtgtcatttgtgaagaagaatgttctagtaactgggggatttttcggaggctttctgcttggcatggcatcctaaggaagatgacctcatgttcattgttcctggttttttccagccagcagcctctacactccatcataggacatcgagtccctcctcctcttctcccatgccttcttccctgccatggcaaatctgagtggcttctctaagcatctgctggtacaagtcaatgtggcaccatgagcttcatggtggcagaagagacaatagtccttagctctcctcccagtacaccccctacttggccagtctgtaggccaacaagaaggttcctttacccccatgcaagacacttatgagaacacattacaagatggctgaccgtggaggatgagtggatcctgaaaggttgtcccaaactgttgatttggaaaagaaataagcacatagataaccttattgtgtgctgcatggaaaggaactgaatacatttgcctttaagcatgaaagattttggtatcttggtgtctactttcttttttagttggttttacattacagaaagctatttaaatgtgttataattatgccgacaaaattggcagcataattactgtaattgaaaaatctgatattgtccaggaatgctttctaccgtacaggataatgtatctcatggctgtttccaaagggtttatttattgtaaaacaagtgatttaggtgggaaagggaagattttggatttttattttgtagaaaaggttttaagctttgaaatgtgaatgaaatatccttatcaaaacattaggggtggccataactcctctgtgccact

SEQ ID NO: 50038 - DNA, 1052 bp, Homo sapiens
catctcaaaaccataatggtatgagcctctttgctgcatattttgctataagaacttattttttttcactttttattatggacgctttcaggaatatataaaagtagagaatatagtacaataatccccctgtgtatctatcactcactcacaacaatcatcaaattatagctctgctggtttttaccagttattgtgaaacaaatatcaaaatgtcattttatcatatttcagtatgtatctctaaaaggtaagaattatttctaaaaatcataaatacctcatcatatcagacattaacagtaattacataatatccaaaatctgatcagtgttcaaaatttcctcaagtgttttatatttagtttgtttgaatcaaaattcatgcaaggttcacatcgtatttgcatgatttggataagtctcttaaccttatagatcctcctctatttttttttttttgcttgctatatatttatatctctatatatattgatatagacatatgtagtgacactgagtcatctgtttcctgcttccccacactctgcctctcctgacatctgggtctctgggttatgccatatatggtgatagtggctgcagccactttacctgtgtgacttacccacagcaatgggatggtaacagcaaagctaaccaaagtgctctgtgcccctttgggttgcatgtggggagactggccacccaatgcctctccagtggggtaggggttgtcttttggtgcatctgtttttcctgtgattattggtgagggcagcaaagattagcaggtggttgtaaactaccttgagtaggttgtaataaatagtctggcctcagactgtattctgattgtctgaattaagatctgtaggtaggtccctcctgaagttttttcccagctggctgcctctacgactgtgagggtcatggttgaggtcagtattgcaggttggcctcatcctgctagtatgagaacggctgtgagttctgcccacggtgtgaggccactgtgaccacttgggattgtgcagagctggcatggaggt

SEQ ID NO: 50039 - DNA, 1152 bp, Homo sapiens
tcacccattttacttcctttcaatttggtatcatggtgtagctattctaaaatgatcctgctccctaatgccctcagaataaagccccaaacctgcagcccttcatggtttgcttatttctccagccatgttctctctctgtcatatgctcactctgcctacagtttcctttttccttataccacctggccaatgtctagtcatttttgaagatgaagatcaaatttaggaatccttctctgataattctcaacccccaataccatcccagttaagcattcctcctggaaacttaataaaatcatatacttcctttttgtaatacttataacattatattttaatattttgtttttccactaacattgtaagatccttgaaagaaggtatgcttttttattactgttcccatggtgttcagtaaatatttgtttagtgtcccttcagctgtagatttcaaaactactattttaatgcatacattctgacctgtgagctctagcatactctagagcttctttgtcataaacttagtttggttggttggtcttagcttttcaattgaagtgtaacatacagaaaagtacacaaattacaagtgtccagctcaatcaattttcacaaaatgaaaacacctatgcaaccacaacccagatcagctccatgaatttttacaaggtgaacgcctgtgaaactgtactacatatcaagaaatagaaccttaccagccctccagaagcctcctttgtgactcctctcaattgttatgcccttgtttttttcccaaaggtaaccattatcctaatctctaacaacacagattaattttgtctgtttttgaattttatataaatgggaaaatacggtaagtacaactttgtgtatggcttctttcactctgttatggtagttcttttttattgctgtgtaatatttcattgttggaaattaccacaatttacttatatgttctattgttaggcatttgggttgtttccaatttggggctcttatgaataaagctgctatgaaaataatccttacataagcctctttttgcccatgtgaatgcatatcttttcagtatgtacacagaagtggaattgctgggttatcactttagtagaatagtttccaaattcacatccttgc

SEQ ID NO: 50040 - DNA, 1111 bp, Homo sapiens
aaaactagcagaaaacatagggaaaaagcttcatgacattggatttgacaataatttcttgaatatgacaccaaaagcacagctaacaaaagcaaaatagacaaatgagactacatccagctttaaaacttatgtgcacgaaaggaagcaatgaactgagtgaaaaggcaacctatggaatgggagaaaatatttgcaaatcatatatttaataaggggtcaatatccagaatatataaagaactcctacactcaacaacaaaaaaatctgattttaaaatgggcaaaggacttaaagtgatatttctcttggtcaacaagcatatgaaagagtgttcaatatcactaattgtcagagaaatgcaaatcaaaaccacaatgagataccacctcacacccattatgacagctactatctaacaaaatcagaaaataacaagtgttggtgggaatatggaggagttggagcccttgtacattattgttgagattgtagagtggtgcaataagcctgtagtttctttaaaaacctaaaaatagatctactatatgatctaccagtctcacttcttgggtgtatatccaaaagaattaaaagcaagatctcaaataggtatttacatacctatgttcacagcattattcacaatagtctagaagtaaaagcatcccacatgtccattgatggataaatggaccaacaaaatgcaacgtaacatataatggaatactatacaaccttaaaaataaaggaaaacctgttacaacctacagcatgaaagaaccctgagaatattatgctaagtgaaataagctattcacaaaaggacagatgcagcatttttctatttatataaggtatctaatgatcatagatatacaaagtagaatggtggtcaccaggggccgggagaagggagaaaggggagtttcagttctgcaaggtgagaatgttttgaagatctgtttcataacaatgttaatatacttacattactgaactgtacacttaaaatggttgatagtaaattttatttttttaaccacaattaaaaaaaaaaacccaaatggacattgtaaaagtggaaaatacctaaaattaagaaatcac

SEQ ID NO: 50041 - DNA, 1036 bp, Homo sapiens
gggtgacatctttaatgtgcatgaagaaaaaagctatcaaccccagaattttatattaagacaaaccagacatttttatggaaaaaagcaggcagaattaatctggagaattcactacaagaaatattaaaagttcttcagactgaaaatatatgattttagatggaagcacaccctgactacttgggtgtggggaggggagggcttgtaatgccccaccatttgtgttccatctaggttgtggtatggggactagacatgttctgctgggatggggaagctagatcttaagctgccttaccaccatgtgccagtggggcctcacagtgccaggggccttcaacctgaattctccactgaacctgctggtaggtagagtttaggtgtatttggggtgagaagtgggtagaggtagattggttgggccttagtaacaaacatttctgtttctcccactctagcatgagcatgtgaatatttgtgaatttcttacctatttccccccaggggagaaaatgggaagtgagggccactggtaaacactgagttagaacaagtgagtaatcccacctacataatgaatgtgatggagtcattgaagagtctgtagttcctcttctccagacttttgtgattaatttgttcaacctcactggcaacttcttgactgaagacagtattaattagctatttcccctgactggggagcagacgtaaggaccttgagctctcaaggcttctcttaaatttacagaagtggtcttagattctctatggaactagggaatactggctctgcagacgggcttttagtttgctctccagacgaacccagtttgaactctatccactttgaagttgcatcactaaatgaattacagcaatgcttaatctttaaagtatgccatatcccaaacttccaattaaaactgtagagaacttctgattataacaactcagggtttaaaaactgacctgaactgattgcctcacaggtatgagagaatcgaaatcccaatccatattgtacctcatg

SEQ ID NO: 50042 - DNA, 1050 bp, Homo sapiens
tcacttgaaggtcatactctatctctggggataaaatctgcatgaactacttagctgatttgaaaaccactagccttgagcatatggaatgtatatactatattgtccctaatttcccacagccactgttcttctctattctttttctttccctataggaaagatgaaaatatccagtgtaaagttacttaagctaaatcaatttcaaagaagaaaaacttggaggactcattttacctgacttcaagacttactataaagctatagtaatcaagatagatggtattggcagaggaacagacacatacgtcaatggaacagatgagagaacccagaaataaacccatataaatatgctcagctgattttgaaaaagtgaaaaagcaattcaatggaggaagaatagcctttctgacaaattatgctagagcaattagacacccatggcgaggagaaaaaagaacctctacttaaacctcacatcttatataaaatttaactcaaaatgtataacggacttaaatgtgatacataaaactagataactttgaaaaaagccacaggagaaaaatcttcaggatcttgggctaggtgacaagttcttggactttgccccgaaagcacatccataaaagacaaaatctgatatattggacttcttcaaaatttaaaaacttgtgatttaagaagaggaaaagataagctacagattgagatgaatttgcaaaccatatatctgatcaatttggaatatataaagtgtactaaaaactcaactgaagtcaggcatggtagctcatgcttgtaatctcaccactttgggaggccaagatgggaggagtgcttgaggttaggcgttccagaccagcctgggcaacatagtgagactcttgtctctacaaaaagtttttttaaaaaattaactgggcaccatgacacacaccagtagtcccagctactagggaggcaggaggatcacttgagcccaggagtttgaggctgcggtgagctgtgatcacaccaccacactccaacctgtgtaacagagtg

SEQ ID NO: 50043 - DNA, 1046 bp, Homo sapiens
tggtcttctctttcttatttctgttattcatttctagtattaatgcatcttatagttttgcatgtggatttcttcatttaacataattctaaaactttaatatgttgtataggttttataattttagtgcctgtagtcccagctacatgattcactaaacaacaacagcaaaccctggggagagggacatctgatttccagagccaccacattataacatcaaaatgtccagttttaaacaaaaaagtatgaggcatgcaaggaaacaaagtacggcccactgacaggaaaaaaaagtttataaaaactgtcccagacaaagcccaggtcttggacttactagacaatttaaatcaacagttgtaaatatgctcaaagaacaaaaggaaaccatgaataaacaattaaatcaggaaaatgatatctcgccaaatagagataacaaagataaaatttttaaaaggaacaaaatagaaattcaggagctaaaaactataataactgaaatgaataattcatgagagagacttaacagcagatttgagcaggcagaagaaagaatcagtaaacttgaagataggtcaattatcagagacccaagtatcaaaaagaaaaaagaatgaagaaaaacaaacagatcctcagagacctgtgggacaccatcaagcttaacaatgcacccacaatgggagttctagctaaagaaagaaggggcataaagaagtaatggccaaaaactccccagatttgatgaaatctatgaatctacatattcaagaaactctaagtattttgagagggataaacccacacctagacacttcatagtcaaaatgtctaaagccaatgacagaatcttggaagcagcaagagaaatgacttatcacatacaactgaacgtcaataatattgacagccaaattgttgtcagaaatcatagaggccagaaggcagtgggatgacatattcaaagtgctgaaagaaaaagtgtcagtgaagaattatatgtccagcaaaattatcctacaaaaatgaagtaaaataat

SEQ ID NO: 50044 - DNA, 1072 bp, Homo sapiens
ttcaaggggcaggaagctccctgggatggtgagaccagaaaggcacagaggctgaaccctcgtgatggcgctaggtcccaggttcgctagcatccgagagaggggattgggtcgctccagaggccattgcgaaggctgctgccagttctagggtcggggtggggtcaggctaggtccctattcctagggctttagcaccgctcactcacaagaccccttttcccaggaggacgtatgggtttttcctgtcgctccagcttctctttcgcggcccttccacgcttgtcacttacctgagcgcagccaatcagcacctagaggttgggctactttcggccaaaggagaacggggacttgtgggggacgctccctgcgcaccaatgaatgtgcatggagatggagaggcgggcctgcaagtgcgaacaagccaatcacggaatcccggcggccggcggcccgggaggcagtcgcgcgctcgcatccccaagatggcggccgttaaggacagttgtggcaaaggagaaatggccacagggaatgggcggcggctccacctggggattcctgaggccgtgtttgtggtaagaggcacgctgttccctggcatcttggcttgaggccttggactgcccctttcttcccggctcccacccaggcctcgactgttggaaggagctgagccaagtgttcagggagggggcgctcggtctgctctcacccctcgcacctggacagattgagctctgctgggggcccgcccggaagaaacgtagctcgagaaggccgtagaagagaacggggtgcggggccgggacgaggggcgaggggcgaggggcggcgggtggcagggcagggcggcctgagggacctccgggctgccgccggttttcgtccccctgctggttggaaaaggggaggtggtgaggagctctcgactcagcatggatgctggagacacagtacaatgaataggcagaacagccagtgctaagatgtgaaaaccgggaatatcactttgtctgttgaaggaatgcagtggtctcgggaatgttgcctcgggaaatggaagaag

SEQ ID NO: 50045 - DNA, 1057 bp, Homo sapiens
acaaactgggtggctttaacaactgaaatggactgtctcatggttctggaggccagaagtccgtgatgagccccagaatcagggtcgattccttctgagagctgtgagggaaaatctgttctagcctcctctcttagctttggtgttcgcggacagtctttggcatgttgatgtgtagaagcatcactgtgatctccgccttcatcttcacatgtgtgcatgcatgtgtccaaatttctccttttgaaagaccttatctccaaataaagtcacattctgagctactgggggttagtagtccaacttattttttgttggggagacagaattcaatccataataccttacttccacgtaaggtcacattcgctagtataaggggttaaaacttaaatgtatcttttttggggacactgtttaacccataataataccctaattcactgtcttgcttctgcccttgctggaattcctaaagtctttccagcacagtggtcagattaatcctttgaaatctcaatcaggtcattccattattctgcccaaaatctttgaatggtttcttatcacattccgaggaaaagtccaagttctttgagtggctgacaagttcctatacatcctggtactctctgttacttctctctttttttttttttctgagacagagtctcactctgttgcccaggctggagtacagtgttgtgatctcagctcactgcaacctctgtctcccgggctcaagcgattcttgtgcctcagcttcctgaatagctgggatcacaggcacgtgctaccatgcccagctaaattttttggtagagacggggttttgccattttggccaggttgatctcgaactcctggcctcgggtgatctgcccaccttggcctcccaaagtgctgggattacaggtatgagccaccgtgtccagtctctctgttcttctcttacttcctcgcttggccacacttggacttcttgccagacttagagcatgctgggaatggccctgcctcagaacctttattctagctctttcttctgcttaagctg

SEQ ID NO: 50046 - DNA, 1598 bp, Homo sapiens
atattcccaagtcaaggggtgtttggattgttttaaaatttcttgtacagtgagcggtgctgtagtaaatatttttgcacgtatagacttgtatacaaaggcatatttttgtatgctgctttgaaatggaattgttgtgtctaagagtatgcacatttaacatgttgatggatactatcaaattgctctccagaaaagactaccaattttcattttctccaaccgtatataaaaatacccttttattaacagtctcacccacatttttagatttttgctagttttataggtgaaaatagtatcatcttataggtttttgtatgacaaaatgctcatttgtatttcctcttctgtttcccttcctgattatgttgttgctccatttttctgttggattctttttctttttttttttgatagacatttaggtcttctttatatattatgtatttcggatgcacagtcttctcttaatattgcagatactttttctcatctgtcacttgtcttttgtggtagctcttagaagttttaaattttaatgtaatcgactttatcagatatttataattttatcttaacagtgtactcctttcaccaaatctgcaaacatttttttcctaatatttatatacttaaattttttagaaaacttttttgttaaggataacatggaaagataagcaactcctcaggataatgggtgagtgacttccaaaaagagggcctcccaatggccagtaaacatatgaaaagttgtcccacttcattagtaaacagggaaatgcaaattaaaagcacaatgtgatctcactgtgtacccaccggaatggtagggtgatactaagtgatggtaggacatggaatagtgagaacactgatttactgttggtgaaggtgtaaatggacacagccactggggaaactggcagtatctgttaaagcagaacatatgcattgcctatgccatagcagttccatgcctgtctctatctctttctgcctcttgctgtatataagaaatgtataaatattaactaaaagaaaggtataagaatgttcatatcaactctgtagtaaccaaaacctggaaacaacccaaatgttcatcatagtcgaatggatgagtaaatcatgatgtgttcagactgtggaatactatacagtacagaggaggaatgaactgctgctacacgccagcactgcaagggtgattttcacaaacaaggttgagtgaaagaaactgcatagcaaattaccacaaactcagaggcttaaaacaatatccattatctcctagctgtataggtcagaaatccagatgggcttggctgggtcctctgtgcagggtcccacaaagccagaattaaattgtcaacagggctgtattccttactagcatctctgggggagaattagatttcagccttattcacgttattggcaaaatccggttctctgtggttgaggtccctgtttccttgctgcctgtcgtccaggagtcagtctcagcttctagaggccacctgcaatccttggctcatggtcctttctgttttcaaagcagtgatatgactagtctttcttacactttagat

SEQ ID NO: 50047 - DNA, 1060 bp, Homo sapiens
aatacagtagaactccctaaacatttgtctcttaatttaatttggaaaagacattttatttccagaatgagacaaattttatttgctctagaagtagcaccaatctttcttagtgctatctgcttatccaatatttcttattttttgagacagagtctcgctctgtcgcccaggctagagtgcagtggctcagtttcggctcaccacaacctccgcttcccgggttcaagcgattctcctgcctcagcctcccgagtagctgggattacaggcacatgccactgtgcccagctaatttttgtatttttagtagagacggggcttcaccatgttggccaggctggtcttgaactcctgagctcaagtgatccacccgcctcagcctccgaaagtgctgggattacaggcatgaaccactgcgcctagccttttccaatatttcttattaaatatcttatagtttttataaaatgttcaaccctaaaagaaataagtaacagaattttaaaaattccgtggtgcaaataaacagcagactgatgaaacatcttgttctcgcttttctgccttaaaaattgcatgaattcatttttgtttctttccactgtggccatttaagcctccatcctcagcttcctggctctacgggaagaaccccctgttcctctcattataaacttcctccaaactattctccatttataacccatcaaagcctttgaaatcataaattactctctataatctcttctttttacacttagaataagagaaaaataataataataacaaagtaccaacacttttccaagtctcacaaagccctaaataatcctgtccttgtccaaccctctggctcacgctgtgccactcctcttttgttcccagagaaaaggtaattttcttgaacagtaaataacagacaagatgaatgggaaaatatcccattacacccttatgctcaagagaaaatatgacaagttttgatgagatccttctggctaaaaagttgctaatgataatgaaaacaaaaggggatattacttcaacaaatgcaatt

SEQ ID NO: 50048 - DNA, 1077 bp, Homo sapiens
aaaaccaaaacatgacatctaccctgttaaatttttacgtgtttaatccacattgttccccatgagctctgtcttttattttacacccatcaaacagcaagtccctattgtccccccttcttctcagtccctgggaaccaccgtcaaccaccccctactccacaaatcagagaagacacaggtctgcacacctgggtcttaactttcatctgaaacatttttagttctcaaggacatcacggagaatagattcatgctttcatgtctagttataaatgtctggctttgagccggctgcatactcagcttttaaaatccccttgggggcaatgtctcggaaacccactggctgaaaaacaattcataatgaatcaggaattgtgcggaggccgttttaaaatgagtgccttgaaaaaaggaaaaaaaaaaatctacaaaaggcaaagtttaaaaaatgatgtcattccagtaagtgaggaatgaagaaaggtaatttggtctacagagttcagagttcttgttattttacactgggcttgtttttaattgaactgatgaataatgaccagaatgcctgaacatctagagctggaaaaagctggccctggagaaggtacatcattcgttatttgtgaaagtcagctgcggtagtcagtacaggatacagtagaagtatccatttcactgtggacagatgtttagatgccttttcttttttcttgggatttttctttttcccacccaaccccactctaccttttttctaagaaaagtatctggtaacaatccaacatgggaaacttctgcttctttcaagaatataacctttaaaataatgggtgcttaacaagacattctccaagctcctatttttcataactttactgtggccacaatgagaaatatattgtgcatattttacagaaccatccggactcacatacatgcaaacgcacacacgcccctaaaactacagctgaacaagacaatccaaacttaacaatattaatagtgtagaaacagggttatcagatatgaatttattaatcatggttacacagagcactgtttcatttc

SEQ ID NO: 50049 - DNA, 1030 bp, Homo sapiens
atcttaacaagaggctgtctcgggtatcgctttgcagagatggacaggaattgctggagttttttgttctgttttgttttgctttgttttgcggcagagtctccctctgttgcccaggctggagtaccctggtgcaatcgcagctcactgcagcctcgaagtccttctctcaagcgatcctcccacctcagcctcctgagtagctgggactacaggtgtgcgccaccacacccaattaatttattttttatttttattttgtagagatgaggtctccgtatgttgcccgggctgatctcaaactcctggcctcaagcaatcctcccaccttggccctgcaaagcgctgggactgcaggtgtgaggaactgcagtatggggagcacccgttttctgtgggcagtgacatgcacactgttacatgtgtgtgcaacaaagttatccttcaatccttcaaatactgcaacgcgtgggacacctgcccactctaaccactgctaaaagacaaagctgttgacacgagaactcagcagaaaacaaaatcacagagctaaggtttccattccatctgctcctgctcacaccaaggcgctaaacaacacttcaataataaatatgtgttacataagcataacagaataaatatatgactataatatgtaaatagattaatgtatatttattacatattaatgtaataaatacattaatataatttatgttaatatatatttttaatgtatttatgcaatacatgtatattaaatttaatatatacaatatatgaatatgttacattaacatacaatatatacacaatatatattaaagtactatatattaaagtgctgtatatgaatatatgcatgtactatattcatatacaggactttaatatatctacatattatacataataagtatactataatatatagtataggtgtataatatatatataatgtatatataatatgatttatataatatatatttatatgtttagtataatgtatagaatttttatatat

SEQ ID NO: 50050 - DNA, 1042 bp, Homo sapiens
gccgcatcactgctgtctctgcctctgtccccatgtggccttctcctctgtgtgtgtgcctcctcttgagtctcttatgaggatacctgtcattggatttgggcctaccctgttccaggatgatctcatctgaagctccttaattctatctgtgaaaaccctgtttcccaataaggtcccattcacaggttgttggggtaagatcatggatgtatctttttggggacctctcattccgtccactccactgaattttgttaaggtcaggaagtgatttggaatctacaggagaattatttttgctcatggacatttctgataatcaatgagggtgtcatttgaaagctccgttttataaggtatttccgttgctagcatacctgaattagaatatcttaagtcaaaagaagctaaatggaaaacatgactttgagccaatatgagtatctgtcctgatcaatatgagaaaatctcagaagtacaacttgtgccacggacatgtaagtgtctagtatacacttactggttgatgaaatggtttggctttgtgtccccacccaaatctcatgtttaaatgtaatccccagtgttggaggtgggacctggtgagaggtggttggatcatgggagtggtttctgacagtttagcaacattgccctagtacagtctcatgatagagttctcaggagatctgatggttttaaagtgtagtacttccccctttgctcgctttcactcatctgccaccatgtaaatgtgccttgcttccccttcgccttccaccatgattgtaagtttcctgaggcctccccagccatgcggaactgtgagtcaactcaatctcttttcttttcttttttgttttttgagacagagtcttgctctgtcgcccaggctggagtgcagtggcgtgatctcggctcactgcaagctccgcctcccgggttcacgccattccgctgcctcagcctcctgagtggctgggattacaggcgcccgccaccacgcctggctaattttttgtatttttggtagagacag

SEQ ID NO: 50051 - DNA, 1203 bp, Homo sapiens
tacttcctatttatctatgtgcctatccatctatttatcatctgtctttctatgtaactgtttacctccctacctatccatctatcaatcatctatctacctattcatctatctgcttttctatatatctatgtatttatcaatcatctacttacctacctatccctctatctctacctttctgtctatctagctatcaataatctacctacctaccggcctgttggtcttttgaattttccattactctttgctgagacatgcctacaagtcatatagaaccaaacttctcaatatgcaccctagcccattatgtcctaggcaaacccaaaaggttaaaaataacttaggcatattgatcagcgtccacccaaggaaaagcaccacattttccttcggtgataacactgaccacacgagggcagcattgcctgaggatcgttgtatcctgtagtctaatggttttaaatagagtgaggttcgtgtgccccaaattttattgattctaggatagagtagactattattagaatacaatatactattaggacataatattgttagaatacaacatagaactattagactatagttaaaacaatattagtctcagggtacgctgaagttaaaaatacataaaaataaatttaaaaagaatagaatattacactcttagaatgactgtattcgaattatataaagttaccagaattgttaataggctataacattggaatatttaaatatattagaatacaatagaatagaaaataacctaattgtaatgtaataaatcattaggctaattgaaaatgaataattaggccaggcaccatggctcacacctgtaatcccaacactttgggaggccgaggtggttggatcacctgaggtcaggagttcgagaccagcctggccaaaatggtaaaaccccgtctctactacacatacaaaaaaaagccaggcatggtgcctgtaatcctagctactcgggagtctgaggcacgagaatcgcttgaacctaggaggcgggtaggttgcggtgagccgagatcgcaccactgcactccagcctgggcaacagaggtgagactccatctcaaaaagaaaaaaaaaaaaaagaaagaaaatgaataattaaattaaatgaataaccgtctcccaatcaaagcccagtctgctgacctgtgcatttcatgaggc

SEQ ID NO: 50052 - DNA, 1087 bp, Homo sapiens
aaagaccctattttcttttcttttttttttttttttttttgagacggagtctccctctgttgtccaggctggagtgcagtggcgcaatctcggctcactgcaagctccacctcccgggttcacgccattctcctgcctcagcctcccaagtagctgggactacaggcacccgccaccacacccggctaatttttttttgtatttttagtagagacgcggtttcacctcgttagccaggatggtctctatctcctgacctcgtgatccgtccgcctcagcctcccaaagtgctgggattacaggcgtgagccaccgcgcccggcctcaaaaaccctattttcaaataagacgccattcacaggcaccaggggttaggatgtagacatatttttggggggcaccattcaacctagtctatccctcaatctcaatacatcccctgggttaaacatgaaatgtgtccccttcttcccccaaatcaaagcaacccaaaagacccctgtgcacctgcacaccttgcctaagtcggcagcactcactgcgtagatgcccaaaccctaagctgtgatcatctccaccctccctcttgcagcctaattgagcccattctctgcccaagcaccttatgaacaggactttaaccctccatctccaccaccttcccattttcactggaaattttacttcttaaagaggccttccctgaccccttgaccaaggttagatgcatcccaatgttctcctatggatatgttgtttgaagtcctcaagtctgaacaaactcatgtgaggtcacccaagttgttagacttactgtcattaatgcttcctgccctccttccagcccgactggaactaaacaaaactaaatgagggaccaaccttgtgttgttcattgcagtttctcggaggtagacagcacctgagacccaggaaaatatcaatcatgatggaagtgatgcattcatttattatattgactccttttttttcccaaaagctattttgtgttcaaaacctggactgcataaaccacttcattgtggttatggagtgttagaagccgacacctaatcaaagaattcag

SEQ ID NO: 50053 - DNA, 1022 bp, Homo sapiens
cccagcactttgggaggcccaggcgagaggatacattgaggccaagagttcgagaccagcctgggcaacatagcaagactgtctctacaaagtttttgattttttttttctttttttttttttttgagacggagtctccctctatcacccaggctggagtgcagtggcacaatctcggctcactgcaacctctgcctcccgggttcaagcgattctcctgcctcagcctcccgagtacctgggactacaggcgccctctaccacgcctggttaatttttgtatatatagcagagacggggtttcaccatgttggccaggctggtctttaactcctgacctcagtgatctgcctgcctcggcctcccaaagttctgggattacaggcatgagccaccgcacccagccgcaaaaagttttaaaattacctgggcatggtggtgcgtgctggtagacccgactacttgggagactgagacgggaggattgcttgaggccaggaatttgagaccagcctgggcaacataaggagactctgtatctagaaaacatatatatattagctaggtgtagtggtgtacgcctgtggtcccagccactcaggaggctgaggtaggaggatcgcttgagcccaggaggtccaggatgcagtgagctatgatcgcaccactgcactctttgctgggccagagcgagaccctgtcttcaagaaaataaaaggatacagccacacacagagggatgaccatgtgaggacacagggaggatcgcttcagcctgggaagtggaggctgcagtgagctatgatcacgccactgcacttcccaggctcaagcgatcctcccgcctcagccccccgagtaggtggggccacaggtttgtgccaccattccgggctaattatttgtagaaatgaagacttcctatggtgctcaggctggtcttaaactcctgagctcccgtgatcctcctgccttggcctcccaaagtgctggtactataggcatgagcaactatgcctgga

SEQ ID NO: 50054 - DNA, 1051 bp, Homo sapiens
tttcagcttttcagcaagctgaggccggaagatcacttgagcccaggagtttgaggatgcagtgagctaggattatgccactgcactgtagcctgggcagcggagagaccccatctctaaaaagaggagaaggagggaaaatacttctccttctcagacccaaagtaaaaaggtttctggtctcacactgaccagaaaaacattgatatttacttaagcaatattaaaagggtcactgctttagaacaggattaaagagaaagtaaaatcaacattgagataggaggacagaggccatcaactgagttctgatcccaatgaagacgagaaaaggctacaactatctaggttaaatatctacttgtcctagaaaaagccttttggcagcaacataaaattcatacctcttagtttttaaattcctatggatgctgaagcaaataaccacaatttgggtggctgaaagtaacagaagtttattctttccagtattggaaaccaggaatctgagatcaagttgtgggcagggctggactccccctggaggctctagggggtgttccttcctgcctcttccagttcttggtggctccaggtgacgctgtcataggacaaagggccccgggtgccgacctcctcagccgcagcggggcagggccctccacaggaggtcggcacccggggccctttgtcctatgacagcgtcacctggagccaccaagaactccgcgcagggctacccctgcgtcctgggtctccccggggggcgctcgaggaggtggagcttcccccgcagccccggggagtctccccgaccggccaggtgccttccctggaaggctgacggctcctctaggaggccgccctccaccactagcacacaccacccccaggactgggccgcccaatgtcacaaaacctcctgtgggtcacctcgcctgggggacctcgtgcgccctcccaggcagcgaccgcagggacacgggcctccatttgcccagcggcagggttctaggcgtggaatgtacacattgctcccagttcgcccgcc

SEQ ID NO: 50055 - DNA, 1801 bp, Homo sapiens
gcggcaggagactataatcccagctatttgggagattgaacccagaaagcggaggttgcagtgagccaagatcacttcactgcactccagcctgggcgacagagtgagactctgtctcaaaaaaaagaaaaaaaaaaagcattgaaacatgcgacatccacctttttgtaatagttcccatagcctacacaaatgcatatgaaatgcttaatattttgcttgcactattcttttctgctggaagggtggttctgactaaaaaattttactttcccattctttgctttttcattaatgctattttctttgctccagggttatagagtggaaagtcccacaatctttttcttctctattttcaggtagatgcattttattactatattctatctatccatttattccatctatctattccatttatcatctacctacctattattatctatcatctatgtattccatctacctgtcattgatctatctatcatctaccaatctacatttttgtcttgtagaaaaacgttgacctcttggcgagaatgcaaagaagggaacgcttgcttatacgctgttggtgagaatgtaaaattgtacaatctctatagaaaacagtatgtagatttctcagagaactaaaaatagatctaccctttgacccagcaactccagtaatggttatctacccaaaggaaagaaattatcagaatagacacctacacttatatttttattacagcacaattcacaatagcaaaatcatggaatgaacctgaatgttcattggatgaagaaaatgtggtatacacacaccaaggaatactatgcatctataaaaaagaatgaaactatatcttttgcagcaacataaatggagctgcgggtcaatatcctaagtgaaataactcaaacagaaaatcaaataccacatgtcctcgcttataagtgggagttaaaaaaaatgggtacacatggacctatagaatgacattaacagacacaggacaccttaaaaagggggaaggtgggaggggatgagggtggaaaaattacctatctggtattatgttcactgtttgggggttagaaggccaatccccaccgctaggcaatatatccacgtaacaaacctgcacccttatgccctgaatctatttgtttttcaacattgacttccatggtcactatttgtgaaatcactcctcatgaaccaggacttgcatgtttttttgtttctcaggtgaactgtcacccctacaactcagcttgcaaccagccctggccaccagtttccccacactgagctgaatatcggacatgcccatctcagacattccagcccattctgaaattccacatcgattcacctgacaaagtctgaagttccagggcaatttatctggaaaagcttacctggaatcacgtgtcatttcaaccaacaactgttgaagaggacgtggcattaaaaccaagggtatcaattatttataagggctgtgtgctggttggtccaagcatctctccttcacgccatcactcctttcaagagctgcctctgttttctaatttagcacaggaatttagatgcccctaaataagtaggcatccagtatctgcccacaccagttttagtgagagtacatatggagacactaccaccacccctgctctcctactgcataccccaccatgccaaagcatggtggctcacacctgtaatcccagtgctttgggaggccaaagaggaggaacacttgagatcagaggtctgagacgagcctgggcaacatagtgaaacctc

SEQ ID NO: 50056 - DNA, 1035 bp, Homo sapiens
ctgcgcccagcccctgctgcactttaagcagagagaaaaacactgtagtcataagagctattaaatacagtacataattttaaaacatttttgaaacacagaaaacacatacttttttgatctcaggaaggaggaggagttagtaggggaggcttgcacccatccatgcttctgagcgtgcactcacacatgcatgcacactaccactcattcacatacactcacacacacttgcactcatgccctttacactgtgcacattcagatccacaccatgtacactcatacactggcaaacccacacatgcatcacacacctacacttgcactgtcacacgcacatacacttaagcacgttcacaccctcatggttacactcacacgcacagcctcacatatgcacactcaacactcatacatacacatttacatgctctcatttatacacactgatacatccacacaccatcacactacacacacttttacatgctttcacacatacccgttggatatggacacaccaacaagcactcattcccacacatgcttgcactgcacacactgacacactacatgccttcatagttgacacacacttccatgcattcactcacctttttgcacactcattcacactcccatcacaacactgacacacttctgcctgtcctcacacgcctacacacttgccacacacacactgagtgttccatgcacactcacatcctgcgcattcagtcactaacttaccctcatgaccacacacacacagactttcaaatgcactcatccacagacacatattctcatatgcatacgcacttgcacacaaccctcgcacgcttgttcacactccctgacatgcagtcacactagccatcactcatgtgctcacacacatacacactcacaccccctttgcacacacacttcccccacccactcaccccaagcccacctgacaggtgacacactttacctgcgggctgggatggctggtcctctgcctgggcttcgaggttccttgggggc

SEQ ID NO: 50057 - DNA, 1344 bp, Homo sapiens
tgccgaacaggctggaagatgcatgtctgtgtgtcggcatgatttagtgagcaaatctgatgggaacgcagccgtttctttaggtttggtcagtaaaaccaatggcagtgcgctcttggctgacgctgccattacagagggtgatgttgagaaaggcagtccctggggatgcttctggtgtgtcaatagcctctggctgctcagcgtgtcctctccctcctgccccttctgaaactcccgataaagcaggtgtgagtcgctgtaagtttgcattatcacatcaaaattttttttccaacatattttattgtagtaaaatatacatagcataacatttaccatcttagccatatgtaggtgtgtggttcaggggcactaaatacattcacgatgttgtacggccatcacccccacacatctccagaactcttttcatcttgtacaactaaaactctgagcttcaagttggggtaagcggggcgggggtggggactaaaactgtccccataaacaccaactctccattccctttttccccaaccctggcagccactattctactttctgtctctatgattttgactacgctgctttcttcacagaagtggaatcacagaatatttgtctttctgtgactggcttatttcacctagcacagtattctcaaggttcatgttgtagaaagtgtctgaatgtcctttaaggcggagtaaaatttcactgtgcctaccacattttgctcattcattcatctgtcaatggacacttgggttgcttccaccttttagctattatgaataatgctgctgtgaacacgggtgttcaattacctccttgagaccctcctttcaattttttggggtatatatccagaagtaggattgctagattttaagtggaattttcattttctttagttccttttcagactgttcattgtttgttagtatttagaaatgcagctgatttttgtgtattgactttttttttttttttcagtctcactctgtggcccaggctggagtacagtggcgcagtctgagttcactacagcctccacctcccaggttcaagagattctcctgcctcaacctcccgagtagctgggactacagtcacgtaccaccagtaattttttatatttttagcagaaacggggtttcaccacgttggccaggctggtcttgaactcttgacctcaagtgatccattcaccttggcctcccaaagtgctggaattacaggtgtgagccaccgcacctggcctgtgtatttaccttgtatgctactacattgctgatttcatttattagtttttttttttttaattcttttttaaaaaag

SEQ ID NO: 50058 - DNA, 1029 bp, Homo sapiens
agacacagatgtttcagcttctacttagcagctagcccaaggtctaaagggtacatgttttgagggtaatagaagcaaggaattttatgttctcttgtcataattgatattgtggggttttttttaggctattcaagattctgactattccttggttaatttttaatggatttttgagtggccctcaaatcatttcggagctctgtctactgagatgaaatcacagacttcatgaaccatgggaaatttaaccagtgacatgctggtgagccattgttcaaatcttccaatgtattaataaatcaaccggagacagagacaaaggtcggggggtggggggagagacagagagtgacagagagaggagaaagagaagttcaagactgaacatgaaggatcgaaggatctctggaaatgcctcccagagcagtaaagaggaaaatattgaaaaaacaaacaaacaaataaacatgggttttgaaagaaatagaaaaagtttccattgacttttaaagatgtagaatgtggtgatggaatattttataaggtactgtggaacaaataccaggggtatgatggatgtaattcaatgccagctataagcaaaaagaggcaggaaagttcatatggatgggtgaaaaagagatgcccaaattttcaagcagattggatagtttaatctgatgctcagaagagtgaaatgtgcactcctaaacttttgaaagtttgaaaatacaaagactcaaggtagcatagaatgtttgcaatacctgacatctgagctaagacgtgttaccaacacaatgccccgaaagagtggatgctattgcagagaagagggattccatacaaaataacagacaacattcattcagagggtttctttttcttcttttcttcttgttttatttttatttttttgagaaactgctgaaaatttcactcagagggctgtaatctgtgtaagacaggtctcttgaactgagatactactattcttcatgtgggactcatgatactaaaaaaaca

SEQ ID NO: 50059 - DNA, 1049 bp, Homo sapiens
caatagtaacagtatatttatttaatccaagggagagaacaccgtgggaaacttagccacatggctagcaacacacctagtcagaagagaggatacacttcttgttttcacttaacagatttgattggcatctagatggatcaacttcaccagcatggtacaacttcacacttcatttggcgtgtataaacacagcctatagtttcccagtttgagttttctcctgggcagctgaatgctacagagtgcagtaattggactgacatctacactgataacagaattgtctgcagacaactgctcatcttttcaaaatgtttacatctctattggtggtctgtttcctctctacttggtctgaaacaatttatgagacatttaacaaacaataataaatgaaccctattaatatactcagatggggttcttgacttctattttctctgtgaaaggatgtctactggtagatattaagcggttagttatgaaagcagctttcatataaagtggataaaatatttttgtaatctgtaatagaatgagaccccccctaaaaggggcaaaaaggtagaatgtacagtcagcatttgtgattcatgctcaggttggaaaaaaaaatcctttctttcttttttttttaagagatggggtctctctctggtgcccaggctggagtgcagtgtcgtgatctgaggatcatcactcacagtagccttgagctcctggccttaagctatcctcccaactcagcctcccgagtggctgcaattacaggcatgcaccaccatacctggctaatttttgttttaattttttgtagagatgaggttttgccttgttgcccaggctgaaaaattatttaccagagcatttacttgaattctgctagaagtgtttaaaccttaatttttctgattagtgtttttgcttaatggataaacaactatatgatcttaggttatgtcagcatataatgcaatttgatgtaatggcaatgtacaagaataaattggttgctccatccatctgattgacaactagtttttata

SEQ ID NO: 50060 - DNA, 1095 bp, Homo sapiens
accttaacgattcctctgtcattctaactgaattgtaattcatctgtttccactgatgcaggacagtcctttgagtagtcttggttctcccctcttttttttcttggagttcttaagaataactatagaatgtgctgggaatgcaacatcttgagataagggggagttacctagaacagtccaggctctgttccaatcccctcatagaaataggatgtccttcaatgctttagcccagcgggtcccatggccccaggtgtgaaacccagggcaggctgatttatggggtctcttagcttcagtgcaacttgggcatgcacagaagagacccccatctacccggggcagcttttctgagccttggaagagtggcttgctatgaagtcccagcttctattgcttcttgctgcctagttgaaagtaacaaacccactttacttactctgtgcatgagtgttctgtctcactggatgcagacaagtgggtcatcagtgcacagtgaacctgcttcacaaatgagaaaactgagacccagaggtatggaatgacttgcccaagatgccatagtgagtggtaggatttaagcaaagaaccctagaatgttgctcttacattggactcaatgcatgtgatgtacacgtgtgtgtgtgtgtgtgtgtgtgtgtgtgtaattgtgctgtctgttacatcttcacttccagaccacatgctgaatggcagagggaggaacaacaacaacaaaattcaaggccattctgcaaaatcaacacatatgatcccgctttaatgcaagcataatccaatcttagcacagtaatatggctcacggacatttcacccaaaacactgcagtgcagaagtctttttgagcattatcctccttggcctctgcctttttccttcactgcatgtagaacagtaaccatggggtaacatggtcctgggccatgaggaatggatttagacttctccagtgattgagggtatatgttacatgctcttaagtttttatttagaaaagctcttttccatctaggaggctattcaatagacacttttcaccatgaaactgaccatggaaaattatttttcaaa

SEQ ID NO: 50061 - DNA, 1074 bp, Homo sapiens
gataaatcatgtgaacccctaatatgatatgatgaaaagtgctcctcactgctaagatcttcttccccaaaacctataactctagtttaatcatcagaaaatatcagacaaaccaagatagagggactaagacaaaatatgtcttagtccatgtgtgctgctataacaaaataccttagactgtgtaatttataaacaaccgacatttgttgttcacagttctggaggctgggaagtccaagatcaagacatgacagagtctgtgtctggtgaaggctcacctcctggttcataaatggtgccttcttgctgtgtcctcacatggtggaagggcaaaaggggggaacagctccttaccacctcttttataagatcattaatcccattcatgagggctccaccctcatgatctaatcacctcccaaatatctcacctcctaataccaccacactggcaactatgtttcaacatgtgaatgttgggagaacatattcagaccacagcaatatcaaggtcacacaaaacaaggaattctgagaaactcttacagtatagaggaaactaatggtgactaattgtaacagtgtcctggattgaatcctagaatagaaaagatcattattggaaaaactgtggaaatcctaatacagcctgtaatgcagttagtagttctgtaacaatgatggtttcatagttttgacgaatgtgctttggttgtgtaagatgttaacattaggggaagctaagatatatggggaatctctgtactatcttcataacttttctgtacatttaaaattatttcaaaatagaaattttactctaaaaaaattactaccaaaggagaaaagagtcaaggaaaagaaaattgttcctaatccactgtggactgtacaaatatatgtaatgcccattgaacacttactttctgtgatattccattttctcaataatgggtgtttccatatagcaggattggagatgagcttattgagtccctaaataaaatagtgatccaggaatattctgggatgacttcagttgtagctcctgtatttaacagttatcaagag

SEQ ID NO: 50062 - DNA, 1039 bp, Homo sapiens
cttaaaaagggtggagccagccgggggcctttaaaatgatgctgaaatgaaaaaagaagaacagaacatgatttatgaagatgagaaccggaaagattgtataccacaacgcagccaaaaaccgtgaacaaagttatttctaaggaatcaattaaagacaatattgtttctctgaaatgagaatttaaagaagcaatataaggctttaaggaagaactgataatacattaggttagacgggaatgaaaagtgagtgggtaaagcctcagaaataaattactaataaatgagaatgaaaagggagcagacagagtcttggaaacaaattagaaacaaatgagaataaaaacggaataggcagagcctcagaatctcagagagagagacacaaaaagagaccaaaatcaaaggtcatgatagaagcagcaaaaaggagatgagacaccactgaaagaatttgaaggatggttttgagaagaaaaaatgagcatgtgagatggaaaagaacaaaaagtaaaagatggaagacagagatagagaaaaagagggggatgggagggggtggtagggaagagatcaaatatctataacactaaatgccttgcatgggttaaaaaatgaatggaacatgaaaacaaattttcaaagatacaattcaaggtgaaattcctgaaatacaatgaaatttgaatctgcagacagaaatagcccaagaattacaaggctgtgtttatattgaataattaacaaatatcccaataaattcctggtatttgaagttatggaaagaattctgtggatattcaaaaaaaacaaaaacctaggaggctaagatttctttatgtgacacatgaaatgctagaagacagtggggcaagatataaaaagtccttgtcccttttgtgttgctataaagaatacctgaggctggataatttataaaggaaaagggatgatttggcttatgattctggtggctggaaagttcaaaattgggcatctttgtctggtgatggccacagcctgctcccactcatgg

SEQ ID NO: 50063 - DNA, 1032 bp, Homo sapiens
aaagcagatcttcaggatggctcaaaatattctggttctttatgagtctcttgaatagataatattttgtacacataagcaatattatttttttctccttcattagccacacaatatttccatggattgtaattgttttcatcagaaaaactgttatccagatagaattaattcaggaaatactgtttacttacatgacagtcattgtagatgtacaaaactgaataagaacataacttagggtattttgtctgttaaactttagtcatgacatgttggggttggtttcgagatctttttccagcaccatggaaaacacaagggacagagagaaatgttggaattcgcagtgagatcattgtgttacctgttccgatttaattgctcctcaaattaactacatttttttctgtacatcttttgacctaagttgtttgtgaaggattaagtcgttgcctccctttccttggttcccaacagtatggcaggggcttctcacagagtccttttgaaactgtaaaactatcacccttgtattaaagcattggatattcttcattgcaaaatgcccataattttcaagttctacgttaatttcaacaacatggtatatgaaatgaatttttttcatgaaaatattttcaaatatttaccaaaatgttaataattatttctctaggggacaaaatgtattttaaaaactacttgagaattttaatattccctaatctctgagcgaagatgaaggcttgggaagcatgaagtcatattcattcactgcttatttcaaaaccgtgtgaaagggatggtgaattcatccttcacataggcaaagtcacttaaaatgatgtattttcaaaattcactttaggaaagaattggcagtattccatattcagagtcaaaataaactgagaataaatagataaatataaagaatacctatctgtttgtaaaccaacagttaatactgtacatagtggtaaaatagtcattccatttaaaagtcagaaatgaactgtcttagtcttt

SEQ ID NO: 50064 - DNA, 1050 bp, Homo sapiens
aaactgtgtatgcatataagtatatgctttatgtatgcatatgtatgtagatatgtttatatctatcgtctgcatcactctcctcagtgttgatgtcaacatgcaatgacaactgataaagcgagatggtagttctgcctggtttgcagtctgagtgggaaagtcctgtttttgatgagcactccttgttagctaacatttaaattctttttgtgacctcagaatgtctctggatctttcctcattgactgactctgtgccacgtcatccatagtttattgttagtatgaacacaactgtaacatttacctggtatctacatccttacctgcattggaaaatgtttgctacctcacaacaaccatttgcctcctttaagaacactgatgggctgcactttttggatagaaatagaatttgatttcagaatgtatgcttggtgagtctcagtgcccaggaacacttttggaataatttatcagacattgaacttctgtgattaatcgcttttatagatttactcagtctttaaaattcgtctctgatttgccagagaaaaacggtggtagccatggaaatcgggagtgaaggagcactgcttcattgtggctcagcccttcctaggggcctctgccctttgatgtccttgagctactcttcagctctggaagttgtggacaaaccgtaggaatgtatgtgtgcgtgtggtggagtgattgtctgtgaatgacaggccctggctattgattgatgttgcatcaatttagcaaattcatttcctcattcttgatggcctgaatatatgtctgcacttttaatgctcctcttaaccagttgtaacatcttaccatttccctaacaaattgaattagtttaataaaatcttttgacacatgttgatatttgtatgagagtcatgattttaccttaaaaagaaaaaaacagtcttccaagaaatgtaaaatatatatgtgactaattaaattttttaaaaatcccaattagtactccaactgtaaacggatatttatatattttaagtgagccgtc

SEQ ID NO: 50065 - DNA, 1047 bp, Homo sapiens
gtgagacttattcactaccatgagaatagtatggggaaaactgcccccatgattcaattgtctcccaccaggtccctcccacaacacgtggggattctgggagctacatttcaagatgagatttgagtagggacacagcaaaactgtatgaccccctttaggtgagtgcaggtgtattgggtgccttccattatctctttgggaacagccacagtcagctactgatttcccgtcccacacacctgtcttgctccttggaagcagcctcacgcaaatagagaataaaagctgctttcacaacttagccaagcagtgttaccccaggggataatccatctcttcctctaccccagtccacatttcacaggtggaccctgcacaaagcttcagaatccccggagaaggtgacggatattttgaaatgtcatttgacatttaagtgcctatctctggtcccagataaaaacagtggagggcatttagaatacaatcaagtcataacttttaaaaaggcaagggcagaaatatcatgaacaggtagtcactgaatgagataacagagaaaaccaacttggacagtctaagtggagtcatttcttctcgcgtcctacggtgaccagtgtctcacaggagaaagaaaccagggggcatcagaggctgttggaagggaggtgttgggacggactactgtggcttgcctgggactgtccagggtgtagcacggaacatcctgccccacagctgacccttcagttccaagcaaaccgaaacagctgggccaaccaagttccctctgtgaaagtaaggtagcattcacattccattgtcacatggattaactcacttaatccagggttcagccctgttgggataagttggctaatatgatattttagccccagattgaaggaaagaatggggtaatggaaagaaaaagggagggagggaaaaagaaaaaagtcattgtgctggctacagcacagaccactagtagttaagactgtgtgtgtgtttcagtgttttctactgaaaacgccaaagaatgca

SEQ ID NO: 50066 - DNA, 1024 bp, Homo sapiens
gccaggccccacatccagcacattctcgctcttctctagcccccacagccaggtcagtcttctagcccaggctccatcagcatctcaggttagagaaaggaaggcaagatgccttccacctctgttttccaggattgagaatatgctcacgcccctctctatctaaaggaaaggagagagggatggaccaggccctgtgttgccctcacaggtgccctgggcgccattttgtcatgagtggtcagcagagcccattgccgaggggcctagggagggtgccctcacagagctggtcccttcagttctgaattaagcagtagcctcaatgccatgtaagcaaccattcctgcaagaggataggcatttaaggtgaaatctgcctcatctgtcgttatttacaggtaagattcagaatagttcaagaaaacaaggcaaatgaattgcatttgcattgacgtgagtcatgccacattcagctactctttgtgaaaacgtccccaaaatagattcctcggagtgctgctttgcgggaccttcatcgatttgctctgaagataggtgtccatgcctgagaggcctcagtgaggtttcaactacacagttatccatggcagcacttctggaaacatttctgtgctaattgtacatggcaggtccccagttcctcatttaatgggaggaatctcctttttctggaaaatttctctggactgctgtgtcacagaacattctagaaaccccttacctcatgaacattctactactagacaatttagaattgaacgttaatatgggcatgggaggccagtgaaaacaacataagcctcacctggtactgcaacacatctttgtttgggaaacactgactttgcaaccacagctataaacaccggcttttatttcaggagtcagcagttactatatttgcaggaaggagaactgagggcatccctgtgaaaaccagaaaataaatccatcctgaagggcattggctttgtaggcctctcatcccctgttgagtagg

SEQ ID NO: 50067 - DNA, 1070 bp, Homo sapiens
tccttacacttcttttctttcattgaacttgcctttgggcttggtgtcccttctgaatttcctggcacgagggcacttgcttaaaccaaatttcactgtcagaggaaatgtgtttcctctaccctcttaggtgcagtgattgggggcctgtaaatcagactaacaaaagacagactatcaagagtaaagatagatttgtatttacatacaacgaaggagttcacagaaaaatgtgactcaaggaggcagttagaatttcggatttgtatgtcatcttaacatggatgggagagaggcagaaggacacacagaagaataaacttttaggaaaacttttaggaaaactaagtgggccgttaggagactagatggtggataagatagttttataacaacatcttttggggcgatttctcatctaggtgtgacaggtgctgacttcttatctttggtgataagactcacacttccctggttgtgaaactcctgagcattggatgtatgagggctgagggctgaattcttctggaaggctttccttagaaagggaagggagtgcagaagccttctgttcctgtacttgatgcttactgtcttcagctctaataaccctcatgccactgtggcatgttcctcagtccatggaggccccatctgcttctccccaacaccccatcattactcccctgcccccttctctgaatgcccagcacccagcactaataagaggccctctgcctgccgagcgcacgtggcatccttgtttctaaacaaccctgaggtgcccggcccctggttctcaggtcctgcctttatccagcccgagtagccttacgtccgtgtccagaacactagccttggggcatcttgctctcccagatgacctcggtgtccctcagtcttgttcccacattagctgccaggtgccacaatccctgtttctgactgcatcctcgcctcctcacctcgcctcggggggcatttcatcctggcatctgccgctcctgactgctgaaaccacagacatccgtttcccacgctcctctgcaacgtctccctctgctggctgc

SEQ ID NO: 50068 - DNA, 1020 bp, Homo sapiens
aaggtgggaggatcacttgagctcaggagttaaagactagcctgggaaacatagtgaaaccgtgtctctacaaaatataataatgatgatgatgataaatttgccaggtgtggtggcgcctgcctgtagtctcagctacttaggaggctgaggtgggagaatcacctgagcctaggaggtggaagtttcagtgagccgagatcatgccactgccctccagcctgggtgacagagcaagactctgtctcaaaggaaaaaaaaaaaatagagagtacattctgggtggtgacttagggatacaggtgttctgtgaaattctttcaactctgctgtacgctggaccatctctacagtgcaatgttgggggaggcagctctgcctagtgtgacagtcagaccaaaagttcactcaggcacaaattagagcatcataggggaactggggatggcacagggcctgagataaatgctcagcgtttttacagagaagaacagagggtgggattagtgctgaacagaacaagtccaacaggagtgcagccaacacagaatcaatcgtgaggactttggaaaccaagcagaaaagtttacacatggtacaataggcatttgagctcactggaaattcttagaaggacacattggccatgtctgtgttttagagctcagtggagtactgggtgacagattagaaataggcagtaagggaggaggaagtgccaggtgtgattccaatgtgatttccttcagggaacttatagttcaattagaaaaaaataagtaatgtcaaaagttataggaggcttaggagaaagtgaaattaagaaaactgtcgctgggcatatattcatatcaacttgtaccaaatttgaagaactttttgcatctctgtgactctttcctagatttaaaaaaactgaaaaaaagatgtagctagttaaaaatacatgtatttttctaatacctgtaactgcatgtgacatttacacaaagtttcatcttaacttatccttatcgtaca

SEQ ID NO: 50069 - DNA, 1050 bp, Homo sapiens
ttgttgggagaagtattacataaacgtcaattaggtcaggttgcttgacagtggttctgaagtctgctgtgtccttacttcttttctgtctacttgttttatcaattactgatagaggagttttaaacttccttctacgtttgtgtttctccattcagttctattggtttttgctttatgcattctgaagctctgctatttgatgtttacacatttagaattatgtcttattgatgaactgatctatttgtcattatgaaatgtccctatttatccctgatgatagtcattcattgttctaaaggcttgtttgttattaatgtaagtaacctggctctcttttgagcaatagttatgtggtatgtagttttctatccttttatcttcaatctatctgtgtagttatatttaaagtaggtttctgtagacaacatgtagttgggtcttttgtttttcttttttattctgatagtgtctatcttaggtgtgtttataatacttataaagccgttacataaggtcatgatctgctaattccatctgtctctatcatttctgtgtctatttctcctgattgtgggtggtatttgcttctttgcagcatggtaatttttgattgaatgttagacactatgaattctacacccagtggagtgctagattttgcttgatttcatttgctttatttaactttgtcctggaactacattatgatctgtccatgccttccttttaaaaatctttagagggtcaggtgctccagatatctgttaccttatcctgaatgactgtaggtgttcggaaaaaatgagtctgttgattgttttgtgtaacaattgacaaagtagggacattaaatcatgacattattaaaataggcatgattatacaattatttaaaataattttaggccaggcgtggtagctcatgcctgtaatcccagtactttgagaggctgaggcaggcgaatcacctgaggtcaggagtttgagaccagcctggccaacatggtgaaaccccatctctactaaaaatacaaaaattagctg

SEQ ID NO: 50070 - DNA, 1088 bp, Homo sapiens
tggccgctcctggggtagggggtgacctcgggggagtccacaagaacagaagagatacagatgggagaagccatttcaaaaggaaaacagcacctgtggaggattccagtcagccagtgagtttgcttctatacagcatgaagccaagcttctcatggctcacaagcttcagagaggaattgtggctctatgagttgagcttcttattccccagctcatctgtttgctttctggatagggagaaccattgggatttttaaaaggaggcgtgtcagaatgcaacctgcacttggggagaatcctctgggtttgtggcacacaacgcctgcagcctagaagagatgggccagaggaaggccagggtgatggtaaaagacatgcaccccccttgactgggccatgaggtgtccagacggaacattctttggagtgtgtgtgtgagggtttttctggaggagattagcatttgaattggtggattcagtaaaggagattttcctttccagtgtgtctcatgaaacacatcatttttcgcatcatgaaatttgtcactagaggaatgaaaggatgatcttaagtagggagaatatcccttcaggataaaaaaaaaaccacaatcatgatatgcttttttttccattggagacacagtctcattctgtcacccaggctgcagtgcagtggtgctatcatagttcactgcagcctcgaactgctgggctgaagcaatgctttcacctcagcttctggcgtggctaggactgcaattatatgccaccacacccactaaggtttttttctttttttctttgtagagacagagtcttgatatgttgcccagtctggtctcaaaagttctacctcaagcagtcctccttcctcagcctcccaaagtgctgggattacagacatgagccaccacactgggccttttttttttctttaattacacaaattacacttgtttcacacggtacaaaaatgtatagcattaaaattggaagcccttctaactcccactctcctactccctggagataaccgttactcagtgtttaactatttaaggtacctcatttcaccccttg

SEQ ID NO: 50071 - DNA, 1032 bp, Homo sapiens
ggaaataggaaaataaatgtaactaaaccataatggggtacaatataaaggaaagtaagtactgggatgaatatcatcatagattgtttattctttaatttgtactaatttgtacatttgtatatgtacaattaagcacttcttagttaagattgatatatttttaaaatcacaactttatagagcacaagtcttacatgaaaacataatgccaggtcagtggccctccacttgagcacacattcaaatcactgagagggctctgtaaaacacacattgctaggtcccaccccagcttctgattctgtagatctggggtagggcctgctgtgtggtttgaacgtttgttctctctgaaactcatgttgaaacttaatccccaatgtggcagtattgagaggtgtggggtctctaagaggtgttgggtcatgaaggctctgccctcatgaatggaccctttcgttcatggattaatagattagtgagttgttggatgaatgcgttatcaaaggagtgggactgctggctttgtaagaagaggaggaggctgggcactgtggctcacacctgtaatcccaggactttgggaggccgaggcaggtggatcatgaggtcaggagtttgggaccagcctggccaacatagtgaaaccccatctctactaaaccccatctctacaaaaaattagccaggcatggtggtgtgcacttgtaatcccagctactcgggaggctgaggcaggagaattgcatgaacctgggatgcagaggtttcagtgagctgagatcacgcctttgcactccagccctggctacagtgcgagactccgtctcaaagagagaaaaaagaaaaaaagaaaaagagagagagagagagagacctgagctagcatactcagccccctcaagatgtgatgctctgtgctgcctcgggactccatggagtccccaccagcaagaaggccctcccaaaatgtgtcccctcgacgttggacttctcagtccccataactgtaagaaatgaatgtcttca

SEQ ID NO: 50072 - DNA, 1022 bp, Homo sapiens
gcttttgtaccatttggtctaaattgtatctctattgtagatatcatatagttagatcatgtcttttttaaatccattcttcaatctctaccttttaattggcgtttttaatctatttacatacaatgcgattattggtaagacaggatttacgtgcggcatgctgctgttttctgtgttaagtcttcttgttaccttatttctttattactgccttttttaactttagatattttttagcgtgccattttaattattctgtcctttactgtatttcttagtgattgctctgtggactatgataaacatcttaaccacttattttaagtagttcacaaacctctgctcctatgtagttccgtttccgactctcttatttctgttgctgttgtcatacaaattacatgtttataccttgtttgcccatcaacacttataatttacttcacacaaaatttgatttacaaacaaaacataacgtttatactgtctttaatatctcccaaggggcaaaagcaaagcccagttgtgagccattgccttaaagtataaaaaataagtgttacagcattcttgtcctttatctcattttaaggtaacttagcacgatttagaaagaacaccagagacgtttttttaattggttattggataatgagaccccaaaaaaccctggataaaaaatgttccatttttaagtgtttccaaatctggcttgatagtttccagaacaaaaaataaagtaaaactttataacaatttttggtataaatacttcaagttagaactttgattcattaatctttattcaaatactgaaagtatgttgagaaggaaaatatatacaaactcataacgtaactctagtaataatctcaagtgagtttgacctggggagaaggtctgttcagagaaaggtgcatgtaatcgggtgatgagaatctgaatttgagccagctgtatccacacagtctttataagtcatccctaacactcagagcaattgcgcgggatagctgttt

SEQ ID NO: 50073 - DNA, 1076 bp, Homo sapiens
atcccctcaggtatgagaatgctcagggctcaaagacagagaagagctgtacgtcacactgttggggctggcagcaaaatgctgagcaaccttgggctctacaacatgtcctccatggaggtcaggctctaggcctgttctgttgactgctggagtctcaacattcagaacacgggtccaacatggcatgtgtattgacagagaagcttcaggtaatttttatgtccttgaatgaatgggcacatgttacatgacagagcagggactagatggagccaatatattagatccccttctctccacacctcattttctatatagtgcagccagtatgagaatataaaatggaaaggaagaaggcatatcattttgtatgtgctctatgatctttaaatgttattaaatgttggtaatgaaatgctgtggtataactaattatatcctagcacctctttcccatatacttgcattctctaattatgttcaaagcaatggttgcccgaaggctaagggtactcggtcctttcctcccccatgaggactatgttttagcttgtaatttcacctgcaggagctcacaaaccagctgcatttgagtgcaattatactttattcatagtgactaataacagaaaagagacatcgtgggggtttgggctggagatttataatctcatataaaaaatacgaattcttgcttatttatgggttgagcaccttgggcccccgctgtttcatctgatggctgcctgatttttatccgcaaaatcattcattagtatctacactagaatgtaaacacagaatgtaagataaatttgttgtgcagtacttggatagttagaacacatttccccagatagaaacattaaaactagaggttattcactcccatattcacacaacctttatgcacctgaggaggttccgaatgtccctgaccatctcttatttcttatgggaaagtgtttgggtaccagcttggaatgccaggagtgtaattctccagggcagcgactgccgcccgtgccattgggtccctagccctttttcatgctctgctttctgatgagctt

SEQ ID NO: 50074 - DNA, 1028 bp, Homo sapiens
gcctactatttgctgtcatctataatgggcattggggtgcaaggatccatgtgacactaaccccccacatggtccagtagtttattactgagattgtcatgctcacaatactctttaagtgggcaaattgtttttctaacctttaaataaatggacatttaccaacctctgtatatatttcattttattacttaatgaattaatttttaaaaatatttttaaattataaaaactcatacatactttctgtttggtctgctgtgtttgtggaagggaagatagaaagtactggttttatagcttcaagagctttttatactggtcacttgagtttttaaaagcgatgggtgtcttgaaaatatgattttgggctatgctgtaagaactgcacttaactgatgcctggaagtaagttaaccttcatagactatagtttaaaacaaacagcagagatcctttcttttactttttaaataaaattattagcatcaaaatgaaggcttggaaatattaacatgattggagatgcctgctggtactagttctatgaaatgcaaaacttcatatagttgtagaaagtctacaggtagaatacaaatgagtgcatttgggggcactcacttcctttttcctttctatttctatttcctctctaagtctattttatggcttggtgagacaatctttcctccagagggtgatatattttactattttgttgccaaatcccactgcctctcttggcttccaactgtagcaaaaatggtttgggcagggagaaagaaaagttaaaaaattttacaaacgtaaagattcagactaatttgtgacctatagtttccttttgccatggataaaccaagaattaattgtacttcagtctgtttcttttcaaaaagacccgatcatagagttaatttaatatttccacaaataattaatatatcaaatagtgaaacttcagacctctggaaatagatttatacaacttctcacaaataaattttcaacattttgcatccagtagc

SEQ ID NO: 50075 - DNA, 1059 bp, Homo sapiens
tgggctcaagcaatcctcccaccttggcctcctagagggctgggatgacagatatgagcccccgtccctggccatatctcttggtcataaaatgaggtgggttttagagccagtctggcaagctggctgaccttgggcatgtcattaaagttcatggtgcaagcaaaggttagtattaataactcatcagggagaagtatgtgcaagggccaaacttgagtctgatgcctagtcaggagaaggcagaggaatggggagaacacaaacaaacctaagccagtctcccaaagacaatgtccacatgtccacctgagacctttttgtgtgtgtggaacaagaaacaagtttttgtgtgtatggaacaagacagcgttgcccagagagctgcctcggaagtcattatcagggatgggtttcatgttatatgcaggaaggtagccccttctcctctatgctggctcccctgtgttcagtgggtgtcaagctgatgtctgctcttgttcatgttttccatgatgttctagtgcatttctgcctacatctgcctgagaacttggccaaagtgtgaaagtgtccctcctccaacctgccatctactctcttttttgctttttgtttttgtttttctctaaaaacaagctgggcgcagtggctcatgcctataatcccagcactttgggagactgaggtgggtggatcacttgaggccaggagtttgaaaccagcctggccaacatggcaaaatcccatctctactaaaagtacaaaaatcagctgggtgtggtgacgcacacttgtagtcccagctactcgggaggctgaggcaggaaaatcacttgagcctgggaggtggaggttgcagtgagccaagattgcaccactgtactccagcctgggtgacagagtgagaccctgaaaaaagagaaaagaaagaaggaaggaaggaaggaaggaaggaaggaaggaaggaaggaaggaaggcaagcaagcaagcagggaggaaggaaggaaggaaggaaggaaggaaagagaaagaaagaaagaaaagcaagcaagcag

SEQ ID NO: 50076 - DNA, 1042 bp, Homo sapiens
catgatttataagtaattcatccattgttgctctagaaggacattaaagtggctatcatctctgatgcaaaggcagaaatggaaagaaaaaagaagagaaaaaaatgagagcctgggaaaaagataaaaaaagaactcacaaatagctacataaacaactagtttcaaaacaccatttcttaaatggccaggaaatagtcctgagatttttgagaaaccactgaaggcttccagcagggtcccttctagtgataatgcaggtggatggatgagttaatgatttaaacaattagagatttgctgcaaacttccatctgtcactgccccctggaatgcagactcacagttctaattggagcctccagcattgaaggcggcatgagttggtgtcactgatttgcttcccctgaccactgtcattctcatggtaagcgttttctgccctcacgctgagaacttttatcaaacatattagtgtgcatttgggtgatcattagcctgtggtagctgaaacattccaggttattttagcctagaaactagcctgtctgctgaaagaacatgcaaagcttcctgctaagctggtacacaatcaatatataagggaaagaacgggttcctatttagatttaaatccaatatgtgacaagttaatagctcagtgtgtttctgcttttccatgtcaattttacgggtgtgaaagactcttccacctgctataaacttcaaaggaaaaacatgcggaaggggaaatgcacctccgtgtaagtctttccctaatctcttacgattaatttcttcttccatctgatgaaagaaaatgcaaacgaaatctcttatttggttcacagttgaagacgagttccataaagctgcctttagaaagggaatctgttttgaacatatgaaaaccatctgagtcaagatgcattacatggtgattacagtctgacagatgttttgaagttgtaatgtgttcatcagaaagcacgcagagcagggatgagcaccgcttgtttgaagatgttgaggtttattctgg

SEQ ID NO: 50077 - DNA, 1035 bp, Homo sapiens
taacataaaggtaaacctaaacagtaatagtgtttgttagtattcatgaaagtagattgtcccagtataaagctaaccaatgaaattttactacttcataaacattttgttcttttaattttcaaggaaaaaatagggacctcttcaaaataatcaggatagtcagagtccctttttgtttggaaaaggtttctgaaacataaaatctttgttgggttaagactttggattttaggccaagttacagttttcagcaatttcagacatctgctttatgatgttactgaaagcgttcccccaccacattaaacccagcttttgggttgtacagtgatgtaaagtttattgaaacatttttacacttgctttctttgaccacaatagtcatttttttgtaacatattcaattaaacaggaacagtataaaggcagtgaaattgatacgattctcatttgaatctactgaatgccttaattgttctcattcgtggctgactgccattgacaaagatctaggaatatgagtacactatcctacataatagaaaagctaattttttgttttattactactgtaataatattaagtacctaaagagagttataggcctcttggggcccagaactcagagttcaaaatgacccttctttgattggatcaaaatctaatatttggctgtggcattatccagaagtatggagtttattatagctatgttcaaggaaaaggtaaggtgaaggaagatcagaagggatatatagtaaggagattcccatgttactaaactatttgtggatgttttcctgcatcatatgcaaatgagaattggtaggaaaacagagggctaagaattagagaaaataaatttggggaggagggatggattgtgcctcttattgctctgctgaatctccaaatataaacacacacacactcaaacccttctatgagtcctaaattacattcttgcttcaagctggctttttcaaatctggcagtccactggcgaaaatgtttgcaggttagagaaaaaa

SEQ ID NO: 50078 - DNA, 1052 bp, Homo sapiens
gatcttttatagcaagtttgccaccccctgttctagaccagtgaggtagccaccagccagatgtagctcccaagtgtttgaaatggggctggtttgagttgagatgtgtcataagtgtaaaacatatcagattccaaagacttagtaaaaagaaagaacaaaatataaaatatctcatcagttttcaaatattgattgcaggtggaaatgacaattttattaaaattaacttttcttggttctattttttttaatgtgactactagaaaaatttgaaatgtgactcacatttgtggctcacattaggtttctattgatactgctgatctacagcctggaatttggaggatatgtgacctctaggaaaagcagaaagaggaaagatggggaaagagagaaaacctcttgtatttgcaaatgtctttctaaagcaataaaatattttctgatttggctcttcctcacagaaaggcatacgcaaaaatgggttaggtggtctatggagatgatcgtagatgagttctcccagaagcagactctgactcagaatttgaattgggaggtgatccaggaagcacctggagggagaggggatgcaaacagggaagagattgaagaggaaagagggttaatgagcaggttgttgctgtggacccatgtgctgcctcccaattgcgccctgtgggagattttgtagacagaggctcagagtggttccacccaggaggtgaaaaagctgggctgcatatccaccaattgccagtaattgccacttgagggctgctcctaggaacatcagcttcttcttactctccccagcacctgccttgcctgaagccaggtaaggccctggggtgaaaaggcacaggtgcttgcaggaaaaagccatgagcaagctggagaatggtgcctcccagaggcacagggttgggcccttctagtgtctggaactgtgtccaaactaaatgttccatcttctaattcataatttcaacagacattcatgtagttctctggtgaatgtgttcattttctcatttgatcttaacaat

SEQ ID NO: 50079 - DNA, 1073 bp, Homo sapiens
taaacacttgttgatggacatgtgcagaattgatgcattagacgagtgttttgggattcggaggaggaagagatgaatctgcttttgagtagacaataaaccttgcttcagggtggtgggatttaagctgctttgacagatctgtggattatgcatcaaagaagagtgaggtgctctgcaggagtgagaccagcagagacctgtcggtaggaataggcaagacagctttggaattttagacaatcctaactagagcacagggtgccaaatggggagccaggaaagaggatgttggaagagtcacctggagggaaggtcttgaaagtctttaaatgcaaggttaagggtttaggccatttttaccattttctatagagtaatagtgaagtgttttttttttttttttaagagagagaggttaatgtatattttctgaaataaatttcatgtgagaatataagaatggatagggttactgtgttcatggaagaaataaaagggggaagagacattcacattactttagattttgtggtctctcttttaattggcagaaagaagtagtatcacaggtcaaaaaccaccaccctgtcaacagaaacatgtaaaattgtgagattcaaggtcctgccccttaaaactaggaagaaataggagatgtcgttgctgattggctcttaggtacagacacaaatgtgattcttttcctgcttttctagtgcagtaagacacagtggggacaatgcatggttatttcttctggctttttgattcacaataaggagaatgctgttcaaacctccgaatgcccactataaaccaaaataatgttttagagccagaagcaaccttggagctcatgtcattccatcctcattctgcagatgaggaaagtagggctgagagtagtaaaagaagttttccgcaatgacctagtgggttagtgactctgaactaggactagagcacagttcccagctgtccagttttgtgtctttcctgctacttcctacagcggttaacagtgccagccagcacaggcaggattgccttttgagtggttctgaaatttc

SEQ ID NO: 50080 - DNA, 1034 bp, Homo sapiens
aagcacattttacctgagccaccccggtctggtcctcgccacccgcccccacttttgcctctaattgtggttgatgtcaggcagtcgttgtaaagggcttacaagcagtttgtagaatatatgtaaatcaattccagtttgcggccgctggaatgtatcgtgcaggatgtatctcgagcttttagtgcctctaccctatgctttgggctagaataaagacagctgaatgtcctgaaaaagaatttcacggggcctcttatctcattttggtttcgcattctgagcacttactgtgtttctggcggagaaggcggaaccagcttgaaatgagcacagacagtccttccagaaaaatgcaaatttgtttttctgttctagcagtttggaaactgtattgcttctggacgtgagaaggcagccctgaaagtagtgagcggagaaagggctgggggattacttaaatgagtctttgaaaagaattctaaaccaacagcttcttctgtggctctggggcatgatgataaaattccttatcagtccaggaagaggtttatagctttgctgttaagcaagaaaaggaaagaaaaagtggatgtaggaagccaaggagagggtgtgatttacaactcaatcaaagttatggaagaattttatgtcaatatttaaatatcaagaacaatactcatataaggagaaaacaaggctggaaaaacatgccaataggcttggaagggcagggatttcaagaggaatgctattgcttttaccagctctgaataaatctggatgggaaagttagcatctgtatcgcaaccggaaaagctcttcactttttcttctaagtgggttgggtgctcgccaccctgcacactttgggggaagtgagctttccatttaagagcgcaggggaggggtttcgaactttctgtccctttcccacagccttgggagatgaagcagagcccccttcgaatggtcagcgcaaaccctccgccttcttgccccctcgcttgttcgctcagcaagcaggcttg

SEQ ID NO: 50081 - DNA, 1038 bp, Homo sapiens
ataaaatacattaaatataaggaaaattataacaggtttttgctatgttgcaggataactttaccttacaactatattacagtaaaactttattaaaactattgagctagccaggcatggtggctcacgcctgtaatctcagtactttgggaggccaaggcaggcagattacctgaggtcgggagttcgagaccagcctgaccaacatggagaaaccccatctctactaaaaatacaaaattagccgggcgtggtggcacatgtctgtaatcccagctactcgggtggctgaggcaggaaaatcacttgaacccaggaggcggaggttgcagtgagccgagatcgccccattgcactccaacctgggcaacaagagtgaagctccatctcaaaaaaaaaaaaaagtattgagctagccacttttcctaatctacatacaagtgtctatctaaaaactgcacaccgtaaaaagatctagacagtgctttaacatatttgaagactgtatttgtgattatctgacttaatttgtagactctgtgatgtccagaaatttattttgcctcacagagactaagggtgacaccagcaagaagtacaacataattactcaggaaaaaggggcaagctcaagtaactgctccagggaaagatcagccccttctatcaatacagggccagagaaaacaagtgatgagtccaatgtgagcctccaaacaaattttacagggtcaaagctccaaactgcagccttcagtttacaatggaacggtttctcaaaaggacaactccttatagaaaataaggggagagctgcccagagatttagttatttaatgatggttaaaagtgctgaggccagatggtggaataaaagtgtttataaagttttccctagatagaagatatcagtcccatttatttgcacaactgcagcacgttttgtcaatttagtctgttgtgcatccaccttggtggccccttcccagggccaacatcatgttgagaaggaaaaaaatcatttttcctctaacctct

SEQ ID NO: 50082 - DNA, 1031 bp, Homo sapiens
ctacatttctatgacaatttgttcacaccaatataattatgactgcattagcacttgccctgtaaaccacatgattcaggggtttatgagtaggtaataaaaactcacttcaggctgaaacttgtctcagacatggaaccttgggggtggggacagttgtaaatggtcggtatgggttagggccttctgaagtttgtggtcattagtctcatttattgttacccttctacagagccaagactatgtgctgtgggatttatatctttcatcatttagcaaaacacaggacctttgccaagtttcatcagcattcattaattctttcaacaaatatttgactgcctataatgggccaggggcaggtgaacagcccagagttcatgttctcatacagcttctattctagtggacagagaagtggcagggaaggagggagcaagagaaggagaaagggagcaaggcaagaaggggaggaggaaagaagagaagaggaagggaggatgagatggaaggaagaatatcagatggtcagagctttacaaaggattaaaatagagtgaattgtggctactttagaacagtagacaaggacagtctctgtggaggtgacctgaatgacaagtcagccatgtgaagggcatgccaggcagaggcatgagctaggatgctcctccaaggcttgatggacaggaaggcccataggctggtgcagaaagggcaagggcaagatatggcccatgtgatagccaatggagctggggcctctaagcccttctaaacaggggttaggagcttggttttttaaggaggggaagggcatgggctgatttcagttttaaatagatctctctggcaaatgtgggcaggagagggagcagggagaccagttgggaggctatggctgaaatcgggatggcgacattgtgaacttgcttgcagggcctcatttgcaatgtcctttcagggaacagaaaacagctgaggaatgtccaaggagtgaggtgcaggctgatatcctcctcctgctagaa

SEQ ID NO: 50083 - DNA, 1035 bp, Homo sapiens
gcatatgtaataaaggacaccttctgagacactgaggaaaaatagaagccgagctggcctctttgttctagacaatgtaaagaaactcgctcttgcgttttgacaaggagcgtatgtctatttatatatatggcgagaacggtgaataaaggctttatgtcaaaggtattgtggtcaattgagttaaaatctggctatattctatatgtgtacaaaaatctcaatctgaatgtaattaaacatggaaatgtgaaagtgtttaacagacttgcagggaaattttaattatacttgggaacagccaattgtaagagacaactgggaaaggaaaaaaaatgtttcagctgagttctggggcataggtaaaacttttgcaaagaaagtcaattttttatagctgtcaaaagtgatttggaatcaggtaaaaaaatttatttttattttttcatggtgatgtggttttttgagttgaattaacttggataattgtgttgaatgatttgactgctcgtctttcaaaggaatactgttgttttctgtcatatacagactttatcctgagttttgggagcaggtttgtgctactgactgcaacaagtggcacaaagactcaatttcagatttctgatattatgaaattaattgcttaagttaatttaaagaaaagtaatcagtgcaaacaaggagatttgagaaaatgaccacgtttttaaaaaatgcaagtcatagtccattccctagtgagactattgatttcaaacaggcattggcaactgcctagtcataaggacaaaagctatggccaattttctctaggatctttgactctagaaagcataactttcgcaaggacacagtttaaatgaaacttgttcacctctgtgagaatgaaacatagaaaagcaccgtgtataatacaatagacactttagtaaataaaattcttaatagcacaagccgcagaacagaagggacaatgcaaatgttttaaagtttatcttttcagtgctgctcagaaaaatatgagtcttgaca

SEQ ID NO: 50084 - DNA, 1035 bp, Homo sapiens
ggttgtcctttgcattgtaggatgtttaacaacatcactaatctctgctcacttgagacgaggagcacatctccccagctgtgataaccaaaatgtctccagacattcattccccaatgtaccctgggtgcaaaaattattcctggttgagaaccactgctggaaactgaatcagattatgtcatcgtctactcaaaacactctcaatttcttcccatcacatttggggagaaaatcctgaagtcctttccatggtctacaaagcccttaataaactggctcttactcccttttgacttcctctccttcccctgtcactcattctgctccagccacctggcctcactgatgtttccctaaggggccaagcactcctcctttccaggaccattgcacctgctgtttcctttgctcagaatagtcttctctagtacattgcataccctgcttcctgctttccttctagtctcctcacatgtcacttcactgatcaaaaataacacctcaatcactttcaatcctattatagtgccatagttgtcttcattggacttactaccacatgatttattacatatttatttctttatatgtttattgtctgtctcccctattagaatgtaaactccaagaggaaaagaacaaggactttattttataaacccctttattctcagtgcccagaaaagtgatctgacatatatgagacactcaatattcatttactttaaaattagtgcttgagatgattctgcacattatgtaactacttggagattactaataaggaggatatcattaatataattggcatttctaaaaatactacaatttaaggaaatcttcacttgtcagccacttttttcacatggaggaaaaagaaatgtggtgaggtgaactgagtggtgaataatgccatgtgaggcttcacttaggtcatctggggagcccagatttattgattctgatttcaggcctcttgtatccatattgcattgctttttacagaattgtttacatgtgatattgttcaaa

SEQ ID NO: 50085 - DNA, 1044 bp, Homo sapiens
ccgttcggtgccactcaaaaagcaggatcataagggccagtaccagtgggataatgaattggctcaagggacagtagccatccctccatttctgttttctttgcctttgaaatattttcagtaatacctgaccacacatcattgcctcatctctttcttggagagctcaagctatacccttcgcctcaggagtgtcagcacagtttcagtacaatatatatggcacatgccacactactgagagcaccaagagagaaaagcaaacctctctagggctgagggagtcacctcaactgaatgatgattacctacctgtggactataagctccagaggtggcttctgattccagtttacttagctaatcagaacatggtgcactttctctctctctctctctctctctctctctctctctctctcattaattttcatgtctaatccataccagaaaaaaaatcaggcctgtccttaaattacttttgtactaatattacgactgttactactgttaccataactatgagactgttgctgctgatactatcaacttagtgctgatacttctgctactgctactactgtggctagggatactatgactatcatagccacagttgtcattctggtagcttttactctatggcatgaaatcagcaagacactttccatacattattttatttaatctttatatcagctcttttggataatattagttatccctacttgagagaggagaaaatcgaatcttagggaggttaagtaaatttcccagtgtgacagagattgtaggtagtatagctgtggtatttgaacctagatcagtttggcctcaaagtccacacttttaactgttacagggccccaagctggaaaattcctcatgagctgatagcatctccttccaaagtactggcaaatgttgctaatagatttcacctctcttcctgcctaagcccagatacaacctcagaatccttttccagttagagccaggacagccactagagaaaatccatcagatttggcatgttgagctaaa

SEQ ID NO: 50086 - DNA, 1041 bp, Homo sapiens
cagcaagtttttgttagcaattttcaaaagggagggagtgcatgaatagggtgtgggtcacagagatcacatgcttcaagggcaacaaaagatcacaaggcagaaggtcagggcgaaactagaatcactaatgaacttccatgtcccgctgtgcacgcattgtcagggttcaagagcagagaactggtctgactagaattcgccaggctggaatttcctaatcctagcaagcctgggggcgctgcacgagactagggcgtgtttcatccctatctacagctgcataaggcagacactcccaggacggccattttagaggccccctctgggaatgcattcttttcccagggctgttaattattaatattccttactggggaaagaattcagtgatatttctcttacctgttttcggtaataagagaaatatggctctgtcctgcccagcccacaggcagccagactttaagattatctcccttgttcctgaaaatcgctgttatcctgttcttaaggtgcccagatttcatattgtttaaacaatttgtgcagttaacacaatcatcacagggtcctgaggcaacatacctcctcagtttatgaagatgacaggattaagagattaaagtaaagacaggcataggaaatcacaagaatattgattggggaagtgataaatgtccatgaaatcttcacaatttatgttcagagattgcagtaaagacaggtgtaagaaattataaaagtattaatttggggaactaataaatgtccatgaaatcttcccaatttatgttcttctgctgtggcttcagctggtccctctgttcggggtccctgacttcccatgacacaaaatcatgttgcccttaacacttccctctgttattcaaggggtcatgcaaccctgagagcaggtcaggtgcctcaatataaaggtccaggggccatggaccctgacacagtcagaacctgtgtctctacatctgggaagatataaccatcagactaaggtttgctgtccttcaagcattatcccct

SEQ ID NO: 50087 - DNA, 1050 bp, Homo sapiens
cactaaatatagaaaggaaaaatcagtactagccactgcaaaaacataccaaattgtaaagactgttgacactatgaagaaactgcatcaactaatgggcaaaataaccagctagcatcataatgacaggatcaaattcacacataaaaatattaaccttaaatgtaaatgggctaaatgccccaattaaaagacacagactgcaaattgggtaaagagtcaagacccatcagtgtgctgtattcaggagacccatctcacatgcagagacatacataggctcaaaataaaggaatggaaataaaggctcaaaataaggcaaatggaaagccaaaaacagcaggggttgcaatcctagtctctgataaaacagtctttaaaccaacgaagatcaaaaaagtcaaagaaaggtgttacataatggtaaagggatcaatgcaacaagaagagctaactatcctaaatatatatgcacccaatggaggagcacccagattcataaagcaagtccttagagacctacaaagagacttagactcccacactgtcaatattagacacatcaacaatgaaggaaaacatgttaagggcagccagagagaaaggttgggttacccacaaagggaagcctatcagactaacagctgatctcttggcagaaactctacaagccagaagagagtgggggccaatattcaacattcttaaaagaatttgcaacccagaatttcataagtgaagaagaaagaaaatcctttacagacaagcaaatgctgagagattttgtcaccaccaggcctgccccaaaagagctcctgaaagaagcactaaacatggaaaggaacaactggtaccagccactgcaaaacatgccaaattgtaaagaccatcgaggctaggaagaaactgcatcaactaatgaacaaaataaccagcaaacatcataatgacaggatcaaattcacacataacaatattaaccttaaatgtaaatgggctaaatgctccaattaaaagacacagactggcaaattggataaagagtcaaga

SEQ ID NO: 50088 - DNA, 1380 bp, Homo sapiens
agacttgaagtttattctctaaggatgataaacagatgatctttgaattaggcaataccaggtacaactaaaacagagataccaaacagaaaacatggggactaagataaaccttatgtataggacctaagatctctagccatcttccctcatatagctcagtaatgttggcagccagatatatatgttcttcttaaattctagaaattttatattgaaatcttttactactgatttccttctattttctctatcctctattcatagaatttcaactattctaaaacattctcccccttctatggagggggtcaaaggcatcttctttgagaacctatcttccaagagaaataagcacaagacactcaaatcaaaagttttccaaatattatcctagagagaagagcaccattgagaagcactccccctgccatgagctcccagccttctttttagcgcctgcctcactcttaaatatgagcagacagccaaggactgccagacgtttatgaaaaaaaccccacctcactttaaatgccaatacaaatagaaagaaaaacttaataataactagtattaatatccctagagaatatgaatcaatgaagaagtagatactataaaacaaatatccagtgaacatgaaaccttagaaatagacaatatgatcgcataaactattggaagataccctgggcacagtggcccacacctgtaatcccagcactttgggaggctgaggcaggtagatcactgaggtcaggagttcgagaccagcctggccaacatggtgaaatcccatctctactaaaaatataaaaattagctgggcgtgtggcaggtgcctgtaatcccaactacttgggaggcggaggcacgatagtcactttaacccaggaggcagaggtcgcagtgagccgagatggtgccactgcactccagcctggacaacagagcaagactccatctcaaacaacataaaaaatcaaaaaatatatattggaagataaaatcaagagaatctcccagaaagactagaagaaagagaagaaaatagataatattttttaaaatagagacttatctagaatgttctagaataattgaagttctggccgggcacggtggctcacgcctgtaatcccagcactttgggaggctgaggcgggtggatcacgaggtcaggagatggagaccatcctggctaacatggtgaaaccccgtctctaacaaaaatacaaaaaaattagccgggcatggtggtgggcacctgtagtcccagctactcaggaggctgaggcaggagaatggcatgaacccagaaggcagaagttgcaatgagccacgatagcgccactgcactccagcctgggcgacaca

SEQ ID NO: 50089 - DNA, 1045 bp, Homo sapiens
ggtgacatgaaaatatctctggcatagcccaagcatggttgttatggtgtagagaaaggctctattgcattcagccattcaggggctcaggctccattcatgttatggctccatgccctgagaccttaggattcaactggattaactacaaacaaatggtagaaaaagtaaaaaggagcatgaagaattgtgtatggggggtcgggggtggggacgcggtaagggaacaggcctagaagtggcaggcatcacttctacccacattatgtgggtctcggaattcagtcgtatggcctagttgcatcacagagaaggctgggaaatctataacattgaggacatgttttgttctcctaggaggacaaaaaagaaaatggggtttggtgagttcatagcatcgtctctgataccatgtagttcactgtggtatggcaccataaaggtccctcatgttccccaagtagtctctaatggcaagctgattcttttatccagtttgaatcaaggttgaatgacaaccttaattcctgttaggtgagaataaagtatcatgagtcatttagcccccatgatgaaggctttcagagaaggtcttgttaaagggtgggtggggaaaattcctagggatatgaggggtcagtggggagtgaagtgagatactgtagagtaagcgaaaaggttgaccagttactccttacctacttacaatggcctgaactgctgagtgtgcaagagggacagttttaaaagctgtcaggccacaagctttctaactgccatcagcataggttgtttttcccatcctgtggcctttggttgggttctctaggaaacagactctaaaatggaaatttgcatgcaagtaatttattggagaatgctcaatggatggaaggatgagaaagagggaggagttaaaatggtcatgggtcaggaagctttagcactgggatggctcttcaaagttgtcctgccttgaggcaagggggccaggcttttggatccctctctatttgacagtcactggatttgagctccttccagg

SEQ ID NO: 50090 - DNA, 1045 bp, Homo sapiens
tggaaaatctagaggaaatgggtaagttcgtagacacatacaaactaccaaagtggaaccatgatgaaataaaacacctgaacagaccaataacaagtaactacattgaagccataacaaaatgtctcccagtaaaggaaagtccaagactcaatagcttcactgccaaattccacaaaacatttaaagaagaactattaccaaccctacacaaactatttcaaaaaatagaggaggaatatgtccaaactcattatatcagaccaatattactctgatactaaagtcagacaaggacccatcaaaaagagaaaactacaggccagtatctctgatgaatattgatgcaaaaatcctcaacaaaatactagcaaatcaaattcaaccataccttaaaaagatcattcatcatgaccaggtggtatttaccccagggatgcaaggatggctcaacatattcaaatcaatcaatgtgatacattgtatcaacagaatgaaggacaaaaaccgtatgactgtttcaattgatgctgaaaaaatttgataaaattcagtatcccttcatgactctcaaaaaactaagtatagaatgaacatacctcaatataataaaagcccatagctagtatcatacttaatggagaaaaactaaaagtctttcatctaagatctggaacatgacaaggatacccagttcactgctgttattcaacatagtactggaagttctcgctggggcaattagagaagtgaaagaaataaagggcatcaaaactggaaaggaaaaagtcaaattatcattgtttgctgataatatgaccttatatttggaaaaacctaaagacttgaccaaaaattattagaactgataaattcagtaaagctacagaatacaagatcaacatacaaaaatcaatagcatttctaaatgccaacagtgaacaatctgaaaaagaaattgaaaagtaatcccatttacaatagtcactaataacgtaaaatacttaggaattaacttaaccaaagaagtgaaagatatctacaa

SEQ ID NO: 50091 - DNA, 1877 bp, Homo sapiens
taacatataactcagggaaacttgatattccatggaccatggactgggagattcaagtgaataagaccttggggtccaggagatggggaggccaggcctaactgacagaggcttatactttaagggtgaatttattaaacaaatattatacaaaatacaatgagctgataataaaacattctttgttcttaaatttatatatgtgtgcttgtgtgtactaatactgaggcccttaaaccactaagatttaggattcttaaacaaaacagattaggtaaagtttgccttccaaagccaaggggagaggggtggccagggaaggagaatgttctggctggaaaggagacaaattctgagtaaaggaagctgaaggacaaacacttctactcaggatttagcattggcaggactgtttggtgtgtaggaatttagaactgggtcagtattatttaaaggactacaaacctggttttaaatttaaaaggggtgtgggggtggagcatggcaggtggtgaaccaaaggaatttactatgatctgaaaaataagcttaagtactaactccactgtgggcagggaggcaagaaccttcccttttttgagttgaagataagcctcttcagtctaaactttcctaaattccacttcttctttttctataaaacaaggtgaagtactttatgctagctatcaaaaatcattgactgtatgttgcatgaatttatgaatttattatgctagaaaagtgtttcttggctacttcatatgtatataagctttctccctcaacacagtttctgctttttatttttggaatctcacatagcctatatcttgttttcagagtagatactatcactgtgggtggctgagttctcatctatatgcaaccaaggctaactggctctctaggttaccttgatgccacccactgagagtcctttctggatttagtgatttagtgctgcttattttcaccttctctcaggatggagcctcagaatagagaccaggttgaaaatcagtcttttacttagaaccatgaaagcagatactacatcttatccgtctatgacctggtgacccagaagccattaatttgacattaccaacatacctccacacaaagactttataatcttcagtgtgagaattaaacaaacaaacaaacaaaaacttaaaacaactttggaggggagaacgataacctaaattttaagcataagaaaatccctaacaaaaagatccaactaattgccactggggggcgatggaagttcgtgaactgctctgctaatccctgaggcaactgagcactttagttggtttatttattcaaagctggaatttggacgtgtgacccatcaagctcagggaaattcctggatgaggaacacagtcctgggagaaacctaccaaagatggaattagcaccttggcgaaccgccttcagcgcaaagaactttctttccttgtgtgtcttaagaatttacttcagttcccttctgtctgaagcagaggaagccaagttaaactgtgaataagcacgacaacaaagaagagttcttatttatcactacctgcaaacacatgtaagtgcacagtttaaacagcattcagacatctcacagccactaggatcagagttttggtgtgagtaggcctcagttggtaactttcctgaggaaaggagggaggttatagaatttatgttaggaaattctgagtcatagataacactttaagtgacagttaaggaatctagtgagagggactttggacaggtttagaaaagtaccctatggaaacaaaggaggaaaaaaaaagtatcttcactgcaagagtaatattgcagccacttggtggcgtgttgtgggc

SEQ ID NO: 50092 - DNA, 1051 bp, Homo sapiens
ggagggaaatgaggtgacgagtaccagtggtcttaaaatggtctctgatgcgataattcctcatttacacccttaagaaaataatcagagctgtatatacagatttttgaatacatctttttctaaacctactatttataaatgcaaaggcctaaaaataacccttttatgttcaacaatgggataataaacacataaattcagaggcaataatatggtgccaatgtggtagagtgaggagaaataatcttttttgaaaaatctttaatgccatgagaacatatttaggataatatttagaggggaaataggctacttaaaggaatcatttagaataaattaatatttttaatgcatatataaatttgatatgcatttacataatatcagaagaatagacatataaatagtaactggttaggactgcttggtgggatttagggtggtttttttttcttcaaagtcttttgtgtttccaaactattgacagttcgcatttattatcagtatactaaggaaaaaaagccattttaaaaatagctctaggaaactattcaaatctaaagcttaagcatttatatttcatgctgcttatgagaagaccagggacatgtagcagttgcttgtttttttctttgtaattctagtcattctatgtgactcccctgtagcaggcagaataatggtcccctaaagatttctacactctagcccctagaacttgtgaatgtgttacatggcaaaggggagtttgcagatgggattaaaggtataggtcttgagatgggaagattatcctgggttggcttagtggactctatctaatcatataggtccttaaaatcggataaactttttgggctgtggtcagagggagatctgacggcagcaccagaaggacttggcccgccactgaaattgcctttttcaccttttgcagggaattctggtagcctgcagaaggtgaaaaaggcaaggcaagaaaatctcccctaaatcttccagaaggcatgctgtgcagctggcaccttgattttaacgcagtgagatt

SEQ ID NO: 50093 - DNA, 1121 bp, Homo sapiens
cttgttgggtttccacactcagtccattagctttagatcacaacatttttgtccaatcatatttctgcacagctgtccacactttgttgaacctaagcataaaaatggccagtttgctctgtatctttgggtcttcattctaaaggttcccttgtcacgtaaaactatgatctcaaataaatttgtatgcgttttctcctattaatctaatctgtctcttgtcagtgattttcagagaaccttcagagggcaaagaggaagttttcccatggctccgaccctgtgaaaagaatgcactggagacagtgcttgttcggggcgctccgctggcttcttggacaattgcgccatgtgtgctgctcggccagcggcggcggcggcccagtcggtgtatgccttctcggcgcgcccgctggccggcggggagcctgtgagcctgggctccctgcggtgcaaggtactacttatagagaatgtggcgtccctctgaggctccacggtccgggactacacccagatgaacgagctgcagcggcgcctcggaccccggggcctggtggtgctcggcttcccgtgcaaccagtttgggcatcaggagaacgccaagaacgaagagattctgaattccctcaagtacgtccgacctggtggtgggttcgagcccaacttcatgctcttcgagaagggcgaggtgaacggtgcgggggcgcacactctctttgccttcctgcgggaggccctgccagcccccagcgacgacgccactgcgcttatgaccgaccccaagctcatcacctggtctccggtgtgtcgcaacgatgttgcctagaactttgagaagttcctggtgggccctgacggtgtgcccctacgcaggtacagccgccgcttccagaccattgacatcgagcctgacatcgaagccctgctgtctcaagggcccagctgtgcctagggcgcccctcctaccccggctgcttggcagttgcagtgctgctctctggggggttttcatctatgagggtgtttcctctaaacctacaagggaggaacacctgatcttccagaaaataccccctcgagatgggcgccggtcctgtccatcccagtctctgccagac

SEQ ID NO: 50094 - DNA, 1022 bp, Homo sapiens
cttttataagtctcatgacaataacaaagtataaaagcaaactgttttttccccacaagaaaaccatctatagaatttacagaatgaaatgtcagcattctcgatgccatatgcaaatgttaatctgtggttgctcacactgtcatctaggacgaccatcgtcatctgaaccagttcatagctcatgctgctctcgacctcgtagatgagaacatgtggctatcgaacaacatgtacttgaaaactgtggacaagttcaacgagtggtttgtgtcggcatttgtcactgcggggcatatccttaccttcttagtaaaggtaactaactaaagtttgggctcacaaaccagaagaacatggaacatagatgccaggctctgagtctgtagacttcacagtcaggtgaaaatgtaagtttccatttatggggctacttttctttttttaggggggaaaaacattttgtttaatagctaattttaaaactaagtctcatacacaaaaagagtttatctggaccctatcaagggtgattttactttattttacagttattttctaactttgaaagcttatgttctctttatgataaaactaagctaattttaaacccagtttatatattcaacttttccatcacaaatacactgcatgtgactaatttgaagaatactgtatcaacgaactggttgctttttgtttttcatttctaagaaagattatgccttaattatttcacatatgaggtttattatgcttcatgacataagacaagaagatggaataaagaacttctttactgatgtttatgatttatatataaaggtatggtatgttctataatttttaaattctgatgagaaaggattcgacctttgtcaggaaactggcctattgaagtaactcccttaggctgcagtttacctttcagactagctttcccccatcagaactatctctggcaactccctccgcaggtaagtcttcacagccaggtgaatatgtatttaggaacacaactt

SEQ ID NO: 50095 - DNA, 1019 bp, Homo sapiens
tacatttaaggttaatattgttatgtgtgaatttgatcctgtcattatgatgttcgctggttattttgcctgttaactgatgcagtttcttcatagcatcaatggtcttttacaatttggcctgtttttgcagtggctggtaccggttgtttctttctatgtttagtgcttccttcaggagctcttgtaaggcaggcctggtggtgacaaaatctctcatcatttccttctctgtaaaggattttatttctctttcacttatgaagcttagtttggctggatatgaaattctgggttgaaaattcttttaagaatgctgaatattggcccccactctcttctggcttgtagagtttctgctgagagatctgctgttagtctgatgggcttccctttgtgggtaacccgacctttctctctgctgcccttaacatttttttccttcatttcaaccttggtgaatctgacaattacgtgtcttggggttcctcttctcgaggagtatctttgtggtattctctgtatttgctgaatttgaatgttggcctgccttgctaggttggggaagttctcctggataatatcctgaagagtgttttccaacttggttccattctccccatcactttcaggtacaccagtcaaacgtagatttggtcttttcacatagtcccatatttcttggaggctttgttcgtttctttttattcttttttctctaaccttgttttctcgctttatttcattaatttgatcttcaatcactgataccctttcttctacttgatcaaatcagttattgaagcttgtgtatgcatcatgaagttcttgtgccatggtttttagctccctcaggtcatttaaggtcttctctacactgtttattctagttagccattcgtctaatcttttttcaaggtttttagcttccttgagatgggttcaaacatgctcctttagctcagagaagtttgttattaccgaccttttgaagcctcattctgtcaactcatcaaagt

SEQ ID NO: 50096 - DNA, 1072 bp, Homo sapiens
cttataaatttgtttgagttctttgtagattctggatattagcccttcgtcagatgggtagattgcaaacattttctcccattctgtaggttgcctgttcactctgatggtagtttcttttgccgtgcagaagctctttagtttaattagatcccatctgtctattttggcttttgttgtcattgcttttggtgttttagtcatgaagtccttgcccatgcctgtgtcctgaatggtattgcctaggttttcctctagagtttttatggttttaggtctaacatttaagtcttttttttgtttgttttttgttttttgagacgaagtttcactcttgttgcccaggctggagtgcaatggtgcaatcttgactcactgcaacctccacctcttggattcaagcaattcttctgcttctgcctcccgagtagcagggattacaggcatgtgccaccacgcccggctaagtttgtatttttagtagagacggggtttctccatgttggtcaggctgatcttgaactccctacctcaggtgatatgaccacctcagcctcccaaagtgccgggattacaggcttgagccaccgtgcccagccctaacatttaagtctttaatccatcttgaattaatttttgtataaggtgtaaggaagggatccagtttcaggtttctacatatggctagccagttttcccagcaccatttattaaatagggaatcctttccccatttcttgtttttgtcaggtttgtcaaagatcagatggttgtagatgtgtggtgttatttctgaggcctctgttctgttccattggtctatatatctgtttcggtaccagtaccatgctgttttggttactgtagccttgtagtatagtttgaagtcaggtagcatgatgcctccacctttcttcttttggctgaggattgtcttggcaatgtgggctcttttttggttccatatgaactttaaagtagtttttttcaattctgtgaagaaagtcattggtagcttgatggggatggcagtgaatctataaattacccttgggcagtatggccattttca

SEQ ID NO: 50097 - DNA, 1070 bp, Homo sapiens
agggtgatgcccataagccactctaacttcctgcactccctttcatttctctgtggggctcaccgatgagtgagtatatttccagaacatcatttctgacatcatccaaatcctctaaagcagccttcctttaaaaactccaaccctggaatctaatctgcatttttggaacgtttgcaatatgctgaagtcagagctactccctttgctgtgccccacgtgcctgggcaccagcccctcggctccaccacctgatgtgcaagtcatgtcagtgtcctcccaagattcctttcacttccccaacttggtgcccaagggggatctgcactgggtctagtgcagcatcccccctaacgtgctttctacaagagggaattggcagcaatgctaggcaaggcgattcagaatcagcgactctacttttttgctgaataagacactgcagatctatttcgctgatttatttacattattctgcatgtccttggagagatggcagaaggttaagggacagcatcgattctttcagattcctcaaggctcttgcagatttcccatggtcctttgtactacaaagtgggagaatcaagcatcagatgaccttttcaatgttactctgttggttcaatctgtaacaactttttctcttgtcttcaccaacctctcactgctttccacaaaaaatgaaccatggcctgctattatttgttttcaattctgaatataataagatatcataaattgctttcacgaaagtactgatttgattatcacttatgatacaaattatgaaactgcaacatgagtgttttctctctgattcctttcaccatttcactgcagacttgaaaagggaccagaatggaccaaaaagaaattatttctttgttgttttgccaaagacctttcctttcaaaatgcacacatcctggagttttgaaaactgctataattatcacaaggcagtctttctgtgggaagaaagtgagtgaatttcccattaggagatcatggttaaaataatctctcggctctgggaccaaatggaactagaaagtgtgttcaaaagc

SEQ ID NO: 50098 - DNA, 1026 bp, Homo sapiens
ctggggagctttaaaaactactgatgccagagccccaccctcagagattctggtttaactggtctggagtgtgatctgagcctagggagttttttaaacgcctcagatggtctcaatatgcaccattgtggttatattgcagctttacaggtgtaagaatcggatttgttctcttaaaagggaagataagtcttctttttggtcctaggtcaatctgagctgagttcttcagcccttgaagaaagagcatccttctaactcaccagttctcaaccaggggacatctggcagatgcgtttggttgtcacaactggagttgggggtgctactggaattaagtggatagagtccaggggtgctactaaacatcctacagtgcaacagctccccacagcaaagaatgaaagggccccaagtatcgatggtgctgagacagaaaccctggtatagcttacctcactcctgccctcaaaaggctgggaagttcaacacttccttcttcaatgactattgagagtaactaactaatagtgttacaacaaaggggtcccaatccagatcccaagagagggttcttggatctcatgcaagaaagaattcagggcgagtccatagagtaaagtgaaagcaagtttattaagaaagtgaaggaataaaagaatggctactccatagagccattttatggttgtttcttgattacatgctaaacaaggagtggattattcatgcctcccctttctagaccatatagggtaactttctgacgttgccatggtatttgtaaactgtcatggcgctggtgggagtgtagcagtgaggacaaccagaggtcactctcatcaccgtcttggttttggtgagttttagccagcttctttactgcaacctgttttatcagcaaggtctttatgacctgtatcttgtgccgacctcgtatctcatcccgtgacatagaatgccttaaccatctgagaatgcagcccagtaggtctcagcctcattttacccagctcctatttaaga

SEQ ID NO: 50099 - DNA, 1048 bp, Homo sapiens
ctccactagcattaacagaacatatgtattctacatttatataaaattaaatgattacatatatttattatatattatgtatttcaaacttgttttttattttgatgtatttcaatttagttttctttctaatgctatgtatattttttcgtgcatttaagaacattgttctgtaaaggagatctggagggttcagctgactgcccagggagtctaagaagccctgtctaactggtgtcttcataatggggagaacctccccttcctcaaatgatcctatccctctcctcccagccactgaggggcagtcatctctagctctacggagatgcccccaccccattttcccatatcatattccacccagccttcaaagccctgcatgagtccacctagtcctttgttcctctggctccaccaccctggctgccagacacaggcattcacccccggcccgtctcatggggtgttctatttgtttagtttatgtttcagccctagtgagagtcagttctggaatccaatggatctgtgattccttgttggaaggaaccacttctcttgcgctgagtaacgcattggtgttggatgacggtgttcatgatgacgaacttatgctgtcctgaccatgcctggagactggccctgcattggagaagatccaagagtctgcgtggtaaaatgataatgaacgtgagcttaggggcagaatgctgatgtgtttattctgctaactatgtgctttgggcaagtgcctatacttattctccctgagcttcaatttcctcattggtaaattggggattatacttacctttcaggatgacatcaagagtaaataatatactgactctaagaaaagtgcctggagtggtgcctggtgcatggcaaatgctcagtacctgtgaggtagtatttgcctgggctggttgatggttgggcgctgggggttagcctggtataaatcgagattttgaggtggtcctgtgaacccaaagatgccttgagaccctgcgtgggagacagatggaaggagatgtctaagcct

SEQ ID NO: 50100 - DNA, 1035 bp, Homo sapiens
tgcaatgctaacatgaagatcggatatactagtatcattttatggtttagagagtggactttggagtcagactgccagatttaaaataccagttacttctaaattaatgtctgggccttgattttctgatctgaaaaactggagcaataaaatacctcctttgcatgattgagtgttaaatagtttcatacatgtgaagtgcatagaacaattcctggcccatggaaaatagtgttttaactattatgtatatcatccattgaagagtataaggtgctatcaaaagcttttgttacaaatgctgttttcagtttgccgttactttctgggtctttgaacctccttgtaacatgttatataggaatgtaaatgtgccacatggtagcttcttaatgcttagttgtcctgcataaattaatcccctttagaaagtaaattacttacaatttagaatggcatactcatggtctgttctttaatccacctgtataattggttcttctccaaagatattaacaagcttgacgtcgatgctgagaaattctagagcagaagagcagactctcccttcactgttatttgtgttcctctctctccaattccttagattgtaggacgaagtaaatcacaagggccagtgtcttgtttagaaaggttttgtcataccgcacaggcggcctgcatccgttttcagtggggtggtttaacttgatgaggctaatgccaagatacagtactcagagtccaccgtgtttgacatagtcatcaacggtcttccttttggacttctttttggatgaggggaaatgtgcattcgcccagtggctctcaccctgactgtacagtggagtcacctagagagctttaaaaatgccgatgcctggccccactcacagaggttctgatgtaattgtgcagggtgctgactgggcttggggatttttaaaagcttcccaaatgattctgatgtgcagccagggttgagaagtgctaggatggcctgcactgagtgatatggaaaggatactttttgaa

SEQ ID NO: 50101 - DNA, 1032 bp, Homo sapiens
aatttagaattcatcttcttagctgtaatcaaatctaaccagattaagcccttaaggcaaccttcctgcacgttccgtccttagtcatgtcttcattacgtttgttcatgtgtttgagagatgcaggagttggaagagaaaggactgatttcccccttgtttagagatccgttttctatagccattgatctctgccattcctacatcccagcccccacaacctagactcctccctgcaaatggagactataagtcaatgttttctgagacatctgaccatacttgcaaaatagttccagcgcaaaaagaacaagaacattggaagcgagggtcagaaggagcctagaaaacctgctatattgtatgtgcattgggtcactgttttagatttagaaatgtttcacaatgtcttcccgaaaagaatgtttaaatggtggattttaagatgggtgcttaaattcaggcatctgttccttcacacaatgggcaaagaatggaaatgtaattagcaatgtaagtcaagctcttaagataatgtgatttgatgcagtactttatattttcctttttgttttctcatttggcatattctgacagtttccatggtaattaaaaagaatttgggaccttaaagggatgaatttccatcctatgaattcttaccattttgcaaagccactgtaccggtttactaaaaactgttttgagctctattatatgatgtcacaaatatttttagatgttttgtaagaggcacaaatatcgtaaactcattaaaaattgttattgaagtataatatgtgtacacgaaaagtgggcaaatcataagtgtacagcttaataagtttttataaatgtaaccagcagttatagattaataagcagaatattaccagccccttagaagccgcctcaggctgccttacagatatacctgatcaaggctaatcacccctaatttctgtcagcagagctttgcactttatataaatggaataatacagtatgagctcttgtgactggtgtggcttg

SEQ ID NO: 50102 - DNA, 1035 bp, Homo sapiens
ctgggactgtaggcatgagccaccatgcccagctaatttttttttaagagatggggcctcactatattgcccaggtggatctcaaactcctgggctcaagcaatcctcctgcctcagcctctcaaagtgctgggattacacgtgtgagccaccatgcctcactctctctcccccatttgagtgtgggctagactagtgactcacttccaaacaacaaagtacagaaaggggaaaataacagcttttggaagaacctggcagataccatattatccatgtgatcaaggtcaacatcaccagtcgtaagttctgctgatgttgtggacaacctgatatgatatgatgagaagggagctttacctctgtgggattctcaaaacccataaccccaatttaaacatgagaaaaatatcagataagcccaaattgaggggcatttgacaaaatacctgaccagtatgagtcaaaatcctcaaggtcacaaaaggcaaagaaagactgagaaactgtcacagaggagactaaggggacatgacaactaaatgcaatgtgggatcttggagcagaaaaaggatattagtggaaaatctggtaaaatctagatacagccggccgggcgcagtggctcacgcctgtaatcccagcactttgggaggctgaggcgggcggattacctgaggtcaagagttcaagatcagcctgggcaacacggtgaaaccccatctctactaaaaatacaaaattagccgggcgtggtgacacatgcctgtaatcccagctactcaggaggctgaggcaggagaatcacttgaatctgggaggcagaggatgcagttagccgagatcacaccattgcactccagcctgggcaacaaaagtaaatctctgtctcaccaaaaaaaaaaaaaaaaaaatctacatacagcccgtagctttatttaacaggaatatgccaatgtaaatttcttggttttgacacatgtaccatagttatgtataatgttaacaatgagggtaactgagtaagggtgtata

SEQ ID NO: 50103 - DNA, 1087 bp, Homo sapiens
atgtgaccttatttaaagacagggtctttccagaggtaattgaggttaagtgaggtcattacagggatcctaatcctatgtgactcaggtccttataaaaagggcaaaatccggacacagagacagacacacatgcagtgaaaacaccatgtgaagattgacattatgtcgccacaatccaaggaacatccagaaggtgggagaggcctggaacagatccttccctagcacctttagagggtttatggccctgccaacacctcgattgcagacttctgacctccagagccatgagacaatacatttctgttgttttaaaccacccagtatatggtactttgttatggcagccctaggaaaggagtacaatcaccctgggagaattttctttgtccccaaatgcaatctgtgactgggacataaagtaaacccacagttcttgtcatctgtctgaaaaaactgtattacttatttgttttactgtgatctagatagcaaaccatcataaaagggaattttatgaaaacccttgcaacttccatcttgaacctcattttccagtattcatattattgctggcaacagtgtatggaggcagctgtggcagaactgcttgaatcacagaggtccagcctcactctaccactcgctgattagaggttctcgtcctcctgtaagccccctgccttcaccattctttgcctcagttgcctcacctatgaaataggatcctaattagtgggtagtaattatgaagaatccctaatgggtagtaattgtgaagaatccatgagataatatgagaaaagttatagaatggtgcttggtaccaagttggtgcccaataaatgttattgttacagttagttgctagtaacccatcctttaacatggattattaaccataaattggtttttctctgataccgtttgccttgattagtgcttgattgagattctgtacatatatatatatatatatatatatatttttttttttttttttttttttgagacagattcttactctgtcacccaggctagagtacagtggcgccatctcagctcactacaacctatgcctccc

SEQ ID NO: 50104 - DNA, 1214 bp, Homo sapiens
atcccccaaactagcaatgttctttccagacatggacagttctctatctgaaattccccttttcattcattgaacacctatttgctctcaataccaaattcaagtacctcctcttttataaagcctagagctacttctttttcctcctcagtgaactgagttctcctgtaccacgggccctctagagaaaaataaaggtcatcactattagtggataccttagttagcccccctagtcttttgtaaagatttttggttcactgcctcataatctgggagaatcctgtacttgagaactactcaatttttttgtaaagctggaagatgaagctcaagaggagaatttcagaagatgcccaaccacagactcactggttggaaggaagtatgggccataaccatgaagtgaacctgaaattactttagcagtcagaactccctggcaattcaggtatatccaatattatcaacatgtatgatttatgcgcctttggttttatttactgaacactgcagacactgagtaggagagtgccttaggccagggattctatttggataagttagatgtcactatccatccatgttcggtattaggcatggaaaagaaaactttttataaatgggatattggtactgaaatagtggtaaagtagaagaaggtgggatagtaaagttgcaggttagaatgctgataagttaacaattctcctttgaatcaccctctactttgtacttagcgcagtgtcctatgcataataaatgcgtgatacatgtctacatgtaaataaatccacttactcaacattaaatatttattaagctcctagataaacagaaagtgcacaaaaacctggggcttcaaagataaattcaattcaacctgtaatagaaagggcagcagctgtgttacaaatatattcaataaagtattgcagatggggaatgagtgtccctgttgtcattttctaatgacttatactcccctccatcctaggttatatataaggaaaggtagtgtttgtccaagtcctatttggcagcaggataactttttcttcccctaaataacaagaatgataaaattctggctgttttctattcaagaaaatgcagtgaggagtcaaatgagatgatacatatggagggacttcatgaattttaagtgaatcacaataattagcagataataataacttagttcagttcttaat

SEQ ID NO: 50105 - DNA, 1131 bp, Homo sapiens
tgaaaatgcagtggctttctaaatttgccatatgcatggtcgattttgaatgtcctaatttccctaagaaactctaagtttcacttccaagcttttagatggtctattgtatatttcaattgtaatattttgccctttaagatttttagtttgacttgcagtatttttttaattaatactcactgcctttccatcctgagttaggtaaaaacagagatgagcattgtcataggctgaattgtgtcccccccacattcatatgccttaaccctcagtacctcaaaatgtaaccatatttggagataaggtctataaagggttagttaagtttaagtgagggttggcccctaatctgatatgactggtgtccttatgagaaaaggagaaaagagacaccagggatgtgtttacacagaggaacgaccatgtgaaaatgcagtgagaaggcagatatctacaagccagggagagaagtctcaaaagaaagcaaacctgtcaacatctggattttggacttctggccttcagaactgtgagaaagtacatttctgttgtttaaaccactcagtctgtggtattttgttatggtagccctagaaaacaaatataaactccttgcatttgtccttctggtagcctatagaaaggttagaacagacacacaaaataatttgtgaataaggtttggtctactccttccagatcaagggaccagggccccatactaggagtgtaggctgctaccaattttaaaccaaaactactgccatactagggagggaatgggacaagggcaagtgggaataccacaaaactttcctaccatttcgaagttacctttttcttgattttgtggacatttggttgctgtaaacttttgactgttttccagagttctgacaaaattggttctgacagtttctactctttttgagagcttgagctgtctactgtgccgttttgttgatgtcaccctccctttctccaaaactttaatacacctatgtgaactatggtgttcctgaaaataaatagtgtgtgtcattatttcccaaacttatttgactatagatttttttgttttttagatagaccatccttttcgtggaacacatttcaaagatagcaagc

SEQ ID NO: 50106 - DNA, 1037 bp, Homo sapiens
gaaaagttaagagatcaaggtcacgtgtttacttagaagcaaagctgacattggaaccaggtttccatgtatccagctataagtatgttgttaatgactatgctgagctattgaatttgtgtgtgtgtgtgtgtgtgtgtgtgtgtgtgtgtgtgtgcatgcttgaatgttacagaatggcagaattattgaaatgagattttgtatattatgcttaatggcaattgaacggaatagcctgtacttcctttactgaagcaatcaggaacacatttgtgcaggtgattacacaataccattaaccatgtaccatcctaccaaatacattcttgttatggagaatcacatttatgagaccaaagggacttctgacactctccaccaactttaagattcaaatgataaacaagaaaccacaaaagtcaaatattcatatacatcctaccctgcagaatcaggcagctctacattagtggagaaatggagatgcgaacatgtgcagccaatggaggcttacctgatactgtagagcactttgccatttttcgaaatccgtagcaatttgttgtcagtggtgacatcgtggaagttggcacccttctcattggcaaagaacaaatctggtttccaaatggagtctagcatggatgggtccaagtccagggagtcatctgggtactcactgtacgccagccgtgaatcattccactgttgtctcagaaaaatattcactcggtagtcctacagaaatgccgtggacaagtgttactgattaccctggcacaggagttctatttgcatttctctctcattcttctccctgatttgatacagctttggtgtccgagtaaaccaaactgtgtataccttggtcaaaataaaccatttagttctattaggagaggggacaaaagggagaaagaaaaaggaagattcaaccaaaccagaacaccaataaaacgggttgacttggttgaattttttagtgtttaaattattcattttgggatgaaataatactaaagctgattttgcta

SEQ ID NO: 50107 - DNA, 1046 bp, Homo sapiens
ctttgctgcaacatgaattgtgtgtgtttgtgtctttggacttgggttgaagtaaatgaggaattaatgtgggggtaggaaatgacagcactgaaacagaagttaagagccctgattcttgtcctagctttcctacttactagctccattgtgacgtccttatcaacaaaacaagggtgttggattagatattttacaaggtaacttcaaatttaaaaaaaatccttctataaaagtcatatttctgactaaattctcagaagcaatgggatttttaaaaagaagacaatatcagcaaagatactgtgggcatgtgagatgagctgttcttcaaaaatgctcaccttctccttttttctttcatgttgtccaccatatcccatgatgtcctgacctttattccaactcacaatattaaattcaacaaatattgtttaaacaataatatgtacaaccttcaagactcacctcactatttcagtatggattcaagtatggattcattgtaagtaatgtgaatttagaatttgactctctctgaatttagaatttgactctttccccatcccagatgaaggaccacatgttactcagtacttgatctctattctctggattattgactttctctgaagaaggtttacaaatcaaaatgtatactcttgtcagagatgatcaataattaatggggcaggtcaacaaacaacttaggaaaaaacagagagtaagataaaacattagagaatgaatattaaagaaaaatggacagaaatggatttggtactttttcatcaacaaagattgtgtcctacatcactggataaaaggtttattaacactgagataaggcctttccttcctatttaaaagatttgtttgaattttagtcaaggtaccccaagtgttcataaggatgacacttacggagttctggtctactgccttctctttttttttagacccctaccttttggaatacagatatatgaagtattaggaaaggtgatcgtgcttgttatgaaatcagtggactgtatatttctata

SEQ ID NO: 50108 - DNA, 1024 bp, Homo sapiens
ctgaaaatcctgttactttggaggcatcagcaacttatggtgacacatatcaaagactttagtggcatcagggttaggtcataaaggggacaaagtagatggcctttttctacttgcttcaccatgcttttgtgtatccactgcttatctaagagaaatgcctcttattctgtcttattccatctcatctcatgcccctcattcttacatcctcctctggccaaggtccttatgtcttgttctcaaagcaattatcccttcctgccagaattccttttggggtgatggtctacatgggcataagatggaaagaaattcaattttctgattaaagagtgattcactataaagatttaatgactaataattttaattttctcaggagacattttcatttcaatgaaaagcttaccaaatcaggctattttttgggcggggggagaaaggcaagttatttggcattttactttgaaaggttgcctatgctgtattgataatgagattttgtatgacacacacacacacacacacacacacacacacacacacacacacacacactttggtttgtctttccattaggatgttgggggttggtcagtatatagggaatgagttgtaagggtcctttctctttaatgacatactaaaagaaccaggtcattggttaaaacaagcagggagtcatttcaacagtggtgacttacaactctccagctgcattgtacaggtctggacatccatcggaaagttcttcaagtccatgggacaggataaggtcaaggtgagtcttagcaaacaaaaaaaaaattaaaaaccatttttaaatctatgaagtccagttgttgagaaacaaacaaaatacacttggcattaagcaaagtgacattgattcaaataatgaaatctaagctccaactcagggcagtgctttttgtttttaaaatgaagaacagtcactgataaattttttaaatattgtagtatttcaccataacctcttactctctatttttcatcttcc

SEQ ID NO: 50109 - DNA, 1050 bp, Homo sapiens
gtcactgatactttagctgtctattaaattgaaaaatacacgtttgtacattccaggtctaatagcatagcatatagtactgagaatctatagaatcctccaggggcagagaagacatagccaagtgagggtatttaatggtagtgagtggggaaaaattgactcatatcttattcagaccctctggaactgaacccatttaatcaactatctgtaaaaaaaacacacacgtgtatttgtgcatatgtacatagttgcccccttggtatccacaggggattggttccaggatctttgcaaatacgaaaatctgtggatgctcaagtcccttatatgaaatggagtaatatttgcatataacctatgcacatcctcccatatactttaaatcatctctagattacttataatacccaatacaatgcaaatattgtatagttgttatgctgtattggttattttttttattgttgttttgctttctttgttttttaaaaatatttttgatccatggtttgttgaatctgcagatgcagagcctgcagatatggaggactaattgtatcttgtacacacatacatatgacaaactttggttaatctcattgacagtacaactataagtgaatagtgagccatccaaagaacaggacatcttctattcataaggccctttatgcattttctaatataacctctcatgccatggagcagtcttttctactacattatggacagggaacagtaagaataaaaataaccaggatgagatgaataccgacgatgtagaaaaactgggctaaacaatttatataagtactgcttcatctcatcctcatttaatttttttaaggggtagataataatgttctcattttataaatgatgaaacaaacttagagaggttgagtgaagtaaaggctctaagatttagatcaaggcctatgtttcaaaatatgtctttgttcatatttttattattattatactttaagttctgggttacctgtgcagaacatgcagttgtgttacatagatatacacatgcca

SEQ ID NO: 50110 - DNA, 1140 bp, Homo sapiens
atccaagaacttcataagatcctgattatgtacaaaaaataattgtttccaacttctttcagaaatactgggaaagtcgtttaaattagctggggatatacctgattcaaggagcaatcatctttattttttagagctaaaacagatatccaaacaaatctttaaaaactcctacaggtatcagtcttactgttttcgtagttctcttactgcaatctctagttagaagcattctggtagggggaataaagcaagaccaaatgtggcaaaactatgtatggcctctttcgttttaaattccaagcatgtcctgggtttgtcagctgcttgaaatggtccagctggtcttagttgaccagatggctgaaaagtaaggagaaatttccttatataggaaataggccatcccagttaataatggcgaaagacaatgcctctggatccttgcttcaaagagacagttctggacctgtcagagtcgtctgcacacctaggtcattctagctatcccagtgtttgctttcacttctatagtctctgggcttcagccacaaatgaggactcaagacacacttaggagtggctataaatcatctagctgtgataacaaacatggagtaaaggaaaataatcgtttaatcttattttgccatgtgcaaagcctgcctgatgtctcagtcttccatcttccattcaattcatcctcatacttttctgagggtgggaaagacaacatgcagcctttagtctgccactagaggctttatgctctaaacggttaaaagaagtattgccagcacaatagcttcttgggggttggcagagatgtatgtttaaaaaccaattttatagcttcaaagggaaagataccgatgaaacacatatcatgctggtatttgattttcctgtatttagagaagggattgaacttctgaaaaacaaaaaatcaagaacaaaaacacaaaaagtattggttggcaggaagataggaaattaacttggaatcaataaacacaagtttcttacttgaaacgtgtttaaaatgtgtgaagcatgtttgaaatgtacccagatttttttctagaaagccttattttaaaagtgtagcccaaatattatgagtagaaggtcctcattgcc

SEQ ID NO: 50111 - DNA, 1124 bp, Homo sapiens
tcttcttccctcagccacatgtgtgtggtcagattccatttttgctgtcttcattttctcagtggacatgacagctcatttataattctgcagttatttactctcattgcaattcaaaagatttatttaaatgctaactgcttggtgtttttctttaaagaattgcttggaaactatgtctgtgaaacattatacattttaaaaaatgatttctatgacgatactagtgattccaggaggatttgagaatactttattagcagctttcctctcttctcaggttaaacttgacatagacaattttgtctgctgctacataatagaacgcataagcttttaactcatttcctaagctttagtattcattttaatattatactgatttgattttaacccatttatttactccaaattccatgcaaaatgtattcaaacataaagattaattcacttaattaaccttttgattaaaaactaaaaccccagtacttatccatctggattctctcctcgaaacagattgtggagaattgcaacttagaagttgtatttcaagtggctgctaatatggtcaaatctacattatgagggaattaacgcacataaagttgaaagatctctaaccaaagcccttgttgaaaaataaaggtgctaatataaggaatgaacattttcattccttgtcagtaggctagtctttaaaccatttctgtaggacctcaatgtctatttgataagtccaaatggtttgggcttgaagtggatgttttcattactaaccatgcaatatttttgctctgctgctgggttctatctctgtgctagaaacaatgagaattcaaagttgaatgggatataatcactgccctaaatgtgaagattgtctagtagaggaacaaacagaagtgcaaaaataaccataatataaggcagaataaaataaaagaccaaagacaggagcttcgcaggtctacaagaggaagacattatttctgccttggtttatccaaagaccttacattttccttatttttctattacactccttagtataatcaacataccagccaaacagaactatgtacttcttcccaaaatcttcagtgcttactcatcactgttag

SEQ ID NO: 50112 - DNA, 1039 bp, Homo sapiens
gggcaggtaagagaaagtttcattgagagtagattcttgagccgaattttgtaaaataagtggttatttctcaggaagatatgcaatatgactatgaactcaagctttggaatcagaaatgctggggtttgaggcctggttaagtgtataactttggacaagttgcctaatgtctatgtgactcagtttcctggtaatgaagacagtgcctaatacagaagggggatcgaatttgataatacatataaggtaattagaagagagatgaaatagaattaaagttattttgtgtaagtccatgttgttatattataaatgtttaatgtgcattgccagagtcaaatgacatgtgaaaaagaggagacccattatggttacattactcataatcatcatcatcaccaatcatcatcatcaagcattgttcctttgagggctgatattttaacttcaagattttgcaattaaggtttctataattgggacacaaatctatggaccctagatggactttggcagctgaactgtagaaataaaaccatgatatctgaaacaaaatggttcaagaagcaagagagcaacaaaattaatgccactcagccccttggctggaaccagagactcaaacagtttggaatcagagccatgccccaacacccaggacaccatgcccagagggctggctctttgtgctgatccctgttttctgagcagttcactcaaaggggaagagacagaagcaggagagtgcctaaatggacctttacatcacacaagagagcaggagtaaatttgctgaactcaaggcactgcctagagaagtaaatattatctctgtatgtgtttggtctcacgatcctgctgatcctaaagtaaaatattactatattggaaagtacagaagttgagccaatgatgatgacactcttggtttctgttacttttgtgctgccccaatattgggcatttatgcctgcaggtgatttatgtttcccataagtgctctaaagctttgatacttttaagacttaaatacgga

SEQ ID NO: 50113 - DNA, 1052 bp, Homo sapiens
tgtcttcagttattttgtgtgtgtgtgtgtgtgtgtgtgtaatcttttctagtaattttggcatgattgttatgcttgctttatgatttagaagtttttctttcatacattaggttctggaattgacaaaacaaattagcatcatctactttttcaaggtatactagaagtcttctatgaatccatctgcgcctggaatctaatgcaaaaattatatgatcagctactgatatgctaaacagattttgcaacattcaacctaaattcttcatgaaaatctttaataatactaattcagggaaaatatatatacaaaagccaaaactatgtttaatggggaaatatagaattatgactagtaccaggaacaagacagggatacctacattagcattattatgcaacattgtactcaaggtagacattaaggcacttaggaaaaataactaaaggtatacaaattagaaaggagatggtaacatggtagctacttgtgaatgatatgacagtctatctggaaaactcaagagaaccaactgaaaaatctactactactagtataaatatttagagagttcagtaaagtagtaaaatacaaaattaatatgtggaaattaataacttttattcatacaaaatataatgaaaaataacaatagcaacagaaaaataataaaatatttatgaataaacttaacaggaaatgtgcaagaacacaaaagttgatttgaacaaatgaaaagacattccgtgctctgtcatagaaaagttcagtatcctatgttttaatccttttataagttaactttgtaactgtaatgtgttggtaataaatatataaattgtttgcctgttgacagagatgcaaacttaggtactgtgcccatagtatatgtggtcagggaagactttaaaacaaatcatatatagcattcatgtaaatctattcttgttcagaaaattaaataaatatttttataactcatgtgtgcctaaacctttaaagcctgaacattcatatatattttgtttggagcctggaatgcttatca

SEQ ID NO: 50114 - DNA, 1052 bp, Homo sapiens
tctggagatatttttgattgtcacaaccagggagcagtgctattggcatctggtagttgaggtcacggatgcttctaaacatcctattatgcacaggacagcatccaaaacaaagacttatccagtcgaaatgctaataattctgaggttggaaaaccctgagagagagaaagcaaaaacaaaaacaaacaaacaaaaaaccgaggtaactatatccagtccagtggttctcaaccagaagtgatgttgctctgaagaacattcagcagtgccagaagatgtttttggttgttccatctgggaagtaaagagttgctctggtttctagtgggttgaggccagggatgctgttaaatacccaacaatgcaaaggacagctctttatgacaaataattacccagtcccaaatgttaatagtgttataaggtggaaaaaccctggtctacactcttctcccagcatagaaacatttcccacattttatatctgtttatttccagataattcttcaaggagtagaccaaattccatccccaaggtgataatttctttgcctattctagcccacggtcgtcttgcccatctttagaatttgtaacgcacttaaagatagaatcatccagtttagtcttcgcttcatgcatatgtgttttatccacccaactaaagtataggatacttgggggaatatagatccagtaatgtcttctgtatccatgccaccaaggacaagtttttgtgcatatagtaagtgtccctgtaagtttttgttgactgtcaaattttccaagtgctatataaattcaaattcctttcacaattattgctttatataaagggtaagctacaaaaaaaaaagacaactaaaaagaagaaaaatgtagttttggtcttttagagatgatagttgttgatatccaaattactctggatttattttcattaacggaaaggagaatacttattatttagatgactttataacttatgtagtttgcaaatatatctggcgggaaagtagaaccagtcaagtggtttagagtttcatggt

SEQ ID NO: 50115 - DNA, 1080 bp, Homo sapiens
cagaactcagtgagctcatacccacataaactcctcaatataagcaatgtctcacaacaaatattcagctttacatctaggtatttgcagcattaatagggactgtgaaatatttttgttttcattccaacagagtagcatataactattacttcaccagcaggattaatttatcaaatattttctggaacagattttgaaaaatctttctctctctactgtacataaaatgttaactttagttctcaagcaatattgttacaggaggtaacattcttcatatcaaagggtatgtttctctcccagagtttgaaatggaaaacaggtgcaagccttttgatagcctctatgagattgggttataaaccagaacagtgctttccaagcatgtctgcacaccagaattgcctggggagctgcagaaatacagaggctggtgcccctcctaacattgaggtttagttggtgtaaggtgtgtctaaggcttgggatttttaaaatatccccaggcgattctaatgtgcaggcaagtttgggaaccacaggactggagatcttgagctatgcatttcaaacctgaagtctctggacagtgtaaagcttagaattctgcactaaagtttaagttgagataatgaggccagtctcactggatttatcatgttgcaatctacatgggtacggcataatttacataaagccagagcaattgatgaaaaaaagtcaatcagatcagtgatgtacacgcacgcacgcgcgcacacacacacacacacacacacacacacacacacacacacacacacacacacagtcaatatttagaagaaccaggattttaaagtaactttgtcaaatcaagtatatatccccaattagagttgccagataaatacagggagcccagttacttccgaatttcagataaacaatttttagtataagtatgtcccatgcaatatttggtatgtgcttatactaaaaattgtttcttgttatctgaaattccagtttaactccatgatatgtatttttatttgctgaatctgacaatcctccccaattttaaaggcctaagct

SEQ ID NO: 50116 - DNA, 1030 bp, Homo sapiens
gctgttccatctttcacttggaggcagtgacccatcccataaccgctaaaattaaaacgactttcacgagtaacgtcttcttcctgacggaataaagacagaggaagcacagattggttgtcagtcaagttagatggaagatgcttaaaattctttagaagtaaaaggataaatcacagttaactggtggtgtgggaggcttttggaatagcgagttctctttcaagttcaactcaattattcatggaacagatacagttgattaacttttcagactgagaaattaagggtaagaataatgactgtggtcattttaattaattaacaaacagaaacacctacattatattcagtactgactttcccaaaatctagtttattaatccctagatatgaatagagattttaaagcagttctccaaatcccagtgttacactgtaagtctatgaagaggaccattcattcattcattcattcattcagaaaacatttactgagcctgtgctgtgtgcctggccctaaggaacctatagtattgtggttcattcacagcgcaattcccccattaacattaggtttaatgttgatgttacatctaaggtgagccccttatatatatacctgttccccctccagccctctagttcatctcatttatatagcagagattaaatattcattaataatttaatttttccagtgttgatttttaacattgattatttggctggtgaatcatttctaccatatttaaatgtgtcattttagctgatgtcagtgatatttgtatgattatttctacataaattagataaaagtctgaaaaattgtatttattccttggtgtaaaggacaaatagccttagagaaaaatgtatgggatctgggtatgtgtttgggtcaaaggagggggtcaaacggtggggttgaaaaggtggggttgaaaagctgggattgaaatgacttaactgtaaacagccatcaattgaattatcttcttctgtaactagattactgccttccacaata

SEQ ID NO: 50117 - DNA, 1004 bp, Homo sapiens
aaatgttaagggcagccagagagaaaggttgggttacccacaaagggaagcccatcagactaacagtggatctctctaaagaaaccctacaaaccagaagagagtgggggccaatattcagcatgcttaaagaaaagaattttcaacccagaatttcgtatccagccaaactaagcttcataagtgaaggagaaataaaatcctttacagacaagcaaatgctgagagattttgtcaccaccaggcctgccttaccagagctcctgaaggaagcactaaatagggaaaggaaaaaccagtgccagtcactgcaaaaacataccaaattgtaaagttatataagttaattggtggcttctgaatggttacccttaagtttcattttgtttctctaacataggcatttataagaaatagtccaagttaacttttgtttatgtttgcaaatcaagcaaggttaaggtcatttatgaggactaactggctttgtcttcccaaggattcttcaggcctggtctccatttactttaacaggacacatgctctaaaggtaaaattgtttggttaaaatttcagtttctctttttgatgagacaggtcttcaggcaaattattgccttctggtatttattttaaacatttttttgaaatacagtagatatacataaaagaatattaaaatacttaatactcatttctcaaaataaacatattaaaatgtttaattaaaaaataaaaccatgggtcctattcaacatagtattggaagttctggccaaggcaatcaggcaagagaaagaaataatgggtattcaaacaggaagagaggaagtcaaattgtctctgtttgcagatgacatgattgtgtatttagaaaaccccactgtctcagcccaaaatctccttatgctgataagcaacttcagcaaaatctcaggatacaaaatcaatgtgcaaaaatcacaagcattcctatacatcaataatagataaacagagagtca

SEQ ID NO: 50118 - DNA, 1033 bp, Homo sapiens
agtcctgatccttgcacgtgaagggtctccttgtccttggtttcatcatttttgaggacctggagctactaatgagacttcagtgtgtatgaggactgaccaaattgtctgttccatgagcagccctgggctctactgcaagagggccagtgtggtacacacttcacaaagagcaccctagagctttgcactcctctttgaagctacatttacctgcttatgaatcatttgtgccaaagtgataatgtcctttctaaatgctagctcatagtctaaaaacatctaatacacgcttccatcatcttgggaaactatatattacttgttatttttaaactgcatttgcacccagagtagaaatagtgcctcttttctcatgtgggagcatgtgtaacaaagcaaacgtcattttccctccttcaaaaatgaaaataaacgcctttgaaatggaattttgttggtctttttttcaactcctgtatcttttgggccattcaatcacacaaaatcttgactctgaagatgttattaatgcggtatgcacaattttaaattatttctcttaagcattttcaacagaaatattctgggctctcttttgacatttatttcgtcattcatgagcatggatcagtggtaccatgaccttttactttccaggtttttcttttcttagtgtggatatagtgaaactgtatatagtctgaggagttaagaaacaaattgtgctggatgttcaaactctaatatgataggtgatcttgggcaaggagtttaattcatggagcttctgtttatctgttgatcaaagggtgtatattgactctttgtgatctgggcaccttggattgttgttaggatcaaatgctgtcataggcattaaacatgttgatattttgaaaacactatgtaaatatgaggttatagtgttatctttaattcttctactttataatctatgaaaaaatatattgcttgaatcattcaaattatacttaaaaaaccctaaattggtgaaaataagaaaaggttt

SEQ ID NO: 50119 - DNA, 1029 bp, Homo sapiens
cactaagaggacctttttgcctgccttgatgtgttccgtgcaggtactttgtagtctgccgaccctgacatgtgagcccattttaatgataactgagaccacaagaggaaaaaaaagatccatccaaggctttcctgagatcaataccataattacattttagaccctccaggtattaatcttctattttcagaaaagcaattccattttcctggcatggtctcttagaaattatactgcttctccatggctttttaattttttcccctgaggggaaagggaaggcaagccttttccttttcacctccttccctcctacagccattctctcttttaaattgaatgttcattgatgctctaaaaatactacacacagagaaagggttgatgtgagaatattttataatattaacagctgaatataggctgttttagtgctttctggaactccttgcttgcattatttcatttaaaaatattgtgtttgctgtctaaaaataatctttgttgaatacttcttatggactagttattgttctaagcacttgttctgaattaactaagttcagtctcattagaaccctgtgaaataggtactattttaaacattaggactccaaggcatagagcatttggaaccatcgcttaaaggctcacagttgttagaggcagaaagaatgtttttttcccagggaattttactccggcacctgcatgctcagtcaccaagctatctctggcttaatctgtatgtattttacactagggccagggaatctataaaaatattagacacagttggtgcctatacttggttgaatagtgtgtacccaaaattcatgttcacctagaacctcagaatgtgaccttacttggaaataggatctttgcagatataattagttgagctaaaatgaggtcatactggattaacatgggccctctaaggtgtttttataaggagagggagttttagagacagacatacagagagaatatggccatgtaaaggcagaggcagaagttgga

SEQ ID NO: 50120 - DNA, 1050 bp, Homo sapiens
ttgtgacaaatggggttatgtctttcatagaatgagtcctaaatagatacaatgttagctccataatggcagggattttggtctgctgtattcactggtatatcccaagaacctagaatagtacctgccacatagcaggcattcagtaagcatttgttgagtgaacagaggaatgcatacattcttataagaaataattgtttctgtctcctattccatctattagattgtcacttaatatgcattaataatagcacaattctacctgtcaaagaatgttttagattgtttacatatattcttgatctaatctaatcctcatgatatccctacaatgtaaggaatctgaggcttagaggaatttagtaactattccagtatcaccagactaatgattgaccctaccatgtcttcaccatgttacctctgattagcatgacataaataactgcagtgtcaatgctacagaaaatggcacaaggagctctaatcatcactcatataataagcagtcatcttgcaaacatcataaactgaaaggtgaaggacttaatccaagccatttccaaacactgagtgtgagggagcatgacgactcatcataaaagcagaaagacaacccttattcctccctgctgggttgtctgttgggagtcaattttattaaactgaaattactttcattgttataattcttatattattaagtgtcattaattgttggcttttcttaatttgttattatttttattattttttgtagagggaggtcttgctatgttgccaggctggtcttaaactcctagtcttaagcagttctcctgccttggcccctcaaagtgctgggattacaggtgtgagccaccgtactggcctaattgttggctttctttgtccaatttattctttctgagaaaataacattctactgaataatggcaggcaaataaaatctcttccttgtgaaagcatggggtccctttgacaacctgagacaatataccccagcagttaagtcaagggcactagagttcactgtttggctttgac

SEQ ID NO: 50121 - DNA, 1027 bp, Homo sapiens
ctccctaagtgctgggattacaggcgtgagccatgtgctcagcctagtgacttgtttctaacatgagaatatggtagtgactgtgtgtgatttccaaaacttggtcgcaaaacatattgagacttctatttggttttcttttttagatcacatgttttggggaaagccagccaacctgccatgaggacactcaagcagccctaggaagagtcctaccttgcaaagatctgaggcctcctgctaacagccagcaaggaattgaggtctttgtgatggttaattttatgtgtcaacttgactaggccagatatttggtcatacattattctctgtgtgtatgtgagagtattttcagatgagattaacatttgaatcagtaggctgagtaaagcagattgccctcctaatgtgggtgggcctcatctgattgattgaagacctaaacagaacaaaaaggctgagtaagatggaactacttctgcctgactacttgaagtgaaacattggtcttttccgaccttagaactccaactgccagcttttgggctggaatcaacaccaccagctctcctggttctcaggtcttcagacttggactggaactatatcattggctctcctggatctccagcttgctgactgcagatcttgggactactcagcttcgataatcatgtaaatgagccagttccttataataaatctctctctctctctctgtgtatatgtgtgtgtgtgtgtgtgtgtgtgtatatatagacgtgtgtgtgtgtgtgtgtgtgtatatatgcacttagaattgcctttccagcaatatatataatatatattatgtaacatatataatatataatatgtaacatatatattatataatatataacatataatttattatatataacatatataatagattatatatgttatatattatatatgttatatatataatatatgttatatatataatctattatatgtgttatatatatagaatcaataggaaaaaatatataaaaccaac

SEQ ID NO: 50122 - DNA, 1040 bp, Homo sapiens
gcatgctttctgtaggcagtggcagttctcctgtccagtctgctgccactggaccaccctgtatgtaagtttgcctcaaaaaaccctatggctcatttgctagctctgggtctcttctttggcctctcaaacctggtgctctccttattggagtgtgtaggggtccagcatgacatccatttatatgaagttctagaacaaatgtatgactgggggaggtgttaactagaaggggtcatggaaactttctggaatgatagaaatgttctatatcttgattggggtggtggttacccaaatgtgtacatttgtcaaaaattatcaaactatatcttaaaaatctgtgcattttgttttagtaaatttaccttaacaaataattattaacaaaacatcaatgtaaggaaaaagtagaaaaaatataattagttgaaaagaaggcaagtaaagaggaaataaggaactagataggccaaatagaaaacaaacagtaagatggtcgctgtaagttcaactatatcagtaattacattaaatgaaaagggactgaacattccaggtaaaagaaacaatttgttggttttatttgtgcatttcttcatgtgtctgtgctgcattcaagagacatattttaaagagtaagatacagaaaggtaaaaagtaaaagggtagctgggcacagtggctcacgcctgcaatcccagcactttgggaggccggggcgggcggatcacgaggtcaagggattgagaccatcctggccagcatggtgaagccccatctctattaaaaatacaaaaaattagctgggtgtggtggtgcatgcctgtaatcccagctactcgggaggctgaggtaggagaatcgcttgaaactggaaggctgaggttgcagtgagccaagatcgcgccactgcactccagcctgggcaacaagagcgaaactcgtctcaaaaaaaaaaaaaaaaaaaaagtaaaagggtaggcaaaaatatagtacgcaaacattaacccaaagcaaactagcatagcgatattaat

SEQ ID NO: 50123 - DNA, 1049 bp, Homo sapiens
aatgaattacaaaggcagtccaattaaagttaacactggcaactttgaaaatgtctgtacagccaaagctttcccttgggggctttgaaataacaccaccagcgctcttacagttgaagtgtgattcagggccagtgcatattagtggacagcacttagtagctgtggaggaagatgcagagtcagaagatgaagaggaggagaatgtgaaactcttaagtatatctggaaagcagttggtccctggaagtggtagcaagtttccacagaaaaaggtaaaacttgttgctgatgaagatgatgatgatgatgatgattttgatgatgaggaaactgaagaaaaagcaccagtgaagaaatctatacaagatactacagccaaaaatgcacacaagtcaaatcagaatggaaaagactcaaaaccatcatcaacaccaagataaaaaggacaagaatccttcaaaaaacaggaaaaaactcctaaaacaccaaagggacctagttctgtagaagacgttaaagcaaaaatgcaagcaagcatagaaaaaggtggttctcttcccaaagggaagccaagttcatcagttatgtgaagaattgcttctgggtgactgaccaggaggctattcaagatctctggcagtggaggaagtctctttaagaaaatagtttaaacaatttattaaaaattttccatcttatttcatttccataacagttgatatctggctgtcctttttataatgcagagtgagaactttcccttccgtgtttgataaatgttgtccaggttccattgtgaagaatgtgttgtccaacatgtctgtttagtttttaaagatggaactccaccctttcttgttttaagtatgtatggaatgttatgatatgacatagtagtagcggtggtcagacatggaaatggtggggagacagaaatatacatgtgaaataaaactcagtattttaattaaaaaaaaaatcacccaagggcttcttaaaatgtttttctgatcttatgccccacctcaaagaaagatcttgatcca

SEQ ID NO: 50124 - DNA, 1220 bp, Homo sapiens
ggtttcaccatgttggccaggctcatcttgaactcctgacctcaggtgatccgccctcctcgacctcctcccaaagtgctgggattacaggcatgagccactgtgcccagcctcagttctcatttctcctgacagccattctcatattctcagctatatcctctccagtaggaagagaaggaaatctttatcaatttatattgttctaggaatctttctgctagaaacaactgatttaatgtcatgggactgtttaggaaatacaatagtattgctatataaaaagagatgcacgttattattaattagagcttataacctttccaatgataacatatgtactaaaacatgagtggttgccttttagtatatactaggaatcaaaagacaaactttctaacttcattctaacctcattaaaaaacaaggtgatgataattttagtaggtttttttgtaagcctgatgagatgttttaagatttagaatgactcaatttggttatgtcaagtacaataatcaaatcatcttacaaattatcccaataggaaatcaatatgctttaatacttgaaagattctggtaaaagtagtaaaaacattgggggtgtgatgggggtcaggggtgatggtggtggtagaatctgaaggagaccaggaccaaatgtgttcttaatagtctgcaaaatcttaagaaaaactcaacatgcagcacatgtgttatgcccaggaatggtggatagggcttggtgtgtaggctagtcaggtgtttcctgaagccagtgccagctggaaggggaattagccagtaaatataaatagtaggaaaaagaattatccacaagatttaggaaaagtgttaaaattatagcccacacttgcataccaattttctatggcatggtggataatataaatagtgaatatttattgattattgtgtgccagacactgatctgaatgtgtagcccatgtgatccttacaaccctataaaactgtgcttcccaggatagtagctatgagtcatataggactatttatgtttaaatcaattaaaatagaataaggttatacattcagttccttagttgatcctagtcacatttaagctgttcagtcacataaggctagtggctaccatttgatcactgcagagaacatttccaaaatcacagaaagttatattaggcaatgatgttataagatgtatactattaacta

SEQ ID NO: 50125 - DNA, 1696 bp, Homo sapiens
aagttaagatactaaaaatagcatattgcttatttttaaattaccaatgcaaccaaaagatacagatatgccaaataacttacaagtgaattttgtactccagtattttttttaacttactacaaactagaaaagccgaagttgaagaaatgacactcttgccactttcatgattcagttgtgtctttgcatctacaagcatatgttattgaccactgccctggtcacgactctgagactcccctcaaaaacacagtcctcccaaatccactctgccaaattgaaaatgaattttgttttggaatgtagctaaggagatgcatgaaaacaccttgatcctgtactcttgttgcaaattatttcaaaaactgtagacccttcaagaattctaatagtacacaagtgactctcctattgtcctcagagcatctctttataccatgtagaattgactactcaattgtttctagtgttagaaaggaaaaggtgttattaacatacatctctacctgctctccccagtagaaacaaaaacttcaactctcttggctagaaacctgtgtaaaactttgctttctttttcctttctttctttttcctttttgcctaaaacttggacaatatcagaaattgagaggattccattttcttccttgtcttctaaattacaaagatgttactttccattctaagaatttgggagtgaaagatctttcatgtgtaagccatctgaagaattttaggcttctgctaaagacagtgtggtgcaatggaaagaatactgatacataaacactattcttaattcttcaagggtttgttgttttccatttttggactttctatattggttacttgcattgctttactgcctcaacaaaatagccctgtcctgtaagatcctactatgatgaatatctttgcaatgctaatggtctggtcactttctagggccttatttcaatgatcctgccttgcctttttattcagtagggtgtcacactattcaggtcctgaactttagtaagggcagtaaattagacacctaccatgctttgactattcagattttttgctttgctacacctgtgagcaactatgctggacaaccgtacctgtgtgcataactctggctcataatggccttaggttcagctagaaagtttctgtagcatccttaacttaaattattcatttccccacagcagcagccacttaccactaaatgtacaagcagtgctatggtcagtaaagcatgctattagtaatcagtcaaaatatttaacactagatagcaggtcagtcaggagtgagaaagaagtgcagtctattgattaccttttccacatctatttcactttttttcttactgaaactctcgttttgtccagggaacttcctttcccatagttcatgtgattggggaggtgaatctcatccctagttccagaggttaatcctgactaatctaagccagttagtgcaagacctttccctggcagctgttattggtctggggtggacacaagacctaaattgggtctaatcagactgaggggaagggcttggttctttggtgaggaaaagactgtcaggctggaagtaggtggcccttatttaaaaagttgagagttaccttataatcacaaggcaatcaagccttagaatgaaattgacacagtggaatgcaaatttt

SEQ ID NO: 50126 - DNA, 1065 bp, Homo sapiens
ttggtggtgccccaggcatctgacagaaacaaacagaaaatcctgtctggaaacacacattcatcctagccctcataaatctcacaagtaatttttcaaagaaaatgagctgtccacagaataactaagcacataaagaaaaaaggcatcgtgagtaattattcacagaaaataaccaaacagcatctctttcaagcaaaaacacactgaaataaaaaactcaatagatgactttaagagttaaagagatgaaagagatacagagcaaattagtgaccccgaatatatgagaaaaattatccaaaatgtagcacagagacagggaaaatatgaaaggctttaaacaacattaagggaaggaagggaggaatggaggtggtggataagagatagttgaatatccattttgtttcaagtatccatattttaacagtagctttcaatgtaggtaataaagttctaaatgctggaaggccttttagagatgaacaagcctacctttgcaccattttgcacatgacgtaacaaatagccagaaaggttacgtgacttgcagagctagaactagagtccatttcactgttctttctcccctgaaatttgtattctaatcagttactggaaggggagatggggagaccaggaccttagagaatcttgtacacatgtacacagatgttcatagcagcattgtttataacactgcacaactgagcataacccaaatacccatcaattggagagtggagaagtaaatcgtgggtagtcatatgatggaatactgtaaagcaacggaaggaatgaactacagctactagtgataacatgggcaactctaaagcctgatacatgcagagtgattccatttataaaaggttcagaagcaaaacacacaaaaaacttaaaatactccttaagaattcatacaaaggttgtaaaatttgaagacaggcaaggaaattatcttaaaaggccagggtagtattgactccaggggagaaagggcaattatgattgtggagggcccctgggcagctcctggaatgctactttttgatttgagtg

SEQ ID NO: 50127 - DNA, 1050 bp, Homo sapiens
catttgtgtaatgtaagcaacattgggaacctcgcaagggttcagtgatagttcctataaactattagcctagtttgtaactgtccactattatcaaggaggtttttgggttttttttttttgagacggagtctcgcactgtcaccccccgggctggagtgcagtgacgtgatctcagctcactgcaacctctgcctcccaggttcaagcgattctcctgcctcagcctcccaagtagctgggattacaggcgcccaccaccaagcccagctaattttttgtatttttagtagagacaaggtttcactatgttggccaggctggtctcaaactcctgacctcgtgatccacctgccccggcctcccaaaatgctgggattaacaggcgtgagccactgcacctggccaaggaggctgttttttgtacctctacagcacttaatggacactgcagttgaatgtgtggaggcttgtttactaaaagtctgacacagtctggttataaaaaacagtgtcttctgagtgctatttgaaaacctgtccactaatcaaaagtgtcatttatagtagggaatcattaaaaaaaatacataaatacatacccccttaaatagttaatatttgaattaaactcaaaatattaatacacactgagttgcccgtagtttgatgtaggattgcaggctttgagtgctgggccactggtttcagctgcatcttgcacaccctccttcataaaacataatctaccattgctactttgagtttcttttgggtggggtcagaacttaaaggcgtatgaactgatatgcttcaggagttttaatttgttttcaattttatacagtagtttaggacacccctcatctgccaagaacttttttctgtgacattcctttattggatttttcaaactgttcagcttagtttttgtggatactctttttgtcagtttatatgataattaaattactcaacacgacgataacaagtacaactgacatcaaacagatgtgtgaacaaacaattgattcttgacaagcactgaat

SEQ ID NO: 50128 - DNA, 1035 bp, Homo sapiens
cagcatcctcttcaggagtctcctctcctctattcttactcccttccagttctttatatagtagcttaagacatctctttaagatgaaaattggatctggttcttcttcaatgtgttctcattgtattttaaagaaatcctaaatgccatactatggcctatatctgattgaatctttcctaactttctaaacttatgtcattcgctccagcaaccactttatgtctgccatgttgctctcctctcagtttctgaatacttcaagctctttatggcttcatggccttcacacatgctattctcttttttctgcccagaaatctcttaccctcaactcttcttattcaagtcttcactttaatgtaatctccctagtgaggacttcccttactctcctcattttattttctctctctgcatcctatttatttcttttctagcaagtaccacattttaaagttttatatttaatttgctaaattatcttcttcactagaaagtaatacttcacaagggttgagcagaactgttattcagcaatatatatccaatgactagcacattatagattcttaaccaatattttttgaatgaggaaattaattgataaatgaatgaaaagttaaataggttaatgagcagatagtttactgaaagagaaatgcaagtggccttaattaatacatacgatgcccctaaaatagtgcctggtacatactaagccctcaacatatttagttattgctatttttatattaataatagttactattattttaaaattaataataataatatcacccaaactaatagtcaaatttaaagagtaaggagataccaatttctgctttttaaatgaactacaatgaaaaaaaataagatgatcaacattttgatgagatgggcactttttaaaggtagttaccaagtgatttgacaaaaccaatttggatgaaagcaagttagttagtataacaagtgatcagatgatgatttgttcaagaacagatactgctagatgtgggttgttgagat

SEQ ID NO: 50129 - DNA, 1035 bp, Homo sapiens; identical to SEQ ID NO: 50128

SEQ ID NO: 50130 - DNA, 1035 bp, Homo sapiens; identical to SEQ ID NO: 50128

SEQ ID NO: 50131 - DNA, 1627 bp, Homo sapiens
ctatataataatatcaaacaatccctttaagaacttattagagagctatgtctgaagtctgttctgcaatatctgttgctgaataataactctttcaaagcattaatgctgagtttatatagttcaaaaattctaatattcattcagttttaatacctaaatacttatattttactagtgatggcattctaatatattaagtcctcatttaaatacttgatactttgttaactgtggcattatatttctgaattttaaaacctttaatattggtaactattgcatattcttttaataaaacatgcagcatatttttttataaaaggaaaagaattcattgtttatatctagagagcataaagcctaagttaagtaagttattaaacaataacttcacaagatgttcaaatcgatttatcactgaaagaagatctatgaaaatgtgttttgaccaaacttagtattaggcaggtacacagataagattttccattcttaacattctcactgtaatgcacgacatttgaagcacctggatgtgctatcaatcaggtgggaaatttagcattatatattggaagcattgagaaacattggtctttcatttctatttttttttcccctcctttcctcctcctgccccacaatatattattcatctggttttaatgctacataaatatgcattgtctcatgcctgtttgtgttggatgccttgtgctaagctgtaacaaaatgttgcttcttttgctgtctgtatacagctgcttgctttaaattagtagattctgaaatagctttccttgcatgtctaaaataaaagtattgcatgtacttcgtctcatgtgaatgactttttcttttccatccctcataaaataacgttttatattttcatttttctaggcaaattttttaaattgtggttaaaaacacataacacagaattcaccatcttacgcagttttaagtgtacagttcagttgtgttagttaagtttattcacattgttgtgcagcagatctgcaggactttttcatctggcagaactgaaactctatacccattaatcaacaattccccatttctccctgtcccccagcccctggcaaccaccattcgactttctgtttctataaattttactactttagatagataatagtttttctgggtagttttgagctacaatttcagtgtgaacatgtgtaagttccattttatattatcaccacaatttattttaaaactctacctgtgcaagtctcacaagaataaaatgtgtaaataattctttgaaactaggccttttagaaaggacacatattttcaataatgcatatttgataagcagtatgattctctacaggaaatgctatataagattgcaggcagtgagcacatggggaaaagtctgaccagctccacggagtagctgtggggcatttttacatggagaagctgagaatgtaaactgtagaattcaatggaggcattatttaattgatacattcaaggctacatgaacctttaaactacttaacattacatggaaataattattttaaatttttcttgaatatttatgagatttagatgtcattctcagtgtatttaatgcttaagg

SEQ ID NO: 50132 - DNA, 2134 bp, Homo sapiens
cttggaatacttttccccaccacctattttaagctagatttttggagggatatggtggggggtggtgatgtagttggatttatttaaacacacacatatataatgacaaaggaaataatagtatggctttttttctgtaaagtcaagcacttaccagtttttctctgctccttaattttatagagccagaatgaagaatggggaggtttgtctgaggatatcttatgataaagagcagtctaaggctttagtccctttgatccccaacttatttattggtaactactaaatttaccatttttgtggcatggataaaatggagtgctatgcaaatactgttgcacgtgagatgatttctaagtccttgcttgatccgtgaagatcaaatagttaaatactgggcatttgggctttaacccttagcggttgatgcatgatggtgttgattagtgctttgagatgtgtcaacctttcttttttatactaacagcatcattttgaaatttgtggtgttgtttttcttttgagctttgtttgctgttggtattttttctcactaaagtaatctgtgaaatgcaaaataagtgaggtaccaaaagcaagcataatactcatgaatttgcttttactttgagatgatccactttatgaatagatttactggatttgcagttgtttatctgcctcatctagaaagtggtactctacggaggattagcgctgctaaaattgatttgttttagtgctgggggctgcatgatatatcttagtactatgctatatttttgtgaaagtaataatctgtgggactgcatacaaatggaaaggtaagaatcttaggagaaaagtgatttcttttaaaaaatgaagcttttgtaacttaaaattattttaataagtactttttgaagtattgaataacatatcttttaatatgaagttttggactttttaaaggtcagctcttgatataattaagaatatttgggctgagcacggtggcccaagcttgtaatcccagcactttgggaggccggggcagttggattgcttgagcccagaagttcgagaccagcctgggcaatgtggtgaaaccccatccttacaaaaagtgaaaaaaaaaaagactagctgggcatggtggtgtgtgtctgtagtccaagctaattgggaggctgaggtgagaggattgattgagccctggaggtccaggctatagtgagccatgatcatgctactatataccagcctgggtggccacagaacgaaactttgccgaaaggaaggaaggaaggagggagggagggagggaaaacagaaaaaagaaagaatatttgggcatgctagtccaacttgagaatatcttaaattgttttaaaaaaagagatgcttccaaatatgtacaagaatgtcatttaacagcaaaaagcattttgatataaatcctcttagatttgcttaaataagacaaactcgtgtaactcctttgtaattactactgttcatgttaaaaccttcaagcctcttttaaagttaacaagactatagtcttttattgccagcgtactttagtttttttataggtaaacttaatcagggtttattataacaaattctggacaaatgaagtttgattacattaatgcttgaaatggaagtgcttgaaaggaagggcagaaagcaggacaaatgttgcctttcattttacatttaataagaaacaatttggccaggcatggtggctcacgcctgtaatcccagcactttggaaggctgaggcaagcggatcacttgaggccaggagttcaagaccaacctggccaacatggtaaaaccccatctctacaaaaaatacaaaaattagctgggcgtggtggtgcacacctgtagtcccagatacctggggggctgaggcacaagaatggcttgaacccaggaagcggaggctgcagtgatccgaaatcaggccactgcactccagcctgggcgacagagtgagactctgtctcaaaaataaataaataaataaaataataatttggccagtgtccttactctctggttctcaggttgtagtcattttgctttatgtgtttttgagccttttttcttttcatacttttcaaaattttga

SEQ ID NO: 50133 - DNA, 1032 bp, Homo sapiens
aacttcttaactcttggactctgtgaggaagggaaagctgtttgagaatctcactgcatcagtcactgactgggacagttgtggggattgcttgaagttgagatgacatcatctggatagacatctactaaatgtgagacaatgcattgtacacttaatgatcttgtagttatcagaagagtggttaaggtgcctgcaaaagtgaagtattagattggcagccctggtgccatctactcttcagtagtgaaatgaacacagaccttttgccttgtgtgtacagtttgccacagtggtttaccaattgattggaaatgttattctggaggtttgtttttaatatcaggtgcgctgactataagcatatactctactgttgtaaaattggtttttaaagttagtatctccttattttgctgttcactaatcagacttttttaaaaattaggtcaaaaccaggattagaaattgggaatttttcatataggtcttcccttgatcactttcatattttgtcacagatctgtattctgctctgtcagaacctggcatttcttccaagtttttctatcattttctgattaattacattggctttaaaatgtatttaaagttattgaagttcaacttttaattttaatatttttcctggagagtaattttttgtttgtttgtttgagatggagtttcgctcttgttgcccaggctggagtgcaatgacacgatcttggctcactgcaacctctgcctcccgggctcaagcgattctcctgcctcagcctcccgagtagctgggattacaggcttgcactaccatgcctggctagttttgtacttttagtagagacagggtttcaccatgttggtcaggctggtctcgaactcctgacctcaaatgatccgtcccccttggcctcccaaagtgctgggattaaaggtgtaagccactgcacccagctgtgcctggatttttaaatgctactgggaaattgctatgggccttagaatatgacagcaatgttaagtttacct

SEQ ID NO: 50134 - DNA, 1065 bp, Homo sapiens
tttatgtcagtccctttaatgtttagttttcttaaatcagggaatcttatgtgtcatttatcagtttcctcaaattcaaagttctatttaatgagcatgggttagggaggatggagagttggaatactctattctcttttaaatagacaaacaaaaacagtaacgatgggaaagagagggagcactttgttaaagttggcattgatgccctgttttgtcttccatgacttattcccttcacaatgatgataaatgaacacatgtgaatacctcctctcaataagactgcagtagctccaccattttaaataacttactgagtgtggaagtcaggtagagtagacatgcacaaactcatgatatatatgccaagtgagtttgtatgatacagtggaaaaaggcctggagttaaggtcaaaagatcaggtttcttatcccagtactagcacttgtaggcgctgtactcttaagcctcattttttttttgtctttttttaatctgtgatcaaggatgaaagatagtacttgctgttgaaaacatcaaataagatgaaatggttttaataatgaaattaatgctgttgtgtgaatactagttattttcatactaaggagcaagaattcattgagtctcaaaacaggttgtgttattctgtatacagtattattttacattaatgctacgagcagtaactgcccattgtgttttctaaaaatcatttaagtgatcttcagtgaaaattataatctccactgaaatgttctgtgtttagcctatcttaggtttttattttctttcttttcaaaagccttaagtacatgtaaaccattttaaaatgcccttttaatcctcctcaaaggacttgctatgcctcagggttgaagttttgcttccttgggtcaagcataacatgattccatatgctagaatcctaatttgaaggagaatataagtttcccaaccttattccctcttctagggtaaataaactacacttcagttcaacagtgtagaacttggtaaatttgagaacaggcctctgtttcccttaagtgataggaact

SEQ ID NO: 50135 - DNA, 1341 bp, Homo sapiens
gaattctccattcttggttctgccatctatttgtctcttcctatgcagatactatacaatgagttttacagtaagttttaaatctggaaaggtatactatccacttaccatttttctttaatttttctttggctttattttcttacatttattcttccatatgaacttgaaaactgtttcaggcattaaaaaattctcatcttcccgctgatttgaatggattttatatattagttttagaagaattgacacttgtctttccttccagaaatatattctaattttccattatttgggtcacctttttttccccatgaatataggtaatcaaaacttgactgcccttatgttcagtgttttgtgtcttttatttgaatatctgaaggtaatattcactttacgctatatgtaattaaacaaggaaatagtgcttgtttaatcacttaatattctaaacatttccaacattttaagtgtaacattttgaatatggaaattcttcttgctctgtgactactgaaagcctctgattcaagattagttggagagaagaaaaagtattaaaagtaggttaatcaattttatataatttttattaaaaaattttttgtagagatggtgtcttactatgttgcccaggaggaacttctgggctcaagcaatcctcccaggtagctggaacatggggtgtgccactgcatccagcacaattttatataatttaacagatactcagtgtaacctttgaattggttatacaccattgtctcttatatcaatccccttttccaggttttgatttcgtcatacagcaaagcaatggcagagcaggtttgaaatttgaatcagattatcttcatattttctgagtgaatcaggattacgagtccatccagaattactcaacaatggaacttctaacatccttctctcccccaactgaggtggtatggggaagaaactcagtcctggcagacaggtggcttggtaacccaggtcccagtggcctcacatgtcccagcatattcctcctctgcctttttgcctcccttaacaaaccgatccaagtcatgtagcaggaagggagacctctcctaatttagctgaccaggctgagttcctaaccataaaaggaagaaccaaaccatttatctctttgagtgatgctttctgaggttgcttaagcaagactctggcattcccaataaggacctgaccaaattcagctgcctgaagacaagatggactccagtgccaacctttcatcaactttttcttcattatactttcactgtaatacttaactctctgcccaaggtgggtcttatctgccattttctg

SEQ ID NO: 50136 - DNA, 1029 bp, Homo sapiens
caaggaaatgaagttccctcagtcctttggcccttgtcacttgcgttaggggacatgccctagtgggtcctgctgccctacctgtggcacagcttaaaccctaccctgtgccccgagctagtataatggggattctggcttcaccttgaaggatctatgtgccaagtaagtcacttgaacgtccttgaccttcatgtcatctcagataggaagttgagtgcaacttccaaatcccctttcttggctaattctatgacacaaaatgttgcatagaacgaggaaggagtctccatttgagcagggagagtgcatgaataggatgtatcagcttttttggctgttgttttttttttcctccaaatattcttcagttattcctatgtaccagtagaagggatttctctgaactaaagtctaagtaggaggtatctttctacttgattggttttaaggatatgttgttttatatgtttatctaacatatgttgtcttttctgccagttctgaatcttctatctcctctccttattctagtgctccccccacccccgccaccacctacgctgtttttgttcaaaagccagagaaggaagtgagcatgcaaatcaggaaacagattgtctttttgcctatgcagatttgtctgtgattttgtttatttattaatattcacttagcatgtttagagtaaaatcttccttttctagtctatcagcatagggtttctccaattgttccctttcctcaaaaaaaaaaaaaaaagtaaaatttcacctgttagggaattcagactttttttttttttttttttgagacagagtcttgctctgtcgcccaggctggagtgcagtggcgcgatcttggctcgttgcaagctccgcctcccgggttcacgccattctcctgcctcagcctcccgagtagctgggactacaggcgcccgccaccacacccggctaattttttgtatttttagtagagttggggtttcaccgtgttagccaggatgatctcgatctcctgacctcg

SEQ ID NO: 50137 - DNA, 1032 bp, Homo sapiens
aaccagatcacggtgcactgcagtgtggatggtgtggtgccagacacgaatggaattaatagtactacagactaccgtgtgcttttaccaccctgcctgggtggtattctactgtttactatgaaatataaaactcattcaaagcagactaagtttttgttccattgttcttatattttatggcttccaggggccctttatgaaggaaataagtatagtagtaatactgctttggggaaaactgtgttcatgacaatctgtttttaaaacatgctgtttcacaggaaacggattttaatataaagtattgtaaggaactcatgcatgctgggaatcctaactatgccattaaaatctttaaattccaaccacctctttctgttaatggagaagaaatggtttaacagctgccttggggtagcgtaaaggtgggctatatgaggcattgctataccctttccctagcaccttggaatatctgttttcttatgttgggaatttattgggagccagaagtccttgacaagcaaacttcactatgacaaacctttcgtttgtcaagagccacatgttggctgggcacagtgggtctgtaatcccagcactttgggaagccgaggcgggcggatcacttgaggtcaggagttcaagaccagcctggccaacatggcgaaaccctgtctctactaaaaatacaaaaattagctgggcatggtggtgcattcctgtaatcccagctacttgggtggctgaggcacaagaatcttgaacctgggaggcagaggttgcagtgagccaaggtcacaccactgtgctctagcctgggtgccagagtgagactgtgtgtcaaaagaaaaaaaaagggggggggtgccgggtgcggtggctcacgcctgttattccagcgctttgggaggccgaggtgggcggatcacctgagtttgggagtttgagaccagcctgaccaacatggagaaaccctgtctctactaaaaatacaaaattagccagacgtggtggcacatgcctgta

SEQ ID NO: 50138 - DNA, 1043 bp, Homo sapiens
ccctgtctcaaaaaaaaaaaaggcttcctagtagtttctgaaaaaactgactgattgctagtgactcctgagtgagatatagtatgtctcagagagaaggaaagacctcttaaccaagctctgatgctggcattggaattatagctgactagtaggcttccatgacactgagggaattcctacgtgtatcaaccacaaattggtacattccttaaggacagccagcatcttatttatctttatctccctggctcccttacacacaggggttgtttattacccattaaagtaatgaatgcaggtagcaggggagtcaaatcttgacacatttcagagagttttctgacagagggtggtgactatgaattaatccagtgacagacaccaggattccagaggaaccttgcacttcaactcctctctgcccagctccatgagattagtgagctttgaaaagcaaatgactactctgatgccaggctctaatgtgagctgagttggggctgtatttctgacaaacaagattactgcttgtaatcaaccctaaacaatgtgacaaggaatatgaacactagaataatgacttcctttcccagaagttggcgctgatgatattcaattgtatggcacgtgtacggccaatgtctttaaagcatggagtgtaaaaatccttgcctttgagttaagcgtacctgaggtgtaacctccgcattctgcctagcggagaatatttatcttttagggcctgggaagttgcagtaagactattattttgggatttacagctagtgagctaaattctcagctacttcattatctacagaatggcagcagttaggaagaccaatttcacctggttttaggcttgtagtgggcagttcaagggcacaatagcttcaggacagtattttttaggtttttatgagctatttaaaaatacatgcaaaatcaaaataagagtcttgtttagggggtccccccaagactgcccacactttggtgatttgctgaaagtaatcagaatatagctgtactcatagcta

SEQ ID NO: 50139 - DNA, 1026 bp, Homo sapiens
tctagtaaaaaataatgccttgaaatagggtcacagcctaaagatattgatagccgcagtggatggatgactagagtgagcctttttttttttttttctctttttgagacagagttttgctcttgtcacccaggctggagtgcagtgacaccatctcggctcactgcaacctccgcctcccaggttcaaccgattctcctgcctcagcctctcgagtagccgagagtacaggcatgcgctactatgcctggctaattttttgtattttatttgatgtggggtttcaccaccttggccaggctagtctggaattcctgacttagggtgatcctcctgcctcggcctcccaaggtgctgggattatgggcgtgagctactgcacccagccgagcctaacttttatattcaagaacaattcctctttttttcttaataacctgttaattccttaagggttatgaaaactatgaattcactttttctgaagtggagattataggtttgaattgatttggacaaaagtactggtaatgattatttgccctacttataagcagtgtgttcctagaagttcccttcctgtgttctatgtgttgtcttcatctgcaaaggccttttcctataaaagggctaatgacagtgtgtgtagaattatcaaagctgattcaagggtccttagaaatgagacattttgaggaagagggagagatttgttaaaggattcaaaataattaccctgatttgatcactatacattatatgtattgaaatatcactatgtgccccataaatatgtataattattgtcaattaaaaaaagaaagaagattttttctaaactgtattatctataatcctgtatctgagtattaactgcatatccatggtcttttccagacttcatcaagattagtttttatgtagtcttttctggtggcatcactttttcctgtatctggtcttcctgtctatgatctgtgcatatagtatttaatcgcgttaaggaggcatattctgctgattcat

SEQ ID NO: 50140 - DNA, 1840 bp, Homo sapiens
ttgataccagcctggtcaacacagcaagacatttctactgaaaaatttaaaaaatcagccaggtgtgatggtacatgcctgtagtcccagctactgtagaggctgaggtgggaggattccttaagcctgggaggttgaggcaacagtgagccatgattgtgccactgcactccagcctgggtgacagagtgagatcctgtctgtaaaaaagaaaaaatgctgtcatagaaggacaatattacatagtttaaaaaattacggtatggccattgaagtccttctgatgtctttacatattagcagcttaaatatttgaatacatgaatgaatgaatggaagtattgcttcagaagcaggtttaagaagtggaaagaagatactcagtaatttgtggttttatttggcaaatcaatattgagtaacatggtcattttttcagctctttcattatttgttggtcctgtgtctgctttttatttctcattatccttttccttaccaaatatatttcgtgatcattcgaaaaacttgtgagaacactcgacttactcttgttcagttggaaatacttcaaactttttgtaactgccatgatttaaaattgccaaggagattgatttctactggaaagagttccatgaaataagtaggacatttccaagggacattgatctaatgctgattgtaactcacaggaaggggttccaggtggattttaagagcactttacagctttgaaacacttgtacacttccacacttatagaattttccctgactctgccttatatcacctacaaactgaggactggactattgggactgtatttctccctgatgtttctcagctctaaaattctagggccttatttacattggagaacaaatgggaaatctaatagaattccttaaaagcttcccgccagtcttgagcatttatcattccatgtgtctttgctgtcttgtatatattcttcttgtttttattatggattctttgactttgctatgcaccaatatagaatatgtattaactcactggttggagtaaagacaggcattttatttttagttataagattttacacaaaaatattctgattttggcaatgcattttaatcaagattttagaaaattgccagtgtttttacacatatgttctgttttcctgggaggaagtaggcgtttgtgcttaatcataacaagaactatctttttttaaacatcttttaaaaaatatttcagatctacagaaaagtggcaagaatagtgcaatgaacaccagtctgcctttcgactagattcactaattgcgaacatctccacatttgctttctctttctctggacagatactttcctccacccctgagtcatttgagaatcaattacaaacatccagatgcttcccccctgagcacctcagcatctgtctcctaaggacaaagacattctcctatgtaaccacaatgccattatcatagcccacgtcaaatctctccaattgttgaatagcatcttaaatcatcttttctctcaaattaccactagtgagctaaaatcaaatggggtgtttattatgttttgcatctggtttttttgtttatttttttgaagccacttcactgtgtcactcaggttggagtgcagtggcgtgaacacagctcactgcagcctcaacctccatgggctcaggtgatcctcctacctcagcctcccgagtagctgggactacaggcatgtgccaccatgcccggatacatatatatatattttgtgtatttcttgtagaaaaatacaacatgggttttgccatgttgcccaggatggtctccaactcc

SEQ ID NO: 50141 - DNA, 1043 bp, Homo sapiens
cactactgggtatatatccaaaagatatgaaattattgtgttcaagaggtatctgcactcatgtttgttgcagcattattcatagtagccaagatacagaatcaacctaagtgttcactgatagatgaatagataaagaaaatggaaaatgtggggtgtgtgggagaaatggggagatgttggtcaaagggcacaaacttgcagttataagatgagtaagttctggagatctaatgtacagcatggggaccatagttaataatactgtaatcccagcacttcgggaggctgaaatttgcttagagagtggatcttcattgctctcatcacacacacacaacagtaactacgtgaagtgatgaatatgttagcttgctcgtggtaatcattccacagtgtatacagagatgaaaacatcttgttgtacaccttgaatatatacaattttttttttttgtcattctgtgactcctacaccttcttactccctttgtgaccttgggtggactcagcatggtgaccaaagactttcatgatctgaagtgggtgtgccctcttcattcctcatacttgacattccaccccaaacatggtgtacacattctttaaacagccttgcatttgggcatgatgtgtttgcttgggctgttttctctctttctgaatgcccactgctgcccctttcctgcatgctcccctcaaggttctttctacagagcccagttgaaatgctacttttttgatgaatccttcccctgacctggtcccaaacttactgacttagaatctcagaggtctggaaatttgtgtctctcatggcatcttgtatagtgccttgcccataataagtactttatatatgttggagttgaaatagataatgtatattaactctgcgaggggctaattgatacctagaatgaacataggctaaaatgagaagctagcatgagctagatatcagaactgaacaaaacacacaccacaaataataaaaactcaaaccatagactaacgttggttgggaatgaagatatgaaaaa

SEQ ID NO: 50142 - DNA, 1064 bp, Homo sapiens
gggttgagctgcagtgagctgtgatcacgccgctgcattccagcctgggtgacagagcgagaccctgtctcaaaacaaaaccaaacaaaacaactttgtagcatgctccagacactgttcccaccttgctttatatactgatcattccacatcaatgtgcagggatgtcttcggtgtgcttgctctgctgtatgctatatggctgcatccttatttatttaaccagtctcatatttagtttgtgtccattattttgctgctttaatttatgctgcaaattagtatccatgtacatatatccttgcacccacgcgcgaacacatctgcagggatagattcctagaaggggagttgctaagtcagaggatgtgtgcattttacattttgatggctcctatacacataagtgagatgagaacaataaaagctaattgctattgaacgtctttatggcctgcaatgtttgttggagaaaaatagccttaagagctagcacttgtatcgatgtgagaagtcttattaaaaaaaaaaaaaaaaagactaaggagatagaatcataaggcagcaagcaccatgaagcctgcagagttacttaagcttgagcaaataacagttactttgtggggactggtcattctggctgttctagctaggaaagtaaacagtttggaaaccaggagccttctatagggaatatttactcctaagatctcttcataggtcatcatgaccctcctttggcatgcatgattagtgctatggctgttgatgaaatcaatagagacactggcatccagaacagttccaagagaaagtgtctgttatacacataaaaagagaaacagatttttccctaagggttaaggtagactctttctgcgtctcagagtgcccaggagagaatgagtaaaatttattttattgtgtcatttctctgcttaatccacaaggtgaaattgaaggctctgggactttgcagaatacttagggttctatagcaactctggttttttgccctgcttcaaagtagtctcagctgccttctagatggtacataaccaaga

SEQ ID NO: 50143 - DNA, 1030 bp, Homo sapiens
aaaaaagaggatttctgtaaccctgttaaatatcaatcaggttacaaaaaaattaagccagctcagccatattggacacttctcacctatggaacatgttccgtctcttcagcctcctaacattctagctagctagcatgactgcacccataactataccgaatgagatttagcatattgtttcagggggacaaaattaaattccttttgtcactttttttttttttgagacagagtcttgctctgttgccaggctggagtgcaatggcgtgatctcggctcactgcaacctctgcctcctgggttgaggtgattctcctgcctcagcatcccgagtaactgggactacaggcgcgccccaccacgcccagctaatttttgtatttttagtagagatggagtttcaccatgttggccaggatggtcttgatttcctgacctcgtgatctgcccgccttggcctcccgaagcgctgggattacaggcgtgagccaaagataaactttttaagacatttcctattgaactattaaggaaattcaagatatgacaaagagtagcagacacaaaggcctacatacagaaaatgactcacttctacatagatttctcctcttccaatttttagatgagaagtttgttgttttttttgagacagtctcgctctgtcgcccgggctggagtgcagtggtgcaatctcagctcactgcaacctccgcctcccaggttcaagcaattctcctgcctcagcctcctgggtagctgggactacaggcacgtgccactacgcccagctgatttttgtatttttagtagagacggggtttcacgatgttggccaggctggtctcgatctcttgacctcatgatccgcctgcgtcggcctcccaaagtgctgggattacaggcgtgagccactgtgcccagccgagaacaaggttcttgtacacatgtgccccagcgttttctttctttcctgaagtgttatataaaacaggcaaaacgtactttgttgctttttttgaaagcc

SEQ ID NO: 50144 - DNA, 1054 bp, Homo sapiens
atggtttcaaaatggaggccctgaaggttattgcaactgggctttgacatttatcaaaaatagtaaatggagcccagtaggtttttatgaatgtttcactgagaatggtttgaggtcctggaaaatagtatatagtaatttctcactgatttcaactctggtatttgtgatggtttggggatggggagtgagtataattgctattcagttggcagtacttaacatttcctaacagtatagaaaaaattttaaatgctttttaagtttcctgcccagaaaaggagtgctttctcaatcttgatgttagcagagcccactatctccctcccatgcctgattgaagcatcacgcatctccttggccctttgaaagcttatgtggtggtatctgcccatcctcattcttcccgtctgagtccttcagtgctcacttcgtcatttttctatgaagcattgccggatttagcaatggttccctgtccttgctctgaatccaacatttgtctcctcccattatttggccgatagtcactcatcactctgtcatttacgattttagttctaatgccagtactcatttttggcacacttgtactttgtccatgagttttatttattcattttttctgtgaacctatggagtatattgaatgtccacaagttttcaaaggtaaagaaggtccttgagagcaagccctgcacacagaagatgttcactaagcccaccttgtaagaatgctccagacccttttattttgatgacggctttactgagatataatttacataccacacagttcacttctttaaagtgtacagttcagtggggagggagtgttcttgggttttgggggttttttttctttttttgttcttgaagtcagtggtttttagtatattcatagacttgtaaaactatcaccacaaatcaattctagaacattattcatcccctccaaaagaaactatagctatcacctcccaattctcttcttcctccagcccttggcaactactgtgctactttctggcactataagattgggctattctag

SEQ ID NO: 50145 - DNA, 1767 bp, Homo sapiens
cttttcctctgcacctcacatggaggctgcagccacatactcttctgtttgcttatattttctctcttgtgtttacctcaaacttatatagttgaatagttttgtttgtaatgaaattattttaaataagatgttagcatttaaattcaatctcttgaccgggcacagtggctcacacctgtagtcccagcactttgggaggccaaggcaggcggatcacttgaggccaggagttcaagaccagcctggccaatatggtgagacccccgtctctactaaaaatacaaaaaaaatgagccaggcatggtggcttgcacctgtaatcccagctcaggaggctgaggcaggagaatcgcttgagccctggaggcggaggctgcagtgagccgagatcgcaccagcctgggtgacagactgagacactgtctcgagggaaaaaaaaaaaaatcagtctcttatagcccttgttcttttttttttctctccttctctcttagactgtttgtctgtgggatataaacgcaggaccaaaagaaggcaaaattgtggatgctaaagccatctttactggccactcagctgttgtagaggatgtggcctggcacctgctgcacgagtcattgtttggatctgttgctgatgatcagaaacttatgatgtaaggtggaaaattcagtgggatcttgttaaatgggtgacctgaatgaccatcagtgattgctgcaggctgtagtttgattttttttttttaagttatggctttaaaaaacagctttaggtagcttactcctgtaatctcaataccttgggaagctgaggcaggaggattgcttgagaccaggagtgtgagactctacacaaaatttaaaaacaaaaaattagttgggtatggtggtgtgcacctgtagtcctagctactcaggaggctgaagtgggaggatcacttattatttagaaaaaaagaaaactaggtatggacatgtgaaggaacatacttggtgtggtggtaaatatcaaaattgagatccagagtgatgccagttggaggtcgaggaggaaaatgatttcatcaaggtgtggccacagggcttcattcacttataatcttataaagaaatacctgaggcaaatgtgacaaaatactgggcatttgtcaaaactagttttaggtatcagattgtgacattattctctacatagtctgtattttgtgtacacttgaaatagttggtaattaaaataggaatctaatttaaaaaacaggactaacagccctagcttgttctctgtaggtttcgaatgtatcatttagtggtcgaggtctgaatcaccagctgtgtggttggtttcttcatgaaggggagcacatagtggagctagttgtggagtgcagtgacagtgatgtgaggccgaatgtgagtgtgtcatccctgggtgccgtgtgcctttacctttgtgttttagatgggacaccaggtccaataccacctccaagccgagtcacttggtggatgcgcacactgccgaagtcaactgcctctcattcaatccctacagcgaatttattctagccaccggctctgcggataaggtttcgaagtttttgcattatttggtgtttataaaacccagttctcttgtgccttaatcagatatttgaaaattcttaggtaaagcatagaaatcattttcacttgttatttttctttagaccgtagctttatgggatctgcgtaacttaaaattaaaactccataccttcgaatc

SEQ ID NO: 50146 - DNA, 1311 bp, Homo sapiens
aatgttcttgtttgctgtatttgcttagatgttctctacttgtattctttctgctaacatgttgctacttcttggaagttaccgtactttttatatgactttgttactttacaaggcctttttcatgattatttaatactatagtcttattcacacaccagatgggcggagaggttaaccttggcactgcactagcagttaaaccaagtatgctggcagggccaatgtatgtgtgtttagggacaggtaggggttagcgtgggtttctgattgatttgaggatgcttctgacttcagactcaaagggtgttcatactgtggagggttaaaacctttcctgttttgatgaatcctaaaataagatgctaattcagtgcagtacttacagtgagttgtatttgaactaaaaagctattggtctgcttattatatggttacttgaaatttcagtgaataactatatcatcttcataactgaaagaggacagttgttttagatccaaggtggaactgaattaagttgcataaggcagctaccaatattttccagtgcaaatgggctttaagaataaattgatgtggcaaatgaacccacatttttgggttttctctatgcatgtttctgtctttgtcttgtcagtttgtgttgtattctgccaggtcaaaatctgttaggttgattgaactaagtgatttgtgaattttaatcctgagtgtgtgtgtgtgtgtttctttctcctcacattagaatttggtggctttggttctgtaacaggaaaaattgaatgtgaaattaaaatcaatcacgaaggagaagtaaaccgtgctcgttacatgccgcagaatcctcacatcattgctacaaaaacaccatcttctgatgtgttggtttttgactatacaaaacaccctgctaaaccaggtatgtaataatagagttaggtcattacttgagcagttttcttgattcaaactggtaatgtttttaaggtcaaagtagcatactttataatatttaaaggtttaaaaattgctttgggggtcccataaccatcctcaagttcagggatttgccagaactacctaaaagcagcttatactaacagctaaagtttattacagcaaagaatccagagcaagagtaggaagaaaaagatacacatcaggggaagtccagaggggttagctacaggcgtctgagtccttcccatccagggccacgtgggacatgttttgtctctagcagcaaaccataggaacatgtgctaaatgtctctacccagggcagcccatttgagtttcagaatctgg

SEQ ID NO: 50147 - DNA, 1030 bp, Homo sapiens
tgactacctacatttgagggaatgaaataagatcatgcatgttaaagtgcctggtgcagcataagtacacggtaagtggtgactgatgctgattctcccaccccttcctgttcagaaataatttgtcaggattgaaatagctctgtttcttcatttggatttcaatgaaagctacttgctgaagttttttttaaaaaaatgttacctataatatgtaatacttaggaatgtaacaaaatgctttaattaaattatttaatgtgtatcatggtgttctttgtatacaaagctgttgtgggattgggttgtgggatgtgcagtggcttagagaatgtaagaaaatgccaagcagcctgcattcttggatgttgaggattgttgtgtggtgctttgcagggttcagtttggggtataaagggactgtgttttatcaccatacagaacagtaaaaatgttgactattctcaatgcctgactctgaggaacaagatcctactccacctcataggcctttcttctgctgacttacaacatgcttcataacgattacttggactttcttagctattgtccttcaattgagttaggtaattgtccaaataattgatttggctggctggcttgctttcttgctttcttgctttctttctttcttttttttttttttttttttttttttttttttttgagacagtctcgctctgtctcccaggctggagtgcagtggcaccatcttggctcactgcagcctccacctcccgggttcaagcgattctcctgcctcagcctcctgagtagctgggattacaggtttgtgccaccacacccagctaattgttgtatttttggtaaagacagggtttcactatgttggtcaggctggtctcaaactcctgacctcgtgatccgcccgcctcggcctcccagagtgctgggattacaggtgttgatttggcttttaaaaggttttatttaagtatctctaagaaatttgttttaattagatagttatttcatatctcttgttgaa

SEQ ID NO: 50148 - DNA, 1042 bp, Homo sapiens
cagctggtccctgcattagactgcctttctcattcacttgcaccttttctagtaggaacttgaccatgtacttttaaagtgtattaaatatggggtcaggcacagtggtttatactcctgtaatcctagtgctttggaaggttagcttgagctcaggagttcaaggctgcagtgagccatgattgcgccactgcattctagcttagccaacagagtgagaccgtgtctctcaaagaaacaaaaaacaagcatcttaaatttgggtgttgcggacatataatttaaagaggattaaatgaaactctaacctaaaaagaggattttgcaacaagttataaaaataataagctaattttggctgggtgcggtggctcacgcctgtaatcgtagcacttcgggaggccgaggcaggcggattgcctgagctcaggagttcaaaaccagcccaggcaacaaggtgaaatcccatctctactaaaataccaaaaaaaaaaaaaaaccgggcgtggcagcgtgtacctgtagtcctagctacaggctacagggaggcagaggcaggagaattgcttgaacctgggaggcggaggttgcagtgagccaacatcgcaccactgcactccagcctgggcgagagcgagactccatctcttaaaaataaaaataattattataataataatctaatgtatataaaactgctcttacagtggccgggttctccatatgcaaacattgatttctatacagataggaatttccactaggcttcccaaaaatctaaatataaatgtacagatgtgggaagagtagagaagaactaaatgatggagacttggaagcattgacgtttacagccacaacagattgaaaaatagattaagcatcatatactcgggtattcaagttctggtttggagcatcgtgtgcatttgcctctttggtctgttaagcagatttaaaatgtattaactaaatttaccttttgggggatctttttgacccactgtaacataatagaaaacagcaggggctttaaacttag

SEQ ID NO: 50149 - DNA, 1076 bp, Homo sapiens
caaagattcaaatgcaagtatagtagtacctccttatctgagggggatacgttccaagattcccccactggatgcctgaaactgcagatagtgccaaaccctatataatttatgttatttttggattggatccctgagccagctaagagactcacaggtggggagcatctacagcgtggagactctggacaaagagaagattcatgtcctcaacaggacagagaagacagcacaagattttatcacactcagaacagcacgcaatgtaaaactcatgaattgtttatttctggaacttttcatttaaagtttttggactgtggttgacctcaggtaactgaaaccaagctctgaaagcaaaactgtggataagggggagctgctgttgtttatttggaaggtggtcttgggagatgctggttggaaagtggagaaggagagagaaggaagctgctacttcatgtgtaataggcaagttcccactatggactcctgcggagcaattcctttggggactctggaggatggctgaattcactccagagttatcctcctagagggatgaggaagctgggctatttctccatcaaatctcacatctgtcattgtttgagggctgcttccagggacattaactctacagcatttccatcttgccctgagcaccagccaagtgcatcctcgaagagagttatggatgtttttcagttggcagcctgaatgtagagggaggaggatatgcaagggtgccaataggatttgctacaggagctcacaagcacagggagggcattctgctccaccctaggaagattcttcagtccctaagttcagtgtggggagagtagaacagtgtggggagagtgaaaaacactgaggttcgatcaaaatgcattgctgctctcatgcagggtattgaggtgcaagtgtcaagggcccggatttatttatttatttatttatttatttatttatttatttatttatttatttttgagacagagtttctctctgtggtccaggctggagtgcagtggtgcgatctcagctcacggcaacctctgcctcctgggttc

SEQ ID NO: 50150 - DNA, 1029 bp, Homo sapiens
aaggtacatcttacatggtgtcaggcaagacagtgtctgcaggggaactgccctttataaaaccattagatctaatgagacttattcactatcatgagaatagcatggaaaaacctgccccattgattcaattacctcccactgggtccctcccaggacatatggggattatgggagctacaatttaagatgagatttgggtgaggacacagtcaaaccatatcggggcagaagattatttccgttgtgagcacttcaagatttagaaattcaagcagttcctgaaaaggagaatgagagacgctgtgcagactctgatatttattgatttgtttcataggctcttatatgacacatgtggcaccactgtcttatgcactttatacatattaattcagttactcttaataacaatcctacaggcagttactatgaatagcaccatttacaaatgagagtaccaaggagcagagaggttaggccacttgctcaaagtcacacagcttcatagttggcagagttggaacttgaatccagatgtctggctccataatgcttgcatttcaacactaaagtcaagggaaaatggtaagatttcgagatcgtatgtcttgagcattcccagaacaggcagatcaagactatttattctacggtttcaagatctgtccagaccattaaccacaatggcattaaaatggtctggacagacctggaacccctgtagtattcttgattggtaacatggaattattctgcctgttcaggaaatgctcaagacatctgattttgaaatctcatcaactcctctttactctagtggctttgaaattaaaatatttagggagaaaacttccaactctcccaacagcctgagtaggcgctgacatgtaaataaatggtcttgtaagaagtggtgtgggtgcttggacctgtgagagaaagataaggaagttttagttttgatcatcagtacccacaatgaaggatatgagacccagtgattgcaatttagtagggcatggagtg

SEQ ID NO: 50151 - DNA, 1040 bp, Homo sapiens
tccctggagccacaatgtcatcctaacacactcacacaaagaaattgaaaaggacacaaaaaatggaaatacactccatgttcatggattggaagaatgaatatcgtcaaaacaatcatactgcccaaaatgatctacagattcaatgtaatctctatcaaaatactgaggtcgtttttcacagaaatagaaaaaacatcttaaaatttgtatagaaccacaaaagaccctgattacccaaagcaaccctgagcaaaaagaagaaagctggaggcatcacactgcctgacttcaaaatatactacaaagctatagtaaccaaaacatcatggtataaaaacagatatagacccatggaacagtatagagagtccagaaataaatcccccatatacagccaactgattttcaataaaggcaccaagaacatatgttggggaaaggacagtctcttcaataagtagtgctgggaaaactggatattcatatacagaagaatgaaactaggaccctatctctaaccatatacaaaaatcaattcaaaatagactaaagacttaaatgtaagtcccaaaactataaaactactagaagaaaacataggggaaatgcttcaggacattggtctgggcaaagatttttatggctaagactttaaaagcacaggcagcaaaagcaaaaataggcaaataggattatatcaaactaaaaagtttctgtacagcaaagaaaacaacagagtgaagagacaactccttgaatgggagaaaatatttgcaagatattcatctgacaaggaattaatatccagaatatgcaaggagctaaaacaattcaacagtggaaaaacaaataatgcaattaaaaaatgggcaaatgatctgaatagatatttctcaaaagaagacatacaaatggccaagaagtatatgaaaaaatgctcagtatcactaatttttatggaaatgtaaatcaaaatcacaatgagatactatgtcaccccagttagaatggctactatcaaagacaaaaaataacaa

SEQ ID NO: 50152 - DNA, 1062 bp, Homo sapiens
cccttcttcataaagcttgtctcctctacttcagtgacatctctcatatccatccccttttttccatttccttgttactaccctgcttcagactgtactaaccccttctctggtttagtaaagcaggcttctaactggagtcctctttccagtttctcccctctggtgtagctgtccagtgagtccctttgaaataaaggtatgatactgtgacatgcttgcaaaaagtatacatggagaagcagtggcatggagagcacaggtgttggagtttgtcagacctgggttccaatcctggccttgtaatctctgctgaaagagtataaagtctgaccggcctacattttaattcagttcctgctgttaactagctatgtgcccatagacaaagtactgagcctctctagttctcagtttccttatctgcaaagtggatacctctttggttgtgaaattgaaagaaagtatatgtaaattcttagcctgcattatgcctggcatgaagtaggagcaataaaaggtagctgttagaactagggggaagaggaagagtgaggtttcatgttttcatgtgatattatcctttttttttccttcttcaggagaggtaggaggtcatccaaaatggtaggaaatttggaagatggctaggaagggaagggccacctgtgtgggaagaggggtgtctgtgtattgataggttttctgtttctaagagtaatttggggaaaaatacgagttggagatgttgagagtacaatttcctgatttctttttttttggacacagagtctcagtctgtcacccaggttggagtgtagtgacaccatctcggctcgctgcaacctccgcctcctgggttcaagtgattctcttgtgtcagcctcccgaatagctgggattgcaggtacctgccaccacgcctggctaatttttgtatttttagtagaggtggagtttcaccttgttgaccaggctggtctcaaactcctggcctcaagtgatccttccaccttggcctcccaaagtgctgggattacaggcctgagccaccatgccagg

SEQ ID NO: 50153 - DNA, 1034 bp, Homo sapiens
tataagctaagaatttttttaatattcttaattggttgtagaaaaataagcaaacaaagaaacaaaaaagggctgggcgcagtggctcacacctgtaatcccagcactctgggaggctgaggcaggtggatcacgaggtcaggagattgagaccatcctggctaacgtggtgaaaccccgtctctaccacaaaatacaaaaaattagctgggcgtagttgggcgtagtggcgggcgcctgtagtcccagctactcgggatgctgaggcaggagaatggcatgaacccgggaggcggagcttgcagtgagctgagatcgcgccactgcactccagcctgggtgacagagcaagactccgtctcaaaaaaaaaaaaacccaaacaaaaaagaatgtacgacagagaccttatgtggccttcaaagcgtgagatatttagtttctggcccttcctggaaaaagatagctaacccttgttctatagctcaggaccagagaaagcagatgatagtgtgactcagagatggggactgacattctggacatgatcaaagatcaaagggtgataaaagaaggtatactagttaggggtttttggtggaggtggacagttgggtgcaggttgagtagagagtaaagcaaagccagaagaaagctaatggattgcatgaaaatggaatatgggcttgtggatagatgtcataatgagaatgtaaagcctgatcagttggtttgaagcaaagataacaggtaaggaagttggaattggagaaaggggacatggttggttgtcttggagatacaagagtttcagaaattgccaactacagccattttaggaaatagctgaactctccagtgataaggtcaggatgatgaagcatccaagagtacgatggtcagattccttaagatgaagacaggaagactatgtatgcagaaataatgtgtgttaggttactggactttttcaaaaaagtggaagtgagcctggagtatgaagtagatgatggcaatgaggtaaaaagaggctggt

SEQ ID NO: 50154 - DNA, 1023 bp, Homo sapiens
atgtattgccttctctgtggttcctgtcctgtggaaacgtgtctgtcacttctctgtggcactgcagcaatgaagtgggcactatggagtttgtctccctgagccatggatgcctgctccgagggcccgttgtcaccctcaaagctctcccactgcagtggcacaggcgccacgtgcgggtgacagctgcccctcatgggcacttagcgcacactaggtatgcctcaggggcttctgtgtctccacgtggtgaaggcttccgggcagctctttataggatgcctgactgtgtccccactgtgcagatgagactgaggcccagaatcagtgttcatggcagggccagacggcctcgggtgtgtccttggcaccgctggcattgagtggggattagcactccggcagtctgacccccaagcccgtgctcgccctgttcggcctcctccttatgggttctagctttgggggtgggactgcctctcggggggcagggcagagtgcaacatggaatgaagtgatcaacccaaagtatgcgagtcatctcacatgaggaaacagacaaggtggactggaggaaccgtgttcctctctggcgagtggtgttctggcatttgtgcctaggtcgcagggccgcccttcgagatggcgcactttccctggggcacctgctgcgtggcttctgaggccccaagctgtctgtcttgcagaggtccagcaccccatcctcgcccactggcacgtcatcctcagactcgggaggacatcacatcggctggggtgagcggcagggccagtggctgcgcaggagaaggctggatggggccatcaacagggtccccgtgggattctaccagagggtgtggaagatcctccagaaggtaagccgagacgcgagctcctggggaagtgaaccgtccccttactgtcctggcaaggcatggtggcacctccaggcgagcaaacacacagccctgaggatggcttctctgcctcagcgctgttggcacctggggccgaggcatt

SEQ ID NO: 50155 - DNA, 1050 bp, Homo sapiens
tgattgtttgagacaagagtatcactctgtcgcccaggccagagtgcagtggctcgatctcagctcactgcaacctccgcctcctgggttcaagcgagcctcctgggttcaagcgattctcctgcctcagcctcccaagtagcggggattacaggcacccaccatcacatccggctaatttttgtatttttagtagagacagggtttcaccgtgttggccaggctggtcttgaacttctgacctcaggcaatctgccctcttgggcctcccaaagtgctgggattacaggcgtgagccaccgtgcccggctcattctgatttttgatacttcaaatatgagctgtttttctctttgaaagtgtttaggatcttctctgctcccggcttctgacatctcagtgctgcaccttaatctctatctgggtgtgttttcatccattgtgttggatacacactgggcctttccaatctggaaatttgtttttcagtcctgtaaagttttcctaaaaagtttcttgactcatttcctgcccaacattttctctgttctttctttctggtgttcctatgattccaaagttgacttcctagagaagactttatcatttttttccctctgttttccatttttctgtcttgtcctgaaagccattgtctcaactttttgttccatcccctcaatttagccacttttgctatcatgttttaaatctttgttccccaaattgtgtctgtttttgtttcacgtttacaatataatttcttggccagacgcagtggctgatgcctataatcccagcacattgggaggccaagacaggcggattccttgaacccaagaattctggaccagcctgggcaacgtagcaagacactgtctgtacaaaaaaaaaaaaaaaaaagattagccaggcgtggtggtgcatgtctgtgatcccaggtacttgggaggctgaggtgggaggatcgcatgagtccgggaggttgaggctgcagtgagccatgatcatgccactgcactccagcctgggtgacagagcgagaccctg

SEQ ID NO: 50156 - DNA, 1051 bp, Homo sapiens
gttttagagtaagcaggaaggtaacacttctctaatccagtcgcccgtgtgaaacttggctcatctctgaaacagcactcggctgatatcttttaagctttacaggcaccaggaggcctcggacatagggaggtgaaccatcaagtccctctgaaacatctgttcttcttggaacgcatgtatggaattctgtgtatatttctgttaaaaggtgtggaagaaaatactctgcctgggatcctgcaggtgcccaataaatgctccttgcaccaacttgaatatgctatcaccttaagattcatttgcaggacttggcaaattccttagagccctcacagcagagcacctgaatgagtctgtgtaggtcactggcccctcaccttctgtggaatgagcccccttctggtttacaggccccaagtagggaagacgtacccaggtattatgcttaagcaccttgagtgatagagggcttgccctccaggaataccccttccatttttgtgccctctactgtcacaaggcagaggtcttctctgtagtgtctattctctcatcttcttccatcccctaggatataccagaagggccccaagagaatgctgtggaccaggcacggtggctcacactataatcccagcactttgggaggctgaggcaggcagatcacctgaggtcagaagtttgagaccagcctggcaaaaccctgtctctattgaaaatacaaaaattagccaggcatggtggtgcacgcctgtagtcccagccatttgggaggctgaggcaggagaatcgcttgaacttaggaggtagaggctgcagtgagccaagatcataccactgcactccagcctgggtaacagaatgagactccgtctcaaaaaaaaaaaaaaaaaaaaggagaatctcactgtgtagctcagccctggtgtagcctttccagggctcagggaggcttctgtttggtccctgatggaattccagttgctaaaacttttggagttgaagcccaccctttcttctcacatcctctcaccccagggacactcct

SEQ ID NO: 50157 - DNA, 1038 bp, Homo sapiens
caaggaaaacaactgacaatatttgttgccagtgataaaatttaaactttgaattgaaatgagattttggggaaacttttttttttttttttaaatatacagagtttctctcttgttgcccaggctggagtgcaatggcacaatctcggctcactgcaacctctgcccccgggttcaagcaattctgcctcagcctcccaagtagctggaattacaggcgtgcaccaccacgccccgctaattttttgtatttttagtagagacagggttttaccatgttggtcagactggtctcgaactcctgacctcaggtgatccacccaccttggcctcccaaagtgctgggattacaggcgtgagccattgcccggcattttggggaaacatgtatgagcttgtgagtcactgtgagcttgacttaaagctcctaatacttgacttaaagcttcctgatacttaaaaaacttttctgatgagattggtggtgatattaacaaatgtggataatgaaatatgtcaacatttgggctaactgcataactcactaaactgatgtattccaaatgaccaatgcttgatgttataaaatcacacatgggcaaatgattcattcaaagctcaagatagaccaatggattttaaaacgtcagagtacataaagctcattgttatgatttcagattccacatttcaactggcgtttaagaaaccgtccacttgttgagttttgattgtatcaaataatattcttaattatccaaaaagacttaaaatagttctccctgcatatctgtgtgaagctggattttcttcatatacttcaactgaaataacgttgccacaaagtgaatacagaagcatatatgagaatatagctatcttctattaagccggacattaaagagattttttaaaatgttaatcactgccattcttcttgttacttttttgttttgaaaaaaaatttttttaattttttgtagagacaaggtctcgctattttgccaaggctggtctcaaactcctggcctcaagtga

SEQ ID NO: 50158 - DNA, 1044 bp, Homo sapiens
ccatccaacttggggaagaatgtggtggaagtaaatactcatagtagtaccacaatcataggtgtaagacaaccatctcacatttgaagtcttaatatctaccacggtgtcaaatagcagggagaaaaatgaacacttcagaaacacccagacatgatcttgcataactttggtgcaggtagtttatttgggaggtgatcccaggaatcaggagtgaaggagcaggcattaggaaaagagagaagggagaaggcattaagaaaagaggaaaagtcattaacaggtatgttattgaggtcaccactgtaggcaatgggggctcacaatggctgactttttaatgctgtttttgatatgtatttgggtggacattttagcatacatttgtaagacctgttaaggcatctatctgctgtgatcggcagctataactactcctccaaactttgaaatctgagtcatagtcatccaagaagtattcttgagtctttgctctgttgactctgcattagtcattttgccttgttactttcagatccattccccatccttcccttactctgtatcacagggacctgaccccttgcaatatctttcatgtctccttgccaactggcttccagctaggttcggccagtgggtgtcagtgacaggagattggagtgcaagaggaaaggggaagtcagggtatttctccccctctctcggtttggctggcatctctaatgggggctgtgcctcttccatgattccagtctcactggacagaccccttccaacatcccgtggcctgaactcctgccttgtggctctgttcatcggtatctggtaatattacctcccccctttgctcttccagaatcttcctgctgttgctcacctctggattgctccagttcttcatctttgcaacatttccctgtgttacattcctgctcttgaactacctgtcatgggttcccaactgatctctgactgacggagatttcttaaggatttcattagtcattgcaaaaatattttaggacatcaaccacaaacaag

SEQ ID NO: 50159 - DNA, 1082 bp, Homo sapiens
cccaactacttgggaggctgaagtgggaggatcgcttgaacctgggaggtcgaggccacagtgagctatcattgcaccactgcactcgagcctgggcaacagtgagaccctgtctctagaaaaataaaatagtaatatatttttagaagcacttatactggctttcttgatattcctcaactattactggatcctgtggctttccagataaaactcagactcttttactaagtgttcaagtccctccctatataatcctgccccctcccttcctctttctcttcagccctcagtgccagtcaggctgtcctcttactcgcccctgagctgtccctgcgggagctcctgtctaccctttcatttccatccttgttccttttgggatttccttcttccgattatccaagtcctagcttttgcaaagtcatctttaaccactccttcattccttccgctgagtgtctgtaggctaccaattgcctgtatcatgcacagaagaacatcctaagaatgcccatacatgacttgtatgtttgtagctgtaggagctatggaacagttacccactcctgaacaaatgcctgttgattattacataaaatgtgttgtttacttaactagtaaatgttcctcccaaatcaagaagttctctaaagccaccgtggaatagacctgccattggggaagtctttggaaactcatgtggctaagctttctgtatatgtgcagcctcctgcaggtggctgtgggttagacaagactcttgagtctgccctggctcccatttctgtgcctgaatccaaaggccgactcctgctgtctgccactatcctctctgcatgactttggactcatgtctcctctgaagtacacttagcctttctatgcagttggatgtgatttgctggctttcatattctcctaccctcttatgagaagcctccagtggcttcctgtctcacgcagagtcaaagctgacatcccgagggtggcctagaagtcctgcatgatttgcccatgagctctccaacctcctcttctactcccatcccgctcactccactgtagccatatttgcctct

SEQ ID NO: 50160 - DNA, 1073 bp, Homo sapiens
acctcagctagtctctgtctagttttgttgctgttgctggctgattaatatttatttatttatttatttatttatttattgatttttgagatggagtttcgctcttgtcgcccaggctgcagtacaatggcatgatctcagctcactgcaatctctgcctcccgggttcgagcagttctcctgcttcagcctcccgagtagctgggactacaggcacctgacaccacgcctggctaatttttgtatttttagtagatattggctttcgctatgttggccgggctggtctcgaactcctgacctcatgagggtgatccacccgcctcagcctcccaaagtgcttggattacaggcgtgagccgctacacctggcctttggctgattaattttaaaagcaattttagtttgatatttccatcactaattttttttttttttttttttgagacagagtctcactctgtcgcccaggttggagtgcagtggtgtgatctcagctcactgcaacctctgcctcctcggttcaagcgattctcctgcctcagccccccgagtagctgaaattacagacgtccgtcaccacactggctaatttttctacttttagtagtgacgaggtttcactatgttggccaggctggtcttgaactcctggcttcaagtgatccacccacctcagcctcccaaagtgctgggattacaggcatgagccaccatgcctggcccctaatttttcttaataaaaacttttaatacatgtctagagtcataatctaggtctccccccaccccaaaacagcccctgagatacgaatttgggggcagatagtttatttgggagatgagcctaggaagtttcagaagggagacagggaaatgagatagggaaaagaagaaaggcagtagagggtatattaatgagcagatgaccactgtgtgggaaactgaggctgtatagtgttgaggagtttggggaggctttatagaacattctctatagaacaacatatagagttgtctcatccagtggacgaggaagctggggacctatccactaactctcagccatcac

SEQ ID NO: 50161 - DNA, 1052 bp, Homo sapiens
tggtcacaaattatagttggaagatcataaatataaataactaatgtggtctcttaaagaaaattgatttggagtcacattctatgataaatttatagtctaaaaacactttaattttattccatgcccagagagtagtatagatactttattagtttatgagaaacaaggaagacatttaacttttagctactgcatgtaacttttgaggagcatcttgtacaaattctctccctgtgaatacgaaccaagattttaaaattccattttctcccactaagaaaaccaagtcaattggaattattttctctgaatattagcaacttctttctgtctaaaagcagaaaactatagtcacttgaagcaggaatagcacaaagaaatcaaaggttaccgtggaattttccttctccatagatttaagaatttacatgtatagattttcttaaaaatctgatacagtaagcaaaacgtgatcctatacaacagatcagttgtaattattcacaaaaccaaagcattctttctttataaaaggattccatctgcagaagttggatttagacccgttttttctggtgaccataggtatagtttcatttgacatccctggggtgtctctacagtgacatctactggtggacagtgggttttcgtggttctgatgtacacagttgtatcccattagcctatttctcttccccggagttgtcatgttgtgctcttcagtgcttctagaaattccacttgaactaatttgatcagggagggtggtggcctatactctgtgagggctttaaaattgctcagtagccgaaatgggccgggagagcgtgtcatataggaaatgccaagagaagcattgattcaagaagtgtctggaagtcagtcagtgcaaaggcactggtgggtcacaggagtatgggaggtccgcaaggatgcaggatgggcaacaggaaaaggcataagcccaggaatagatgacaagcaaaggagaggacaggagagtgcgaatcttcagactcaggcagccacagtcacagtgctggact

SEQ ID NO: 50162 - DNA, 1050 bp, Homo sapiens
tggcataatctttatgttatttgtcatggtttttttttctggatctgctgcctgataaatgttttattttcattcactcattcagtatttattgagtcctttctctgggctggccactgtgctggttgattgaaagtgaagcgtgcacatgggtactgtccttgtgagcttagagttaggcagttaggtctggcgtttagggccatggagacctgccagactcttctgaaaggacacttgatataggcctctccaagtgagtggaggcaagggggctgttcagtctgcccataccccgcttctcccctatctttgtgaggctggtaaaagctaggcacatcctgaagcatttgggcgccaagaccttcatggtgactcctctcccttcgaccaaggaatcttagcaagcataccatcttactagacatttgccaccttattggttctgattgaggcagtatgtttttttaattgacagataaaattgtatttaatgtttacaacgtgatgcttttaagtatatatacattgtggaatgactgaatctagctaattaccatatgcattacctcacgtcgttatttgtgtggtgatgggcagtagggttttgaagactagggtaaaatctagatcattcttttaacaaatgggtaaagcatgccttctaattcccagtcatgtcttgggggggggcagtaaattcactcaggtgagagctactccatacagtacttttctagaagctctgtgttacataagctattaagggaagcacttccaccaggagagtgaagttgtcagtgatgagtggactgggcatggcacgctctttgggacatgcacgctctctggggccccatgggcatctctctaatcccccacaagcagccgccatctctttgataagtcttttaaccttgtccttatgaagcagaaaacccaatttaagggaaacaatagtcatacccgtcagacaaagtaatacctatagctgaaaagtgattgtataacctaacatttaacttccagaaaattcaaagtataacatcc

SEQ ID NO: 50163 - DNA, 1105 bp, Homo sapiens
ccctctttccatacttgactctttggaaaaagggtactctgtgcccctcccacttaaagagtggggagtttcattctacctccttgagggaggagtatctaaagaaatgatttggaatccttctacacaggagatttgtttattctcctccgtcctagttgggttttgataagggaattttttttatctgttctctgaattccaaatgctaattctgtagcacttgtattatatttgtcatttactacctagtgacatcacctacatttgtgtgtgtgtgtgataagtaaacagatttatgtcttatttacccaaggagattgtaaatttcttgaggactgggacagcatcttatttaaagccccttacagagttagatacagtgcaggcagttaataaatagtaagcaaatggtttttaaattagtttaattaaaaatttaaatattaaccatagttaactgaaacaggtcatcaaagtctaagcatatgagaaatgtggtaagataaggatactgtttacttggcatcctgatttgtgaaattgtcctgaacttgtaattgtggctaatatgatatttactgtgtgccaagcacttttgtaagtactttacatatattatttaattttccagacagccctgtaggttggtgccattatccccattttatagataaggaaactgagatgaacaaaggttgaataagttgttcaggatcacaaagccaggaagtagctcaactgggattttgatctcaaacactccggctccagagttttgaacacttaaccactgcgctctagattcattgaagtggtgattaaaatggtatctcttttgggggaaagaacaaaattgtgatttaaatatttcatttcaacctgttaggatgctcctgatgacatggcagcaatgttgctgtatttttcctagggggagtatttccataaagccacggctgtttttccttcttctgtgtgtgtgtgtgtgtatgtgtgtgtgtgtgtgtgtgtgtgtttatgagtaatttttgtgtagtgcaactaattgcatttaaaatacaggcatgttcatgattgatatgtcatatacagactatattct

SEQ ID NO: 50164 - DNA, 1024 bp, Homo sapiens
ggagaattaagttgtattttccaagtagaacgttgtgaagccattaagatggtaaacacagaggtttttagatatgtatttgttatgatactttgcattgtaatgatctgttatattctaagctgagagcttttcaatggcagggacctgatttttatctatttttatatttgtggtacctagaatagtgcctgaaacctaatctgcactttaataaatgcttgctgaataagtaaatgaatcaatggaaatacaaaaagagttttttgcaaattgaacaaatcagaacacaaaattgcatacactaggataaaaccatgtaaaatatatctatatgcttgtgatcaaagactgaaagggaacaagaattgaaaatgcttctgtcatagaagataacttttcttttaatattgtaataatgcattaagaaaaaccacaagtcaagacaaggaaaatgattaatacatttctcagaaatattgcccacttttgcctgcctattggctgcagagaaactgaacgttgattgcttaaaggagaaagaggagcactcgcagagctgttactggatttgcctagaggctgataggcctttgccatcatctacaataccagcctcctttctattattcgctgccagctaaatcctgttcgtcattctggacttgcttcaaataggaaaaaggaaaaaataaccatatagtctatgatatttacataaaacaaaacgtaaaggctggccttttaatccaaagttttaaaatacgatcaaaaactccccattgttccagtttacttgttatattgcagagactgggcccttgtcactgtataatataaaatctgtccttttctcttatagtgaatgttatataaatgctaaatgtagctcctctctaattccactgatgattaaaaataaacagaaaaaagcaataaacaaaaacccctaaatcacagagagatcaaagcaagaacataatagttttgcaatactgtaggattaatctattaataaaatata

SEQ ID NO: 50165 - DNA, 1101 bp, Homo sapiens
atagccctgctctacggtttagtaaagttaattcacagggggccatacgtttgtaagaggaaagcagttagaggcatagattagcattatttagtattacagatgcttcagactacaaagttgatggagaatgagttggtcaattaattgaccaacttcgacacaccaacaagactgcagggtctaccatctttccatccctatagcatcaacaattccagatggcattgacttttgtttgtttggtatatatatatttttgttttgagacagagtctcactccgttgcccaggctgaagtgcagtggcacaatcatggctcactgcagccttgacctcctgggctcaagcagtcttcctgcctcaacctttcaagtaactggcactgcaggtgtgtgccaccatgcctggctaattttttaattttgtgtagagactgggtcttgctgccctgtttaataccatgttgaagctttaactccctttccctccacctttcaggatgtggaattcattagttcattcatttgtcgagaatggattgagtgtctactcaaacagacactgagctaggtgcaggtatgaaggacaagtaagagaaggtcattggcccccaaaggaggcaacaggcatgtcagctgacaattgtttggcgtatgtctgtgtccatgtctgctttgtggcctctccttctctgggtgtgtaattctttccactgtgtttttccagctgtgtctttcattcttctgctgggccatctcctgcttctgggacccctccccattgccattctgcatatccctgacaccgagcccttctccctggatccctgtcctcatcacatcttgttctacgcttctctatccagaagcctcctctggtttcttattgcccacaaaataaagtcctcatctttagcttggcatccagagtccactagaaactcactcccaatctgccttcctggtatcatcttgcgttggtggaagaagagggctgaagaccacaacttatttaacccatgtaccctggacaagttattgaggcttcctgtgctcatcataaagatggggccagcatgctgaacctcctagagttggc

SEQ ID NO: 50166 - DNA, 1050 bp, Homo sapiens
agattaaaatgtcagttctgtcttttcaacctgaatgcctccaacagctacattttagaaatttctgaaataattaatgtgtactcatatgttcacccataaatcagaccatgggattactgatgaaaggatgcaaacttgggggtcagtcttggaaaattttgactgaattttaatcttcctattgtgaacatctatttcatgttgaaaactcagcatttcctgtttctcctaaacatagacaccacaataaatagtttgtatctatttcttttccttcaaaaagatcacagttctttgcctgtattatctagctccaagataaattaaatgccagctgaaattgtttggtgtatctaggatgcccatggtatgtgccatttggttgtgtggctgagtcagtggcgttaggtggagtttagcctccccctgagtggttattagggttgtggatggaatgtattgaattcaaatctctcatttataaggcgaggtgtgaattgtagaatgatccgattaacttgggctgaaccccagatattgctgtgtgctttttttcccccttcaacatgtcatggaggcttaaaacagtcacccacacgccctttccatatttaaccttttggaggtgctgtcttattgctgagccagggtggtaatagctgactggcttaaatggacagacagcaacaagatagctgaggagggtaatagatcctgccattctgttcatctgcgtttgtgtctgggtaaaattctcattaagttgcagccagtgtgtgtattttgtgtgtctgtgcattgtgtttgcagtccattagaaaactgatacccatgtggtgccttggtattgacaggtttcctgtgtgtgacctaaaaccattctgcattttcatttgtcaggttttcccgtgtgctctgggttcagagcaaattaacttccaagtcaacagaaccaccgaagttctgcttgaactaaagctaagctactctactggtgtggggggagggaggatgttgatcattagaggacaagggcaagttgagaaa

SEQ ID NO: 50167 - DNA, 1025 bp, Homo sapiens
gtcaggacctagctgtggccagaaggcaaggaggctgtgcatgattacttaagtttaaagaaagggcaatggccagggtggtcgctcacgcctgtaatcccagcactttgggaggccaaggcaggcagaacatttgaagtcagcctgaccaacacggtgaaatcctgtctctacaaacaatacaaaaattagctgggcatggtggtgtgcacctgtagtcccagctacttgggaggctgaggtgggaggaacacttgagcctgggagacagaggttgcagtgagctgagatggtgccactgcactccagcctgggcaacagagccagaccctgtctaaaaaaaaaaaaaaaattttgttttttttttttagtatcttcttaattatgtatagattgtgtacatatattcctgtactaattgaagatcaagaaaaccccagagaagctcctacgctgttattattaggcttaacaaacttttgaaacacataaaattgagtattgtatgactttagacattggtggaaaaatgaagacattttcttcatggttcaggtacatagttttaaaatatcttgctaatcctgatggttccacacttacaccaatgtcaggggtggaaagaaacccatattatgaatgatcttgataactgagtgtttgggggccatctccccgtaagatctgatgtgtcttccccatgtggtgggcaaagagctcccagcagaagctgaagtggcaactctatcattttctttctttctttttttccttttctttttttcttttttttttttttttttttgagacaaagtttcgctcttttccccaggctggagtacagcggcatgatcttggctcaccgcaacctccgccttccggtttcaagcgattctcctgcctcagcctccagagtagctgggattacaagcacccaccaccaagcccagctaatttttgtatttttagtagagacagggcttcatcatgttggctaggtaggtctcaaactcctgaccttgtga

SEQ ID NO: 50168 - DNA, 1027 bp, Homo sapiens
aatcccattccatgtgtataaactgatggcttagacctattagtccattttatctcaggccttcgtgccttcaaaaaaagagtgaaggcctggagactctggtttcttccagtgttgctttccgtttcccttaaatgagggacatttttgctcaagtagggttcctgggtgaggtaccatttatatgactcttcatcccaagctttagcatcagagggaactttgaaggttcttccttagagagaaatcttagtctgaacagcatccctgcactgctttggctttttgccctcctggagaattcgttcttttggcagttattagaccaccacctagactcattaaggatgcatcattaatctaaatgccctggaaccttcttgagcctgaaattgaatatgaacctatttattcccatatgccttaaagtccaccaagaatatttagacagatcttatctggactcctcactcccctgccatattgaaatgctggagtgatcactcatggctgggaggtcttgcatttcctcatctgtagtacagtctggtgattatgctatcctatgccatgcacttcctgcctccaacaaaaaacagctttggggagtggtggcggtggtggggatcctagatgtgctcctaatacatcctctgcttccacttaccagaatgatagtggcttccctaaaactgcattggctctccagctgcctacaaagtagtcagattcccaagcagtagtagaaaagtacagaacggaaattcttcctcattcatcatgtacttgtcatattccattgtggcaccctaagtcccttttactgtgtttattttctcttggattctgtgcttgggctggaagataaaggggtgggaggaatgtctgttactacctggaataaggcttgtctttaatccactagcattcagaagtacccccaggaagcatcctctgctcaccatagaaagttttcagaaactcctgagagtctgattatatactagattggaacaaagaagctagt

SEQ ID NO: 50169 - DNA, 1025 bp, Homo sapiens
aatagtaggctattaaatttctacatggaagaggctttctgttttttaaattattgttaataaattctagtttcattgcattataatcagacatattgtttgtaatatttccactttattgaagtggaaatattttttctttgtgacctaatatatgattattttgatgaatgtggtgtgagcagttgagaagaaactgtattcattagtatcagagtgtagagtttgataaacattagtaagagttactctattgagtatgttgtttagattttaggtctccttatttttggttcacctaatatgtcttgtacaaagaatgatgtattaaagtctcctattattagtgtgtttccagtgtctcctcgcatctcttgtagtttttgtctcatgaaggtgattgctgtgttatgtttatataaatacatatatttatatgttatatcttcattgtggggtgtggcttttgggattaaaaagtgtctttttgtgtcacagttaatgctttaggacatggattctgctttgcctgagaccagggttgccattcctagtctttttttttttttttttttttttttgagatggagtcttgctcttgttgcccaggctggagtgcagtagcacgatctcggctcactgcaacttccgcctcccgggttcaagcgattctcctgcctcagcctcctgagtagctgggactataggcgcgtgccgccacgcccagctacatttttttatatttttagcggagacggggtttcacggtgtttgccaggctggtctcgaactcctgacctgaggtgatccacccgccttagcctcccaaagtgctgggattacaagcataagccaccttgcccagctgcctactctccttttgtttccatttgcctcgtataccttttccagctatttatgtatttacttatttatttagagactgtgtctcactctctttcccaggctggagtgcagtggtgtgatcttggcttactgtaagctccgcctcccgggttcaagtg

SEQ ID NO: 50170 - DNA, 1031 bp, Homo sapiens
aaaaatcaaaaggattatttacactttggcatgtaaagattatatcagagcaaatggctcttaattcaagcagagataagacatgcaaggtacaacactgtccagtagaactttctgtgatgttggaaatgttctaggtctgaactgttccatatgatggccactagccacatgtggctgttgagcattgaagacctgagtttttaattgtttctaaatttaaaaaaattgaatttatatcagcacatatagtagtagcttctgtattggactgtacaattaactagctgttgactaacctcgacagattaggatcaggaatgaggaaggagtttcagatctcaaacaaagttacttcaaacccacctactcttggtttctcctgtacaggctttgatatttggcacttgtcattcaaccactctcagatgctggtaggccaccaagaacagaaccagcagttagctccttgacactgtatcaggtctgtaggacagtgatcgaactggtagacaagacttgttcctggctccgtggtggccctggagtgcccacagtcagccaatcctctctgtcctgtctcagcttttcaacttggcacaactgaagagtaaaaactggagccagggtctttagtttcacaacttggttggagaaaccagattgacttacaagccattaccaaaccattagataaaaccagtagctagctatgcaggatttgggtgagctgtgggcagagcttttccagcaaaaggttggcagggacctcaaccacaccctaggccagagaaccccgtggcaggaagtgaggttggtgggggcattggatgcctttgctgagttaatcgtgttccctgttctctagcaagtactcagtaaaatggataagtctcagctctttcattctagcttgctccttacaaactgcggcctcagacattggcccctagaactcagttgcttgtctgtacaatgagattgtacacaaggtgatcttactggtgcgttccaactctgtgatgctgtga

SEQ ID NO: 50171 - DNA, 1031 bp, Homo sapiens
acagctttatggctggtcgtggtggttcacacctgtaatcctagcacttcaggaggctgaggcccacagatcgcttgcactcaggagttcaagaccagcctgggcaacatggcaaaaccctgtctccacaaaaaatacgaaaaattagctgggcgtgatggcacgtacctgtagtcccagctactttaggggctgaggcgggaagattgcttaagcccatgaggtcgaggctgcagtgaactgagattgtgccactgcactccagcctgggtgacaaagtgagagcctgactcaaaaataaaaataaacagctttatcatctgtataaaattcatatgccatatagtccacccatttaaaatgcacaattcgatggtttttagtatattcacagagttgtgcagccatcaccacaatcaattttagaacatgttcaccaccccacaaagaatccccatactcactgacattcttcattcccccggcctcacaactacccatctgtctatatagagaccacgagacttctgccgggacagtcttcagcctttggtgcagacacgcgttgcaattgcctagaagtctgtgggtgggtcttcatgcattagaggtttagaaaccaatattctgcatactctgtccttcaggtctaagacgcgcttttaccctgaagccttgccttttcacctcctgtacattcccactccacagggcctgcaaagcgctcagaacctgaatgtaatgtacacagcggtctgcagttatatactgcacatgttcattttagcttcccagacagtaatggccgctaattgttgagcacttatgtgccaaccctcatagttctgggggttgcctgggcttattggagaagttctgctgctccatttggggtcacctggagtccctcatgctggtacagtctgctggtctgctgggagctcagttgggctcgaaatgtccaagatggtctctcattgtccaggtacctaatcacagagagtctgtcctggactttctaacagcgtggc

SEQ ID NO: 50172 - DNA, 1034 bp, Homo sapiens
cttcgtaagggtaagttttatttatactctttggactcccatgaacttttgcacactgctttgtgtttttggtttaccctaaactaccatcctttttatctttgctttttttcttcctattcagaaaagagcaaaatgtgaaaagacacaagactctcaggtatagaatgaactgagcaatttggagaatgtattggactttgtcctctcttattcccccctcctagccctgcaagttgctaggtacttgtgaggcagtgtactggagaggggagagcatggatcctggggtcaaagggcctttgcccccacccttacttggccctctacctgcaggtgaccactggcacattctcctgcttgtctcagcttcaggttcttcacctctaagatggggatgatgaaaacagtacctgtcatgcagaattgttgggaggattgataatttagatgtttatacatgtaatgtacttagatcagtgtctgctcttttcacttgatatccagtactatgtaagatagaaggtgcatgtcttctgtattctgtatttcccatttcttttgcgtgcagtctttgattcgtacaatagaaggaacacgtagaatgtatatttgtacattcatgtcaacatagtatttgaaattgctaccaaactcatttaatttggcataagactaacagatgaagtctctcatttgcttgaagatattttacaaaataccaactgttctatatttctttagaaaaagattatagttattaatattgatacctctgataatattttattcttaaatcttcagtgattccttttactatagattcatgacagctaattagtactaactgatttagaggtttcctttcccatcatatggaatgatgtaaagaaatcagatacaaactactgcaattagaaaataaaatatgaacaactttcaacaatgtatacaattgattcttttctaactttataacattttaaactatttattcatatgactcttttccaaaaatttgctgtttttaaaac

SEQ ID NO: 50173 - DNA, 1199 bp, Homo sapiens
aaagtagtaatgcccataagtgtaaatgctttactgcacttctgctgttactgtaattgaatgaaattcaaacttaatcttttggcagtataaatttatttagtgattagggtgttactcttaaatctgttttgggctcttcttttcaaacctcttttaactaaaatgtagttcagaaaccacctgtgtatttcaacccaaaaacaataataagtcagatgtggtggtatgcacccatagtcccagctactcaggagactgataggggaggatcacctgagcccaggagttcaagaccagcctgggtaacatagccagactttgtctctacataaataacataataacgttaaatttgatgcaaagatggaatttcggaatacctagagcagttgttcctgaccaagaatactcacactgtgagttaaattactaatattatagacattttaacatgtacacaaaaataggaagtgagaaataaacatgttgttctgttattttcttaattttggagaccctgagccaagaggagtcttacgactaaactgttactaatattttgacaatagaattaacaattctattctttggtaaataagagcttgcagctgacatgtggattaagcgccaacccaaacattttgacatctgagcaggggtagaaggcctctttaaaaaaaaaaaaaaattaaggaacctaaccagagaacatgcatggatatgaagccgcatgcaccaagataatgggttgagaatctaggcgtggtcaagattttctcagtaaaaatttctggatctgggccaacgcctcctcagaactggacccagctggctggctggaaaagggatggtaaagagtgattattaaaggagttctcttgaacattttgtaaaagttggctctgtcacctgagaaccctactctttgagacatttctccaggtggtttatagatgttttaactataaccagattgactcaggagaattaggtcagtatcacactgaacgggatcaatcatatcatgcttcctgtgtctgctcccatccatgagatacaaaaatctcaaattacaagcattaaaggaaggagacagtaaattttattaagaatattttgcataacatgtaacattacaaaggagatcatcacgatttacttatagcaggccagaattataggaatttcttcttcaa

SEQ ID NO: 50174 - DNA, 1040 bp, Homo sapiens
aattaggtacagttactgattttgtttgtttgttttgaaatggagtctcactcttttgcccaggctggagtgcagtggtgcagtcttggctcactgcaacctctgcctcccaggttcaagcgattctcagcctccaaagcagctgagattacaggcatgcaccaccatgcccggctaattttgtagttttagtagagacggggtttcaccatgttggtcaggctagtctcaaactcctgacctcagatgatccacccacctctgcctaccaaagtgctcggatttcaggcgtgaaccaccatgcccggcctcattactgatttttattaaaaagttatatttccattttatcgttgtataatagtatcccataggattttttaaaagcaacatttcttggttttcacccttccaaatacaaaagtaatgaattcttaacgcagaaaacctaaaaataagtcccttataacctcatcaaaggggaaatgtacttgacatactgttctgtaggcctgcattttcacttggcagttattatttttggctctgttgtatcttaagaaaaaacataattttgttatattttacttaagcatgaaagtcctgctgaaattacttagcatttctgatctaagaaatgttaatgtatataggaataggactagcgcttcctggttcattttcattgcttaggggtaatcatgatttgaccagatctttctgattgatgagtctatctgatgattagtgaaccagctattcttaaggaaatacgttgttaccatatttccttgtatgttgagaagtatacctgaaagttataatagcttcagaattagtgtaattagggccttccttactaaaaatacctttgcaaacaaaagaaaatggtaacacagatactcccatcttgacttagcagtgacactgcaggaattttttttcataaaatattctttatagttattgtcttatataaaaggaatgctcttatgatgaaactttgagtaaattacagtgctgacttatgagtatttctt

SEQ ID NO: 50175 - DNA, 1328 bp, Homo sapiens
gcctctaaaatagcagctgacttgacttgggcatacactgttttattattactttttccctcacttcagaagaaaggctgcctttgagttgaccaaccatgttgaggtggtagatgggtgctaaactcactgtagtctgagtaattgacttccacaagtcatccccactgttgagcctttcaaaatgaagtctcagtatatttacaaattaatggacatcctctctggggattagtcatattctaattcaacaaagacattgtttgaagtttgtttttgtttgctaaatgaactaaaaattatgagatttgcacctaaaggtactgaggtaaaggagagccaaaagtggggtagtcaatctacttattcagaatgagtcgataatttaaacatgtctaatagcagagacagtatattatagaaatggcattacattctctgagatctgcttttactgaagtggatcaatgatgaaactagccaaatctgagcatcagaaggctttccggtctacctgatgcatgatctctacagttctgagaagcagaactataaaacaatgtaaaacaataagggcatatgtctggtgtgtgtgtggggggtgtgtgtgtgtgtgcacgcacacgtgtttataaaggtagcagttgtaggaatgaatgagattgggggtgagggggtgcatatgtatgtctatgaaagcctaatcatttctgggcaatgatgtaaaggttttacgactgacctttgtaactatgaagttttctacacttgacctgagctcagaaaaaagaaagaaagaaagaaatgtcatcatagagtcttagttctagctctgccgttaactaacttgatgtttatcactcccttatgtttgtttatagttttactatatgtatttattcccaactggtgcaactttattctcttgacagttttatgtggactttaagttgctgttatcaaaagttgaacaatattccatacccttttcctttctccccgctagagtatgctcaggtaatcaaaatgttgggaaatggacggctagaagcaatgtgtttcgatggtgtaaagaggttatgtcacatcagaggaaaattgagaaaaaaggtaggtgtgatttgttttactttaatataaaattggttaagggggaaaatccctctacagtttttaactgtccatggacttcatttttggaaattcccaaaagacttaccttggtaaacagtgatttacctataagtaaaatagcaaggtctgtaatggtaattttatacaggttctaatgttaaagaagcatttgtatcacttgtattgtattcctg

SEQ ID NO: 50176 - DNA, 1022 bp, Homo sapiens
tggcacgtgcctgtaatcccagctactcaggaggctgaggcaggagaattgtttgaacctgggaggcggaggttgcagtgagccgagatcacaccactgcactccagcctgggtgacagagggagactctgtctcaaaaaaaaaaaaaaaaaaaaaaaaaaaactgtatagagatgaggtcttcatatgttgccctggctattctcgaactcctgggctcaagtgattctcccaccatgacctcccaaagtactgggaactaagaatgtgtcgtatagttcagagggaattgagctatggttgacagttctgtgatttagttggcagttctatgattagcatttctggtagtgaatggtacatataatatgttgagtagaccatggacatttgaaggatgagcctgaggcccttatagacctctccattctccagtgccattagcatataacttcgtaaactacaataaaatgaaactgaacagttaactgattttattagactgaagaatattgtaagtgccagaccaagatacatagcactagtcaaataaatcctaactggatcgtttgccctttcctgttacttttatttcgagtcatttcaaacctacagaaagttgcagtattagtgcaacaaactcccttaaatccttcatctgtacacacacatataaagaaatatatatgtgggattttttaattttttttttgagatggagtctcgctctgtcgcccaggctggagtgcagtggcgcgatctcggctcactacaagctccacctcccgggttcacgccattctcctgcctcagcctcccaagtagctgggactacaggcacccgccaccatgcctgggtattttttttgtatttttagtagagacggggtttcactgtgttagccaggatgggtctcgatctcctaacctcgtgatccacccgtctcggcctccgaaagtgctgggattacaggcgtgagccaccgcacctagccccatatgtaggatttcttcaggaccat

SEQ ID NO: 50177 - DNA, 1025 bp, Homo sapiens
agaaactggtccagaaatctgttagtaagtgacccttaaaataagttcgtttggccgagtgcagtggctcacacctgtaatcctagcactttgggaggctgaggcgggtagatcacctgacgtcaggagttcaagaccggcatggccaacatggcaaaaccccatctccactaaaaatacaaaaagtagctgagcaggatggcacacacctcaggaggctgaggctggagaatcgctagaacctgggaggcagaggttgcagtgagccaagatcatgccattgcactccagcctgggcaacagagcgagactctgtctcaaaaaatatatagtaagttctgccgggcgcggtggctcacgcctgtaatcccagcactttgggaggccgaggcaggtggatcacttaaagtcaggagttcgaaaccagcctggccaacatggtgaaaccccgtttctactaaaaatacaaaaatcaggctgggcgtggtggctcatgcctgtaagaccagcctggacaacatggtgaaaccctgtctctactacaactacaaaaaattagccaggcatggtggcacacacctgtaatcccagctacttgggaggctaaggcaggagaatcacttgaacccaggagacggagattgcagtgagtgaagatcgtgccactgcactccagcctgggtgacagagtaagactccgtctcaaaaaaaataaataagttcatatgaaattggcatatctatcaaattgttcacatatctacactttaaaattgccatttgaaatgtgattgatgaagctgagcatggtggcccatgcctctaatcccagcactttgagaggctgaggtgggagaattgcttgagcccaggagatggaagcttcagtgagctgagattgcaccactgggctccagcctgggcaacagagccaggccctgtctcaaaaaaaaaataaaataaaaatgtgattgatttctacaaaaaaaaaaaaactgtatagctcagttgttttaggaattatc

SEQ ID NO: 50178 - DNA, 1009 bp, Homo sapiens
aatgcatatgtgaactgcattaacataagtttattttctaggacaagggagataatatgacctttactctgcattggtcgtttgagggttgaaatgttaattacatgcaattccatataccaccctttaagatgatttggagtgtgttcagagaagaagatggtgatgagtcttatctgtcttaaagaaatgtttgaaggaacttaagttatctagaaaagataagtttcagggtggattagagtcatagatgtagatttacttcctgtgactttgcagatagagtacaggcaagttagtcatcatttattagtaatcctcttaaagagaattcacagctgaggaaagttgctatataatgaaaaatttcatgtagcaggcagtactttctcagagatattatagtgcctagtgaggtagtacattcttgtcctggtagtattgaagcgtaagtaagaatggagtagaaagagttgaaacatattatgtgtagtaggaacagaagactgttgagatgccttatcaattcaaagattttttaaattccaagatcaaaaggactttacagagtattttatcctcatgaagctacctcaccttagtaataatgtgcattggtacagctctttaacatttataaagttctttcttctgaattatctcatttttgagcctggtaataatcctttgggtagataggacaagtatccttattttgaacaggtaaagtaataggctaagagaaaatctgaattgcctcaaatcataaagcttataagcagcagcctagggctctatccttggtctgcgaattccaagtttagtgctgtttctcctgtaccagttttctttaaaagtaagttataagttgtgacacttgctttgcatacattaaaaattgcagggaacagatggttcttaaattttattcctatgaaaaacgtacgtgtagctcaagttagactgagggttctaaacgccaaacaatggggagtcatgggggcaagtc

SEQ ID NO: 50179 - DNA, 1090 bp, Homo sapiens
gcttccttctctaccctcccctgttgttagctgggtcctttggggagctgagcttttggctttatagtgcagcaacaaagaagtttgagtcagccctctgctttcctcctccctgtcatcagtggggcccagcagggaggtgagcttacacccctactcagaggcagtgaggtgatacaggttggtgccctactttcattgggactaagagtggagctgaacttccgtcccacccatctgcaacaaaacagtgtgagtcattgctccacttttgcctgggtgatgttggtgcggcccagagggaagttgaacatacacactccacctcaacaggaggactgcctgcttcggggaaaaaaaaaaaaagattaaataggaaagagtcctataatctccaaatatccattagacagtaaaaaatcacttataccaaaaaccaggaaaatcgcaacatgagtgagaaaagacagtcaacacacatcatcactgtgataattcagatgttgtaattatcagaccagaattttaaagcagccatcacaaaaatgcctcagtgagcaatcacaaacactcttgaaacaaatgaaaaattagtctcagaaaagaaatggaagccataaggaagaaccaaatagaaattttagaactgaaaaatacagtaacaaataaacttactacatgggctagatagaagaatggagatgataggaaagaataacattggagataaagcaatagaaatgaacaatagagaaaaaataaactggaaaatgaacagagcctcaagagcctggtgaacattaacaaaagatttaacatttatgtcatcagagtcccagaaagggaaaaaagaaactggacctgaagaaataatggctgaaatttccccaaattttgcaaaagacataatcttacagattcaggaagctgactgaatcccaaataagataaatgcaaagtaatccactcctagacaaaatcaaaatcaaacttttgaaaatgagtagttattgtctaatagatacagagtttcaattttgcaagatagttctgaagattagttgcataatgtgaatatacttaatactac

SEQ ID NO: 50180 - DNA, 1064 bp, Homo sapiens
cctcgacttcctttaaataacaggtacccatgatgcactgaaaaatatttaaaaaatcaactatataagtattttattatagaaaatgaggcctttgtgtgggagatcatgtttagtgaatgtgcagccatttttaacctcaaagattatgtagtattctatagtatagtacatagattttatagtatttctactatatcaatattatataggtttcttattttatctatagggaaaatgctctattaaagtataatcattgattttgaaaaaaaatgttttattgtttcttttccttttcctgttttatttttaccacctttcaggtttttttctttcccctaagtgaagatctgaggagaggacaggtattgttacatgtcaactgtcaagtaactgtgacccattactgaacacttcattgttttcagtgattatgatagaggatgtcagttttgtaaaatctagaaaactttgctttattttggcagcttgatcctgtagtaatggggtagattcaaaatgtgaaacttgctggatgcatttaaattttattaataaaacttttatctaattgcaggagcaaatataggcagactttgtcttctctttagtatacatttctggaaaccacaataagtatatcttatttttaataagacaggtggcataattggactgtgtactcctgaccaaggacttgacatttgctaaattatagaatgaccaaaaatacagatcacttatctagaagtctgagttgcagaacaattgtcctaaagtttttaaaaatttttattactaagaaattcataccattgtgataattaacaagatttgctctacagttcaatgctcagggacatgtgatctgccaggctgtgaatgatgggtaaggtcacacttgcctggttgacccagtgcagaatgggtgctttagacccaacggttcagattataatgaatgacacactgacatggtggtggtctcactggtaatgcctgcgtgtgatagtgctcagttgtttatgtgctttggtggataacacattttaaagcattga

SEQ ID NO: 50181 - DNA, 1054 bp, Homo sapiens
actctgcctagtgctctttatactacactatgattaaacttcttccaattagatttttgctagaacctcactaggcttaatcaaatcaatgtgagcagatgggaagtaaaggaaatccattcccactttattccttgaagcctgttaataaagtacagaagaagcaacatggggctctttcttctatccttttagtcaaaattatgttttgtcctttagtaggtcacgatacgatatatgaaatatattttgaccaaattaatcctactctgtgtcaattagaaacaagatgcattcttgcaactttaccatttattatttttaaattttttttaagttttctggtatatagtaggtgtatatatttgtggtataccttagatgttttgatacaggcatgcaatgtgtaatgatcacaccatggagaatggggtatctatcccctcaagcatttattctttgtgttacaaacaatccaattatactgttctagttattttaaaatgtacaattaaattattgactgtagtcaccctgttgtgctatcaaatggtagattttatatattctttgtaattatttttataaccattaaccatccccacctccccccaaccctcaacccccgactagaggtttcccagcctctgataaccatccttccactccatgggttcacttgttttgatgtttggataccacaaataagtgacaacatgcggtgtttgtctttctctgcctgacttatttcacttaacataatgacctccagttccatccacgtttttgcaaatgacatctatcatttattattaaaacaaatccatagtgacagatatattgttactcctattttttagataagagtcctgaagctcagatgacacagctgataacagggaagccaggacagaatctcattgttttgaacaccaaaacccgttcccttgacaacttggctatactacactattcgaatgttgcagatactgtggtaggtatgagtctaccattgatccccaatcctttctcacaaaggaagtcagggaattac

SEQ ID NO: 50182 - DNA, 1077 bp, Homo sapiens
tgactgtatctccttgaaagtagaccttccacctgcagtcaattttgatgttgcagccccagctgacatcttgactacagcctcacgagatgcactgggccagaacctcccagctccgccattccagaattcatgatctacacaaaccgtgagtttgagaaatgtttgttattgtttaattttgcagttttggggaaatataattaatatacatacattttgctattttaaagtgtatagttcagtgatttttagtttattcattattattcgacaattaccacgatctcattccagaacatttccattaacccaaaatgataccccatacctcttagcagttactgtcggttctccctacttcgtgttacctgacaaccattaatctactatctgactctatggatttgcctattgtggatatttcttatagatggaatcatgctgctgtgaacatttgagagtaagtttccatgttcaattctattccagtcctaggtaaatacacaatagaattgaacataggttcacatggaaacttactctcaaatgttcgtagcagcattatttatatgcagatcccccatatatgtgactgtctttaggtgtctctggattcaaatccacctcgttattctcagagagttttcatactggacaatctccagtgtgatatcgtccacacacttttaagcctgggtgtttagtcttgtgggttttctcagggagcctgttttgtaaacttaaatactcacttagaaacgtcttggtatttgttggatattgatttcactacagcttcatgaatctaggcaatgtgactgatcagtacaggtagcgcttcattttggtgatcaccagtttctcgtgttatattcattttgctattcatatagcaacatgtccgtcctctaggctctatgcgtggcatggactggctccatgccagtccagaaagcctgagcccaagtttgtgtgttaggcagtagaagcaccttgagtggtttgtttttatgtaggcccccggcctgagctgatgagctttcacagggactgggtggtcactggtccagagct

SEQ ID NO: 50183 - DNA, 1126 bp, Homo sapiens
cctcatgtgatctgcctgcctcggcctcccaaagtgttgggattacaggcgtgagccaccgcgcctggcctaaaccttggccttctccagagccacagttgtctgagtgtattgggagtgacttgcaaatgtttttacttttcaacaagagaaccatggcattaacagggtttaataaatattcatttgtacaggactataagttttcggagtcgagttttaccctctaatgcagtgtggatggagaattcaaaactgaagagtttggaaatttgccaccctcaggtattataatttagtgagaaatccgaataggatagcttccgttcatgatatttgtccaagatttgacacacctttaaactggcctttgtcctgtggcattgttaattcctctgttctgtatacaaaggtggccataagttttgtatttattgatatttatttatgtcctgtaggagcggaacattttcaatcggatctttggtggtttccttatgaggaaggcatatgaacttgcgtgggctactgcttgtagctttgggtgagttacatgtaaggcagccttaacttctgagaagcaatttatatcaccccactgaaatgaaacatttcggaccagtctgggtgtgtgtgggaatatgttatgtttttgaatgaataccacactgataccagctgaatttgatcttcattttagaaggttgtttctctgactttgtaagttcatacattaaaaaaactactgagaaaatacagtgatgatatgtagaaaggaaaagatatagttattttggccctaatctgctcacgatggcgtctcttaccatttctcactggtaggatcttttcccccttctctaactttattcttcgttcatttttattttgcttcagctagttgttagaggaaacaattgagatcatctgaattttgcaatataccccaaattctgtcctttcccccaacagtggttctcgaccgtttgtggtagcagtagatgacatcatgtttcagaaacctgttgaggttggctcattgctctttctttcttcacaggtaggtgtgtgatgagagatgacatacaacttttttttttcatttgagcctagaagtttctatatc

SEQ ID NO: 50184 - DNA, 1086 bp, Homo sapiens
gaggccaaggtgggcagatcacagggtcaggagtttgagaccatcctggctaacatgatgaaaccccgtctctactaaaaatacaaaaaattagccgggcgcggtggcggcgcctgtagtcccagctactcgggaggttgaggcaggagaatggcgtgaacccgggaggcagagcttgcagtgagccgagatcgcaccactgcactccagcctgggcgacagagcgagactctgtctaaaaaaaaaaaaaaagacaaatattaatctgtatacgaaagtacaggaattgaatatttatcgtgaaaaagtgaagctaaaatatttaagagagaggcttgttagctgtgtgattgaagaataaacagatccaaaaccccaaaccctccagcaagaattttggtcttagtggaccagcagggattgtattgcaaccaaataagatgactggtgactaagaagttcaattagccaatgagtatgtgctcatatttctgtgttctgtgcaattagatgatttgacttggtgaaaggataaggatttgttctaacagcacagtgtcaaaactgcatgtagattttacagaatactgtaaatactgagaggctttctctgaatgctgtcattcagaagagaaacctatagtagcttggtctgtaaagaaaactaaaaatatctcttttttttgttgttagtcattgcttattcccacattaggtggtgagaatttactagtaaattgaactggaatgagtgacagtatctggggttctgggttttttttgtttgtttgttttatttttgtttttgttttgagacagagtcttgctctgttgcccaggctggagtatagtggtgtgttctcggctcactgcaacctccatctcctgggttcaagcgattctcctgcctcagcctcacaagtagctgggattacaggtgcctgccaccacacccggctaatttttggatttttagtacagacagtgtttcaccatgttggccaggctggtctcgaactcctgacctcaagtgatccacctgccttggcttctcaaagtgctgggattacaggcatgagccaccac

SEQ ID NO: 50185 - DNA, 1045 bp, Homo sapiens
tgtcacaatctccgctcactgcaacctcctccacctctgggttcaagtgattctcacgcctcaacctcccagttagctgggattacaggcgtgcaccaccacgcctggctaatttttgtggttttagtagagatggggtttcaccatgttggccaggctggtcttgaactcctgacctccagtgatccacccgcctcagcctcccaaagtgctgggattacaggcatgagccaccatgcccagccttggatatagtgttttcattcttgcccaaacaatatggcggcttgcagcatccagctgaaggaaaatatcttcttttcctccctccctccctccttctcccttccctgccctcccctccctctctccccttccctccttctccctccccttccctcctccctccccttccatcccctgcatccctccctcccctccctccttctcccttcccttccctccttcttccttcccttctcgtcccgtccctttctcttctcttctcttctcttttctttctgagagatgatctcactctgtcacccaggttgtagtgcagtggcatgatcagggctcactgcagtcttgacctcctcaggctcaagcaatcctcccatctcagcctcctgagtagctgcgactataggcatgcaccaccacacctgactaatttttttttttgtggagaccgggtgtcaccatgttgcccaggctggtctcaaactcccgagctcaagcagtcttccttcttcagcctcccaaagcgctaggattataggcatgagccactgcgcccagcctatcttgtgtatctttgaaaatttactctcattctttttccttcctcaacgcattaattagcaattgagttatttaaaaggaccctatgtgtctcttatattttcttgattattttattttgttccttttgaattttttttgctttggtcatttccaagagctccttcctgttctttgaatgttctttttttcatagaattatttttttcttttaatgtagtggcttttaaaatttatttga

SEQ ID NO: 50186 - DNA, 1058 bp, Homo sapiens
acaaccaccactcctgtgtctagaagggtaatgcatacagctctcacaactgtcaacaaatacttcttccttgaacatctcactatttgtgatccagattgaaaatatcaagacagaccaaagggtgtttttgcagaacattaatcccatgaaatgctctgttgggggaggtgttcagtggtcacagtaatcttgggaaacactacacttctcttcttggagaatctcaaccaacattagcctattaaaggctcccagaagtcctgctgttaactcattttgattttgtttagctcagtataaaccaaacatttcactgtttgtaaaccagtcaaagagctgaactctttttcatggagtatatgtgatccgtgaatgctctggaaaaagcctcgctaaggattaactgaaagaaaacaatgcaggtacttgggagcctgaggcaggaggatagtttgaggctgcagtaagctatgatcacgcactccagcccaggtgacagtgagatcccgtctctgaaaagaagaaaaaaaaaaaaaaatctcaagactactaattcaggtactctggtctacaaaacaggacttcctcctgcagttgcagttagtttctaggtgaagttaacattttgcaaagatgacattaccttagggattttacttagcaaggaaggtcccactttatcctaagattaggatgaatttgttttaattttttttttttgagagagagtcacccaggctggagtgcagtggtgcaatctcagctcactgcaacctccacctcctgggttcaagcaattcttgtgcctcagcctcccaagtagctggaattacaggcacccaccaccacgcctggctaatttttgtatttttagtagagaggatttcaccacgttggccaggctggtcttgaacttacctcaagtgattctcctgcctcagcctcccaaagtgctgggattacaggcatgagccaccacgcccggccagtataattaatttttacaactggtatggtttaaggagcagtgcttccaagaaggccaagtaaggagc

SEQ ID NO: 50187 - DNA, 1055 bp, Homo sapiens
ctttgtagaaaacaaaagaaagtaggtgatcttagcaggaaaagcagttttagtaaagtgagcctaagatgatcgtattagtcagctttgataatttgtttgcagctgatgctttttcctttggttaaattctttttcttgtgttcttaggttaagacatcagaattttatagatactcccgacagctccgttacgaagttgaccaagcattgaattactttcagaatgttcaccagcagcctttgttggatatgaagtcaagccgcatccgttctgcaaaaccgcaaactacagtatttcgaggaatgattggacatagcatggttaacagtaaaatacttctcttaaagaaaccaagagtctggtgggagctagaaggcccacaagtacctctgcgacctgactgccttgctatcgtcaataattttgtgttcctgttaggcggggaagagctgggcccggatggtgaattccatgcttcttccaaagtattcaggtatgacccgagacagaactcctggctgcagatggcagatatgtctgtaccacgctctgaatttgctgtaggtgttattgggaagtttatttacgccgtagcaggcagaaccagagatgagactttctattcaactgagagatatgacatcaccaacgataaatgggaatttgtggatccttatccagttaacaaatatggacatgaggggacagtgctcaataacaaattgtttatcaccggtggaatcacctcatcttccacctccaagcaagtgtgcgtgtttgaccccagcaaagaagggaccatagaacaacggaccaggagaactcaagtggttaccaactgttgggagaataagagcaagatgaattacgcgagatgctttcacaagatgatttcttacaatggcaagctttatgtcttcggtggtgtctgtgtgatcttgagggcctctttcgaatctcagggatgcccttctacagaagtatacaacccagagactgatcagtggaccatcttggcatccatgccgattggtagaagtggccatggtgt

SEQ ID NO: 50188 - DNA, 1029 bp, Homo sapiens
gacgcggggcgccgcgggcgcgggacagccttccccgcccccccttcccccccgttcccacacccgctcccgctcccgtggcgccggaagtgacgcgttttgggctgaaagatggcggcattggcgctcgaccagggggaaggtaaacacccgccaggccacgggctggccccctcggggcgccagcaggggccgaggggggggcctcccgggccagctccccgcccccaacggcttcccaccctccgccctctctcccagcgtggcggccttccgcgtcaagacgacagcgcactgggccccctgccggccagccccgcctccctgggcgggccccgggcggctcccgcggcccgcagggggcgcgcggcccggagcggcccccggctcgtggccccgcacgccccgccccttccccgcccctttcccgccttcctccacccccggcgtgggtgatcccgaggctcggcgcgcttcggggcagaagcccagagacgccgtcctcgacgcttcctcggctggtgcttctgtctctgcctgctgccccccagcccttttccccgcccgcggccccagtcggccctcccgccgagccccgtcgggtgctgcgaggcccccggcgttggcaaggtcggtccgggccccgacgccgcgccgcctcgtgcggagcccgactgtctggtttctcgactcagcgctgtcttctttcccaggacttatccagagggggctgcaggcgagcactctcgtgccccgccggagcgacccggctcgtgccgggagcggctgctcgtagacgtccgaggagcctgccgagtgccgtcccggcgcccgaccgcccacccatcggcccgctggcccggttcttcctgatgcagactgccgtccactagaggctggacaggaccccccgaggtacgtagccgcccctggccgccggcctgcggagcccgggcttcgcccgcggccccgagctaggcacgaattcgccggccctctctgcacggacccgagtcaaacatttggtag

SEQ ID NO: 50189 - DNA, 1045 bp, Homo sapiens
cccagcactttgggaggtgaggcaggtggaccacttgaggtcaggagttcaagaccagcctggccaacctggtgaaaacccatctctactaaaaatacaaaaattagccgggtatggtagtgtgctcctgtaatcccagctacttgggaggctgaggcaggagaatcgcttgaacccgggagacggaggttgcagtgagccgagatcatccctctgcactccagcctgagtgacagagcgagactccatctcaaaaaaacaaaaagatcaaggaaggcacagtttgttttctggctccaactagtgagtgccatcactgagatgggtgtgccagggaagtagagtttgtgagagttatgtctgaggtgccatggggacttccacttggaggtgtctagttcatgtttggttggggaactcaggagagagttctgagctggagatatagatctgggagatagcatggaggagatggaagtgaaattgaggcagtgaaatggatgagagtgaaattgagatagtttctggactgagaaggaagtggatggagatggttacctaggaagagtgcctcaggataatcccactacagggctaattctagaaagtaactgaccctgagccatcctatcaggttcttagagggggaaaatagaggagctgtaattaaagctattagactcctccttctattcatctgtctctacatgaaatctggttaagctaatctactttatcccagaatcttcccaggttggaaccctaagaaagactacttaaagggccaatagaagaaggatcatgaaaagaagacagagaagtatttctcaaataactgggagatcaagggaccaagggcagggtaagtttcatggagggaatgtccaatagaatcaaatgcagtagagagatcaaatgagttaaggaggaaaagtttcctttggatttagaaagaagaggtcagtggtgatgtttcagtgaagtggtgggagcggaggctggatggcagtagattgaggagcctataggtggtagggaagtggaa

SEQ ID NO: 50190 - DNA, 1022 bp, Homo sapiens
ctccatggaattgtgatagctgcacctttcttaaccacccagcactaaatcgctgtgagcagtgcgagatgccacggtacacctgaattcagaaaagtctgcgccaggttgaaagtgaaactttgagcactaccagaagaaaaggaaacctcgggactctattcatccacccagccttttcattttcgattgcacagcggggaggaggaatggctttgtggtcgtcgttgtgctcacgaaaggaaaaatggggaggtcttttttttctcctttcttaactcactacagagtgagagatagaaagggatacttgaaactgggaaaggattcactctgtgaaagaatgtacacacagaagtcaagagctcttctgtggtggaatcccaattgttaaagttactgctgagtggcccttattttttaaagtagtactttgaatcatagtatgaaatgctacagtttatgcaaactgtgaattcccagagcagacttacctggtcaccgctctctggaaaaccaaggctccccgtgcttcttcccattgcttcctactaaagaggacaacaggaaaaagcacctagaatatttggggggggggggcaaattaattaagggtatttgtaattgctgcttttttcaggggtaatttccaacacacatacatgcacacaaacaaaatgttttaaaatgtgatttgtagcagtcaggaactaggcatatcatgcctttgtttaaaagtacaatcagaggtggtaagatgcctttggcttgtacagtgtgattcatcgagctctatcaacactggtaactaagacctacttatgccacataagagatgcatttttttaagttactgcatgtttttattaaggccattggttttcaaaataacaagtccttacaaagtatgattttataaatgatattctcgtaaaactgcgctttgccagtagcacagtgaatgtatgccaaatgcaagtccattccaaaatccatttggaaatcttgagctcagctgtggt

SEQ ID NO: 50191 - DNA, 1044 bp, Homo sapiens
tgaaatatgagcagttaaatttttttaaatgttaatatgtagttaaaacttgatattctctaaatctcggggagaatgttaatatttttaactaaatcttccaggtaacaggtttgtgctttcatgactattttgggaggaatttcttcaaaaatgtgtcatgtacttctttgtctttttgacttgccgatttgtaggagttttttactatatgctggaaatgagcccttgctggttgtaaatatcttctcccactgtgtggcatgctttttctatttcatggtattctcataagattacctccaaggtattctctcatcttctagaagctttgttgttttggctttcacatatagatctagcatatacctgaaattgatttttgtattttgtgtgaggtaggggataataccgtcttttcctatatggatagctaattttcccagcacaccatttccctgctattgtcaggaatcaagtgtccatatatctgtggttctgtttctgtgctttctgttctgttcctttggtctgtttgtctctacttgtactgatgccacattgtcttgtttattatagttttatcataaaacttgatatctagtagaacaagttcttccacattgtccttcgaaagcatcttcgctattcttggccctttgcacatttctttgattttaatatcatcttgtcattttccacacacacccacaaaacctgttgctactctgattggaactgcatggcatctagagagcaatttgggaagaattgacatctttatcattttctaattcatgaacatgatacactacgccatttatttaggtctttaatttctttcagtaatggttgtgattttctccggaagattgttcacaacttttgagagttttatttgtagatatttgatattttttgatattgtaaatgtttatagccattattttgtttgtttatatctttatattgaccttgtatctaataattttgctcaacttttagtcatatatctttagagtatgtatttgatcttttactatg

SEQ ID NO: 50192 - DNA, 1021 bp, Homo sapiens
tacttgacctcgagcccaactgcaatgttatatggaacacactttggtaaagaaattcaagtctgaagtaaactttgaaaaccagtctaggagatagcatagttgactctctactgtagttgttgagaagcctatccgttgtgtctctgggaacatcagaagataaagctataacaggtgcccacgtaggaagcctggatttttcgcacaaaagtaacttttcatatgctctagtggtgaagcagttaccctgtagacccagaagccagaatgatttagtctgaaaaatctaaagataggtattaaattaactctcatgatcatagaaaattctttgcaccatttttgtagaatatcccaccgaataacttggcttttcacccaaaccaccaagaaaaattgccaccagtgacttgatgcaattaacttgctatcgggagttctttcttgtgaaatgattgaactttgaaagatgtttaccaaagacagcacctttagcttcatcacaattactgtggaatctttctttgtaagtagttagatgcaaaggccagttgttgcttgaggcctctcctggattgtgattttaaagtgtatcatcaacacatgggaagatatttctccctctttatcttatgacagaaatgcaggtatagctttcatctcaaagtaagattaaggtataagttacaaagatgtgtagctactatatggtcctgtgtaatgctacttgaggaaggctgttcctttcctggcactgaaattttagagcttgcataatcagtatatcaacctcgtgtggcttggtgcttagcaagtttcagcttctagagcccatggctaatggagccatccaggagaatgttggagagataggtctgaagccttagaagagaagtcttgattaaggagtaatgagttgcgggaaggggtcatggttgtggcggagatggaagcctggggagaggacagagacctcctaggaagagagtttgtgtaagaagaagaccaaggacctcct

SEQ ID NO: 50193 - DNA, 1052 bp, Homo sapiens
atgtcaggggcagtgaaagcaaatgagaagtgagatgatttatatttattgaactaatgtccggtatctctttgacagagttgaataataatcagttgtcggtgtcctttctgtagtgttccacattggatgggtgaagaagtcctgatagtcgattattgatcacataacaaggtcaatttatcataactgaagtgcgatcgatttgtgggtgcaaagaagaaacaaattctggaaccgaataatgtttatattgcttttctctttggaaacaaagcagaaaggggcctttctgcttgtaagataaacatttcttcaatacactatggaagcgctttgaaataaagattccgaatggttcaaaagcaaaaatcatgttgttgttattgttgttttcttttttcctgttttcttgactactcattgtaaatgctaaagtctttctttatgttttgtgttttagccacgagactcaaacaacttgctgggaccatcccaaaatgacagagctctaccagtctttaggtaaggacatggccatgtttcctccaagttaaatgacaggtgacctttaggataaagtagtttgcagtgtgaaagttacttgctatataaatacatcactagattgtttcaagggtgaaagcagtggcaccttcctatccaaaattgacagtcagctttctttttatcagaggttccttaaaaacaagttttagaagttgattgattcctaaaaattcaatatacctgagagggcctataggtctttgtagttctctttggtgcctaaaatgatggaaaaacagttgcaatttatggctatttttttttttcttcccacgaagatagaaaactgtttcaggtgcttgttgatttcttccgtgtgaaaccaagacaacccttttgccaaaccacaaatgttgtgtaaaggaattttctgccgtctttccggtgctcacaattcctaaggcctggcgggtcattaatgtgaacatttaaatgatttctttagtatggcttgttttgtgtttatgtaagagcctgacagt

SEQ ID NO: 50194 - DNA, 1026 bp, Homo sapiens
ggagatgggacattgttgttacacagtgtgactagtaagggcctgtgtgagcccttgtacatgtgggcacacatgtgtgtgcttcctctcttcgctcttcctttctccctggtgcttatatcacatctggatgacctttggaaatagaggaggcctgaatgcagggtggtctcaatagaaggtaacctttccttgctctgcacttatatatggaattggtatacactcactttccgagctgagaaatgcctgagaacaagcaacactttttccacgaagctgcaagctgcagcctccttgtgctgtgcatgtaaagtaccagtcctgcctaccccttctccagatcataaaccggcttggtcatggggtgtcctaaaaccccttaaagcatagagaccatatctcctgctcttcttgctctttaagacttgaatgtcactctgttatattccctcaactgataagcccttgttatagtcctcaaatgtgagttgtctctatggaaaagtaaaactgaaataaacgtatttggaagacagtgaaacagcacttcacaagtgaacattttcttgcaaattgatttcagtagccctcactgttcaatcactgactagtaaatattacagggatggtctttgaagttgtacagtttggatgatttccatatgtctttatgaggtttatgattgtgttccatttcttaaaccaacttaaacggttgttttaacttattttttttaaacataggtgataacatgtagtgtgttggttttgctctctaggaagggtctttcttcgccttgattgacttaattacagttggatccacatctatattgtaatcaactaataacagatttgcttttaatagatgacaatttgaggggcacatgataccaaaagcgaccacatattgagcaccaaatggtgccggtcacttacctatttcaactaatcctttaaccctccaaggtaggcaggcttgctttaaatttcaccgccagtagggcgcagagccctaaaatt

SEQ ID NO: 50195 - DNA, 1058 bp, Homo sapiens
cactaatctagaagaaaccagtatgataagcatttatcctttttaaaaacatatttgcttctctctccccaacactaaaatgagttaaatatcaaaaagaaggacactacatgcttcttcagtaaatattctaacatgcttaacaataaagaatgctgtaagaccatggcttttaaaatttattaaaatctactgaaagctaacatctttttcccctagaaaaagcatgctagtaccaaaaggcatgtatcaaaagcatgtaccaaaaaacatgttcaattacaaggggttcatgggccctccaaagccctttcattaattctgtagtaggccatgatcctcaggttaagaatccctactgcaaagtaaattttattttcccattgactttcagtataaaattgatggtgcaatttactattaaatatgcttctttctgacaatattaaaattatgtctagaataatgatgaagggagaaacaaaatgtaaagaatgaagaactgtcttcaaaatgactaaaaaataaacccaacactttgagctaaaaatataatacagagccagcaaatctaccaatttgggtcaggtatcataatcaataaagaactatgtagttttagcaaatttgccaagttttccattagtcttaaatctctaccacatccctaccttacggtgagaaaccttatggcgtgatagcaggaacactctactagccttcagaaatctagtctcctgatgtaatttcaatacatataataagtattatttaagagtgactttggtgcctcgatgatcttatctacctggacattcagaatgaatgggtggggttccataggccaggaagaccctaatttgaactttggaaaaaaaaagagtggctatttctttgaaaatctgttgaattagagaaagtttttgcaaggagagcaaaattataaatgcagttggctccaggtatggctgagagacagaatcctacatggctctgagtttctgatttctgagccaacgtacaatttgtatttgtgtggaagaagcactgaagcattc

SEQ ID NO: 50196 - DNA, 1047 bp, Homo sapiens
ccatagtatccggccgcagtgggccactctgaatcccctcggttgccccttctgtttccgtgtgactcacgcagctttctgcacagatggtatccttctagacgtctgggatgttcgaggcggttgtattgaataccgtgtgtgtattccgggtgagggggcgcgcaaattggggcaaagaaagctacttcaggatatttcgctctgctggggcttgtctccagcgctctctggccagaaaaagcgctggcacaaaaggaggaggtgggtgggtcagagccccgaaccgcgcagtgttccagggggggcggagaaaggagggcaggccccaggcaggaaggagggagggaaagaggcgagaggaggagttttccagcccggccttcgcccgcccgctagcacgcagtcccttggtctcttcggtctcctgccgcccccgggaagcgcgctgcgctgccgaggcgagctaagcgcccgctcgccatggggagccccgcacatcggcccgcgctgctgctgctgctgccgcctctgctgctgctgctgctgctgcgcgtcccgcccagccgcagcttcccaggtaggatcggaggcgtggctgcctcctcagctgggcaccaaagacccccggagtcgccgttgggacccttcgctcgggatagagggaggtgccgggggcgccctttgtttgcgcagaactcctctttcgcagcccgagggtggggatgatgcggatcggggctggtgtctgggcacgcgccgggaagaactgaccatcccatctccaggcgcggggcgccctcgcggcgacgggagccctagcaccttctgcgtccgggcttccagagttccaatcaaacccttttcggtgtaggaggctccacagagaaagtttggccgcagactagtttgctactttctcacccccagaattttgcctctcacatggttgcccactggaggctggcagcttgtcctggaaggagcctctatgccctcccactacacgtcccaggctacccccttggggccgcaggacacgagcca

SEQ ID NO: 50197 - DNA, 1022 bp, Homo sapiens
tcaggagattttacatttaaaaagtttctcagccaggcatggtgactcacacctgtaatcgcagaactttgggaggctgaggctggaggattgcttgaggccaggagttcaagaccagcctgggcaagatgataaaaacctgtctctacaaaaaaattaaaagattagttaggcatggtggtgtgcgccctgtagtcccagctactcaggaggctgaagtgggaagatcgcttgagccctgaaggtcaaggctgtagtaagctgtgattgtgccactgcactccagcttgagtgacagagtgaggccctgtctcaaataataataatgtttcttggacttttggaaagcctgggtctgggagcatcacactgtggcaacactgacctgaagctgagctgaggctggcacccctctccccagttcccatggctccttccctcactggccttgatgctaggctcctggctcacaataaaaggatgtatagaggacacaaaaataagtggacgttttaaatgaactattttccagtgataagatctgggacattatgggaaaaaaaagtccaaacttactgtttttcgacagtcctcaatgcacactaagaattctatcttactttttatggaggggcctctacaaaattatttatacttatatacaaatatatagtatatgctcatgttatttttctctgtaaataatctttttaatctttacacaaaccctctgaggtaggtattgctaatgttatttttccattttacaggtagactataaaatacattcactgggtgccatgctcaggccatgagtgattagattaaggcttggaaagcagtgcttagggctttgtatttaatgcccttcccaccccatactgctgtttccatgattttcagtgtagttaaaacatgaacttacaggttaacttttcctgtccaaaaaaaaaatatatacttgaaattttgatttttctacctgatataacttaaatacaaagttttatgctatattaacc

SEQ ID NO: 50198 - DNA, 1111 bp, Homo sapiens
tagagggccaggggcagaacccacattgccaggaaagaatgagctccgggaaatctgctctgcagaggaatagaatcagaactgtgaaaattaaatatcagatatagatatttaatttttaaaatatttaattttttaagcatatttctcaatttaggaagggagatgtgtactccagagactttggttttctggggaaaagatgataaattttgttcataattaatatatacataagaatagagtgttattgatgtgagcttatgaaccaaaagaaaaatctgcaatgctttaaacattagtgaggcggagaaaaaaaacatctgtgagaacagccattattatcctcaaattaaatgagcaggtttggaaacaaacatgggctccaaagtccagtagaactgagttaaaatcccagccctccactgatgagctgtgtggacacctagaaaagttgtggtggtggtggtggtggtggttgttatttgacctttctgagtcttatttccctcatttgataaaggaagggacttttgacgattaaattacctaacacatgaaacatgttataggcactcagcaaatggtaacctgtatcactctaattatactctgtgatcacaccaaggtaggtgcaaagctacactcatgaatctccaggtcactgactgatgtgcgtgagtttagtcatgtgaacctgacttttgtttaaatgtaacataatagcaaaatataaattggcttatagaaatagatctgtgggaataaagtagattgcaataatgatcatgcttaagtataaggtggagtgaaactattacacaccatacattagtcaataaatgcccctaaatatttaaagtgtgttgaaacgctgatcacactcatgtggttagccgaaaatttaggtgtgttttctgtcactgaacatttccctctgtgtcctaaccttgttatcaaaataaataaaaataattagcacataaggtatagtcgtggatcatgcatttgtttatggacaacaagaaaatcttctaaggaaaaagagtagagatagtaaagaataaatctgaaaatgagaataaaaatgctcgccagcaagatattctat

SEQ ID NO: 50199 - DNA, 1033 bp, Homo sapiens
gataaaaatatatgtgccgaacatgattatttaaaaagtagatttaaaataattaagatggatgacacagaattcataaagaaaaaaacctccagggaaatgagaaactcttaaactcaagttattaatgtaatagctatgagcattcatcttctactgaagagataatcagccagtaatacagaaacaacgttctaaaatacacccatctcagtattaaacctggtctatatgtccacgtttaaatagcatttcttcacatttccctggccaaaaacattttgtgctctttagaagtggtagttcatgcaagcattgttttctagtggagaacactggcctccctagtcactttgagaccaaagcccttcttctggttttgtacttttgagctgtctgaacttgggctagtctcttagctttgcagtcctcaatttcttcatctggaaaattatagaatgagaatgagtgacctaagggattctataggaacagcagttgttcattaccagctagagctctgtcacacccagattttctgcaattcctttttcctcaataaaaaatcttaagtctcgtcaccaaagcgaccccacattcaaactaactagtagttatactaaagtaaacagttatcctaaactactaagcacacactaactttctgtgcccactgttgggcgaacatttatttaatcacatgtggcaggtctagtaccctcaaaaagtttatggagaggagtgtattgtgggttaggggtgggttggggtacaaaagacccaggtctatccaggctttcatcgacagaagtgatttacatgtttgtaaattttatatatcttaggagaaaaaaaaggaagcttaagaatgagaccactttgtccctcatgaattaacacttggttatatagattaaaataactggttccttctttattgttcccatctgctggttgttcaggcttttatagtagtttattactgatcattattgagggaagtgtgagtagtatatatagaatccattgagtt

SEQ ID NO: 50200 - DNA, 1028 bp, Homo sapiens
tattttctgtaaagaaacaagagtggaagcattttattgctgaaatttgctctttgggatcattaacttaagttataatagccatacttttccttctgtcaagccataggttatgattgcagttcttatgtataggaaaagactaccatttattgatagagtggccctctgactttggttgagtatgactttgaattaattactatgctgactttactgaatgatattaatatcttttttagttttaaaattttgtgattttagtgaaaatctttgataaccttttccaatatttggttgggctttaatttatcaagaaattgatagcataaaaataaaattaaacatttggaaattagagactgttcatgggtaggaaagagagacttttaatgaataacaaattgcaaaagaagggaataggctgtggttttcacaaccatagagagataaaggcctgccctgaaatcctttgcttttcctggctttaaggactagtgcaatgaatgaatgagggattagaggattaggaaagtaaattggagaaatgtaagttgagggaagaagtctataaaaaatatttagtttctatttatagtgtctttgacatgttttcaagtttaaaactcttaaaattgaagtcactgaagtgcaagagaatcatactaaattgttaaaatttagagctagtcctcattcgttctatctataatactgaaaggcatggtgaataacagcattcctttgaatatgggagagctgttcgaacacagttgtagaagctcaatgaatattgactgatttttgactgaccatacttccaagcagacacctttcttgtgtctttccttcctcttcccttagactccaggctctccctcttctgggctgctttattgtgctagggaaagaaaggcatgtgcctttagaaatcagttctggcaactgggccttcctctcttagggctcttaaaagaatcatgactttttaaagagcaatagcaagaacagccagaaacggaaagcaa

SEQ ID NO: 50201 - DNA, 1013 bp, Homo sapiens
tgtaaaagtcattttaaatgatatttcttacaataccaagttgattaaaatgtagtacctacccttctgaagtttacagtcaaactataggatgtatagtttttccatgtacaaagcattttcaagtacgaatatatttcatttaatctcccaaccactctgggagagaggtggtggtatctgagattccatatatgcaggcaggtttagaacacagttttattcaaggtgatgctgcgattgagttgcagaatcagaattcgaactccagtcttccagttctaaaagcctgaacaatttctactgacatgcagtttctctccatatacaagaggaagaggaggatgtggtagcaactaataatgaccaggcactgattatgtgttctatgtgcctttgaatgcattaattcggttattcctatgaaacaaccctatcacataggcacttttatccccatgttacaggcccagtgattgaacaacttgctcagtatgactcagtaagtggcagaatccacatgcaaacaaggcagtctgactctgtagcacatactttttgctactgtgctagaccaataactgcaatatacagcagaccatgattggtaacgtaagacatttgatagcagagtcttacgtgagaacaagaaagaaaaaatattatttcttgttaggggcgtcaggacatatttcagagaaagggtggtatttgagattaaccatgaaagatggaaacaactctgagagagacagagatgagggaagaacaatccaggcagagacaaaaacatgtgcagagatatagagacagaaaagtaaatcatgtatttggagattattgcatagttgagtttgtttagaggttgtttgtttagaggttagggatcatggatcctaaaggaatgtaaacccctgaaatgatatgctaaatttggtaggtgcatttttttttttgagctaggtctcactctgttgcccaggctggagtgcagtggcataatcacggctcac

SEQ ID NO: 50202 - DNA, 1094 bp, Homo sapiens
ttttccttttaaacttttaagtcagtttttatgaagttgttataatgtttctttacttttcaatgcacacatgctttgggatacgtttgtttttacttggaacatttgtttcttttcttttttaaggagaaaaaaaaatgagtaaaaggagctccacactttgacttaatttcatacaaagctctgatgacaggccatgactgtagagtggtcagaactgtgtggttggtttgagggagcgaattcggggaaggcacttggtgatataactttgttttgtttacagagtacctgctcgggccaggtaaatgctattggatgtaatccagtagtgtgtaatataaattcaaaccatatccacacacaacaactaattgtatgaaacttttatatcctaatttaaaagctgtgaaattagttttcacgcatcaaaccggattgtttatatgtttaaacattttatgctcttatttaaagaagactttgagctatttttttctgtaccctgtaaaatattgaaaactaacataatatgttgaggttgcttggaaatgtacataaaactaaaattttctgaatcgtgtgtttatgtttgaaatctgtgttttaactttgtaagtaaattctctgcctttgtatttatattttacaaaaattttcttaaaaggcaataaaactgttgaggaaaggagaaaattgaagtaccttgtgtcccatgtattcctaaagcattattgttgtccctgattcttcttaaatggtgctggtgatgtattccctatagataactttagagcaatttatagtctctggaaaccaaagcagactggaggattttggaggagttatactcagaatataatttggagtcctattctgaaagcccaattcttggacatatttcctgtctcttagaaccttctctttcctgtctcctttgatgcttatggaggcttttgcactgcctttggccttgacctatttcagtcccacgtcatggccaactctctaggagtgttttttctgaagctaggcatttgttatgtcacttctgcagcccttctgttgcatggcctgagagtcaaggcctgtag

SEQ ID NO: 50203 - DNA, 1049 bp, Homo sapiens
cctatggttgagcccctattcgccagtgaccaatcatcttgggtgtacttgtcaagagactgctctgctgtgtgttgacagagctgcttgatgagtaacatcctcctcagccctgaagctataaacatatatgccattacaaacagtgatggaaatcataaagtatggtaggttgtatgcaaggaatgtaacaccttccttctcaaaagtgtcactcccaaaagaatggaaggatgggagtggacatgcctgaatggagagacagccttgtgtgtttataatgctgttagtgagggtctgaggagagaagagatcaaagaaatggggatacagacttactctcccagtgactgttgatagcagggcacttggataggcttgaccctagttgtggtcacagctgaatgagcaggactttacccccagaaaggggagaaatggggcttattcagatggtcctccctagatggacagatgagtccagagttcctactgctagaagtagttactctgcctcaccttagaaaggaatggcgatggccgggcacggtggctcacatccgtaatcccagcactttgggaggccaaggcgggcggatcacgaggtcaggagattgagaccatcctggttaacatggtgaaaccccatctctactaaaaatactaaaaagtagccgggcatggtggcgggcccctgtagtcccagctactcgggaggctgaggcgggagaatggcgtgaacctgggaggtggaacttgcagtgagctgagatcgcgccactgcactccagcctgggcgacagagcgagattccgtctccaaaaaaaaaaaaaaaaaaaaaaaaaatggtgatcagagagtaggtatggtgagaaatgaggggtgggagcagaatgaaaggacatagaggctggtccacttgggttggtagttaatattaatagttgggcgcacttttcattttactggaaactcaaagcattttcctttctgttttgtaggccacgaaactggctactgctttcggatgtccttaagaaattgaaaat

SEQ ID NO: 50204 - DNA, 1045 bp, Homo sapiens
cccagtgggtagggggcaggaaagcaggaagagccagcttctgtcctctcttccgggccctttgaagcaacttgccacttggcgttttgtgggttaacttaggtgccgtttgaatgtggtataattaaaatattaatgctttgaaaacataattggtgtatctttaaaaactgaagccgctccagtgatcagtgttaacaatgggcttttcttcctgcactggctacaactgtgtaacgcccgcttcttctcccgtctcccatccgcccgccaccccgtcaccccctccgtatttaggcttgcctgtgttctccggctctccgcccatgaagagtctttcatccaccagtgcaggcggcaaaaagcaggctcagccaagctgcgcaccagcctccaggccgcctgccaaacagcagaaaattaaagaaaaccagaagacagatgtgctgtgtgcagacgaagaagaggattgccaggctgcctccctgctgcagaaatacaccgacaacagcgagaagccatccgggaagagactgtgcaaaaccaaacacttgatccctcaggagtccaggcggggattgccactgacaggggaatactacgtggagaatgccgatggcaaggtacctcttgaccccggcttccctctggggcctgtgcgaacacatccccgcctgcctgcttcccagcttgaggggacaaagctttccttttcctggactcctcccccacaccacacgtcactcccctgtcctagaggagcatgtcttctgggtggcagcgaagtttcaaactagtaagaatgaaatcccttcccccaaaccctcctttgacaggcaccccccacccccaaaaaaagataaggaataaagtgcctctctccacgcaggtttgtcacgtggggaggaggaggggaagcagcggctgttagaaggacacgggcttaaccgtgtgcgctgcttggttttatgataggtgactgtccggagattcagaaagcggccggagcccagttcggactatgatctgtcaccagccaagcagg

SEQ ID NO: 50205 - DNA, 1664 bp, Homo sapiens
gcatagccatggtaaattatgggatgtatgtgctgtgccttataggaccatgatgcaaggagaaagtggtagacggtgtaggactcagccatgttcacatctgcctagatctcatgaccaaaggcacatggcattccactcacagaagggctgtaagtagttgcaatggaagaggaccctgatggttaggacccctatctatcccttcatctctgtctatgcacccatctcctttgccctcaagagtaatttctgtgggtactggtaagaatagccccatttgagggaggtccaagtgaagtgtacaggaaagtgacctggagcctctccctcatagctgtttgccatacgtatcttcggcagtcaaggtgggtgttctttgggattattactggcccatggagggaaaccctagcataaggtttgggggccttcactgaggggaattgggatgtttgccttgagaggctcaggggttgaaggaaggacaataggcctcatttgcggaaagatctcgtttgcggaaagatcttcttgagagcggacaagaagcatctacactgcgtgtgggcaggcatgattgcagtgaaccccagatgcagcagtggagggctcccgataatagttctggactattcaggaggcagaagggggccctgtccggctgaacggggaatggtggggacttggaggaggcatgtgtgtttcgcaccccttatcctagcctgctggcttccccatgaatggggagcagaaggtggtgtgtgcaggggagccctccccacccccactgggcagcttttcctagatggggagccccagagaagacagatggcaagacctccccatatctaatgggggtgctccctagcagagagactaggtccccagttagtcactgcctgttgatgccagtctgtgaaataagtgattacaagtcttctaggtggttttctgtggacaaaatatactggcagtttgggcataaggccaggtaggtgagatataaactcatttcactattaggaagtttgcagtgaaggtcaaaactccaatggaaaactttctccctgagaaagatgccttagacttggttgagattgttacaaatacaggtggctgtgtgagacctggagttcaaatggaagctgtggaagtcaaatccaaagcactagggttgagagattcttaatctgatggggatttgatgggggggggggggtgtctctgggaagggtgccaagacagggcagttcgttctgggtggggccccacactggctaagctgctgcctcattttgacccaggaaggcattgtgacattacctagtcacctctgctttcaaaccacttggctcaaaccctctctcctacctaaagggaggggaaatgagtacactttaaaagtataaaagtaaccttgcatgtggcgcttcgtaacacagtctttacatttttacattgcacccccagcccctcccacagggctttcaggggcggctgattggctccagaaagtcaaatagtatataactaggacaatcagttcacatcttaaactttcataaatatcagggctaaaaatcaagctggtctggggatcatagcgtccttttgtaagtaatttctccagccttaccctctgccctgctgcaccgtgttta

SEQ ID NO: 50206 - DNA, 1050 bp, Homo sapiens
tccgagattttggaaactagcagcaccaagttacatccagatgtccccaccgacaagaacctaaagccgaaccccaactggaatcaagggaagactgttgtcaaaagcgacaagcttgtctacgtagaccttctccgagaagaaccagatgctaaaactgacacaaacgtgtccaaacccagctttgcagcagagagtgttggccagagcgctgagccccccaagccctcagttgagccggccctgcagcagcaccgtgatttcatcgccctgagagaggagttggggcgcatcagtgacttccacgaaacttatactttcaaacagccagtcttcaccgtaagcaaggacagtgttctggcaggtaccaacaaagagaacctagggttgccagtctcgactccattcctggagccacctctggggagcgatggccctgctgtaacttttggtaaaacccaagaggatcccaaaccattttgtgtgggcagtgccccaccaagtgtggatgtgacccccacctataccaaagatggagctgatgaggctgaatcaaatgatggcaaagttctgaaaccgaagccatctaagctggcaaagagaatcgccaactcagcgggttacgtgggtgaccgattcaaatgtgtcactaccgaactgtatgcagattccagtcagctcagccgggagcaacgggcattgcaggtgagcccccccacctgaatttcagttactttaccagttgtcagttttttaatgtgtaaacaggattgggggagtatggtagggcagggcaccaggcagatttggtgaatgaagcttgtggtaatttgaatatatgcaatgtggccagtaagagaacgtgagtggtagcactgaggcgtgtctggatgctttaagttattctgtagattataagggaactccactcaattgctgataaccgatgttttaattattgtgaagggtatctaaagactgcatgacgtttacctatcaattgctttgatttctctgcctgtaagatagcaaatatacctagaagtgctg

SEQ ID NO: 50207 - DNA, 1034 bp, Homo sapiens
cacaccctccccatctgacctcttctcagctgtctttcctctccatccctatccagcacctttacccacttctctccactactagaaaaaggggttaaaccccagatccaaggtgcagcttcgcagctcacagtggaacaggttggtgcttgtaaagtgcttttcatgagtgacttcacacatcttggcacttctggaagcatagcctgcatttggaagaagtggggggtggaggtgggcattgaaaaataaaagcaaacgagcttcatctatagctgcaaagcaccctgaggctctgtttgtcattgaaatcaggtcatttgccctctccacagtgttccgctgccaagggtcagcaacatcagtttcgaagcacttggccttagaggtaaaaaagtccccagctatttcaacagcagcttctagaagtttgatgtccctatactttgcctcccagtctctttttgtttcttaccccagtgtccccttcgttgtacatgacagagaaaccagggtgggctgtaggtaatggtgacccctgttcttcagtagaggcttggtgtgagccgtatggcctttgcaaaggaggtccctgcttttgtaggtttggactgctctttgtcacccaggaggagggcctcctgtgagccagggccattgctcattggccctttccactcctctccatctttggccaggaacccgaagagttaaaagtctttagcttgttgcaatgaaattatggctggcagtggcgccgctgtttgttcaacagacctccacttttaaacagttcacaaaaagttcatggggcagctaaagattataagtgtgtgtgtgtgtgcgcgtgtgtgtgtgcgcgtgtgcgtgcgtgcacgtgtgtgcgtaagtccacagcaggatccaacaatgtgttccccccttttgcttttatgttcagccccatcctccaccccttccctcccaaaacacacacacacacacacacacacacacacacacacacacacacacacacgacagtgaaccgctct

SEQ ID NO: 50208 - DNA, 2584 bp, Homo sapiens
ggtggaaaatggatggaggtgggggaggagtggttgctagaggacatcaactagagaaatctcatcagatgggtagggaaagcagcaccgggggtttatttctactggccacaaggaagacagacatagtgctttggaggaagaaatcctctctcccatcccaggaggaaagttgtacagctgtgatatgtctggtctcagctttgattccagagggtaaaacagggtatgtttcatgatactctgcccatcggttattggtgattttcaaagaataagtatttgtctgctatcgttattctatatcctggtggaaagtttataacgaaaagtaatgcctttcttaagtcataaaatgagccttgtatgcttatttaattaaaatctatttaaggaccgattaggcgtgtaatttgcactaataatgacgattatggaaatgttcaacttaaccaaaaatcataaaggagacattttgatcagtggggcggccagtaagtatttagtgagttgggcaatttccgaaagacaggaggcattccgctgagggctgcagaaagcacagacctgtctggcctctgtgacatggcatggagaggggcagacctccctgtcccggccccggccccagcccggccagaccccactttgctgagcatggaaaccaaccctgcgagtctccacaacctttattctcgtgatgcttcctcgagcttccagaaggagtaaactctcggagagggctgatgagccacacggaaatctctgcgaaatggcggtgctcttttgctttaacaaacagcgctgacaaacgcatgcttccttggctagccttggctggatcccggaggggtagggggagaaggggtcccttgttccggagaaacctgccagctgctgggcttggtgtgaaggcagcaaaggcagacacaatgctgctgttgttggtttgatctctaactgtggattgttagtctggctttaactatgtggtaaggggggaatgtgaaggctgtttacagcgagtgcaaataatgtgacagctgttggcgcgcgagcagcgctgcgcctcctcagcacttacacaaagcgcgcactatgcaggcccatggacgagctgcagaggtggcggccagtttctggccagcgcatccccagatgagagaaagctccacggcacacccgccctccatccccaacacacatctttatgacttcccaggattggggtggggtgcaggatggtttgtatgttgtggtttagggaacttgtggtgaggcagaggtggcgggagaaggcccacggggccgtgagtgtcaccgtgttggtggggtttggccaggatccgttgaactgggtcctcagctgtttatggctgagtttttaagatttgtgaaaataactttcagccctaagtaagcttgttggaaagaatgtgttattaactgaaagctttctggaaattgcagaggctctgaaggccgttgttcccctctgaaatggccctgttattcagacaagttagagacaggcgggtgctgtgttctgtgcactcgacactgtttccagcttggaaatgcaagtgtgcaggttcagtaccctaaggggggtgtattttggggggaagggaggacagattggcttttgattacccacatcccttaaccttttcttccaagccttcccgttttcaagagcacatttgccttcaactgcagcacgcaaaggtgccgtcctgaagcctgcccacagcaccacctactctgacttcatcaactagatgcccacagcaacaggctttctttgagttcctggtaccccgccaggccctgcagagaggcgccagggtgggagggagagcagttggtggtggcagttacccactaggccagtcctggaggttcatggctggcccaagcaggtggacttaggatggccaagaatgtggacctgcctctggaccgtcctggggcaagctgggtgtaaaaattcactcctctcccccatgagtcccaaggttgaagccttccaagccctggcacctgcctggtcctccttgggttttggaagatcatttagggctgactttggtctctgggtgtacagcctacaggatatctgcaaatctacttcattctctcctgtcccccccaccctcagcacctcccctccctaagtctactctctaagttttaacatggacttctacatctagttgggtttccgatggggagctgggagatgcttctggagtgagacatgaacttcggtgccagttctataaattggtctctttttatgacgtgtgccattttctgtaggaatgttgcttgcaaaacgagtttcgccttggaggaaaggcggaaagataaacaagcctgcaacgccaaaacactggcagtctttccctccttccagctctcttaaagcagccgggctgtatttccaggattagacttgtgcatgtgaggagggactcgcgttggctttttttcccccaagcaaatgcaaattagagaaaaataattttctttcaacgatatgcaatgtattagtcacttgttatcgtgctccgaggcaggc

SEQ ID NO: 50209 - DNA, 1094 bp, Homo sapiens
ccagggtataacagtgtagggagatttgtaggatgtagggggaaatggtgaaagactttgagtggaccaggagatgacttagatacaggagaaactgggttcacggctcactgtagaccaagtaacataggtgttaaacactctttgcctcgttcttgggtacataaggcctaaggaagcttttcagaggagacagtatgtgaaaatcaggatttcaaatggcacaattagaccaataattggctcctctccgcaactccaggactgagtttgaccgtggcccattttttactagctgtgtgaccttgggggcaagttatttatggcctttgagccccagtaagttttttcatttgtaagactgggaataattatccacctttaggatctaaatagaatgcttggcacatagtaggccccaaggatgaataattgctttgaatgacttgtcatgttcctataggttgctcctccattccctgctgcccctgagaccccctgagacttgctaggcctgtgtcctgggacccaaggatgcagattaaatctcccctacgagggtattctaggtccaccttcctgggttcccctttccctttgttaccgtagtttgcattctgccttttaaaggattccatatgaaaagacttgcttctcccctccacccccaagtgggatcattatatggttaggaactcatttcagaaccgtcatctaggtacccttcggcaaggcttcctggcattatttcaggggggaaccacggtgcctagaggggcaagacctggttggaagaggtgagagggggtggcctggtgcagaggccagaggtgctgtggtttgtttgatagggattaagtccggatgttatgagggctcaatgtggttttcaataaagtctgccagggattgcttcttttatatcaatatgtatttaaaaaaattactagcatgagaagaaaaccagacctgtatggatccaggctggtagtaagctactgtgatcaggtttcctactcgactcccagaggggaagtcagtgtttgattgaagctacacttggttcttgactctcaggggatgcctgctctgaa

SEQ ID NO: 50210 - DNA, 1027 bp, Homo sapiens
ctgagatcccaccactgcacttcagcctgggtgacagagtgatactgtctcaaaaacaaacaaaaaaaaccccaactctttgattttgttcacaattctgtgggttaggaattctggaacggactcagctgggtacttctcacttgggatatctcattcggttgcagtcacacatcaacaggggctgcagccatcggaaggatatccgagatggcacactcctgtagcaatcagttgatgctggctattggctgggagctctgctgggctgttgactgtggcacctatgttgtgagtctctgccatggcagtagacttcttactgacttctctcagagcaagtgccccaaaaagagccaggagcaagctgcatggcttcttctgcctttgtcttacaagtctcagagtgtcacttctgttgtgttgaaagcagtcacaagcccacccagacttctagaagtagagacagagaccacacctcttggtgggaagagtgtcgaataactagcgggcgtgtttaaaaccaccacggtatctcatggggttgttatgaggattcagtgagatgatcttgctgaagtgctggacaagcatgagttcccctcctccttctaatttgaggcctggaggctaacagggtaaagccagtgccaggtgccaggtctccagtcgcttgcagttgttcatgtctactgggccatagggaccgtttttctcagtcttgtctcctcttctcttctcttctcttttactgacagagtttcgctcttgttgccgaggctagagtgcaatggcgcgatcttggctcactgcaacctctgcctcctgggttcaagcgattctcctgcctcagcctcctgagtagcttcaattacaggcatgtgccaccacgcctggctaattttgtatttttagtagagatgggatttctccatgctggtctcgaacccccgacctcaggtgatctgcctgcctcggccttacaaagtgctgggattgcaggcgtgagccactgcgcctggcctgt

SEQ ID NO: 50211 - DNA, 1037 bp, Homo sapiens
atggtggaggagcaggggagaaccttcagctgaaggctaaagaccctactagcacctgggcccaggcaggatcgaagtgacccaacctgaagctaaaatgacagccggcaaacaagaatgtatgcagatgtcatacaagagccaccagggctttaattgagctctgtttaacccagtggaggaaatcagttgagagggtgaaaacactagctcagggtgacatgtttgtggcaaaagagaccagaacccagagctcccagcttcagaaaacagccagaggaggaaagtgactgctggttagagaaagatccagagtgctcttggtcactgaagaggcctggtattttagtcatttggcatttattaagcacttgctgtgtgcaaagcactatgctggcatcaaagggggctaccagcactatgagccctcaaaggactgagcagggaagactctcccctttatatgtgcctggtgacaaaggccatgaaagacagtgggtgaaggggctggggaatgggaggaggaagccaaccactctgggttccactcttgaagatagcagtttacaggtgggcatcgaggccagagggcaacctgtagcaatggacccctctatggcctccctgagccaaaccctacctggctaagcacctgcgcctgtaagattgtcctcccagtggtgggagtgcgagagaggccatcttcacttccccttccttggagggcctgactttgttgccctaggcaggccaggaaacttattctaatgccaacgaaggaggcaacttttctagctagaaaagcacacgctacagctctctctcttgccctgaacaagcagaagagcacagcttatccccaaaagctcctggacaaatgtaggctctctgggggagctggtaagggaatactgcctcccttaacaaaacaaacctgagaatctccaaggtttagcactgcacacggagtctcccagcagagaagggggctagcttaagtgccccatgcattccacctgccccttggggcgctctca

SEQ ID NO: 50212 - DNA, 1029 bp, Homo sapiens
atctctactaaaaatacaaagaattagccaggtgtggtgatgggcacctgtaatcccagctgcacaggaggctgaggcaggagaatcgctcgaacccagaaggcaaaggctgcagtgagccgagatcacaccattgcactccagcctggctgacagagcaagactccgtctcaaaaaataaaaaataaaaagatgcctttccacccccagtatttttagtgtttgtggtggatgtgatttccaggatatctaacctggcatattgctcgaaatggaggagcatcttgctttattcactgaacaaatcttggagatgtttccatataagtatataaaggatgtctttgttttgtgttgtttaacaaagcttagtatttcattagatgaatgtattaaaattgctgagtagtcccaacttgttggccattttggtttcttctgatattttgctgttacaaacagtgccacaataaagagcctttttatggatgtgccagtatacctgtagaattgctgggtcggaggatatatgtaattgtaattttggtagattttgccaaattgttctccatagaggttatgccagtttatattcccaccagcaatgagagtactggctttttcccacatccttgtcaacagttttatcagcgtttagactttgggtctttctaatttgtagatttttaggtcttttgatttgtaggaattgggtatgtacattagcgaagttagccccttgggatattcattgtaaatattttttccgcgtttttcatttgtgttttgacttgacttttggtaggtttagctatgcaaaattttcttttaaatagtgaaatgtatcaatattggtttttaagttttcctgattttgtatcattgttagattcttctcactcccagattttgaaataatcctcccaaagttttttttctaataccatttggattcctttttttaattatttaaaattttaaatatatttttatttatttattttgagacagggtctcactttgttttgg

SEQ ID NO: 50213 - DNA, 1056 bp, Homo sapiens
aataaagacaagcatcactgttaaaatgagagttctaatccatattgatgtgaatggaaatggattaaatactattaattgctgtgaattgcttcctccttttgcagaaggtatctagaagtggagtttgaactgaagctgtaatgtcataccttgtctgtcattgtgtacattgtgctttgtctgtgtaaagtatacttcatatgctgtcttttatcaccagaattcctccctgtaagggtataactgaggaaacccaaaaggctctggaccgctctcttcttgattgcactttccgattacaaggtagaaataaccgcacttgggtagcagagttagtgtttgcaaattgtccacttaatggcacttctactagggagcaaggtgagatgtttcacacattttgtctttgcatatttctggatttttttggtatcgattactattaatattctcttttaatcctgtaggaccatcccggcacgtttacctgacatatgaaaatctgttgtctgagcctgttggtggtagaaaggtggttgaaatgtttcttaatgactggaatagcattgcacgattatatgagtgtgtgttggaatttgcacgttctctaccaggtacgtgtggagataatctcctttttaaataaattaaaaaaaaaaagccctcaccctttttttaactgaagtgaaacatgcacagtgttccaagcaaaaaaatcaaagtatatctaataaaacttaagtattcctttcacttcagacttcaatttccttcccctaaagacaaccactgttaagtttcttttgtttgcaaaaattttacacacaggtataccatatcataataatagtgcttatttactgtgtggcatacaatattataaacagtttgcttgtgttaacaaatgagttttcacaatcttcacaatcacaatcatgagggtaggtattattcctcattttacagaagaaaacaagttgcagagactaagaactttgcataaagtcccatagctagtgagtggcagagttggaattggaaccctctaaccac

SEQ ID NO: 50214 - DNA, 1481 bp, Homo sapiens
tttttggatgtcttttctctgcatttctttgattcgttcagcagatatgcattgagtgtgactgtgtgtcaggcttgaattctgacatcccctcagaatgctgtgggttcataaagcagaggaatatgggctagttcagaagtcaggaagggtatccctgaggaagtaccagttatacttggactgaaggagaggtgagaattagtcagaggaaagtggggcagaggcagtgggaggtcctaaccagagggataactgctaatgtgaaggcttggagggaagagagagcttggcatttttgtgctgaaaggagttcggcatggcaggagatgggagaaatgaggctggaaatgtacgcaggaaggggtcacatcctttaggcctatgtaaatgtccttcaacaatttaggctttatcctaatggcactaagaagctatcagatgattttaagctaaaactgacatcattagataggtgtttttgaaagctcaacctgatagcaatatggagaataaattgaatgggaacaagactaaagtaatgaaaccacttgttgaagtggttcacattagagttgttggtagctcagagtagggtacgttccacaaggagttaggagagaaaatattcacgagttatgattagattggtgttgaaggtgagaaagaggggaaagtggcaaagatgattcttggttttatcttgggcaaatgatggatggtggcagtgttttctgagatcagggacaccaaagatgtgagtttgaatggactttgctaagtttaaggtgcctgaataccctttgggcaggcagagatgtgtttcaagctcaggtaacagatctgggaaggagaagtagataaagtcatcaccatggtgatagtaattgagctggggtagtaaattagatcaccaggaaagagtatacagaaggagatgggcatagggcttaagttctaatggacaaaggacgaggagccaaaagatgcttagaagtaaagctaatgtggtacatgtgctttaaaagtgacccagtatggacttgcaaagccagaataccatctaagagatcaacctttttggtccaggaaacaggtttctttgcaaaggaggggtacactttattgtttcccagatgttgcttaatgatataaattatataagcaatttttatttattgaattcctctgtctgctaagacatagcagctctgcaatttgagcagtggggctttaccatttgttatctaggaatctgtttccgtggaaggtagatagagctagcaaatagtgtcacataacccatgtgtcattagtgctcactttagatactacagaattgaactagaatagttcctcttcctggctatcttaacaacatttccacaaaaacgttttcaggagagagagagctagtcttaaaatggaaatcagtaggaaaatgcaatacttccaattgcatttggttttgaattgctttg

SEQ ID NO: 50215 - DNA, 1039 bp, Homo sapiens
ctgcaagtcctgggctcaagcaatcctcctgcctctgtctccccaaatgctaggattacatatgtgagccaccacacacagcctatttttagtttttttttgaggaacctccatagtgttctctgtagtggctgtagtacttcacattcccaccaacagcgtgagggttccccttcttccacatcctcacaagcatctgttattttttgtctttttgataatagtcattttaactggggtgagatgatatctcattgtggtttttatttacatttccttgatgattagtaatgttgcattttttcataataccttttggccatttgtatgtcttcttttgagaaatgtctattcaggtattttgctcattttttaaatggagttatttggttttattttgctattgagttgagttccttatgtattctggatattaatcccttgtcagatggatattttgcagacattttctcccattctgtgggtggtctcttcacactgttgattatttcttttgttgtgcagaagctttttagcttgatataatctcttttgtttatttttgcttttgttgtctgtcctttttttttttttttttttttttttttgagacggagtctcgctctaccgcccaggctggagtgcagtggcacgatcttggctcactgcaacctccgccttccgggttcaagcaattctcctgcctcagcctcccgagtagctgggactacaggctcgtgccaccgcgcccagctaattttttgtatttttagtagagacagggtttcatcatgttagccagaatggtctcaatctcctgacctcgtgacctgcccaccttggcctcccaaagtgctgggattacagacctgagccaccgcacccagcccaggccaatgtcttagagcatttttccaatgctttcttctagtagtttcatagtctcaggtctcatgcttaagcctttaattcattttcagttcatttttgtatagtgtgagagatgggggtctagtttcattcttttgcatatgatggt

SEQ ID NO: 50216 - DNA, 1028 bp, Homo sapiens
gggccttaatttctgcttcatctctccggtctgctggcccttccagcccccacctagttccctttatcattctgaccataactttaacttccatctcaccgtctaccctaagagtaggaggtaactataagccagagatcattttaatattttctcctccttgtactttgaacctctggaagtagttttagtttttctgttcctgtggcacgtgggtgggagacaatctaaatggctgggtgtgtgtacttcaagaactgattagctgtgggagaggcatgagagttgtttaggccattgaatcttggactgtgggatagaggttaacagaatgtggcaattcaggaggcattaaggatctttctaggcatcagtggatgtgaatgttaaatggtatagcttatctgggaagaagttgacattggttgctggctatcagtattggaggactagcaaaaagaaacttaaaaatcctgttggagctgtttaaaagcaataaaaatttttcatctaaccaccatgcagcataattactgtaaaacccttgacatacactggtccttttgtatgcttagcttccagttttgtccaccataacacaatgtggagggattattgcttggaaacaggtatccattggatacagggaggctggcaaccaagtagtaagttcttctgcatctgtgaccattttggtcttaaaataatcttttctctgacaccctatgatatagtgtgctaatgtgggacttgggctttttaaatgtttaaggttcatgcaatacattttgaagtattttgaatggagaaaaatgttcttttgttggtttttgccttataaccatactgctggaaactcataaatctaaaaaagagtaggtagctacatgagcctgtagtagctgtttacccagtttttctgaaacattaacgtatttaatagagtcaaagtaaagactattatcacattagaatgaaggtatgcatgtatctaatccgttttttttttttcttcttagactgccaag

SEQ ID NO: 50217 - DNA, 1077 bp, Homo sapiens
ccatgctgaccaggctggtctcaaactcccaacttcaggtgatctacccgccttggccttccaaaatgctgggattacaggcgtgagccgctgtgcccagcctccaaaccttcttgatgtttcttgttagtgcctagcacactgccatcttagagcctttgctttttccctagaaatctgtgtgaattgctttctcattagtcctttaggtccttgtttacatacaatttatcagaaagattttctctgaccacctataaaatagtactctgccccttcactctgtccttcttacttgctgctttatttttctttacagcacttattgccacctgacattattagtttgttgtccattcccaccccatgaggacagagattttgatttgtttgtgactttccctggtgcctagaacaatgcctggcacacagggcttaactaagtatttattgatttaatacatgaatgaatgaatgtttagaattgtcataaatcaatatatggtttgatagaagaaataataactagtgtttgataactcagtagggtgactagtttgcaagaatctactgtacatttcaaaatagctagatgagaataattcagatgtttccagcataaagaaaaaacaaatatttaagatgatggatatcacaagtacactgatttgatctttacaaattatataaatgtatgaaattatatgtactgtgaaactgtacatgcttaatgcatcaataaaaatattgttcaaaaagaattgtaaaccatgggaaatttaataggaaaagttatttttgttcttgatacacaggtatacaacttttttcacttttgattgtggtaattattaattaattagtttgggaacttaccatggaagttcctaaatagtgtattttccctaaaaactgtcaggattaatatgttaatgtagagccagtgttcgaggtatactttatgagtctttagggaaacagttacttcagtaatatgtgatgcttgtgtgtgaactattgaaggtaaaaaggacaaccttggcaacttaggtggttttgttttggtctcagatttct

SEQ ID NO: 50218 - DNA, 1028 bp, Homo sapiens
gcctcttgacgatacgttttaaatgtaagctgttattgcttctaagttaatgcaggagctacatacgttgtgtataaaatacaaatttgaattcaaagtactttttttctggaacttttgagtgtttgaggtcttaatgaagttagtgtgagtaaaatttttttgtaagtagtctgttatttcttggagtatgaagggggtttataaatcacctagttacccatgaaatgccttggggcatgattaagttgttaatcccttcagaataggatcagaatatactaacgaatttcagtgtgtgaagaaaaggcaccgtaacattttgggactctgttgtacatcttataacccaggttcagaaaaagttaatcagaattttattttttatctattgcaagacttcagatcagggttatcaattgagatacattagtatgcagatattaggctctaaagcgtcacagtaatttgtttttagagactgataacagatacttgtttgcagatgactgaaagagtaggctctacttaactcctgtaaaacgtcattctcagttttgatgtattgtacttttttgaatgggacagaaaaaagtagtgttaaagaagcctacccatggctaatgagaaatttaaatcgctgtcaggtttagggactattataatgatatacctctctgcaccatttattgttggatttcataaaaatccaagaatatccatgagaaagtttcatgtatgtgcctatatagagctgtgggaaaaaaaatgttgaaaactgctgctatcggtggtgtaatttgcttttccataggggatttgtagaaattccttgaattgtggttgtctttttactattttaggacttggcttatgaagagaggaacatctgttttattgccgtagaataagtatgtagttatagtcccacaccctttatgtgatggttcccatatttgtatctccagcacagacctctctgatgaactccagactctatatccagatgcctacatttcagtatcttg

SEQ ID NO: 50219 - DNA, 1076 bp, Homo sapiens
tctacttcatctgtgggttccgttcagcatccaggctgggtggacttccatctagcacttagagtagctttggggatagaagcaaataggattctttcccatctcagttgcccagaagcaggctatgggatgggtatatgtgtgtgaccgggagtaggggtgatgagaaaaccttgtctcagctgaccctgtattcacctgatctatgagcataggaaggaaggaaaaaaggcctaagataatactgacataaaggatatttctaagtgaagatccctgttagcttgcttgagctatatatggactttgtcataatgtttgttcctggcttaagtcttcagccacaaaaggattggcaaagaaattgccagttacctctttcaaaaattaacatatgcaagcttaaagagctttcttaccagaagaatcagagcctaggactttaagagttaaaaaactttgatggataaatacaatgtaccagtctccctcaacccacaagaagatgctgtgtgactaaaattcagaaatataatcctagtgaaagccaaccttgcactaaaaaaagaaagaacctttcatgtcaaatttgtctcttacatgcctgtatacacaaagaggctaagagagtcccttcagccaagagagtagagtgctctgtagatgaacctgccttaaaagacaagataaattctgtgcaaattatatctactatttttacattttaattttttcataagggcagtttatgctgggtgccatattgggcatgagtgagatagctgaacaagacacagtccctcccttcaaggagggtacccgctagtccctggggtcttgggtttcccacgtgatgggtacttcaggagcacatgggagggtctcagagctcacaaaggacttcccaaagaaaagagcatcagtactgagttctgaaggattactcagccaagcaaaagagtgagtggggaaggggaagagaggatgggaggttcaggcagagggagtagtaaatcaaaaggccaggaagccagagagagtctggccctttctggaactgaaagtagttcaggaag

SEQ ID NO: 50220 - DNA, 1077 bp, Homo sapiens
gccacaaatggttctgtggttggtttgagagagtacaaatgacatggacactaacttggttttgtccatttctgtgagtcgtcttcttccctcatggtatttccaagctaccacaagagcaagaatcttatcttggccttccctttatagtatgtatgtttgcccatatggaagtttgtattcaacttaagtcaaaatgttcacttgtcttgttgaaaactggaattaataccaaaaaggcatgatctgttgttgcaatagaatccccagaagattcacagggtgcaacttaagctaaagaaaatgcatggtgatacacaggagtgctaatacaagaagttattttcaataacttcttaatacaactccttttataaggaactttttctgaggaattgaaagtcctgactggcattaggttagttcccaaggtttcagaaataactccaaaaattagaaatgtggcccaaaaaatcaagtgaatctagtcatgcatacccagattgatggcataatgtttctgacaagtatgaaatgcatttttctctgtaaatgttataacgtactctgaattgttcatttctcaatcagagattaaaagtaaacatttcaaactgctgtataatgtggaatgaatgtgagtggccacatgggttaagtttaaatggctcagttaaataaggaatcattcccttcgcattagttacattgtaccacatttttatttccaaaaacagtgtaatttctggttatgtactactacagagcagtagtttcataatggcttttttggttttatgaagggaagaaataaagcagactagttacacaaaatgtagcaactgttaagcaaatgctcaagtatactatttgaagaaatgcactgcagagccaggcacggtggtggtgcctgtaatcccagctacttaggaggctgaggcaggaagattgcttgagcccaggagttcgaggccagcctgggcaacagcaataccctgtctatacaaaataaaaataaactaaatagaaatgcacagcagtatcagcagaatgttgcttcacacaaaacgtcagtgg

SEQ ID NO: 50221 - DNA, 1031 bp, Homo sapiens
gttcttctctgatgtatatctcttttacccttactagtaataatatttattctataatagaaagattctgaggtgattgtaacatgtgaaatcttaggtttgtttctcttcagattgggtcagttagtaactcttgacacaggtactaaaaattattaaatacttttcaaacctaatctttaataaaaattaggcagttgggatcttcagcacgataatttatggtaatgtttgtcatcttatacttgatagggttttaatatcaagtcactcttctgggtctcattaaaagaaagaaaaggtatagaatgttagagataggaaagaattgattaatgaatgacacagtcatcacttaaaatatgtgagccttcgaactgcaaaatttttttcatacttctgtgaaatcatgcaagcaagtcagtatggcacctatacagctcaaacctcaaaggaaatggttgtcagactgtggttgttactgttgatgtaaatatctctgtgtttctgtgctggtgttctgtgttaatgaaccttgtgtcttatttcagagagattccccttccacttccagacagtccccagctaatggtcatagcagcactaacaattctgtttcggtaagaactttagctccacacagcaaagtgtgacaattttgttggtgctcacctgccatgagtgttctagttacatgtgttcagtggaaatagtgtcttctgctgatatacaaggctactacagctacaatgcactttactcctggaaaatctttttcaacatttccttctcattaaaaatccccttcaatagttaaatttgaagaaatatagttcaagactgctttggtcattctaaaaatatttctatgccaccccatttgtatgtatgactttgctcaaacctatgcaaaggatgtaaacggaaatttgtttaaacttctaaatattttttaatttgaaaaagataaatgtaagaattttgcagagtaggcatttgggtattcttgggctttgtagttttctattctg

SEQ ID NO: 50222 - DNA, 1043 bp, Homo sapiens
cgtatcaatgttcatcaggggtattggtctaaaattctgtttttttgttgtgtctctgccaggctttggtatcaggatgatgttggcctcataaaatgagttagaaaggattccctcttttctgttgattggaatagtttcagaaggaatggtaccagctcctctttgtacctccggtagaattcggctgtgaatccgtctggtcctggactttttttggttggtaggctattaattattgcctcaatttcacggcctgttattggtctattcagagattcaacttcttcctggtttagtcttgggagaatgtaggtgtccaggaattcatccattttttctagattttctagtttatttgcatagaggtgtttatagtattctctgatggtagtttgtatttctgtgggatcggtggtgatatcccgtttatcatttttaattgcatctatttgattcttctctcttttcttctttattagtcttgctagcggtctatcaatttttttggtcttttcagaaaaaccggctcctggattcattgatattttgaagggttttttgtgtctctatctccttcagttctgctctgatcttagttatttcatgccttccgctagcttttgaatttgtttgctcttgcttctctagttcttttaatcgtgatgctagggtgtcgattttagatctttcttgctttctcttgtgggcatttagtgctataaatttccctctacacactgctttaaatgtgtcccagagattctggtacgttgtgtctttgttctcattggtttcaaagaacatctttatttcagccttcatttcgttatttacccagtagtcaatcaggagcaagttgttcagtttccatgtagttgagcggttttgaatgagtttcttaatcctgagttctaatttgattgctctgtggtctgagagacagtttgttgtgatttttgttcttttacatttgctgaggagtgctttacttccaattatgtggtcaattttagaataagtgcagtgtggtgctgagaaga

SEQ ID NO: 50223 - DNA, 1050 bp, Homo sapiens
aacattccttcctagaaggagttgggtttgccctttcccaagatttaggtttctgtgaaaattcttccagacgtgccttggccagaaagcattctttcattttactccgtgtagacgtgccttggccagaaagcattctttcattttactctgtattcatgctattgaaagttgcttctgtcagaggaaacaaacactgtgattgaggaaatattgatgaattttaaatgacaaggaaattgccacattgacagaattttggtccatctatttaaagatgattttttgaaaagatatgcataagactcatattctgacaagtttcacagaacaattcagaggttattaccaagaggatcccactgaaatcatcagcctgcctttttaaaagaaaaatattgtttagtgaaataataaatatgaagctctgatttttagcaaagaattgtgagtgtttactggattttcttctttgctttttagctgtatgacaaaattaacacaaagtcttcaccacaaatcaggaatcctccaagcgatgcagtacagagagccaaagaggtaagtgatatattttatagaagtatttggcatcatcatatttgccacctttattgaagacatttctgttgcacattaagaggcagtttccctggagtcacaatttgactcattatattcagatttagtatttctaagtttattactgaacatacagaaaagaaaaaagatctctgcagcaatattgcctagatttctagttctggttctgcgatgtaaacttgaatacattaccatcaattttacttctctttttctgttttttaaaaaagcaagttattttacaacacttggtggaaatagacatgctataaaaatttgagttgctttttgaaggtggtaatgtttgaaagttaattaaatttctgtagcaattaaatatactgagttcaaagaagtcatttttgtaaattgtcaaggtatgtggctatatctgtcacaaacttttaaaaacctatttatgatagaaatacaacattgcagaaagtt

SEQ ID NO: 50224 - DNA, 1505 bp, Homo sapiens
cagaagttgtcagtggtgaaaccaggattctaattcagcctaccactaccctttgattttgcactagatcctatccctttttatttgaccacattgacccaacaacttcctcccttcctgcatcatcagagttctctctctgttggatctaacatgctataggttatttgtattatgcacactcttatatagacataataccttctcctgaccctacaaccccctccaggttttgcccctattctttgcttcccttgacagcaactcctgaaaagagttgtatagactactcacattgtccagtttcccattcctttcccatgaacccagtctagtcaatatcacaatcttatttattccactaaaacagctctggtcaagtcactactgaccttcatgttgctaagtccagtgttcaaatcccagggcttcttcttggcctgtcagcaacatttgacatccatccttctgaaacactgtcttctctgggcttctggaacacctgctctcttggttgtccttctacctcctggctgctccttctcagatcctactgattcttcctcatctcccctctcccacctcttcacactggaatgccataggcctccatccttgctcctcctctttttctctgttgaagctgaaaaaactcaaactgctctcacaccacacagcaacaatcaatacagaagacttctgtgaccagaagtgtggagatttcttcccaccaacaagcaagcaatcaactctgcagcagactgcagctgggtgtcctcccaactaaattcaaacactatctacctggagatagcatcagatcccacagattgagggctcagtcccacaaccctcacctcttcagacaccagtcataagtccaggccgctgaaacttctgccaaccaactacaaattggggacaccacagcctcttcctctttggggttggttaatttgctacagcagctcacagaattcagggaaacatttacttatgtttaccggtttgttacaagagatattacaaagaatatagataaagagatgcacaggacaagttacaggagaggaggggagcagagcttccataccctccccaggcacaacaccttccaggaacctccatgtgtacagctattcaaaagctccccaaatcctgtccttttggggttttatggaggccttattactataggcatgattgattaaaccatcggccattggtgatcaacttaacctttggtacctctcccctacccagagattgaggggtggggctgaaagtcccaaccctctaatcctgcctgggtctttgtgaccccatcctgaagctgcctagaggctgccagccatcagacatctttggcgtttctaaggattttaggagttgtatgccaggaaatgagctagaggaccaaatatatatttcacagtatacctctggtcttcaaacctggattccttacattaaaaaaatataggccaatgtggtgaaaccccatc

SEQ ID NO: 50225 - DNA, 1034 bp, Homo sapiens
gaatcagccactgtgcttatctagattgcaggcaacaatgctagtctagcaagtgctgccccctcagtccactcccattcatgttagaaataaattttcggtgccacaaagaagaatcaaatcagcactcccgcaaaaagttttctcagcaaggcaaattaacttccatagaagcgtgcgtctcgcgggtggagcaatggcgagagcacacagaacaaaggaaagcaggggtttttattcctaatgcaatgagtttctactactgtgtcctgtctccattggatggagctggaccacacaatcgaaactggtcttggttggctaatttgaagtgtgcagggagggggttacactggcgggaagggcagttttgggggtaagagctgttatggcaggaggggtaatttgcagagtgagtgactaagggcaacgagcaagaaacagctgtggactatagactggcgggaaggttgtttacttcagtcaggggcaaggagacatgaagaacaaggaagttgagattgagaacaaagaacaagggagttaacatgccaaacttttgaagagaaactgattgtatctgacattcagatagagtaaggttccataggcacagcagaacgagtgggctgtttttaccaccagggagtatagctgcatttattgttagccccaattttgccagatgggataaggcacaagccaccccttaggagtccaccccacaatcagacccttaggaattctgactcaaagtttaaaaacatagttacagtttcttacttaggaattgcccctgcttccagcacttgtagttgcagccctggtcctaggaccaatgcatcaggtaggggaaatgtaaaaaaaaagttgaggtgatgtgggaaagaaaaataaagagtgatcattataccagtgtactcctcccttagcaagaaatgcatagtcataccagcatccttccacacctcctcttcccggatacctcagaaaagcggagaaatctattgagtggggaaattcccttagcccca

SEQ ID NO: 50226 - DNA, 1040 bp, Homo sapiens
tctgtagtaacccaatacaaatattggtgcaaactcgtttgtaaaattgtttgtggatggcttatttgcaatccatctttatcaaaaatagaaacaaaactcaaagttttcttataacttactagaatcaaatattatagagctaaaatagaacttcatgatcatctgtggactgagaccctttgttttaaagttgaagaagctgaggcccagaggaactcactgtaagcacagactgcacccagggttgggtcccagtttggttactaatgagttaacccactctgtttctaattgccctgcactatctccatttgtcaacataatacactgtttggggcatttcataatggatttggcaaatcctgggaagtgccaagtatgcctcagatcaaatgaatagttataaagaattgtgaaaccatgactagtctaaaacaataaaaattttaaaaataaaaaatagaattgtgaaaccaatttttttgttcaggattgtcgaatcagtctgtgacctactaactaaatgaaagctaagtgtgtacatctggggaggaagacttgcatcaagcactccctctcatccttgagtagttaaaccagtgggagtctgaaaaagagaacagaaatctaatttcatcaaacctgagcattttagttatcagtaaatcttcacttaaaatttacagaagtaccttgccatttctcataaacccgcaatgcttaccttatttcatgtttatttcataaattctctatgatgtttgctaatatttctctccaaaacaaaagtgagaactgcctaaagtgtccagattgtgttctgctgctgttcatctttgccttgccaccatttacttaagaacagtgactcatccagggttacatggccgttcattacagagtagtttggcttttagaattcccatcacttttacttcagtaatgtatcatgttccaggaaggaattacatagaacaaaaaacagttttaattaatttagagaagaacagaaatggaatgctatttctaagtgattg

SEQ ID NO: 50227 - DNA, 1031 bp, Homo sapiens
ctttgtctgaaaaacaaaatttgatgtgaatagttacatgcctgggatttataattttacttagagaaatgtatagttcttagattgtaaaacaatttgtaagtgatgattgatttttcctagaaatataatttaaaaaattttaaggcacatgtaaccaattcatgttggccaaagtattacagaagtattttgcggccacaataatagagagttgactggtttttaattaccacattacttatatatagttttcaaaatggtgtctttttgtggctaggctaaaacactcctttataacctaatactattagaagagtctcttttcatatttcagaagttaactcagttctacatgaacaaaaattcaggcaagatcctgaattgaacagaagtatagcaaccaaggacagactccaaaatcccagggtcattaccaaagaatatttaaaatgtcctttcaaatatttaatgttaaactgtcatacttcaataaaagtttacacatgtatgtcaaaactgtagttacagccagatgtggtggctctgcacctgtagtctcagcactttgggaggctaaggtgggaggaatgcttgagaccaggatttcaagaacaccctggacaacatagcgagaccctgtctctataaaaaatacaaaaactagaccgggtatgttggctcatgcctgttatcccagcactttgggaggccaaggccagcctgggcaacatggtgaaaccatgtctctacagaaaaattagccaggcatcctggcatgtgcctggagtcccagctacttgggaggctgaggtttgaggatcagttgagcctaggagttcaaggctgcagtgagctatgatcattctactgcactccaggctgggtaacagaaagagaccctgtctcaaaaacaaacaaaaaaaaactgtagctgctatgcttgttggttagagtgtccttgtgtgtaatttgctatctgagtttttcagaggattttttttaaaggatatgatgttttaatcacaaca

SEQ ID NO: 50228 - DNA, 1044 bp, Homo sapiens
ttcaagtgattctcctgcctcagcctcccaagtagctgggattacaggatgcgccaccatgcccggctaatttttgtatttcttttaatagagatggggtttcaccatgttggccaggctgatcttgaactcctgacctcaagtgatccgcacgcctcaacctcccaaagtgcttggattgtaggcatgaactacctactgttcctagcctaggatttatgaaaactttttatcatttgaaaaacagttatattaaatgatttcctctgtcttaccatttcttttacaattatagcatcttagacaaacatagctggaaacaacttggagaccaccttaatacagctttgagctcagcatgacttgaatgtcttcaaattcattgccctgactccttctggctgaagagcaagggacctagtctcagggatggagcagccatggctatggcacaaaataaagaatatgctcaatgtgtggtcgctgtgtttttgtactgctggggctagggcgaaggagcaaatgaaagtttatgtgtgttctttaggcttctgatctatacgcggtagaactaaagctaaatattctcttttcttttgtgcaatgttctctaaagcacattccagggtttttttaaatcccatcttctattattttgagtttttattacaattttaaatttttattctttcttgtccctcaaaattttaaagcattctttcataccaaaaatagtcaatactagtgaaactcaatggaagaaggggatttttcccttcttgaaccacaataacacggggatacctggcaggtatgctgacaggattgatgtgaaaccagtaccacttttactctggtccccagtcatctttattgcttttccttaacttcaagcctatctctgccactgggctacatgtcaggataagcaggatggtagtgtgaagagatgatgtcatacaatgacatgacttgtggtctctcctaatcttgagatttatagaaaaggtagatgtttatacacatcaaaatgaaagcctattg

SEQ ID NO: 50229 - DNA, 1050 bp, Homo sapiens
ttgattgtacatacctgtgtgggtatgtttcaaaactctatattgtttcatagacttattgatctgtctttagggtaataccacactatcttgattactgtaattttatgtgtctttggattttttaaaaaatagagacagggtatctctctgttgcccaggctggagtgcagtggggtgatctcagctcactgtaaccttgacccctcgggttcaatcaatcctcccacctcagcctcccgagtagctggaactacaggcgtgcaccatcacacctggccaatttttgtatgttttgtagagatgggatttcaccatgttgcccaggctggtcttgaactcctgggctcaaacaatccacccacctcagcctcccaaagtgctgggattacaagtgtgagccactgcacccagccctgtagttttatacgtcttgaaatcaggtgtcagtgtcccaactttgttctactttatcaaaattgtttgcacttttctaggtccttttcgtatgaattttagaattagtttgtccatttcagcaaacacacacacacacacacacacacacacacacacacacacacacacacagaaggcctcctgggatttttattgggattatgttgaatacaggtagtcctcaccttgcatggcactatgttaaatgaaacgtgcatattgaaaccaaggcctcaccatgcacagttccaatattcatgtttcagttaacacagtactagcactgtgcaaagtaagtatggcctatatgtagaataatttgggggagaactgacatattaatgatactgagtcttccaacccatcaacccaatatcattcttttatttgtatctctcatatatctctcagcagcattttatagtttttagtataaatgttttttcaacgttttgtaagaatttttctctgtatttcatatatttgatgctattacaaaatttttctagtttcaatatcctttttttaacttctggaatatataaatacaactgatatacaattgtatatcagtcttgtattctacagtct

SEQ ID NO: 50230 - DNA, 1069 bp, Homo sapiens
cagacagctccattgggcccctaccttcaacattggggatcaatcttcaacatgaggtttcaggggacaaacatcccaactatagcaacccctcttgcaataccatctttaattggcctgactcagagatcacccagtgcaaaaaaagtttcctctgggggcatttgccaaaaacctttagaggtagttgtttaatttcattgctgcctgaggcatagataacagctgggcaaacaaaaagctaacctaaaagcttaaaacaaaaagctagctaatgagatgcccatagaggctttgaaaaagctacaacgtattctctagaaaatactatgttaagaaggccatgcacatatataaggctatgaacaagctcaggaaaaatctaagaaggccttaatttctcacctctagctgactttcaggctacataaacaggaattgaatgataaggtagaaatgtgaactccctgactgagtgttgaaggtatgccctacacatccacaaaacccttgagcaaagactaaactaaataagcagagacttaagtggccacacataaaaaagaatacagactgcagaatgtgttcccccaaaaaatcactaagcaaagagcaggagtaacaataaacagcaacaataaatcctgcagaaaaggagattctgatttttagagttgacacataatattatttaagacactcagttttcaacaaaaaattatgaggcatgcaaagaaacaagaaaatatagctcacactttggggggaaaagcaatccatagaaactgttcctgagcaaacccagatgttggacttactagaaaaagagttaccaaatggaaagtatcaataatgagatagaaactataaaaaacaaaaagagaaaatcaaatcaaaattctggaattgaaaaatacagtaactaaagaggctcagcagcagatatgagcaggcagaataaagaatcggaaccagaagacatgaagataggttcattataattatctggtcttcagaactgaaagataaaagaatgagcaaaatgagcagagcctcagagacctctggg

SEQ ID NO: 50231 - DNA, 1047 bp, Homo sapiens
gctcactccttcattactttgccattgctttggctatataaatgtcttcaagtcctattctgaagacaaagccacccattctattgatccctcatactcttaagcctccttgaacttaatagaatcatgtactcttttcatatccttcctatatggtaggaccacagcgtatagatattaaatgacatccagttggatttgggatattactcatgactttatctgattttggtcggagtttagtggtattcaagtgaaaatatgcaattggccctttatgtttatggcaccagaattaagtttttccatcttctttagcacagcgactcagtataaagttaggaaacaatcaaaattccatctccaccacctctacctttttttcttgcgatgggattcccatgccctctgttgctcatgttcacacaagctttcttgattctgacttggacacattttattataagatgtataatatatgtaataaatagtaaattatttcattatataaagtctctgtgaacagtgcttcccctccctcaacttctttcaacccttttccagtcactatgggcaacacatcttaactcctctgctcttctggtccatttacaaattgttagggtccaaaaatgacctcattcatggcttagcatagaaggagatgctacataagaagacacatattttgaagtaaaatttaacacagtaaaaaggaatccataagttcaaataatatctagaaatatctatatttaccgttacattctttcccaaataaacttatctcttaagcaacagataatttaaaatctattttattctttattctttcctttttgtttcattttattattttatttttggcttagtggtttgtttgctctttgttaattacctcaatattttttcttgttttcctagtgtacttgtattcaaatacattattgagtgaaataggtctttaaagggttatctaagaacctaccatatgctatttatttggataggtcattataatacaaatgataaataaaaagagcccct

SEQ ID NO: 50232 - DNA, 1027 bp, Homo sapiens
aaaaaaacaaaacaaaaaacctgccaaccatgtattatatacctggaaaggctgtttttcagaaatgaagtagagataaagacttccctgtgggagttcatgtcccactagacctactttacaagaaatgctaaagggagttcttcaagttgaaacaaaaggactctaacaacacgaaaacatatgaaagtgtaaaactcactataaaagtaagaatatagttaaattcaaaatactctaatgctgtaatgatggtgcataaatctctcttaattctattataaaagttaaagacaaatattaaaaatgactatagttgcaataatttgttgatatgcaatatatacaagctgtaaattgtgacatcaataatagtggggcagaggagaaaaagtgtcgtacttttatatgtggttgaagttatcaatgtaagatattttataattataagatggtttatgtacacctcatggcacaaagaaaaaatctgtagtagattcacaaaagataaaggaatcaaagcattctcttacagagaaatcatcaaatcagaaaggaagggacaagagaggaagagtggaacaaaggaactacaaaacagaaaacaaggtatcagtagtgagtttttacccatcaataattactttaaatggcttaaattcttcaatcagaagacacagaatgaatgactggataaaaagaaataagactcaaccatatgctacctacaagaaactcactttagttttaaggacacacataggctggaagtgaagtggaaaaagatattctgtgcaaatggtaaccaaaagaaatagaggtggctatatttatataaaacaagatagactattaagtcaaaaactgtcacaagagacaaaaaggataattttataatgataaggggtcaattcatccagacgatacaacaattataaaatatatatgcacccaacatcagaacatttacatatataaagcaaatattaatagaagtgaagagagaagtagatagcaatacaataat

SEQ ID NO: 50233 - DNA, 1040 bp, Homo sapiens
tgtcctgccctcatgtgcataggaggctggggcagccccaagagctagaggtaagctttaataatttccctgggttccttggcagctggctgtgcttaggagccgggtgctacttccagagtagcaactgctgtagaaaagttctgccaaatgtgtagattttgaaccattttaaaggctatagtgttcagactcaaattttttagtaggcagagagtattatttaagggtacttatgctgcagtattggataaggttcgttgtgaaatagatactacaacaaggcctccatgtgacataaacttattggaacttgtgtacttttaaaaccatatgtttaatacatattttgagcttcattaggtcaggattcttggctatcatagtcattgttgtatctctacaacctagagtagtgtctggtacatagtagatgttcagtatatagttgaatcagttcaaacaaggggaagaagtgactgaacacattagaaaaggtaaaatttatggcctataatgcacaaagtcagaagttcatattttcttttagtgctaatatcttgctgcttcaaaaccatttagttctcataatgttcttttgaaataggttagtagacatagaattgtatagtatatgccgaacatagtagtggaatcctgaataatacctggtttccctagttgagatctgtaagaccaatgctctaattagatgaagaaaagaagtttctaaggttgaaatggaatggagaattttatagtgagtggaattactaatgactggcttacttgatctatctaaaacgatttcattgcttgtaaaatggagacagtagactttaactgatagtattgtttgaagattaaataagatagtgagtatgaagtccttggagacttgcaggtgtgcagtgagcatgaattgttttcaacatcaacagtaatttttgagagcttcctaatcagtcacctagctagtcccacccagccttaggcaaagcgaaggggccataggccaaatcctgccgtctgctttatat

SEQ ID NO: 50234 - DNA, 1050 bp, Homo sapiens
cttcttaaaaatactctttttaagttttatgtgttgtaaatagcatctcctagtccacagatttatttttcactttattttttggtgcattttatagtccagaagtatgtaactttagtacagttgaatttattgaccttttcctttagagtttgtgccttttatattttaagaaatcctgaccgagcaggaacccacatccaggaacagagccctttgctcctccctcagaatgaatggagaccagaaatcagatgtttatgcccaagaaaagcaggatttcgttcagcacttcccccagatcattagggtgctgagtgaggatgagatggggcactcagagacaggagatgctgttgaccggctcaaggaggtcctggagtacaatgccattggaggcaagtatcaccaggatttgatggtgctagtagcattctgggagctggtggagccgaggaaacaggatgctgatagtctccagcaggccctgaccgtgggctggtgtgtggaactgctgcaagctttcttcctggtggcagatgacatcatggattcatccgtctcccgccggggacagatctggtggtatcagaagccgggcatgggtttggatgccatcaatgatgctatgcttctggaagtatgtatctaccacctgctgaagctctattgcccagagcagccctattttttcttttttttctttctttcttttttttttttttttttttgagacagagtttcactcttgttgcccaggctgtagtgcaatggtggaatcttggctcaccacaacctctgcctcccaggttcaagtgattctcctgcctcagcctcccgagtagctgggattacaggcatatgccaccacactcggctaattttgtatttttagtagaggcggggtttctccatgttggtcaggctggtcttgaactcccaacctcaggtgatccacccacctcagccttccaaagtgctaggattacaggtgtgagccaccgcacccagcctggagcagccctattacctggacctaatcgagctctt

SEQ ID NO: 50235 - DNA, 1072 bp, Homo sapiens
gccccattcttggtttaatgctttgctgtcactgtctggaaattcttaattttttaacaagaggccccacattctcattttacatgtaattttcttgcaaattatgtagtgggttctgcccaaaactttaggaagaggtcaactacttgaaggtcttaaagaagtctgtgctgggaactatattttgttgtgtatcacattagtaaataagaggtacaaaaagtgaaatcaaactatgtgtacattaatctgtcctccagctacagacttgagatggtgattctgcctcgatttccctgggcacatgatggatccaagcgtaaccagctcacttacctgtggacagagaaaagagaaaccttgttttatttgagggtaaagagaataaaaaatacagagctaggggaagaacgtagcattcagaaacattagaggaaatgagaactcttcttcaccagggcccagaaaaaaattttggaaacccgttagcagtcctaaggtttccttctgtaaatggaaggaagaggtggggactgagatgaaaattcaacagaatgaaatgagaaacagacagggtaaggaaaattagcagtactccccaacagtaggaacaaaattaaagtacacattggagatagtaaagagcaatattcatacagcaaaaaaaaaatttgaatttgatgtcaagagcaaagctgatgctaagaaattgaatggaatgtgaaggacaaagacaaacaaagagagagaagatgatagctgtggaaaaagaagaatggagaatctggagaaccgacatatggataatttgtgttcctaaaaaaggaacgaaggcaaatggaagagaagtaatgaaagtaactgaaacagaaaagttttcccttttttttttttttttatgagatggagtctcgctctattttgcaggctggagtgcagtgtcgcaatcttggctcactgcaacctctgcctcctgggttcaagcgattcttctgcctcagcctcccaagtagctgggaatacaggtgcccgccaccatgccaggctaatttttttttgtatttttagtaga

SEQ ID NO: 50236 - DNA, 1049 bp, Homo sapiens
attgaagtataattgataaagaactgcacatatttcatgtggaaaatttcatgagtttggatatatgcaaacacctgtgataccatcaccataatcaaggtaatggatgtattcaacatctctcaaagtttcattgtatccctttggttttgtgtctgtgtttgtgtatatgttaagaatcacttaacatgagatatacactgtgggtggcagtttttgttcacttctaaagtaaactctgacttcattagaatagtggactggcttatgctctgtcaaatccctaaacatgattgtgatagaatttgactctattcctatttagttacagaaaactactggtgcatgaacaaaaatatgtgaaatatcatggatggggtttggggggacatgtggggccagactttgtgaggttatagaaaatcatggaactggaaagcatctggaagttcttttactcaaagaagcatagattctttcacatttgtgttaaaaacagtgaattagacaattttgacttggtaaagttagcattctggcaatgctgtgaaatcgttcatctctcttcatttacttccacatatagtccctagggtcaaaatttctttctaaaaatgataatttctaaagtcagagatgctttttgggggcaaaatagaattgtccaggtaatcagtttaaaagacagagtaattctactcttccttcagtagaatgacgcacgaagcagcatttctttcatttccagtagaactttgatgcgaatgtgacttttatctctctcagtgtagctttaaacatcaatgggtttctttacttcttggtttggtgtataggttgcccctgttctaaccgtgtggagtgtaagctcttcaaattctaggttaacatttcaagaaatggtctttatcccagttcaaagcaggccttccaacagcaggtggcaggcttaacttttaatagtctttccctccctttaaactctttctcatacctcaaataaatggtctttagccagaatgtatgggagtttttgtttattattattt

SEQ ID NO: 50237 - DNA, 1023 bp, Homo sapiens
cactgtgtgtgtgtgtgtgtttgtgtttgttgttttttgaaatgtatcagtataggtgtcaggcattttactgtctattcactcacatttctttatttgacaaatatttactaaaaggtgactatgatctagtgtactatgctggtacctggggaatctcaaaattatgggactgattcttaccctcaaagagcacatattctcacagggagacacatttctaaacaaattgaagagcaatgtgtcttgtgtttctggctgagaccacagactcagtgatctgggaaccagcccccagtagtatgcagctaactttccagaggaatccaggaaggtcccttagcatcctataagagagctgggccttgcagggagggaagtgcttgtcaggcagtgttcagaagccgaattttgctcctccatcagtccatctgaggagagggaaacttgatgggaagattcaaggaagacgacacaaagaattttgtaccataagaacattgtatgacaaaagaagttctgtacagtgccaaaagcagaggcttggtagagatctgattataaatgaaggttgcaatggtagacatgtgcgatgttgatgcctttagaaaatagcacaaggcttaaaaatgagaccaaatccacagaaaggcctcggtaatagtatagagtagtaatgggttaattgtcactaaataagtctctaagtcatgaattcttgagagaactgactggtttttctactattcacaagctcagagaagttactttattttgacgtccttcttttgtttttacttatcattgatggaatgcaaattattttcctctttcttttatttaaaaacgacaagaattcctcaccatcgttgcacactgctgacattgtatgtagagaatgccttagggttttcttccagagtgtggggagagggacaaagagagatatatatgtacatggatttagggcaattaatttctgaaacttgtccataaaaagactgtttgttacttaggttaaaa

SEQ ID NO: 50238 - DNA, 1015 bp, Homo sapiens
aaggatgacaatcaaagggagccctatttttttgttttgtttttcatcaaatcctcgaatttattccatccctaattccgtggtccttcatggcattcataggggcagctgtgaagaaaagtggtaatgtacctgacgactctctcctgtcggtgtcagggttgcatttactattactgatcccagtaataggatgagtttgatctctcagcatgaaaagaatgaccatattagggatttgtttgttctccagactacagaaagtttgataaccagagtaggacttactggagagataatgtcagaatgaatagagactgtctgtgagaaatttgaacgggctcagtgctgttacctactagctagaaatgggaagcaaggggatgaatgtgaggttgggggcattgagtcaagaagaagatcaggcaattctggagctaggtaaattgggatcattcctggcttgtcacatctacgtgggacatttagactatccacgggctggataccttaggaaagttccttctggctctgggactcactgctctttcagcattgccaatttacatctagtgtgttcttgttagaagtggaaggctcctcttcatttttgagctccttgcgccctgtcattttctctgtatgagagggttttgctattcctttttgagtgaaaacgactcccatagcatattgccattcacactccaccaggtctccccttcacacacacacacacacacacacacacacacacacacaccattctcttgtcctccctgagccagtcctttcaaggttatatcatcctttagtgccaagtacctcccctgacctctttcttcactcatagaaagaggaaccagatttcccctgtgtgactgccatcaatacaaacagcagttttgtttctgttatttcccctttcaacctagtgataaagtttgctgctgctgctctccccaccccgcacaggaagaaagacttccttccttcatctcttgactttgcccag

SEQ ID NO: 50239 - DNA, 1084 bp, Homo sapiens
ccatactccaaaagaccttcccttatttgctatgcatgggtagcagggagattatagagaaactgttctttttcctgctttctttttttactgctgggggagtgatcactttcctacagctcttgtccacctggcccttgaggcgtttggagttttggtaaggtgttaacaaaaattgtctcaggtgccaactaaatttcataagcttatagcagcacaacagactaagacaccacatgggaaatgtacattttacaaaaatatattatacatctaccatgtctaccatgtgccttagaaagttctgggtctggtaatacagcagtgaataaagtccccgctcacatggagggggtaggctgatggtgatggaactcataagtatacggcaggtgttagtaaacactgcggagaaaaataaagctgtgtcagagagagagtacctggggatcaggggtagagcgacgttaaccagggctaataggaaggcctctttgatgttattaggccagtgaggaatcagctgtgggagtgtctggaggaagaggattccaggcagagaaaataaaaaagtaactgcagtagagacgggagcaggctttgtgtgtccaagagacacatcatggcagatcaggtaggactctgttggccacagtaagaagctgtttggaaggtaggaaatgataactagagagagtgaagatggtattctgagagtctatgtgatttattgtagggatcccggagagtcgagccccttgtgcctcataactggagtgtttacaagccgtgtaaggccttcttgcagtaaaatgctacttttgtaatttaaattattatgctatgaaaaccttagcaaagatagataaagttgaactatttgaagcacaattacagctaaaaagcgcaaagtgggcaattcttcctatcacatctactcctcagagagatgtggggtacctgaatgtctaactgtggaatgttttgatttgatttaaatttgccaaaaactcatcttccataaggcatatctttgctgatttttgcactcagtaacaagcagtttagaattttgaactgaagg

SEQ ID NO: 50240 - DNA, 1044 bp, Homo sapiens
tatattattaactataaacaatgtggttatgtaaatgcatcattttagttgatcttttttctttagcctagttctttttttcttttcttttctctctcttttttttttttttttttttttttttgagacagagtcttgcactgtcacccggcctggagtgcaatggtgtgaccttggctcactgaaacctccacctcctgggttcacgtgattctcctgcctcagcctcccgagtagctgggattacaggcacacactgccacgcccggctaatttttttttattttttatttatttattttttatttttagtagagacggggtttcactatgttgaccaggctggtcttgaactcctgaccttgtgatctgcccgcctcagcctcccaaagtgctaggattacaggtgtgagccaccgcgcctggcctagactaattcttaaaggaacagattagatacatacaaaagttgaatttagtatgcttttgtaagttaatataatgattgggacattttgttttcttagctatgctttataacaaaatagttctagttactttcttttaaatggttactaaagtaataacttgctttttaaaaacatagtataactatttaaggtagactatgaagagtaggctgaggtttcattttaaattatctcctctttctgccatggaagagtttaattcccctgatgtgcttatggtattgaaagcccattgttggtgttggtattgaaagaaagcttagtttttctgcgtttcctaaaaggagagggaagaaagatttttaaaagtgaaaatccattgatttttttttttcttgattaggatttgtataatatatctgaagtgagactagagttcttaaagttgagagaaacagtaaatatgtacacgcccggcaaaactttgcagggaacattcagagttcggattacctgaaaaaaatcttgaaagcttcagacattttccagagagtgttagtgcgtgaaagtggtacccatgaccccaagagggtgtccattcacagcctccatt

SEQ ID NO: 50241 - DNA, 1073 bp, Homo sapiens
gtcaatagaagtaatcatgtgatgtctacttatagaagcaaatggaaaaaatttttcttctttaactgctaacaagtatataggcaattttagcaatcttcatttattaatttgaatatataattataactgttattaacagaataagttttgggtaatataggaaataataattatttctttctttttaagccaaattggaagttgaatctacttttggttcctgttctgttactttcaaaatcttaaaatccttaactcaaaagggaaaatgtataataaaacaggatagcagtgctgaaatttctctctcttagcagtggagtgggatgagggtgggggagggagatgaatctagtgagatatattaattgttttttccccctcttgtatacttggataacttttgagatcagttttctcagactagcagctctcaagacttttgcataagtatttattcttaaagaaatagaaagacaagataagcacggctcttaagggcaggtcctccaataagtcaggaaacgggtgatccaaacttgtgaacatgacaagtcaatttgacttaattaaggaatggcattagttttcttgaagcacatgaatttataggtttttagagtcttgaagacagaaaaatggcaacaaagcattaaggtatttacagataatttatattcaactgctagcttatgttttcaactctgtatttcatgtaagtaaatacttggggagaacatgatgatttaataatctggataaatactgccgtgcctgttggaaaaaagcctctaatttttaggttttcctcatccatttaaaatccattgttttgaatgacaaaatgtgatagaaacaggttggaacagtaaatgctagaaagtatatcccagaagaattaactgagaacttcatgttttcaattctatttgccgttctctgttctcaatttgttaatttttaaaagtacatcgaaagtgagtagcattgcttgctctgaattctcctctggggtcattgagagtattcacattttcgtataccctgttaaaagatattaatgccatgca

SEQ ID NO: 50242 - DNA, 1033 bp, Homo sapiens
ggtttgtaaactcagcgtctgctttgggattattttttaatatgtgccagacattcttctgattttcatcctggcttggttgtggctctttctctgtctgtgtgaggctggggtgttccctgttttaaagccgtagttgtcgcagcctgggcgttttctgtttcggcttatggctttttttctcttttcctgaatgagtgtcctttgtgtaaccccagtaattcagaaatcctgcagtcatagggactgccctatcatgtgacttaggtactaggtgctggctgcgattggtcagcagctaattggcgggtccctataagaggtcttgggtcgggcgtccggccactctcctgcctgggctgctgctcaacgggggctgggggtgtgtggggcgggggtggtctgtccagtgattcagccacatgtgatagatgaccaagtgactgctttcttggagtccgcacaccagtggaagactctcaaagtggttgtgaccgacttgatcaaactctaggcttcctgaactggtaactgtcactttaatataggttactgattaaactcagaaaaatgcagcttaaaatctttgccaggaacttgtgtggacttattccctgttcccccccccaccccccttgttctgatttgttttgtcacaggaatgaaatgcagataactctttagaaaacttttgtaggaaaagcgcctcgtgtgatctggaacaaagacgttttataatcagatttatcaagctgcgaagagggagttttagtgaacggaagcagcagcattctgtcaccaggaaatactcctttatccagaattggtaagtgaaaagtggcattgctccctaatagatatcatatgcgtgtgtgggaattgaaaaattgttcacagacccctaacaactgtgttgaacagagaacacataaacagtgaggagttctaaaaaagagcagcacgagaataccgcataaagactgagaagaagccaggtaattaacaaaaatgagctgagtgctatcagtttagc

SEQ ID NO: 50243 - DNA, 1072 bp, Homo sapiens
aactgatcttcccatctcagcttcccaagtaactgagactacaggcgcacaccactgtgcctggctaatttttttattttattttattttattttattttattttgtagagatgaggtctcactatgttgcccaggctgttctccaactcctgggcttaagcaatcctctcacctcggcttcccaaagtgttgggattataggcgtgagccactgcactcggccacaagattgttttttgtttctctcctgaggaactgtaaggttagtactgaaggtgacagctcacccttagagagctgatggtggtagcagacatattgaggcagcagtctctgttccttgcttgtattttttcgcttattcccattcttcagatgaagtgaaagccttagagaaatgaagggactcttctatgtccccacaggtaatagcctcagagacagtattacaacccaggctgtttgtctttaccctgacttgtaactttggtttctgggagcctgacacagttggatcgtttggtattttagaacttacccaagacaggagtggcggtggacaggaagctccatgctggagctccaaaccagccttgaactgaactgttgaatcaggtctgtgtgcatcttcaaactgggctgcgacatggaggggaacagaatggagccttcccccatcactcatttgtaatcccaaccaccctctcttcattttgctggcttttcccccattatgttaccatctgtctccaaaacattgcctgggtaaagacaaactggagcagttgctcgccctcaaacaaaacacagaactacttctcctcactcccattcccccccacactagtgccgagcaccatatttgaggaattccatatttataaagcttgcctgcacctcgatgatgtctgcttgctgtcctttttattattcttcaaatatgttatgtgctgactggaaacgattagcttttgttactgaggggtttgtgggatgcttgaaacagcttcatatagttctcagatggaaatgcatgctgtttgctcctttaagaaatgcaatttcttaatg

SEQ ID NO: 50244 - DNA, 1111 bp, Homo sapiens
caatcatgacctcttccttgaaagcatttttttttcacttggctccttgatgccacacttggtcctttgcctacccagagggtgatccatgccaatcttctttgctgatcctcctggcattgcttcagcctcttcatattcaagtgcctcaggcctccacaacttctgtaactgtcctcactcccaaattatctagtcccttgacattaaatgtcacttaaacactgacgattttatcttggaactctgctcaatttcaaccgttttttctacctctctgcttggatatctgattggcatctcaagcctagcatgtccaaagcttaacttcatttccttctacacactttctcacccctgccatacccaatctgccccatcttggtaaatgtcagtgccatttttaaaattgcaaaatcctagtgctgctattgacctctgtctttagcttctacttcacatcagcaaatcatgtctgctcttcttttaaaatatatctgaaatctgaccacttataatctccactgctaccacctagttcaggcagctgtcatgtcttatctggaggtgatcagttgggtgccctgttccactcttgcctttcgaatcaccctggaaagattcttagatctctcccaatctactcatgtgggtttccatttctctcggagtaaagaccatagcccttgtaaagacaatggcctagaaagtcctatgtgatctgctctcccatctctaccaaacccagtcagtctcatatccctcttcattctcccttgatcattttgctgtggtgacactggcttctttactgtctcttttacaagttttctctgccttgccctctcatttgttgcctagatatttatgaaacctactacttctcttcctttagatctttgtttaaatgcctacttgatcagagaggctttctttcactgatcaccctaaacaaaataagttgctcctaaccctgctcccacccccatgtcccaggattgcctgccttctctatcctgcttgagcactcatcaccgggagcatattatgtagttatttggttatatttccttcctctttagactggacagggaatttgtctcttgttctt

SEQ ID NO: 50245 - DNA, 1050 bp, Homo sapiens
ggtgggattttaccatgttggccaggctggtctcgaactcctgacttcaagtgatccacccacctcggccttccaaagtgctgggattacaaatatatatattttaaaggcagcagaaatagacaaaactcaatcttatttcaggactacagttggtgttcttaaaaggtcagaggaagagctgaatatatctagaggtcaagtacagcagcctgcagggtatggggccagttcaggatggagtgtagaagcagtatttgaggaagggcacagatagaaattcctgatccagctagatttggctctcataaaccctccagtgaagggccgtttcctgtgaagcctgtctcttgctcattgctgtcagccccatttcctctaaaagttggcccacaccttccattgtcctttatggcctctggatacagcaccatctccacacaacacatctgttgcgttctctcagcaagatgatcaagaatttctttacttacttcggcaagtataggatctgctcatttctgggacactttggtttttgccctgaacatctgattaagtatctctcttcagtggttgggtgcctgcagccatctctgtattaccttttgagagttgttttcattctgatgtacaggatccacctcactctgttcatctccgaactaccgacctctccaacctcacatttgactttctgtaaactccagctggagctgctgagagcagagacttgggatatatctcaaaaacctcaagaatacattttgatgtgagagtgccaaagatggtcctagcaaccccaggagtaggaaggcatcactttcagttctgataaggaccaagattctgaagggcagaagatgagaactcaggtcttatcacctttccgaaggtggagatagatgtagcgccccttgccatcctgatatggaagtatgcatataccccctctcccccatttactttgtgattttgatattttttcctctagtaaatccccaagtgaggtctttaaaaaacgtgagaagggaaaagaggatgaaaaga

SEQ ID NO: 50246 - DNA, 1034 bp, Homo sapiens
tgttgccaagaaggttgggaacctgtctgtgacaatctggaagatcccagatcaggtggtctcttctggaattcaaggagatcaagtaactgaatcaaacttgagaattcaacaagaacgtcttgcagctccaattcctgaaaaagccacaaactactggaactcacctaagatgaaattggcaacctgaatagtcctataaccattaataaaacgggattcatacttaaaaatctcctgaaaaagggatcttcagacccagatggtttcagtggtaaattccaacatttaaggaagaaatgacagtctcttctagaataagagggaaaacattctaacttattttataaggccaacattaccctgataccaatggcagtaacaaaacaaaataatgatgacaaaactacagaccagtatcctttataaacatagacaacataagttcatcaaaaaatactagtaacatcatccatcaaatttataaacattcccttcttttaatgtctgtgggatctgtagtgatattccctctttcattcctaatattagttaagttgtgtttcccttttattttttattagttttgctggagttttaacaattgcactgatattttcaaagaatcagcttttggtttcatttttttctattgtttttctgctttcaatttcattgctttctgctttttctttcttgcttgctttggctgtattttgctcttcattttctaacttatttaggtggaggcttagattgttgattagagaccttcttttcttctaatataaacatttaatgttgtaaatttctctgtaagcactattttagctgtatcacacagattttgatatattgtggttttgtttttgtttttgtttttttttttttttgagacagagtctcactctgtcacccaggctggagtgtagtggtgcaatcttggatctctgcaacatctgcttcccgggttcaagtgattctcctgcctcagcctcccgagtagctgggattacaggcacctgccaccacgc

SEQ ID NO: 50247 - DNA, 1074 bp, Homo sapiens
ttttaaaaaatgttaaaacttacattgaaaaaatacatatgccacttttaaaatggaggctttcagcagcatttcgatctatccatatgttatggtttgggccaaattaaccagccaatttcagatctgttttttttttttggaaagcttaggtatatattcacttgaactttctgtcaaatcacagcttgaagaagctatctccaaactgcttttcatgtactggttaaattaaggatgcttctctcaggcagagctcatgttctcctaatttgggctggccatcctttcactggtgctcctcatgctgtgcctccttcttatctgcctctgaagcatcacgctgcctgtgacctttctggtgcccctctgtcttcaagtacctgggctcctggagggcctgggtcagggcctgagtgctcaggagcaggcgggaaaccacaccagagagcccctctcttcctgcccacgcctggagagtcaaggtcagcaaattacctggctagaaagctcccctggggtctctgatcacagccagggcagagaattcttgctataatgattgaaggactcatctctttgcggagaaactcagaaaataacatggatgatactaacctttactcagggctcatgtgtgaggtcgaaggagaagataagaggtttccccgtattctttcatgtgtgtttatttgttaaatatctgtctgttgtgtgccaggctctgaaacagttattacacacttcatctgtactgcaacactgtgaggaagagatgattggccttattttagaaatgaggccatagatacttaagagagcattcaagtcatttgcccaaaatcacattgtaaatgatagagaggatatgcgttaccttcccttttctgatttcaccaagcctataccaagaaaaaacatacagcaaaatggatgttgagtttgagatttcctttcttattcgtatatcagtataaataacaaatttgtttttcaaggcatatttttcattttgcagaattttggtgtaataatgacattggaaaaatatttctgaggttccactttatacca

SEQ ID NO: 50248 - DNA, 1060 bp, Homo sapiens
tagttctctgtctttttaaagatatgatatttaataaaggcatttcatcaagtgattatttcaaattaattatccttacgtcttaaaagatgcagttaccatatggattcccctgttttgtagctgctgcttgggaatttaaaaatttttctgaggccgggcgcggtggctcacgcctgtaatcccagcactttgggaggccgaggcaggtggatcacgaggtcaggagatccgagaccatcctagctaacacggtgaaacctcgtctctactaaaagtaccaaaaattagccgggtgtggtggtgggcgcctgcagtctcagctactcgggaggctgaggcaggagaatggcgtgaacccgggaggcggagcttgcagtgagccaagatcgcgccactgcactccagcctgggcaacagagaaagactcggtctcaaaaaaaaaaaaaaaattctaatgcatgtatgcacatttatgaaatataagtgtgatgtaaacaatgtatacctgaaagaaatgttgtaaatgagccctgtctaaccaccactgaagtcaacaaatacaacatgccagggcccagaagccccctgcttctccttccaatcattatgcatttctcccaaaggtatcctgactttatgaaaaatcacttccttgttttgtttttaaattttgctacctatctctaaattgtatagttttgcttgttgttgagctttctataaatagattgtgtctggctttatttgctcggtatatccagtaacatatttcacatattttattaaatttatttcaggtacttgttctatgttgatgttaacaaaatggcatgtctttcaacattttatttctaacaattgctgataaataaaaattttatttttgcacattaatatattcagcaatcttgataaaccctttaaaattgtagtaatagtggtaatagtaattcctttgatttttctatgaacacaaccttctcatccgtaaataatatcatttttttcttccttctttttcttgccttactgcaatggccaggacctctagtacaat

SEQ ID NO: 50249 - DNA, 1038 bp, Homo sapiens
caggctggtctcgaactcctgacctcgtgatccgcccacctcggcctcccgaagtgttgggattacaggtgtgagccaccgcacctggcctgaaaattctctccaaattctcagatgcctagtcaactcaacgtaagatgtttgcctgggtttagggcaaactatggcctgtggggccgaatctgtgcctgtgtttataaataaaattgaaacacagccacgtccatttatttacctaattgtctatggctactttcatgacgtcaatgtcagagtgacagagatcactatatggcctgcacagcttaaacctttactctctggcccttatggaataactttagcgccctggtatcaataataaagggtaactttttgtatttgtgtgaaattgagaaaagtatctgaagaatcttgattttttttaaagagaaaaaaacagtcagtctaacatttaatagattgttatcttcttccagattacatcaatcttccagattgccttagggccctaatcacaggtcaaattaattttgccccttcaaccaatccttttcaaagtactgaagataatactgtcatcagatgctgacattactacacaaatgcagtatttcatcagtgaattgtgtgtttttatatatcatgttgatgcatgccacttccctcatacagcgcagtgtgtatttttcactggaaccttccaaccttaggctcttccttccctggggtgccgccttgtggtgggctgtgagcccttcatgggcaaactgcatggtttggtcatcgaggaccgtgaatctgctatggagtgactcatgccaaaccctgccaagagcaagctgtcccatcatatacctaagaggtcatgaatcattagactggaacaacctgctggtgaatacaacgtggaaaaaattcctcattctactgattatcaacctcccccgtgccttctctatatatgggcttaagaggaaacttttaaaaaagaataaagaaatgactcattagggctttttggggatagtcttaatt

SEQ ID NO: 50250 - DNA, 1082 bp, Homo sapiens
ctccctactcagccgccatctgtgatcaccagcatggtgggctgcttcctcacacccttgacaccatgttgaatcttaaggcttcagccccttgcttctcttttcttccataaacattcagcccaaatgcactcttcagagaagtcttcaccagcaacctcagttacagctccacagaactttaaaggtccctctagtagccctgatatcagtgctgggatttcacttcatcctctccattttgttcctgcctctagtgggtgagtgccttgtggcagagactgtgtctgatttatttctatgggacttaaccctccgtcagtgctgaataaatgagagagaacaatcattcatttaagtacacttctatagataagtactgctttaagagactgaatgttgattagccacagggaagagaaaagtataagatcagaaacgacttcatggtgtatgttgttatgggaatctatggtattagccagtttattaaatattaaattattttatatgaagtagcacagtgtgataggtagaataatggctctctgctgtggtttggatatggtttctccccagcaaaacttaagctgaagtttgttccccagtgttagaggtggggcctaattaatgggaggtgtttggatcataggggtggatccttcatgaatgggttggtgctgttttcacagtagcgagttgttgctctccctagactggattagttcccacggagaatggattagctcctgagtgagtgggttgttataaagccaggacgcccctcaggttttctgtcttcacaagtgtctctttcctttttgaccttctctgccatgttgtgatgtagcatgaaagccattgccggaagccagggccatgcccttgaactttttagcctgcagagctgtgagctaagaaaacctcttctttataaattgccttgtctcaggttttgttttgtttttttttatagcaatacaaaatggagtaagacaaaatgggctaagacaccctccaaagatgtctatgtatcctaatccctggaacctgtgagcatgttatatggcaaaggggaatta

SEQ ID NO: 50251 - DNA, 1049 bp, Homo sapiens
tttggtgccttgggcaagtcatcaactataagcctcagtttcctcaactagaaagtggatagaataaatagtacagtagctttacctatctcatgtgggtgtttggggaagccaataaaacatttcatgtgtgaaggctctttataaatagtaaagggctataaaaacatcgattatcattaggactaatgatgcagcccttgtcagcagtaaccatctgttgtggctgtcactctcaaaagcaagatgcgaaaatgacccaaaggtatttaaattacgttcaccttgagttttgttcccatatgactgtttttgtttgtttttggtaggtaagctgacactatggttagggtttgagctctgtccttggagccattgaaatgtagagctggaagggacactagaatcaccaaattcccctcttttaagttgtagcttatgaagtttaactgacttacctaagttaacagagctgcttcaaggtataaccacaaagagttttgcttaaactctgatttgtataattaggactataattttgatcaagtaccaaaataatgaaggagatttcttttgctttcaaactttgggattctctattttccttctccctatccccactgatatctttcacttccctcctatttcacagccctctccttccatttggatggtatagcacctctacccacttcagagaagagggtcctctgtctctcacccaaaaccaatcccctacctgtgctcttgattcccacccatttttgcctcctctgggacctaatctaacagtcattctgtctatgacctattttgtcttgctctccctttctgttggttcttcttggtctacaaatgtgtccaaacttgtaagactgtttacttcatcctacataccgcttcttttcaatacttgactattgaaaaggaaactggtaagaagactcatagctttttcaacttcgattaattccttatatggtaatgtacaagtacagggactggtgcttggtagtagctcaggaaagttccttccctccctcctgact

SEQ ID NO: 50252 - DNA, 1035 bp, Homo sapiens
ttcataaaaataacaatatttcaccaagagctttgaccctgaattgatgtgaccttggacttgcctgatgctggaatcagatggctgaactagaagtgaggaggctgctgttctatccccagttagcttctaagtagctatgatgtctgggcacatcctttttattggtctggacttaggtattgtcatctttaacatgagagttggactgttttttgttttctgttttttttaattttttttaaagagacagagtctcacctgttgcccaggctggagtgcagtggcgccatctctgctcactgcaacctccgccccccggggttcaagcgattctcctgtctcagcctcccgagtagctgggattacaggcggctgccaccgcacccagctaattttttgtatttttagtagagacagggtttcaccatcttggccaggctggtcttgaactcctgacctagtgatccacccgcctcggcctcccaaagtgctgggattacagacgtgagccactgcgcccggccgagagttggactattgatctctgaagtctcatcacattctcacactcaagtcttttttttcttttttttttcttttcttttttttttttttgagacggagtctcactttgtcgccagggttggagtgcagtggcacgatcttgactcactgcaacctccaccttccaggttcaagtgattctcctgcctcagcctcccgaatagctcggattacagttgcccgccactacacccagctaattttttgtatttttagtagagatggggtttcaccatgttggccaggctagtcccaaactcctgaccttgtgattcacccaccttggcctcccaaagtgctgggattacaggcgtgagccactgcacccggccttttttttttttttttttctcttcagacagggtcttactccatcgcccaggctggagtgcagtagcatgatcttagctcactacaacctgtgcctccccgggtacaagtgattctcctgcctcagcctcccgagta

SEQ ID NO: 50253 - DNA, 1034 bp, Homo sapiens
ccagtttccttttggcattggtaatttgggctggcctagtggaaataccactggtggtgctatgggatgaggaaggagctcttcagtattggaaaagggaacaacacctttcctcttcatcctggaagctgctgtatatagccttggaaattgggggctttctcattgtgaagcaccctcaagtatttgccattgatttgtctctatcctccgatttaaaaggcattttctaggagaggagagtgtcaggaaacaaaaagagatctgatagattgggactgttcatctatgttcttcctcgccatgtgtgaaaatttaagatattctcctactgagaaacagtagtcctttacccaattataatgtctgtgtgctttcccagctgttacaaactcttcagagtggaaacatgaatttaaacgtctctgatacaccacccatgaaaggaaccttttttgaggactagactacattaggaaaaagtatagttacagtatacaacgcaggaactcagttgaaatatgctaaaacatgtatgaagagatcctagttttcaagaggtagtataataaccatgaataagttctagcttttccagaacttggcttcagtgtacatctgaatgttttagtagagttgttagaagcagttaaaaaaaaaagcagatgtaaatttcacctcattcatgcccatttctactaatcctagagatagagccgtactgtgaagtgaccaaaatgcataaaagaatgggaggcacttacagggtcttaagacccctcatgaccgctaagtgaactctcattgcctcttgccagtcctagattggctgctgacacagttggaggcatgaaaaatccacaacctgagtaatcctctgctgaaataacagctgtgccatttgtgggtgaaaatagaatttttttcctgcccctctggaattttaatttatcttttccaaattttttattatggcatgctcatgcttttcattttattcaacagaagattgagtttttatctcaccatgcctt

SEQ ID NO: 50254 - DNA, 1125 bp, Homo sapiens
gattgggaagaaccatagggaagagctcagtgataactcttctgtaggaaagaatgtggcaaaatatatgggtatctatactttctctatttgtaatccatgcttgccaaatgattctccccctcccctcttctatccccaaggacagtcactgctgttcagtgctgcagctttccttagcccctcaagatcctgccattcattagctttttctcttcatctttttcttgaaaggtctgcattttctgtcactttgatgtcttaaaatgtcccctcccactgccccatgttcttcagacccttcagacccctcaacccccacatctttatagcctgttcccactactatccctcaactcaggctgcaggtatgtatttgttaattgcctcctggacatctccctctggatgtcccacaggtgcctttcatatgaaacatgtgttgttcctctccagtctgcttgtctgctttcccaccctaattaatatatttaccattcctctaggattctgaagtagaattcttggcactgttccggattctcctgcatgacttttatcaccctcacagctcatacttagttggtcatcaaagctgctgagtctttctcctttctctgaaacatctttcatagacatcccctcttccccatattcactaccttgtggttctggttctttaattcccctttaggattgtagtaataacctcccatctgatctccctgattctactcttgcctctaatccatcttccacttgtcatcagctttcttttcctaaaacacagatttaatcatgctgttttttacttaaaaacgatttgtagctctccactgcctacaagaggcattcaaatccctaagcatgatttacaatgtgagactcttcattatttgccttcaatctgttttctctgctctatcatctgccatttcctccccacactccatctgtcctaaactattttccattcctagaacattccttgagttctttcctgcatctatgcttttgcacatgctgtttcttctatttctgatgttcatgcctgtctacctggcaagttactagttttcctttaaaagccagctgaaaagtggcctctttgagccttccttttct

SEQ ID NO: 50255 - DNA, 1114 bp, Homo sapiens
tgcttgtgtctttggcttaaggtgctggagccgggcttacttgtcctaggtagactgtgggacttggaggaggtaaaaaagcttcgcggcgcggttattcgcaattaactccagaaatctcagtgtgtgtctgtcggtcggtctctctctgtctctgtctctctctctctctctctgtctctgtctctctctctctctctcacacacacacacacacacacacacacacacacacacacactcgcacgtctcatggctgcttggatttgccgatagttgttcatgaatttttattcctgtttgttcatttcctgacttttttttttttttttttggaaaaaggacctacctgtattaaaatccgtggggtttcagaaagacccttccgcagtcattcatattcaaatcaaggatagggcattttgatgaaaataccccaccaaactgctgtttggattggacaaaactgtagttcaggttagaattactgttattttaaatagacatcttacaaccttgtggtaaagtaaccttagcctgaatcgcccctgatctttctttgtgtcaatttacagaattctgaattacagatgaacaaagcggtgaagttttcttttaattttaaacgacaggtcttgaaatggctgtaagttgagttctgcgactccatctctttaatgatcggctcagagtggtgtatagttgatgatctgagacttacatatgtttcaatttctaatcaaataatttatcataccattggggagaaggacgccttaggaattttcaacacagaggagaaagaacatttttgtcttttggagcaaatgttttgccactttttccccagatgtccccgttagatgcctagaaaagatgcattgttgacgaataatacatgatttatttctcttttatgtctacaggtggcagtgtagaagccagaccgggagcttccagaagtggtttctgaaagagtcaaatgtacatgagtaagcaagcacaggaatctgaaaaaccacaggtatgtaggacaattaatccacctatctagctttataattattgcattccagtagtactaacccatttgctcttatgttcaatattttga

SEQ ID NO: 50256 - DNA, 1044 bp, Homo sapiens
agagatcagggatgctgctcaatatcctaccatacacagaatagccccccataacaaagaatgatctggccctaaatgtcaatagtgttgaggttgaaaagccttgtgttagcgtctaggagagaagctgtgggtagagtgaagaatggtcctgtatgggaagttgagagacttacagtccgagtaaccttactgaaatcatttcatgttgccaagtctcaatttctgcctttatagtagccccaggctacctctaaggtcctgtccaacttcagcatttccaccacctgccctctgggtagagtggtttaacaggaatccatgcagagaacaagagcagaggggacacaggggctgcaactccccactccagggacactatctcctgtttccaaggcctggagccagttgtgtgtcagaggctgaaatgctgattgaaaccaaaacttccattcaacatgacaaagggagaagggggatctaatttctaattaatcaaatacacgtttgaactgaaaattgggaattaccaacctgagagttaacagttactatttaaggctgatagggcgtatcttactctttgattcaaactgttgcatgttacaagtatttcgtgtgttgtacgagtaaaatggggaaaagaaggtttttgtgggtggaatgtcgggcaattttttaagcacattttgttgtgtatatgttttctttgcagccatttttccttaattcacattttaaagttacctgaagcccatcctcacacacagtggtcccccactaaccaccacgctccccgcctggtgtggcttactagctcgatgtctgaccagtccccaggtgtacgatgtaagtactgcacatcagggttggagtcctggtcaccatgccagggtagtgtcttacgtaggaagaagaaaccatcatactcatgcctccaaatccacagatttttgcttctctaataagctgattagaaatggccatcttccatatgtttatagatttcgcatagtaacagagaaagcttttaccagggtaatg

SEQ ID NO: 50257 - DNA, 1034 bp, Homo sapiens
tttctgggtcctccgtgtttttttttgtttgtttttgtttctccaggctgaaatctgatacccgtaaatctgtcacctaaatctttaacttcaaacagttgcagaggtgcctttcctccagttgctactctgtgaccaccgccccccccccaacccgcccatttttttgtgcttccaagtgcctcccttggcccctgatttccctttctgctcttccttttctgttttctaaaaactcagagtcaagatcaatttattcatttatttgacaaatagttattgagcacctgttctatttcaggcattctttcaggttctgggaaaatatctgcaacaaggtagatgaatctgcatcctgaagggcttggtgacaaggtgataaagggtgagggtggagagtggcagaagcaagagagtggagacactcaggcctcaccagccccactgaagcagaatctgcattttaacagtgtctccagggaatgtgtgtacattttaccattagaaaagccctgatctaggcaatgtatagctctggagagttttaagcagggaagaaaactatctgtgtatcacggtcagagatttgactctggttttttttttgttttgttttgagacagggtttccctctgacgccaaggctggagtgcagtggtgcaatcacagctcattgcagccttgacctcttgggcccgagggatcctcctccctcggcctcctgagtagctaggaccacaggtgtgtgccacttcaccaagctaatttataaaatatttttctagagacagggtcttgctttgttgcacaggctggtctcaaactcctgggctcaagtgatcttaaccctcccaaagtgcagggattacaggcatgagcccactgcctggctgattccctgtttctaaaccctattattaccctctgctgagaaatcttggatccattatcccaatgatatgacaaaggccctgtattagtccattcccacacttctataaagaaccacctgaggctgggtaatttatgaagaa

SEQ ID NO: 50258 - DNA, 1028 bp, Homo sapiens
gcagactaacacaggaacagaaaaccaaataccgcatgttctcattcgtaagtgggagttgaacaatgagaacacatggacagaaggaggggaacatcacacaccagggcctgtcagggggtagggggaaaggggagggagagcattaagacaaatatctaatgcatgcggggcttaacacctagatgatgtgttgataggtgcagcaagccaccatggcacatgtatacctatgtaacaaacctgcacgttctgcacatgtatcccagaacttaaacaaaaaaaaaaagaactgaaaaaaaaaaaaggcataattactttgagaaatggcttgcagtttctcataaagttaaagatatgctgcacatatgaccgagcagtcccactctgggtatttaccttagagaaatgaaaacatgttcatataaaaacttgttcatgggtgttcatggcagctttatttgtgccagccaaaagctggaaagaagccagatatccctcagtaggtgagtgtttatacaatggaatacaacttagcagtaaaatgagatgaagtgttaattcacacaatacttggatgaacctcaaaggtgttacgctgagtgagagaagccagtctcaaaaggttacatactgcatggttccatgtatttaaccttgcaaagacaaaactgtattaatggaaaaaacaaaacaaaacaaaacaaaacaaaaagcagtggttgctggggttaatatgtaggatgaaggtatcagtgtgaagagatagtacaagagagttttgggggagtggtagaactatttggtatccttgttgcagtggtgcttacatgaatctatatgtgtgttaaaattcatagaactgtacaccaaaagaaaaaataattcattgtataacaataaagcaaaaaaaaaattttaagacaacatcagagaaattttaaaaaagaaaggaaaaatataggtcatagatttggggaaaatattttcaaattgtattttcaataagggacttctatccagaaaac

SEQ ID NO: 50259 - DNA, 1050 bp, Homo sapiens
ctgaggcaggcagaacacctgaggccaggagttcgagaccagcctggacaacatggcgaaaccccacctctattaaaaatataaaaattagccaggtgtggtcgtgtgtgcctgtaatcccagctactcgggaggctgaggcaggagaattgcttgaacctgggaggcggaggtggtggtgagctgagatcatggagaataaaagaaagaaagaacaaataaaaagttcacctgagaagaatggctgcccctgggcagaacctagatgcctccagtgcaggtgaatgacataaggataactcccaggtatctggttctcacagggacagggaatgcagagaagaaacaacactgatggggaggagagagacttactcttggatctgttgagttagaggtgtcagagagatggcaagcagaggtttagatgtaggttgtggaacaccatgggagaactctgtgctcaacctacagttgctagaactgctcctttaaagttcctgctgggtgagtgacttttaaaatataacctcttattatggaaggtttcaaacacagtagagacaatagtataataaaccaaatcccatgtacccattaccatgctttgttaattaccagctcatgatccgtcttattacatctataccttccagctacctcttcccatgtcaaggtgattttgacacaaattctagatgtcgtgtcattttattaggttggtgcaaaagtaattgcggcttttgccattactttcaatggcaaaagccgcaactacttttgcaccaacctgatatttgtaaatatttcaatatttatctctgaaagacagtcttgtaaaaatatagctacaataccttatccatccttaaaaaccatagtaattttgtgatatttgtcaaatatccagtgagttcgcatttccccagttgattttttttaagcttcatttatgatgtaactaagggccctccaacagcatttggttgatatgtctctgtgtctcataaatctctcttaatctgtagatttgggtgtaaaacttttcag

SEQ ID NO: 50260 - DNA, 1074 bp, Homo sapiens
cttctctggagacaaatacactcatcagttgagccatttctgcctgaatgtgccatgctgtatttaaaatcagcgtatgtaataacgcagttggcactgttgctctagagtgccatcaacacccacctagatgttgaggtgccctcccttctcacattgcctaatggttccccggagaaccttgagaaccccactgctatagtataaactaaaagaatggctgctggaatttccttacgatgcttttttgcttttgtagaattcaccttcagttagctatgaactctcagaggatagcaattgttgtatgctgtttctggcatatcccctttagtgctttacacagtcttatacatacagtagggtttttttttgttgttgttgttattttaggtaacattttttgaactttttttgttagtttaggtaatgggtgtaggcatttgtttttaaaaacatcaaaaaaagtaactgctggcagaaaatgtaatgaaaagaagatgagcagctgcctgttgtattatgtattatgatagcttagtacctttaaatttttttttctgaacttatttttatttttgagaacagagtctcactctgtcacccatgctggagtgcagtggtgtgatctcagctcactgcagccttgacctcctgggttcaagcaatcctcccacttcagcctcctgagtagctgggaccacaggtgcgcaccaccgcagcaggctaatttttgtatttttttttacagagacagagttccactttgttgcccacgccggtctcgaactcctgggctcaagtgatcctcctgccttagcctcctaagtagctgggatgacaggcatgtgtcaccacgagtttagtgcctttttcagtggaacttctttccttgttctctgatagtgtaccactgtcctacctcagcacatcccacgacactgcctgagctcctttcctccttaccacttacaacatactatttaacgcatttatcttatttttaaacatctttccccctgctagaatgtaagccctatgaagggagggcaggatttttgtccctgttgttga

SEQ ID NO: 50261 - DNA, 1050 bp, Homo sapiens
gggatcttattggagtgattgtgttgatggttgcataacttgttaaatttactaaaaatcattgaatcgtatgcttaaattgagtgaattttgtgggatgtgaattataactcaataaaattgatttaaaaaaacaataagtgtggtgatgcaaaaaaaaaaatgactgtggccagtttggccatttcttgtagaagagtctcagccacctgaaggcttccagatccttaataactcatcaggtccctgccagcacagggaacatcatagacctgtcagcacttaaaggaacaaaagtaatgaacatttacattaaaaaatgagtgtgaaataatgacattcccagaaaaacaaagattgaaatgttaatgtctgttcatttttgcttcagtgatttggtattctgtttttagatgtgtccactttaataatttttatatcttcctgatgacattatgatgaagggtctttccgtctataatatttattgtctagagtttatttcatctgatataaatgtagttactgtagtgcttttatgattggtgttacctggcatatgttttccagtccttttactttaaacgtatgtgtgtgagtgtgtgtgtgtgtgtgtgttttaatctacaacaatggttctcaactgggcaatttagcccccttgtgacatgtgacagtagctggaaatatttttggttgtcatacctgcatggcagctactgacatctaatgaataaaggccagggctactactaaatatcctatgatgcacagaagagctcttacaacaaagaattatccagcctgaaatttcagtggtgctaaggttgagaagccctgatctaaaatgtgcctcttttagatagcataaagtggaatcttggttttttccccagtgtgacaattgctgccttttgattgcagtgtttagtccagtcccctttaatgtaagtattcgtatggttggatttatatctgcaattttgctattattttctatatatttcatgaaagttttgattctttgtttttttttcactgccctccatg

SEQ ID NO: 50262 - DNA, 1051 bp, Homo sapiens
atgtggatccatccttgccttcctgggataattctgttggtcaaaggcaattttccttatgagtcatggtcagatttgagttagtaatgtatttttttctttttcctcaactccatgtccctccattcacaattcagaccaggactagagcctgggcagaggtgtatatagggtaggagctcttctctttctatacagtcagtacaagaacagagaaggcaggcccacttctttttctatacagtcagtgtaagaacacagcctgtggtaagcaccaggaggcctgagttagtaatattttatttagaatttttgccactataaaaaatttgcttatagttttcttgtttttagtatatttaacaagtgttggtattaaggttatgccagttattaaaaggaaatcaggagatttccattttttatgtgttaaaatagcatagacattctcttaagttcgactatatacacatttagaactgatgccttttttaaaatggcaaattttaactattttattttctctgattattgctctacagatttctggtgggggggattaattttggtagtgtatgtttgctagagatgttatgtttttgtgcatctgtgcataatgcttcattaatttaccttgatcatttccatacctgtggcaatagcttcttttttcactcctaaaactgtgcatgcttgtgaggtgtgtgggtgtatatatacatatatatatattttttttcctttctcttttaccttgatcagggttctcatgaatattttgttgtcttcttttaatttcttttttttttttcaacctcccgagtagctgggattacaggcgcacaccaccacacccggctaaatttttgtatttttagtagagacgggatttcaccatgttagccaggatggtctcaatctcctgacctcgtgatccacccgcctcggcctcccaaagtgctgggattacaggcatgagcaactgtgcccggcctactctttttttttttttttttagacaggttctcactgtgttgctcaggctgaagta

SEQ ID NO: 50263 - DNA, 1033 bp, Homo sapiens
ctttcatctagattcaccaatttttgaccttttcccacatttatttttactttatttctgtatgtatatgtgtatgtgtgtgtctgcatacacacatatgtatgcatttattttgggggtgacagtttgagagttaatggcagacacaatagcataatgacagcttactcctgctacccacttcagatagtctttatgttagtcatcactgtgcagaccctaatgaggctgtatgttgagccctgtgtagcccagtacctgtccattaattttttagtgagaagcccgtcagtctcttagagaccccgttattgagtaaccagacgcggatttttggaggaaggctcttgcccatattatttaggggagggtgcctgatttgtatttttattgatattgtagatatcaacaaaaatatatttgtagatgttggtgattaatttttattattttgtcagttgctgttttttttaatgcctgagaatttgtcagctatgatttggattttgttgtggactagttgacctgacctcctgatgaaggctactctggctcaataatcagcaggaatggcatgaacaaacctagaaatttgaattaatgatcatcattctccagtgaaggtgcctggcctaggaatacagatatttgtaagagtggggctggccagtctctttagagattataacgttctggctatatattccaagtctgatgtgggggcagatttctcctacaaagcctgacagctgaagtctttgtaattgtcattggtcaggccttaataattaaaaatcacacatagagttttagccaggagctggcctcctcaatttcttaagagcaaggacattctcctatatcattaaattacactgaacacactcagaaagttaacattgatataatactattatgcagtgtatattctttatattttaatctggaagacttcctcagcatttctttgtttttcatgtctgtgacatttttaaagcacataggccatccgtattgtagaacgtccctcact

SEQ ID NO: 50264 - DNA, 1050 bp, Homo sapiens
gagcaagctctgatgtccatttctcttatatgtacaccagttctgctgggttagggccccacccttatgacctcatttaaccttaattgcctttataaaggcccagtctctaaatacagtcacattgcaggttggggcttcaatgtatgaatttgtggagtgggagtacaattcagtccataacagttgggtaatatttttttaatccattttgaaaacttcttccttttaattggtacattcagtccattgacatttaatgcaattattgatactcttggatttaggtatttaccactttattatttgttttctggtttttctccctttttattcctttgtttctcattttctgccttcttttgggttatttgaacattttcttagattacatttttatttgtctattgtgttttttactatatctatttacagagttacatagttttttttttggtggttgccctgcaaattaccatatatatttaagtttacacaacatgcttagcatcaatattttacctctttaaatggagtgtgtgaaccttaccatcttataagtcccttttccctctcccctttatgtttttgttgtcttatgtattaatattactttcacatacattgaaatttctaccagaaaatgttatttctcttccaactgtcaaatgtattttaaagaactcaaggataatctattctatttacccagatttttaccactttgatgttcttccttcattgttcacaatcttaagtttccttctgatatcaattgcctgttatgaagaactgcctttggcagttgtttcagagcaagtctgctggcaacatagtcttggttttccttccttgagaatgtcttctttcaccttcatttctgaaggagatttttactgcatatagatttttcagtggactgttgttttcttttggaactttcacaatgctgttccacttcttctgcacaccctggtttctcatgagaaatccacagtcatttaaatagttgttctcctgtaaataatatgttgtttttcacttgtcctt

SEQ ID NO: 50265 - DNA, 1052 bp, Homo sapiens
tctctgagtcatttgggagcctgtgtccacaatgtgaggtcctaagccgttttgggtctgtgttccagttatgaagtgtctctactgtttgtggccaactttgcacaaaggtttcaaagctgtttggtgatctgtgtccatgactatcagccatctgaaatctttccggataaggacaaagggcaagttccatgaatggttttgaggactgagtccaggatgtgatattccttaagcatttagaggtctgcgtttagagtgggaagactccgaactgtttgggggtctgagcctaggatatgaggtttctaagctgtttggggtccgtgtccagggggtgtgatctcagttcctcagggtttttgtcatagggtgtgaagtctttaagctctatagagggtttatgtccacactttcaggtctgtggggcctctgagctgtttggggatctgtctcggtgtataaaggctgtgagctattttggggaactctatgtccagtatatgacatctctgaacaggaatctgtgtccagggtgtgagcctctgagtagttttcgggcctgtgttccagcataagtgattttagggctctctagcattgtgtccgtggtgcgaggtctctgggctgtctggtggtctgagaagaggttgtgaggtctctgaactgttggtccatttttgtcccagtttgtgagttctctgagaaattggtggatctttatccctgattgtgaagtctctgagtttcccggaggtctgtaatcagatttccacgtctctgagctctttgggtgtggggttacaaagtgtgaggtctctgaagtgtttggtattgtctgttatcaatagaatagaaatatattgattactaggctgccttggctttgaactgttgaggggtctgtgtcagaaggcgtgaggtcatgtttgagctgtaaacagatttgtttcccaggtatgagtcctgtgagcagggtctgtttccaggctgtgagatctctaagctcttggggtctgcttcaaagacttgagtctaagttgtttgtggca

SEQ ID NO: 50266 - DNA, 1029 bp, Homo sapiens
tgatgtagtctttggtttatttcccaaggtgtgagtgctctgatctattcatgggtatatgtcctggcatgtgaagtgtctggtatttttatgtgtatatgtctcagggactgagttctgtgatctgtttgtgggtataaggccccagatgttagttctctgaaatatttgtgggtgtatatctcagcttgtgtggtttttgatctttctgtgagtatgtcacaggatgtgaggtccccgttctttttgggtgtgtgtttcctagaatttggattttctgagctgtgtgtgtgtgtgtgtgtgtgtgtgtgcgcgcgcgcgcgcacatgtcacagggttgaggtccctggtctgtttgttggtgtatgtccaggatgtgagttctctgatctctttgggtgtgtacgtcccacaatttgaggcctctgaattagttgatactctgcatccagcatattaattctctgaaatatattttggggtctataccctaagtctcagaaggattctgaatcctgaatgcgagggttctgcgctttttctggtctacattccaggggggtgagttcactgggctgttttgcggactgtgtttaccttgtgaggtctctgagctgtttgtccactggtgtcctaggatacgtggtccctgagctcttttggtttcaaagtcccttgacctgtttgggatatattttcaggcgtgaagtctctgttccttttcagagggctcagtcccggggtttgatatatctgactcattaggggtttgttccagggttaaggtctctgagcttgtaatgggtgtgtgtgcgccagtgagtgagttttctgagttgtttgaaggtctataggtgtgaaatttcttaactctctggtggttcctgtgcagagtatgatgtctctgaactatttagcagtctctcttttcaggtgtgaggtgtttgtacccttgtatgagaactctgatgtatttgagtatcaccgccaaactgttttgagccaatgtcccaacaaatgagttatctg

SEQ ID NO: 50267 - DNA, 1074 bp, Homo sapiens
tgatagtagatataacatatatatatattgtgtgtgtgtgtgtgtgtataatatatatacctgatttgttgaggtgtgtatgtgtccaagctgtgaagttattgagctatttgtgggttatttcccttggtttgaaaacctctgacctatttgggagtatgtctcagaatataagctctctgatctctttatgggtgtatgttgcaagatttcaggtctgtgatctatttctggctcttttccctagcatgtgaggtctatggcttgattatgggtctgtattgcaggattgagacctctgatttgtttatgggtatctagctcaggttgtgaggtctctgatctgtttgtggctttatgtctcaagatgtcaggtctgtatacctattctgcatatatatcctgcaggtaaggtctctaggctgtttgtagtttcatgttgcaggattcaaggtctctgatctctttttggttgtgtttcttacatgaggtctgtgatctgtttgctagtgaatgtcacagtatgtgagtgtctcttttgtgtgtatttgtcaaggatgtgaggtctaattcaacatgtcccggattgtaagatacctaacctggtagtgggtttatgtctgagaatgtttctttctgcagtgtgtgtgtgtgtgtgtgtgtgtgtgtgtgtgtgtgtgtgtgtgtgtatgtcccaggtttggagatttgatctgttgggggtgcattttgcagcatgtggggcccctgatatcttcgtgggtatatatcctatcatgtcaggtccatgttttctttgagtgtgtatgtcccagatggtgagttctcttatgtgtttgtgagtttaattccaagtgattgaagactctgagtattttttggtatatgtcccagaatgtgtctctgctctttttggatgtctgttagagagtggaggtgtcttatctatttggaagtgtatgactcaggatgtaaagtctgtgaattgtttgtgtgtgtatgtaggtctctggtagctaatggtaccccaaagatgtgcacttcctaatccctgaaacctacaattatgctaat

SEQ ID NO: 50268 - DNA, 1206 bp, Homo sapiens
tctaaaccttgagctgctgaggtttttacaagactggtaagaatcggtaggacaatgcacagtccacacacgctctcctgatttcagtcccttccccctaatcccacaccccttctgaaagtagaattcagggctgggggaagggaagcaagcaatccatataaatgccaggggccagtgtgggcttgggactgtctcagttggaacttaggaatcatgtgcacatgttgtttaatgtaaatgtatgttgggtttaagaaagagtaaacactccccagaattgtgtcttcatctctagtaaatccacagttttacttcagttgttctcttgagaacatgcataatagattgtgcaccatgaggcaaggatgcacagtgagaaaaaactttgttcctcttctgaaaactgtgcttatgagacgggtttatacatttatgtgagaggcagggtatgagctccagagaaagactttaggggaggatgcagggccccagtagctcaaagtagtctcaagagaaataaaaaatagtttggactaaatgaaaatcaaaataaaacttaccaaatttgtgggatgcagcaaagcagtacttacctagagggaaatttaaaaggcacttatggcttctgctgtactttttcttggatcactgactagtagaagccagccatcattcgaggatgctcaagcagccaaaagccggtaaatttgggggttattttttatgtggcaatagataactcataagaggtgtttctgagctctttgatggtctgtctggagttcgagactttggagctttttcgtggtctgtatccatgccatgatgtctgggtcttttgggcattctatgtttcgcatttttaagtgaccttttggggttctctctctaggtttttagatctctgaattatttgggaatctatgtcccaaagcatggggattctgggctgtttttttctgttcatgttcagaacgtgatcaagtccagaatttgaattatctgagctctctggcagtctgttctgggtatgaggtcactggggtgtttggcagtctgtgtcccaggttcacatccatgcactctttggaggacggtgtattgtttctgtttattctttgaggtatatggatttctaagtcccaggaagagacatcaccaaggtgactggattctgcatccagaacactaggtgtcagctgt

SEQ ID NO: 50269 - DNA, 1062 bp, Homo sapiens
gcatctctcccactcttcctgcttgtttgtctgttccctctgtttccctctctttgggccctctgaccttatgtccacgtgcctcttactagtcccatacccctgaccgtacccagccacatgcagctcaggataaggagcctggaatgctggccctggccctattgtgctggcctgctctgtttctgtgtctgtagggtggagtgacagggctagactagaaggctgtcttcaaactgcccctcactcctgcttacatgacccatggtatagacaggctaaggggcaggcccaggcttgggagttatgctaggaaagagatgggccacaagtgtgcccaccgccaacaccttctcagccccagggtgcctgctgttgctctctgaagagagtgttttgcttccccatcttggtctccatctctttcctctctgtctctaattctgtgttagtctctgcctcttcacagtgctacctgcgtgtatctctgcatttctatctccttttctgctcccgggtctttccttctttttctccggccatctgtctgtctctgtctcttactcgttgagtttctctctctctgtttttcctttctcttcatgtctcttttgtctcttgctctttgtctctgtgtctctgtctctctcttcccatctctccctgtttctccctctcttccctgtctcattgtgtgtcttctgctcactctttcaccactattccctcatcccctcaactccaccttacccaccatgatctccctccagccccactgcccccaacccctgcacctcacacgttggtgagtccagggctgcccacccctcccatggcaggggcccagcctcctcacccccagttatcactctccggacagagataaagtttatctcgaggctgggggatatgaaagctccttatcagctgccccactagagtaagtgttgccccaacggcggcagcaggcagcagctggcaccctccactctccctcggccccagcccctcaccccaggtaacgttccaatcccagccctcaagggagggtctcaccgggct

SEQ ID NO: 50270 - DNA, 1075 bp, Homo sapiens
atccccaatcaagatggctatctcagaagcagaaaaactaccttccctggcaccccaggggaatgaagaagccctttcccctgttgcagaagaaaagccctgtcagggtactggccagggcggggctggggttgggcgctgactggaatctgtccagggtgtagtcacctgttttgctctttatctttagcctcttcccccatctttacccttacatacccatccctctaatttctccttcaacacttgacttacctggcctaccctattccatgttggtttcacttgttccgacctgagttgttccctctcttgccctgcttatttgtctcggttcagtataaactccgccttccgggttccagcggttctcctgcctcagcctccagagtagctgggtacaggtgcataccactaagcccgggtaattttttttttttatttgagacggggttttgtcgttttgcccaggctggaactcctgagctcaggtgatcgcccggctcagcctcccaaagtgctgggattacaggcgtgagccaccgcctctggcccggactcttgccctgcttccaaatgctagctaacctgtgagcctttcgcctgtcccctttgccatcctcagtggtgactcacttgtcttcccttatgtgcgtcaactttcctttgcattttcacttgtttatcctcacctgctctgcttttatctgctagcttaacattcctgactcgcacctgatgccagtacgccctcaccccgaccccgccaggtcaaagtttcttcgtccccagattcccgtgtgctctccagggggcgaggcctcgctggaagacgggaaagcggaatttcagtccaaccatgaagcacctggtagtttctgatacggaaagggcggcgccttatggagaagctgccaataaagagccgagatgaaaggggtggctgaaccaatgagtctaggagacaagatcgggggatgatctggaaagcgcgatcagtgaagcggacgaacggcaggataaggcgggtctagtgacaggaatgggccgatgaagctctgtagggatggtgggt

SEQ ID NO: 50271 - DNA, 1069 bp, Homo sapiens
gaccagtaccccctactgactgctaatcttccctctctgcttcttggcctacagactgctgtgccctaatccgccggtgcctggcccccaaaccttcttcccgaccctcactggaagagatcctgctggacccctggatgcaaacaccagccgaggatgtacccctcaacccctccaaaggaggccctgcccctttggcctggtccttgctaccctaagcctggcctggcctggcctggcccccaatggtcagaagagccatcccatggccatgtcacagggatagatggacatttgttgacttggttttacaggtcattaccagtcattaaagtccagtattactaaggtaagggattgaggatcaggggttagaagacataaaccaagtctgcccagttcccttcccaatcctacaaaggagccttcctcccagaacctgtggtccctgattctggagggggaacttcttgcttctcattttgctaaggaagtttattttggtgaagttgttcccattctgagccccgggactcttattctgatgatgtgtcaccccacattggcacctcctactaccaccacacaaacttagttcatatgctcttacttgggcaagggtgctttccttccaataccccagtagcttttattttagtaaagggaccctttcccctagcctagggtcccatattgggtcaagctgcttacctgcctcagcccaggattctttattctgggggaggtaatgccctgttgttaccccaaggcttcttttttttttttttttttttgggtgaggggaccctactctgttatcccaagtgctcttattctggtgagaagaaccttacttccataatttgggaaggaatggaagatggacaccaccggacaccaccagacactaggatgggatggatggttttttgggggatgggctaggggaaataaggcttgctgtttgttctcctggggcgctccctccaacttttgcagattcttgcaacctcctcctgagccgggattgtccaattactaaaatgtaaataatcacgtattgtgggga

SEQ ID NO: 50272 - DNA, 1027 bp, Homo sapiens
tccctgtgcccagaatggctgctggatatagaggtcagaaacctctgttggagtctgttttgcccctaactcacaaaaatatcctgtctcctctctcccctgaggtctcacccttacaaaaaaaaaaaaaaaaaatagggagttacttaaggtgatctctcagggcttgttctttggtcttggtttgcctgtctgagttggcttacctatcttttgtgcccgttgagggctggcattttaggatgtggagtcctattttggagcagtgagccagggcttgctctgggcatcttggcatggatctttctcctgggatcatagtggttacagacagccatggtcacagagacatggggtacaggcctggccccaccactcactggctgtgtgatctaggcagattctgtaagtattccaggctggcagcttggctgatacagaaagcacctcccactgggcctggggcctagtaggtgttcagaaggtggcagtgcattttcccagcacataccgatagattctcattcatttctctctctctctcttacagtcatttgctgaggattttggtatcttctattcaggtttcacttctacaaacacaaagtactcctgcttcattttcggaaacacatagcctaacaccaacacaccctccaacatagggttcttttttgttttgtttttaaataaacttaattttagagcaggtttagatttacagaattactgcaaagaggctgggcacggtggcccacacctgtaatcccagcattttgggaagccgaggctggcagatcacctgaggtcaggggttcaagaccagcctggctaacatggtgaaaccctgtctctactaaaaatacaaaaattagctgggtgtggcagtgggtgcctgtaatcccaactactcttgggaggctgaggcaggagaatcacttgaaactgggaggcagaggttgcagtgagccaagattgtgccactgcactccagcttgggcgacagaatgagactctgtctcaaaaa

SEQ ID NO: 50273 - DNA, 1050 bp, Homo sapiens
ttttttttcagcctacaaaggccatgttgacttgtaggagtcaggaaaactgaattcagagttgactctgtcacagactgactctttgtgaccttggacaaaccacaaactccccctgaacctcagtttcctcatgtggaaagcaaagggggtgtgggaatcaatagcatttgaggccaacctgtggaacttagaatgttgttgatttctctgagtggccacgtgtaccctagacaaagtcatctgcccaagaggcctgtggatgtgttcctctcacctgcactctcttgttcttcaagtctggccctgcctgccatatttttccatgaccccgttctagcctacaagggcaagaactctccaggccttggggtagaaaagggaatttccctggtcccccagttcctcctccccaaaggatgttctatgattcagagctcttctctggcatctctgaccctagctgctgctttcttctgcccccacagctgaccaggtgtatggagaccaggacatgcatgaggttgtgcgaaagcattgcatggactatctggtgagaaaatggaggcctttggggaaggggcagggtgggaggatttcttctccacacagaccttaaccttccaatctattctgcagatgaagaatgccgactacttctccaactatgtcacagaggactttaccacctacattaacaggaagcggaaaaacaattgccatggcaaccacattgagatgcaggccatggcagagatgtacaaccgtcctgtggaggtgtaccagtacagcacaggtacttctgcagtgggtaggtgagggaaagatggtgcctcattcgagcctgcccaacctggcctgctgtggatgctccctccttctctttctctgcagaacccatcaacacattccatgggatacatcaaaacgaggacgaacccattcgtgttagctaccatcggaatatccactataattcagtggtgaatcctaacaaggccaccattggtgtggggctgggcctgccatcattcaaaccaggggtgagtg

SEQ ID NO: 50274 - DNA, 1033 bp, Homo sapiens
aaaacttggatcattatcccatgagacaggtgaaaagattgaagcatagaaagggaaatgacatgctcagggccattagccagagctggcctgggaacccagaggtgtccaaaggacacgcattcttttttttttttttttttttttttgagatggagtctccctctgtcgcccaggctggaatgtgcagtggcgtgatctcggctcactgcaacctctgcctcccgggttcaagtgattcttctgcctcagcctcctgagtagctaggattacaggcgtgcaccaccacacctggttaatttttgtgtttttagcagagatggggtttcaccatgttggtcaggctggtctcaaactcctgactttgtgatccacccgctttggcctcccaaagtgttgggattataggcatgagccaccgcatccggccaggacacattctttttatgatcctaggatccttagcttcttagcttggttgtcaactggctggatgaccttggctgtgttccttgacttctctggaccttacctcctccaagtaggagcacgtggccctctgttgttgggagtcttgaggcaggtggctttctgccttctgttcccctggattatcttcctatagggtcctaccatttgctttagagacttctgagaattgcctactccccaggtagctgcctgcctgccattggttcccctgagttaagcaatatccattgcttgcgctcagttctctcccacctcctcttattggggattcatgagcatcattgaaggcttgggtggagtggaggtgggaacctgagcctcagaggtatcctgtggcccaccctgtccctgttatgctcagataacctcctcctggaaacatgactctgcatctctcccttgctccctccctccatgtggctttgactcagcagaaacctctaaccctgaccagggtcctggtgctagcttctgtgggcagagtgaaggccacatggttgtttctacatgggccatgggggagtggcaagggctgtgcat

SEQ ID NO: 50275 - DNA, 1024 bp, Homo sapiens
atgtgtttgttgaaagggtggagtgaatggtctcctctctattctgccaagcagaagaggctcaggcaatgggctctattggactgggaaaaaacttatccctcctacccctctggctcaagtttgtgttttccctgggatgtttcccagaggaagagctgggtttcggggcatcttggacaaaagaaaggcaaagaaagaataggtgggggcctgttaggtgctaggccctgtgttgagacctcaggctagatgtggggtaagcagggcttctggtggagttaggattagagaatgcagcgggcatctgagtcttgggcagtcattgagggtaagccttgggactggctagtgaggacctggcttgtgtagtaactcatatcaagagccgtgtgtgtgtgtgtgtgtgtgtgtgtgtgtgtgtgtgtatctagctagctgttctctgtgtgtgtgtgtgtgtgtgtgtgtgtgtgtgtgtgtgtgtatgtgtgtgtgtatctagctagctgttctccccaaatacccccgacccttggggctagctagtgaggacctggcttgttgtagtaactcgtatcaagagcagtatttgtgtgtgtgtgtgtgtctatatgtatctagctgttctccccaaatactcccgacccttcctcccactggggccttcggtaaggggcctctacttacaggaagagctgaccagggcaggttgaaggcctttccttatcggcactatggctacacatttcccctgactgggctgcctttggcttttctctgtaaaacctcagaagtcctctggcctctcccccgaagtacatggcccttggtctctagaccttatctggaggtttccttggtgcagagtgcataatacatgtgcctgggaaggggactttgtccctgggctttttgctgcccccgtttccagcctcgcctggatggggacagatggcagtcagcttagactgtagtgtgaagccctacaggctgacttcctgccatgtgttgaatagtggaa

SEQ ID NO: 50276 - DNA, 1050 bp, Homo sapiens
ggcgggtggatcacgaggtcaggagttcaagaccagcctggccaagatagtaaaaccccatctctactaaaaatataaaaattagctgggtgtggtggtgggtgcctgtaatcccagctactcgggaggctgaggcagagaattgcttgaacccaggagacggattggaggttgcagtgaggtgggggttgcagtaagctgagattgcgccactgcactccagcctgggtgacagagcgagactccatctcaaaaaaaaaaaaaaaaaaaaaaagagagagagaagtttattctgtcacaattctggaggccagaagtccacaatcagtttcactgcatccaaatcaaagtgttggcagggccacactccttctggaagctctcagggagaatttagaccttctctagcctctcgtggctgccaacattccttggtttatgactgcatcattctaatctctgcctccatcttcaccatcgccttctctgtatatgtggtttccttttctgtctgtatcaaatttccctctgtctctcttttataaggacacttgtgattgcatttaggtcctacctgatactctaagataaccccccatctccagatttaataatgtaagttaattacatctgcaaacactttttttcttttctcttctctttttttttttttttttgaggtggaatctcactctgtcacccaggcgcagtctcggctcaccgcaacctccgcctcctgggttcaagctattctcctgcctcaccctcctgagtagctgggattgcaggcgcccaccaccacacctggctaatttttgtatttttagtagagatggggttttgccatgttggccaggctggtttcaaactcctgaccttagttgatccacccgcctcggcctcccaaagtgctgggattacaggcatgagccactgtgcccgggcttttcttttcttttcagacagtgctggcctctgtcacccaggctggagtgcagtggcgtaatcttggctcactgcaccctccacttcctggactcaagtgatcct

SEQ ID NO: 50277 - DNA, 1048 bp, Homo sapiens
ccagttcagtggggatgggagggagtggagtttggctagttccttgggcatgggaagagggttggaggccttttttcgatgttgtggaaggaagttgactgccatcgtcctggcccccagagtgcggagaagcggaaggccatgctggatgagctagcaatggaaacgctgcaagagaagtcccagcacaaggaagagctgggagcagttcgtctacggcatgagaaggaggtgctgggggtgcgtgcccgctatgagcgtgagctccgagagctgcatgaagacaagaagcgtcaggaggaggagctccgtgggcagatccgggaggagaaggtgggtgggtagatgatgatgcccttcttcctctaaaacctgggaaccacagcgttgctgataggccagtgggtggcatgcatcaggtgcccgctcctctgccttcctggcccatgacagtctgccccatcccaggcccggacacgggagctggagactctccagcagacagtggaagaacttcaagctcaggtacattccatggatggagccaagggctggtttgaacggcgcttgaaggaagccgaggtgagttggtgatgcctggtgaggaacagaggctgattggggccctcatgtcaaaccacagaagcaggagtggtcaggccctggaacttcccgagattttctggacttagggatatccccacagtcccctggctcaatagcagccctctggagtggatcaggggatggccatcagataggacagactgtcacgtgttaaggctgccctgcctttgtgcaaatttggaaaggcacctctttctcctgaaactgtacttctgtcaggaaattaatgcaatacactgatgttattgaacaagaacctgctgggtgcggtggctcacgcctgtaatctcagcactttggaaggccgaggtgggcggatcacttgaggtcaggagttcaagaccagcctggccaacatggtgaaaccctgtctctactaaaaatacaaaaattagccgggcatggtggctggcgcctgtaa

SEQ ID NO: 50278 - DNA, 1026 bp, Homo sapiens
cctggcctcccacaggcaccccaaggtactggcagatgaagacgtcagagtacttcagagtcacacagagaggaggcctacagcttggaagtcatggatcttatagcttgagaagcttggtgctttgttttcattttaaaaattctgattgagtgcctcctgtgtgccatgccctagagcacttactgtgagcctggaactgccctaagcactttacgtttattaactcatttaatcctcacagtaactctatggggtaggaaggatcattatccccatctttaccgatgaggaaactgaggcccagtgcagttaagtgactcatccaaggtcacacaagcaataggttttaaaatcttggagccgtcttcccaatacccccttggcttgagcctcaagtgccatcttactttaagggtttttcttgatgatcccatctggacaaggcaggagttgccctaggtgagtcacagagccctaggattcctcacggaaatctccagggtgcatggactaggaccctggaggcagaaatagttaccgaggggaagttacaggcctgagtgtgagtccctgtttggttgctgatgagctttgaggtccttggccagacactcaaccactttgaacctcagtttcctcatctgtagatgagtgtaacagtctagaacactcctctcagggatcatatccacaagtgctcgtgctgtgcgaggatctcactggttgtttattgaaaggctaagcaagtaggttgaggtccctgggaagcaggggtggatcctgtgtcaccagggctgccccttaccctaaaccttggccccgacaacccacccacctgcccagcagtgctgatctgggacgatgcccgggagggcaaggactccaaggagaagctggtgctggagttcaccttcaccaagccagtgctttctgtgcgcatgcgccatgacaagtgagcctgaggaggaccggggtgggaggtaggaggtccccacagtaagtgagagggatagtcctccctgg

SEQ ID NO: 50279 - DNA, 1032 bp, Homo sapiens
cacacacatatatatatatgggggggggtctcactctgtctcccaggtttgagtgcagtggctcaatcacagctcactgcagcctcaacttcctgagctcaagtgatcctcccacctcagcctcccaagtagctgggactacaggcacgcatcatcacgcctggatgatttttgtattttttgtagagatggggttttgccatgttgcccagggtggtcttggactcctgggctcaagctatcttcccctctgggcctcctaaagtgctgggattacaggtgtgatccacagcacccagcctatattttggaagtagcactcagaggatttgcttgtgggggtgggagaaagaggagtgaaagatgaccctgaggataggtagattaactgatgtgggagaggccaagacaggagcagtttgaggggtaagagcataagtttggttgtggccatctggagtttgagatgcctgttagacatctaaatagccacattgcctggaactcaagggataagttacagagctggacgtatgtgtttgtcattatgtgtcacaggctggaggtgacacattagccagccaagtagatgatatttacagccataaggttgaatgtaattcccaagaaattgaatgtagacagaggcaagaggaccaagagctgagtcctaggatcctcctgcatttaggggtcagctagttgaggaggagccaaaacagggacaaagaaggagcagccaataaggtggaaggaaaacctggactgtgtggtgtcctggaagccaagggaagaaagtgtttccaggaagagagagtggtcagctcggtgcagtgctaccatcatcaagtctgatgacgactgagacctgaacaatgattttaacaatggggaagtcatcgatgaccttgacagctttggaagagggatgggagcggaagcctgcctcaagtaggctcaagagagattggaaggacaggaagtggagtgaacacaagtgctcataactttttgaggaattttcctgtaaag

SEQ ID NO: 50280 - DNA, 1033 bp, Homo sapiens
catcatgttcgctgtgtgaagtctatctctgcttcagtataagctccacaaagacagggatctttgttttgctcaatatagtttatcacaaatggctagaacagtacctgttaagggactatttttttggttggaggaaggagactgtaatctctttggtacctaacccagtgggggcaaggtcaggtatatcttctcagcagaggcagctgggatgaagctggctccaggaaagaagaaaagacataaagccaggacaaaggcataacagcccaacccctatctgagggcgccacccatgtcagaccccctctcctttctgtgtcttttgtctctacaggtcagtgaagcccaggaggacctggggggggcaagagctcaggagaaggcctgccccccttcccacccctataccctaggtctccacccctcaagccaggagaccctgtctttgctgtttatatatatatatattatatataaatatctatttatctgtctgagccctgccctcactccactcccctcatccactaggtgcccagtcttgagtgggccccctctcttaccccgtccctttccctgcatcccttggcccctctctgtttaccctccctgtcccctgaggttaaggggatctaaaaggaggacagggagggaacagacctcggctgtgtggggagggtgggcgtgacttcagactctctcctctctctccctccactcctcccaactctggccttggttcctccagcaatgcctgcctgaacaaaggccgttagggaaatccaactccagggttaaagaaaggcagagattgggggggcttggggtagagaggacagtttaggacccaaggtggtcttggagaggaggtgtggagtggaggggtcagcaggggggttgggttccagacagagtggatctggagtctgaaggagaggagtgcgctagagcattctggggtggggcttggaagggcgctgagggcagggttctagaaggggcgaggctttaagcgaggcagaatggt

SEQ ID NO: 50281 - DNA, 1053 bp, Homo sapiens
taatttccaaaatacataaggaatccatacaactcaataccaaaaaggaacaaataatccaaataaaaatgggcaaagtacctgatatggtttggctgtgtccccacccaaatctcatcttgagattgtaagtctattaaacttctttcttgtgtaaattgcccagtctcgggtatgtctttatcagcagcatgaaaatggactaatacagtaaattggtaccagtagagtggagcactgctgaaaaaatgccccaaatgtggaagcaactttggaattgggtaacaggcagaggttggaaccgtttgaagggctcagaagaagacaggaaaatgtgggaacggttggaactccctagagacttgtagaatggctttgaccaaaatgcttttaatgatatggacaatgaaatccaagctgaggtggtctcagatggagatgaggaacttgttgggaatgggagcaaaggtgactcttgttatgtcttagcaaagagccctacagattagtggaactttgaacttgagagagattaacttgagagagatgaacttgagagaggtggaagaaatttctaagcagcaaagcattcaagaggtgacttgggtgctgttgaaggcattcagttttataaaggaagcagtgcataaaagtttgaaaaatttgtacccagacaatgtaatagaaaagaaaatcccattttctagggagaaattcaagccctctgcagaaatttgcataagtaatgagctgaatattaattcccaagacaatggggaaaatgtctccaagacatgtcagaggtcttcatggcagcccctcccatcacaggcttggaggcctagaagaaaaaagtggtttagtgggctggggccagggtccccatgctgtgtgcagcctgggaacttggtgccctgcgtcccagctgctccagccgtggatgaaaggggccaacatagagcttgggccatggcttcagagggtgcaagcccaaagccttggccgcttccatgtggtgttaagcctgcgagttaacagaagtcaagaattagt

SEQ ID NO: 50282 - DNA, 1088 bp, Homo sapiens
agagggagagctggatttcaaagcttcatccatgctgagctgcaaggggaatggacagaactggaaactggggcagactggagttgccagcctaggctgggctgtgagctccatggagcagatgccgggccatcctgccccggctcctatttaactttttaaaacaaatgtaatttgtagttttgaaagtcaggatagtgactactcttgagggaatagtaactggtaaggggcatgaggaggtggttcaggagtgatggtaaagtactgtttcttgatatgggcaatgattatacaggtttgttcaatttatgagagtttatttaacttcattcttatgatttatacacttttaaacatagatgccgtttttcaatgaaaagttttaatgatgatgatgtaggtatattatttgaagtaaaattatatgtacttcctattatcaagctaaaataacagtttacaaagtatatggcatttctacacatttaaaaaagatatttatgattgtgtttatatatatgtgtgtcatacatagagaaaagtatgaagggtacgctacaaaatgttggcagtggtcatctctgatcagtggcactttaggttttttctcttcctaatatattttattatgttctgaatttattgccatgggcaggaaatgcttattttttatttctcttatttttaaatgagattgaatttgtaagctaacaatgttttatcatagtggtagaatatactgtgttttcaataaagactggctaaattaatgagtttatgcctcactcacacattcaaagaatatatcaaatgcccactatgtgtcatacactctggtttcagaaataaattagagtccttgctctcaagaagattactgtatacaaaaattcaacttcttttgctatgtttttatgcaaatttaacctatagttgtatagaaatctaatatgattgttttattgagatataattcacacaccaaaatattgactctgctaaagggtacaattcagtgcatttcagtattttcacaatgttgttcaaacatcaccattgtttaattccaaaacatttttatcacc

SEQ ID NO: 50283 - DNA, 1042 bp, Homo sapiens
gccatgtggtcactggactgaaaactctttcgtgggtgggaatcagcctgaattatttccatgagtctagagtctgtaacatggaatttaggatattttatgtcttaaatggtcactcctcttttacaaaacttctgatatcgctgctttcctgacttttttacatcatggtatacattggcttataacccctcagttgctgatccagactcattgattgcatctgcattagataattctgtggaagtgaagtgcttgatgcaaagtgattgatgtacataataagctcttggtacatttgtcagttggaggaattattaacataagcctgctaattgtgtgttggtttgtttttccagatgaacagcaaagatgttcagtattgtgctgaaagaaacattgatgtgaacccagtgatcagtggaattgtcaagtacaggtgagcacttctgtgttcccaagaagacagctcatctggtttcttcctgcatcttgggacactccttccctgtctataccactgactcttgctctggttgttgtactcttatacgtgaatagactcttaattcagcacctatagccttttgttgtgcttttttgatgtgtctgccttcattagactatgatgtctttgagagcaaagactatttttccttactctttgcatattctgcatctgagacactacttgaaatatggttggcatcactgaaggttctttgattcaattaatattttgtaatcaccgtgtggcaaaacattccccttccaatctggtgctagtagagtatatgctatctaggcaccatgtgtgtggcttttgtgtatcaggtgtttcagaaatatttcaagacagttgtaagatgtttgaggacaagaattattactcctatttctatgtcataccacacagtagctgcacagttttaagattatgccatcacctagggtaatgttttgtagaatcagtccttcgtgtaacaactctagtgtttttgtactgttgatgatttgcttaaattttattcaaaaactatca

SEQ ID NO: 50284 - DNA, 1044 bp, Homo sapiens
ttgtacttgcatgtgcgccctgactattccatcactgcctcatccctggaaggcattcatgtcagcttcagtttcctgtccagattggtgctgagcctgaaatggagacttgggctggacaaaaaaaggttcatacacaatcttagttaggaagtcacctgcctttctaagatagaccttcatggttactgggatttgtattagttggctgtgatggtaaacttgatgtgtcaacttggcttggccacagtacacaggtatttgttgaaacaccagactaggtgtctctgtgaaggtgttttttaagatgagactaacattaaaatcagtagactttgagtaatgcaaattatactccatgatgtggctgggcctcattcaatcacttgaaagtcttaaagaaaaaaaaaaagactgggatccccccatgaagaaaaaattctgcctcgagactgcccttggattcgagctacattacctcttccctgggtctccagcctgacattctgctctgcacaatttagacttgccagcccccacagcctctctctctctctctccctctacacacacacacacacacacacacacacacacacacacacacacacacacacacacagaggaaccctaaccaaaaggctgcttacatctgggacccttaaagggcatagctgagatcagtactttggtctcactctgttgcatggctcctaaggcagaggcctctggcattctcctcccaccctctgcagactgccagccatggggctcatcactgtgactcagcgtttggtcatccaaccatgtagagatcactacaattccataagtgttccctgccctctttctgtctgtgaggtcctctatcccatcctgaggactcagggatctactgggcatgtttccaaccttccaggagagaccacagagcctggtgagggaaatacacctgcaaagagaagttcagtttagtaacagcaatgggcatagccggtgtgttcaccaactaatgagagatcacactaccaacatctcccgctt

SEQ ID NO: 50285 - DNA, 1052 bp, Homo sapiens
aaagggaacaaaaagaaaaatttctccagccttttcttcagctttgctgctgctactgcagcccctcccagccttccagacagaatctcccctggcagctatgatgttaaccctataattgcaatgaaagccaaaaaaaggaattaaaaatagctttttttttgttttatggctgctgcatctggatgtatgataaaattgatgtgaaatgctatatacttataatgtaataaatgctagagggaccatccccttcagggaaggctggaggggaaatattttttcttttttattttgagacggtctcactctgttgcctaggctgcagtgcagtggtgcaatcatggctcactgtagcctcgaccttctgggttcaagcaatcctcccatctcagcctcacgagtacctgagatcacaggcatgtgccaggatgccaggctaattttcttatctttttgtagagatggagtttctctgtgttgtctaggctggtctttaattcctgggctcaatctgccttatgttagtcatttccagtgaacctgtaaagggccaaagccctcagctcctacacaacaaaggactaatagcctggctttgcttccctaacttttctcctggtgtacacaccttggtaaggcactttgaccattcaatgcagagctgtcaccagcaaagcattgaacttttccagcctgctcgtgaaataaatgatagagacaaaagggataagaagttatgcaaacctacataaatttatttttaaatctggaatttcatcctgatcagtttctgaacatgatgtgtattattggttgatttattaaaatttttttctctgaaaattcttttttccctcttgcatatgaccatttcagagaaaagatctagaggacggtagatgataagtaaagaaatgggaaggtcttttttttttaagagatacttggttttatttaaagtatatattgaattacattgagtgtctttatagtatctattgagattattattttttactttaactgattaatatatcgttacttacatt

SEQ ID NO: 50286 - DNA, 1019 bp, Homo sapiens
catgcccggctaagttttttattttttattttgtagatatggagtctcgctatgttgatcaggctgtttttgaactcctggcctcaagtgatcctcccacctcggtctcccaaagtgctgggattacagacatgagccaccacgcctggcctgggtgtgcatcttctgagctttttggacatttgtgtccctgggtgtgagagctctatgtaggtgtctgcaccccaggatgtgaagtctctgagctgtttgcaattctgggtcccaagttgtgatgtttcccagctggtgttggtgaggacaattttgcttaaggtataaagtatctgagctgtttggaggagggaggggtctctgcccagaatgtaggttctctgatttgtctggggactttatcttaagattatgtgatgtttctgagctacttgaacttctgtttctgttttgtattaggttgggaggtgtctgagtggtttggggggggtctctgtctagggtgtgagatatctgaatggttttaatttgtttcccaggagtgagaactttggtctgttgtgtgtgggggtctttgtcacagcatgtgtggtctctgttctgtttgggggtctgtgtcaagttgtggggtctctgtgcagggattttggagtctgtttcaggttgtgagattagtgagctctttttgatgtctttgagtatctgagctgtttgggagtctgtgtctcaggagtgaaatttcttacctttttggctgtgaggtctcggtccaggaactatgggttttggaggctggcagacatgatttcaaagcctggagcccccaagtcttgattgtgtgacattgggcaagtcacttgtctccttgaacctcagtatgtatcataatcagtaaaatggggccaatatccatcttggagggcatctgtgcatcttagcaatgtgtgtaaagggccccactccagccatccttcaacaagaatttcctgagcgtctgctgtatatttgagtactgttctaggttc

SEQ ID NO: 50287 - DNA, 1061 bp, Homo sapiens
gagtcccttgacttttgtattctgactccaaggtattgttcagacctcagctcctgggggccggcccctggagtcttccctccctggtagcctctaaccagcattcccagacacctgaggcagatagatggatgggctggtgggcaggggggtggctggggctgggccatcaccattccagagacaaggccagtgtatatgcaaactgggggactctcctcccttctctccccagttctggtcctggccaggccatgctacactaacccctgcccccactctcctcccctcttttccttccttcctacccccttctccctctcccttcccctgactgttccacccaggaggaggaaacttcacatagccgtgctcacagttttttattttaaaggaatttggctggggagctgaacagggctccctgtgatctgaagaaagcttttggtgcttgtcctcacaaccacctcagtcctccctccctgtcctcccctgtctcctttcctcctcctgggttcatgttgtaataaaagaagattgttggtgtgtaattaatttgttcaaaagaaaaaaaaaagcaaaacaagaaacttggttccaactgaagcctattttaattttattttattattttcctcttgttagaaataaaacccttagaaacattttttggaaacatgtttctgaagtgcatttctcttagacggggaagacagtgcttccatcaccagtcagtggagcagctgtagtgctggcaggagcactagggctgaagccagggagctctgggttctgaaatcaagttccaccagcttcttaaccttgggcaagacattctgatcctcccccgactctaaccccaagccactttccctcaagtccaaacagatgggctcgggccccctcacccaaactcctacactacaacctcccccagttgatgccctccagtttatcctcctcaagctcccaaagggatttttttgttaatggctttattgagatataatttacatactataaaattcacttgtttgaaatgtacaattcagtgatttggg

SEQ ID NO: 50288 - DNA, 1031 bp, Homo sapiens
gattatgataatgcttatctttttggatagttgattgtattaaagataatgtttgcttagtgactgacccatggcaggtactggtatagcagctatttatcattatttacatgacctagcaaaatagactggcatatgaaacctcactgctgattatctaggtgactgtatcaagttacttgatctttcatatctcactttcctactctaaagtgggaataaatacctaacttgcaagatgtaaggttagagtaaggtgatttatatgaaagccatctctctaacattgcctttgcaatgttgcagctgctattattggtaatgttaatacatgaagaaactgattgaaatttggaatgtttctcaggaattgccattttattacatgcagatggtttattaactccagctagggcaataatattaccaagctgaaggtggtcctgctttaattgatttcttgtaagcttgtgtcagttgtgtgtgtagctgagtggaagctgctacagagctctaaagtccactcgtgtagtttcagccatcatcttcaaatttcacacttgcccagttagggaattgactttgtgagagtctttcataagattacaaaggagtgctggttctgtgggatcccttgctgcctatctagggtaatactttcttattttaaagctcatttatagctttcctgtgagtgtgggctatagggagaactatagctacagtagtgttggaagtctggggcctctcagtcgtggtgtaagttgttgagtccctgggcttttccaggcatcattttctcactctgttcagtactgttattaaatgatggccgtgtggctgtgccaagctgtgggaaggagccaaagcaaggtggggagaatagaccttctcatcttgacattcagaattcttcacacttggcccttacctcagagaagcattctggacaccatagtcttggaatcctgtaagagattgtatgtgtatttaagtatgtttctgggaagaggacttatagtttacatcca

SEQ ID NO: 50289 - DNA, 1056 bp, Homo sapiens
gcagtaatacaggtaagaaagaaatgctgatgttgcctctaagtagagatagatttgagaagaaaatatgacggaggtgggagctgatgcatggtccaaataaatgtggagatatgtttatgaatgggaagatttgatattgttaggatgttaattctccccaaattaatttagactcctggcagaggaatcattgggttgaagggttcttgatatacattagcaaatttgttttccagagagtagaatgtatttattcccttaccggcactgtacctacttcactgtgtcttcaccaaaattgaatgtttatcttaaaaagctttgtgagacttctcagtaaagatgacagattaagcatacacatggctacttccattctgtactgaaactccacaaaaattacataaagggattttttaacgtgaaaaaaattacagagatggagaatacgagagaggagacaatgataaaattcttgaaactagaaaacagatagatgagaaaactgaaacataagccactactgaggacatcttgagaaccagcccgattcatacctcagaatcccccaaagatttgttatcagtggcaccaggcattctaggggtaaagatggatggggtgaaaataaggattggttcatgtctgtataagaagctgtgagggccgggtgcagtggctcacgcctgtaatcccagcactttgggaggccgaggcgggtggatcatgaggtcaggagattgagaccatcctggctaacacagtgaaaccccgtctctaacaaaaatacaaaaaattagccgggcatggtggcggatgcctgtagtcccagctactcgggaggctgaggcaggagaatggcatgaacccgtgaggcggagcttacaatgagccgagatcacaccactgcactccagcctgggcgacagagcgagacaccgtctcaaaaaaaaaagctgtgagataccctcccatgctgggcagctagaaatgtctagtcactctagtaaaagactgaagatttatttctgaagaggttaaaacagagtctct

SEQ ID NO: 50290 - DNA, 1050 bp, Homo sapiens
gctaaggggtggcttattatcacatctacattccagccagtggaagagggaagtggggaagtgcagggctagacaaatcttttaaaggcacacatcatttccattcaccttctgttagtaaaaacttggtcatatgaccacatctagctgcagggaaaactgggaaatgtaattcttattttggatggtcaagtaccacttaaaactggaggtcatgttgttatgacagaagacaagaatgaatatcgaggtacaactagcagcctctgccatactttgtatactcttacccttctcagagcagtggataggtctttttatttaacaggtcaaaagttgaacccagagttctggtctatcctctgtgtacttctttcttaccctttaaaacattttgctgggtatacaacatggcttacctgtgagagactttatattcctgggaatttctagcattgattagcatcagccagttttctggtgtggatcttaaaacagcctgatcactagtcctgtaagaacaggaattagtagatcctctatctctgctttaagtattatccggggctgctactcttccctacacccttccacgctctttggccttggacacattaccacttactctaatgtatgagatagtcaataaatactgaattaatgtctccttcagatattcctagatatctgtacagtagggctttggactaggtcagtggttctcacctgcatttctttttgccttctccttgttttggtatactatatgccccatgagtaatatttttttattataaaatttagtgatatttaaccaaggacttgggatatctagggaattggacagaaggaggtgtcctataacagttcaggcaatcttcctccactcagggagttatccttttctctctctacctcaccccatttaaggatgatgatcaagggcttgagttctgctgctttacaagtagacatggggtctgactttccttagacttctctcttcctgacccatagcacagcatcagtccttgtctataatgccatgga

SEQ ID NO: 50291 - DNA, 1053 bp, Homo sapiens
cagtgggagggggtggccagcctctttgagccatttcttcttcaggcccagacgagagtgaaactgaactacttggaccagattgccaaattctgggaaatccagggctcctccttaaagattcccaatgtagaacggcggatcttggacctctacagtctcagcaaagtaagaacaggtttttgtcaagcacccctcccaccaaaccccaatatccttgatactctgggggcccccttagtttggatattagatctttaggctgcaatggaaggggcacagcttggtagcacacaagctgtcatcagaacatcttggaatcttttgctgcaatttgaggttgggataaggggatagcccccagtgaagtgagggactagagttgccctcattgcccttttgccctttctacaggcctactccctcacatataaatacacgtggcacatccatgtcttttcctacttgttttttcagattgtggtggaggaaggtggttatgaagctatctgcaaggaccgtcggtgggctcgggtagcccagcgcctcaactatccaccaggcaaaaatattggctccttgctacgctcccactacgaacgcattgtttatccctatgaaatgtaccagtctggagccaaccttgtggtaaggatgtcacagtggggcagggtgcggctttacccttcagcacagatttccacacttgctcttaatgaaactggtttagtggactggagacctgggagttggactctgctctttcctagtgatgcttattctctttctacactgctcagggtcagaggtcctggagttatctgtacggctagcttatttgttatgtgacaaagttttaactgatagagaaatcagagaagggagagcttgggctagaaggtgtgggaagagatggcgtctgatttagttggggagatggttggtggaggaagtgactggaagggaggagtgatacaagcaaaggtactgagaattcccaaaatgtgtgctggtgtcagtgctaaagaccagtggaacaggggctgttggtgt

SEQ ID NO: 50292 - DNA, 1086 bp, Homo sapiens
cctcttggctacatcgcgaaaatcaggcccatcgcagagaaatcgggcatttgcaagatccgcccacccgcggtaagccccggggccggttttcgccggcggcgagacggaatgaagcagtaggatagccagcggcgaagtctggggcggagggcagctcgaggtggggagagggggtggctgggaccgttgtggttgcggcgcggatcggaaaaagggtgttgggccaggggtcctctcgtggtgtgaggcccacaggtgacctggagtcagagatccacccccaccccggcccttcagaatcactccgggtttaagacagggattcctagtgggccggagggagttcacagagaggcaccccgcacatctcttagcccgggccacctaggtcgaggctgtaaaaataagacgtttctccaatctgttgtcatcacttcctttaaggcaggcagcatagtatagtattaatagaaagatcgcagtcctgaagggagacagacttgagttcaaaactccactttgaagctgagcagctgtgtgaccttgggaaagtagaagtaatctctctgagcccgtgaaatggatcccagaaatggttatttagaggattgaattaaactaggtagcgtctgtatgtagtacgcactagataagtggtaattattgtgactgtgagggtgtttgatgtggtcattggtttattcctatgtaggttgactcatatttactcataccttgccaggccaattcatctatgataatatcctggcctgctggaccagtcaggaaatcagtctcacagggattgctctgtctcccttgaggtgggttcagggaattgtcctcttcttttcctcgttgaaggcaatgtcaaggccttttctgcacatcatcccgcagacttgacttcctatggagatgtttggaccggtcagcttggtggtggggtgtgagtccttctcagaagatttctactctcctctggtccaggatgtaggagatcccagaggatagggcactcttgggcccgcagaacagaatggagccatggaattctgtcccttttggaacatgattgccagg

SEQ ID NO: 50293 - DNA, 1024 bp, Homo sapiens
cctcttcaacaagtgcgtgctccccgttctagcctgcttaccccttcctaccctgccacatgcacttgggttcctgggacagaactccacacagtgatccccgttctgccatcctttcattttgtggaatggtatttctccccagacattcagggaagaggattggcaacagggtggcagagtagagagtcccttaacacacctgggctcgggtcccagtactgcccctggctggctgtctgatcttgggtgagatgaccccactaaatggattctgaaccttgtcctccccaccttccctttttagaggggaggtgatatggtgtagaaagagccctagtctgggaaacaggagacctggccccctcagtcggcctttggctagactcactgcatagccctgggcaaggtgcattcctcccctgggcttccatttttccacctaccactagcagaatgtgtatgtaagaggtgttgggggcagggtggtgtgctggacccttcagtgactgtgactaagctctttctaggtgcctggtcttctgccaggtgtttaggagtgaggtgggagtgtgacatttgattagaaaataattggaaaatattagatgtaattggaaaacattagatgtaattggaagccattacttgaatgccttacatctttatagcttattaaacactgccacctatatttaattcttacaataactcagcaaggcaggcagtagtgttcctattttgtagataaggaaccaaggcttggagaagcaaaaggaattgtccaaagtcatacaactgggaagtgatggatctgagactcctatggcatcagtcccttccaaattttaaccttgtggggtcctaaggttctggggttctgaatatgggatagctgtgacccagattttggcccagctccctggaaatctagggggcaccttgtctacagaaacactcagagaaagttggtgatacctgcctgagtgggatgtgggacgtggaacaaagtaacctcttcact

SEQ ID NO: 50294 - DNA, 1027 bp, Homo sapiens
gagggtggacctgtgtctgtctttagtatatccccattaccttgggctgggcagctctaccccgggtgtctttgttttgaggctcgatgatatgatacataaagaacgagctttggagacagacagacctggatttgaatctatgttccaccccaacccgcaggatggcctcagctaggtcattttaccttttatgaattttagtttttctgtaaaatgggataacaatgcctattatgcctatttctcaagtttttttttttgtttgtttgcttgcttgcttgttttgagacagggtctctttctatcagccaggctggagaacagtggtgcgatcacagctcactgcagcctcgacatcctgggttcaagtgatcctcctacctcagcctcccaagttgcttggaccacagacatgcactaccatgaccggctaattttttttgtagagacagagtctccctctgttgcctgggctggtcttgaactcttaggctcaagcaatcctcccacttcggccccctaaagtgcagggattataagcgtgagccaccatgcctggcatatttctcaaggttagccaaggtaatttcgatggcattccctgatactgtaggtgctccgtaaatagataatttcgatggcattccctgatactgtaggtgctccgtaaatagtcatttttcttctctttcatgaaatctcccatggacaatgacttaacgaatcaaagctttgcttcccctgaaaactggtatatttcttccttcctaatgtgaggctgtcatagctcattgtatcttcctttttgcctcagccaccagttaatttgaagcatagctctagcatctttgttgatttcttttttggacttattttcgagttcaatttctattctgtgttcttggagtaagcaccctcaaatcctttgtgactcaagcaggtataaataactaatgggtgtaaatagttgaatgaaagtaaggctgaagaggctggactggcgatggtgggatttgaagaggac

SEQ ID NO: 50295 - DNA, 1899 bp, Homo sapiens
cactgacaggagcacaggaaaaacatctagcttatgtgaagattcagagaaggcatcctgtagtctaggtggtgatacctgaactgagtcttgagggacgggtaggaattagccagttgaggaagtagaaggaatttccagatattggaaacagtatgcatgaagacatgaaggcaagaaacagcaaaacaaatactgaagcatgaagattcctggggtggggggaaagcagcaagaaaaggtagagaggaaccagattggaagagggtcgtaaatgcatggctacagaattcagatttgttttgtaggacagtgtggttcccaaactggctgtataccacaaacaggtacggcattctgggccccggcccctaaaacattcattaagtctggggtgaagatttggaatcttgaatgcttataaaggttaccacatgactagggtacagccagatttggaaaccatagcttgaaggcagtgagggagccatgaaatggtttttaatagggggactccagatcagatgtgaacttaacctgtttctggctggctagccaaccagcatggaaaacagattaggttagatgttcatgctgtatgtgcccgtgcctgtagcttccctgttaatcagcttcttacactactatatttgcttattttgtctctgaataagctttaggcaccacaagggtgggcctggggatattttgcttaccagtatagcccctgcaaaaaagcacagtgcctgacacaaaacaggcacccagtaaagtttttgaatgaatgaatgcatgagtgaatccatttgtgagagagcgaatggagatgacaagattagctaggagactggaaaaagaccaggaggcctgcactagggcaaaggccagtaggaatagattggaggtgttaaggtgtgaactgttaaggtaagatgataacttaatgactgattattggatgtggagggtgactgagaggatagaatgagtacccatgaatagccatgattcctaccctgtcccagtcatctctttccttatccatctctgaaacaatctgcttacatcctcctcagcaactggaattcctcaagttagttagacattctgtgtgctgtgtggtctctcactgcccccccactccccacccctccacaagccattgattcattcatccagttcaataaatcttggctaagcacctccagtgtgcagtaaggctcttccaagccaggactctgactccctctttcctacctcaagagatgtttttgagggctttcccaggtaagagtcacatctcttatacaataacttatagtgagatacccagaatgtcagacttgtaagggaagactgcccaaaccccttctgaggtcctcagaggggaattaacttcctaaggtccgactgctaggaagtgttggagccagaaatggaacctaggtttcctttctatgtcatctctggagtcttgatcttgatctatcccattgtagatcaggacaggcagaggtggtcagggagaaggtgggacttaggttgaaccttgaaggtcaatgtattggacaggtcaaacaagatggttgccaattacactgcccccttctggaaacccttagcaaacctgccatgcttgcagtcccttctaaggggtttccttagcataagttgccatgctctgtaccatgtgacctcacaatcctggccacagatagctagatgtggatagtgtctggttcaagggcaaccaatctctaggctggccagtggcctgttagctggactggcataaggacttcaccttacaggggtggcatgtatcaaatggcaaatgtatgaaacaaccagatctttcagggaggcagaatgtgagctattcagaagaagtgaacgtta

SEQ ID NO: 50296 - DNA, 1789 bp, Homo sapiens
tcattctccttttgagaagttagattgttaaagatagtctcattcagctaccaaccactccttgatccttcccttcttagtggctgttgtttgttgtacttccgtttagactttgttttaatgcttgtacgtacatatgtgaactcattggaaatattgtgtgtttaatgcaaatgatatattgaattgtttagcaatttgttttctttgcttaacgatgtttttgagatctgtgcatgttacttaatgtagctcaatccatcttctgtaattgctgtatagattgtcatcatatgattaccacattttacttacgcatttcttttgtgatggacattaagactgtttttaggttttgctattacaaaatactacacaggagcatcactatgcctgtgtgaaagtatatgtatgaaagtttacctagggttgattcctagaagtggaattgcaaagtcataggatatttatatattggtttttaataatacttccaaattgccctcctgtactatttactcagtatttttcttgaggttgatctgaggtctaacattgttatcctatatcattttcatcccaagtagtgatatctgtgaaatcacaggtttgatgtgtgctaattatgtattcttctaatacatattaaaagacataactatcaaaacaaaataaatttgtctgttttcaaccaaagaagtcacgtaccactggtggtactgtgtgccataatttggcaaatgctggcctttatggacgagcacaattcgggggtcagacctggttcaaattctagctgtagaaacttgtgcaagttacttcacctctgagcctaagtttccacatctgtaaaaggagataataaacacctaccttgcagtagtgaagcaaagagaaaattaaatatatatgaagcaatttggctggcatctagatcattcacagccctttaaaggtcacctttgctgttctccccactttacagataaggaaactgaggcccaaaaaggtttgaacccaggtcttccaagtcattcaagtgctttctccactgtacaggtggttatcaaccttggctgcgcatcagaatcgtttgtaaagctttttctttttcctttttaaaaagtaaagcaatatatacacaggtaaaaaaataaaatagtacagaagggcttataatgagaagcagcagttccctgcttgcacccccacatccaaaggatgtggagctctttaaaaataaattgctctggtcccacctctggaaatctgattcagccagcatggataataacccagataactaacccctacctcacaggataaaaaggattacatgagatgccttaggctaaggccctggcacacaggaacacatgtgctacaaaggagctttggggacttaagtcctgaggatccaggaggtgaggtgacttgtccaagattccactggtttagtggcagagcctagacttccactcggatctatttagtgcttgccccctgctctctcctgtcgtgccccaccacctcctggcatcacagggcaaccgttgtcaaggctatgctcacgggaggctgggcaccacagtgtttccaagagcaagctggatccgagtagattccctagggcttgttggaggaactagtttgactcccttatactgtggacgcagtagccttgctgtagggagttgaagagtactccacaacagtatcttaagtttaactgggcacttccctctggaaatcacagtgttgtgcaccaggaacacaaagatgagtcaaa

SEQ ID NO: 50297 - DNA, 1045 bp, Homo sapiens
acctctgcctcccaggttcaagcgattctcctgcctcagcctcccaagtagctgagattacaggtgcccgccatcatgcccagctaatttttagtagaggcggggttctaccatgttggtcaggctggtcttgaactcctgacctcaggtgatctgcctaccttggcctcccaaagtgctgagattacaggtgtgagccactgtgcccggccctaaatatctattgaattctggtttttgtttccactgtctaatgcaggccactttcatctcacatagccaactacaggagcctcctaaatagtttatgatgtgtttcaatcatcattatattcaggaggatttgatttttttaacttatggaaaatttcaagcatatggaagtaaagagaatgataataatgaacctcaggcactcagcttcaacagttaagcaatcttattttttataccccccattggagtattttaaagaaaactagacattactccatccgtaattacctcagcatgtatctctagaatatgagaacttttaagaaaaacaaccataatattatatctgaaaatatttaacaataactccacaatatcatctaatcagtaaatgtttagatttccatgaaagtcccataatatttttttatttttattttttttgcagtttatgtgtttagatcaatattccagtaaggtccatatgttaaaattggtctctgctagtctataacattttcttcttcgtttttattttatttttttccttcgtatttatctatggaaggaactgggtcgttggtactatagaattgtctgcattctagatttggctgattatgtccccttgatgttactgaacatgttttttctattccttgtatttcctataaactggtaggtaaatctagggtttgattggattcaagttctttttttggcaagaatatatcataggtgatgttgtgtacttgtgaacttccttctacatcacatcagtagacacctgatgtcagttctcactttctttgtaatgttaacattgacc

SEQ ID NO: 50298 - DNA, 1053 bp, Homo sapiens
gtgtattcatagaaaatgcacagtattgtttgtgtgggtttaaaaaaaaaaaaacaacaacaaatgttaccatactgcacatgacaaagttttgatgtagaaaaaaatgctcaaatataacattaagtcagaatacagagttttaattacagtctagtctcaactatgtaaaactgtctgtaaatcaaatgctgaaagaaaatgtgctagaatgttaattgattatctagctgatgagattgtgagtgattccccacttaatactttctctatacttttctacatatattagataacttgtaaaattggggtgtgtgggagaggacaaccaaattttaaaaagataggaggctgaggggtgatgggggtgtgaaagcaaagctcattgacgagtgactccaataaactgcctagtaggaagggtgggagcaggagaatatcccagggtaagatggggaaagtcttcacctattgtcctgttcccactgctgggaccaggaggaacaaagacacatgaagatcatagatgagaccatggctcagctacaagacctgaagaatcagcatctggccaagaagtcggaagtgaatgacaagaatcatgagatggaggagattcgtaagaaactcgggggcgccaacaagtgagtgggttcaggcctggggtgggaggacgtagatagagcaggcagcctgccagatttgggtctcacctagcccctggaccttttttagggaaatgacccatttacagaaggaggtgacagccattgagaccaagcttgaacagaagcgcagtgaccgtcacaacttgctacaggcctgtaagatgcaggacattaagttgccactgtcaaaaggcaccatggatgatattagtcaggaagaggtgagtattgtggctggtggtgggagtgggcgatgaacatcattaaccagggatggggagtgaaagtgaccaggaagggcagtgagagagagaaagatggtgggcagatggtgaagggacatgaaaagggatgcagcagaaatgaggcaaggtgcagtggtgaa

SEQ ID NO: 50299 - DNA, 1034 bp, Homo sapiens
tacattatgttgcagtggtggtatactagaaagagcccgggttttggtgttaaatctgggtttcagtctcacatgtgccatttactagctgtgtggccttgggcaaggtcttttacctcttggcctaagttttcctcatttgtaaaattaggataataatgcctacttgcagagctgttgattagaggattagagataatgtatgtaaagtacatagaagcctaataggaattaccatagctggtagaatcagatggactcttttatgcctccttgtaggaacttggagggcgctggggtcttcattgtttaaagggggataaataaggtttggccgaatcttccctgccttatgccatgtccacagggctaggctgaggaacttagttcttcagcttcaggggaccgttttatgtgcatatggatggatgaagcaagttgtgactgaaaatcagtaactctgggtccctgagccctgggtctagtttccctttcttcccatagttggattttgtacattggttatctctggctgatgagattatgagtgattctccccccacctttatacacagtttggagtttgagaatcagaagactcgcttgggcattcagttggattttgaaaagaaccaactgaaggaggaccaagataaagtacacatgtgggagcagacagtgaaaaaagatgaaaatgagatagaaaagctcaaaaaggtaaggaaggaaagaattaaaagacagactaataactgggaggaaaaatgggaagaaatacgacagacagaaggataatgtccacaacttagaaatttctcatctaaatcaataagaaaaataccaagacctaaacgggaaaaatggataaatgtcacaaacagttcaagaagactttcaaatagtccctaaacacatacaaataatttagtcttactaaagaaatgcaaattaaagcaacaattagatacaatgtattttgtaacacatcgtggaaaatgtaaaaacagaagacacaatgctcaataccagccatg

SEQ ID NO: 50300 - DNA, 1950 bp, Homo sapiens
actagggcagtagtgctaagccaggttctctcagttgtggagagctagcccttcctgactgtggggccaatgcagtcaaggtagctttttctccaaggagcctggtctgctttgtcctctcaacccattgcctgtaggaaaaatccaagctggagagtgagctagccaactttgggcctcgcattaatgatatcaagaggatcattcagagccgagagagggaaatgaaagacttgaaggagaagatgaaccaggttggtagggtgtgggccatgccagcgtgtgtgtcagggcaggactgggactggaagcaggacagactaaaagggccgatgccctccctggcttctcttctcaggtagaggatgaggtgtttgaagagttttgtcgggagattggtgtgcgcaacatccgggagtttgaggaagaaaaggtgaaacggcagaatgaaatcgccaagaagcggtaggtgggaggattggtagaagagattggcatgcccttgagcctctagcttgacatccttggaaaaccagatgctgtcataggcaagggtcagctcttagaactatgtgagtttatgtagctaggccttaaagaacagaaatcaggagggcagtatggcatagttatagtggttaagagtgccaactctaaacttgattttctggattcctggattacaaccccagctccacaactcgttatctttggcagtgacttgacttctgtaagctgcaatatctgcaaaatggtataatgatacctatctcatggcattgttgggaggattaggtgaaataattttttttttttaagattacctgttttaccttttttttttttttttttttttttgacacaggatctcactctgtttccgagactggagtgcagtgtcaatcttgaccttcccaggctcaggtggtcctcccacctcagcctcctgagtagctaggactacagatgtttgccaccacgcccggctaatttttctttttttgttttttgttgttgttgttattgtagagatggggttttgccacattgcccaggctcgtcttgatctcctgggctcaagtgatcctcctgcctcagcctcccaaagtgctaggattataggtgtgagccatattgccggcccttttttttttttttttttttttttttttgagacagagtcttgctctgtcgcccaggctggagtgcagtggcatgatctcggctcactgcattctccaccttccgggctcccgtgttcatgcaattctcctgccttagcctcctgagtagctgggactataagtgcacgccaccatgcccggctaatttttcgtattagtagagatggggtttcaccatgctggccagactgatctcgaactcctgacctcgtgatccacccgccttggcctcccaaagtgctgggattacaggatgagccaccacgcctggccccaacccccgcctggcttttttttttttttaacctttttaaaaggtatttagcagcttacatatcatctactaagagcaagaaatagtagcttttgttgttattatcataatgggcaacgtgaggtggagggaggcgggagatgaaattcttggttgaaacaatagtcagaagaaaataatcttctcatttttcctcactttagttgattcattcattcaacaaacctttgttgagtacctaccttgtgccaggttgtcttgtgctaggtattggaagggggacaagggagatggaggtaagacagatgaacacaacacagtctttgctgaaggaggtcatcccttgtaccctgggcttcagttagcagtttagccctttgcccatacagtaaatattcattgctgtcctacttcaagccagtctcaagggatatagaattgaatcagactgtatttctttcctcaggaaacatatagagtactgggggaaac

SEQ ID NO: 50301 - DNA, 1877 bp, Homo sapiens
ttattcatttctttacctcccttctcttacccaaacttttccacctttcaaagggacgttaggattggccactgtgctgatctggagtgcacacagcaagctagtctgcaattgcctcctcctcagtccatacagtctcattcagatagggtagggttgcatgggtacagaactagtgggctgtcttttttgtttgttttgagacagggtctcattatgttgcccaggctggtcttgaactcctgggcttaagctgtcctcccattgcaacctcccaagtagctaggattacaaacacacactaccatgcttggtattgggttatcttaaccactaggcaatacagttgcattcacttcctgatatagattctagtctgtccccctttccatactgggaattaggattcctgagccagcttccaaaagcttcatacttcagttttcccttcctactttactcagtacggccgcctcattgacctatgccagcccacacaaaagaagtatcagattgctgtaaccaaggttttgggcaagaacatggatgccattattgtggactcggagaagacaggccgggactgtattcagtatatcaaggagcagcgtggggagcctgagaccttcttgcctcttgactacctggaggtgaggcttgttggggattgggtcaggccagtgttcaagggcccctcctctagtactccctgtttgtgttctgccactgactgagcttctccccacaggtgaagcctacagatgagaaactccgggagctgaagggggccaagctagtgattgatgtgattcgctatgagccacctcatatcaaaaaggccctgcagtatgcttgtggcaatgcccttgtctgtgacaacgtggaagatgcccgccgcattgcctttggaggccaccagcgccacaaggtgtggattcccttgcccaggctggagctggacaggctcagtactggagattcatttgttcagcttctccccctcttctctcttccccctgctgtgtgtagacagtggcactggatggaaccctattccagaagtcaggagtgatctctggtggggccagtgacctgaaggccaaggcacggcgctgggatgagaaagcagtagacaagttgaaagagaagaaggagcgcttgacagaggagctgaaagtaagccacaggcagtgctgtttttagcagtgggagtcctaagcctaggtcagccaccaccttaccacctagcccttctttcttgttcccttcaggagcagatgaaggcaaaacggaaagaggcagagctgcgtcaggtgcagtctcaggcccatggactgcagatgcggctcaagtactcccagagtgacctagaacagaccaagacacgacatctagccctgaatctgcaggtggggcctggccttcagccctgttctccaaaggccatccacacattcctggcctaggtttctctgggggtggggaacttgtttcacttccccgtctcctcccagcctgccgcagggagtcaggtatagcatagagtcagacagccaggggttcagagcttggctctgccttgagtatgacattaggcaagtattttcacctctcagtgtcaaccttcacatctttatctgtgaaatgcgagttaagatgatacctactcggccgggcacggtggatcacctgtggatcacctgaggtcaggagttggagaccagcctggccaaacctgtctctactacaaatacaaaaaattagctgggcgtggtggcaggcgcctgtaatcccagctacttgggaggctgaggcaggagaattgcttgaacccgggaggtggaggttgcagtgagccgagatcatgccattgtact

SEQ ID NO: 50302 - DNA, 2130 bp, Homo sapiens
ggttggctggggtctgaagtggaagagtgtttcgacctttactagggtgctgtggaatctattgccatgaagaaccccaaagagaggacagctctatttgaagagattagtcgttctggggagctggcgcaggagtatgacaagcgaaagaaggaaatggtgaaggctgaagaggacacacagtttaattaccatcgcaagaaaaatattgcggctgaacgcaaggaagcaaagcaggagaaagaagaggtaggtggccaagctacctcttggctctgagggaccaggatggagccagtgccttatcgatgcacccctgccaccattcccctgtttgcacaggctgaccggtaccagcgcctgaaggatgaggtagtacgggctcaggtacagctgcagctctttaagctttaccataatgaagtggaaattgagaagctcaacaaggaactggcctcaaagaacaaggagatcgagaaggacaagaagcgtatggacaaggtggaggatgaactgaaggagaagaagaaggagctgggcaaaatgatgcgggagcagcagcagattgagaaggagatcaagtaagaggcagacctgggcctgcaacttgtgggaaaccaagaggccgtgctgtttattagggttcctctgagcccggagttcagtacctatactcatttctctgttattctcctaacttgcttttgtaagaaccaggcacatttcttgacttgcagtttagacaaatagaatatttaagcactcaggccctgggtagacaggtgctcagatgagggagaactcaaaaggggtggtggccttgccaagaaagaggaaccaatgtgaggccgagccaatggagtggctgagaaggccttcctagaagaggaaactgaagctagaagtttaaaggataggaatttgaggggccaactaagtaaatacaggatgttcttgggagttgttaatgagcttcctggccagggttgaggcagagttggtagctttgccttatggagtggctggaatgccaggctgaagtcatacctttcagggagtagtcagactgcccctttttttcaggatctgtggggcattacgcccatgttcttttaagtaattccctgaggttggctcaggggctcaagctctcctttgggtgaaaagcctgggaaccctcccttcttccatagttctcactggtttcccccacccctctggcaaaagggagaaggactcagaattgaaccagaagcggcctcagtacatcaaagccaaggagaacacctcccacaaaatcaagaagctggaagcagccaagaagtctctgcagaatgctcagaagcactacaagaagcgtaaaggtgacatggatgagctggagaaggagatgctgtcagtggagaaggctcggcaggagtttgaagaacggatggaagaagagagtcagagtcagggcagagatttgacgttggaggagaatcaggtaagctctggaaggggttggcagggaggagatccctgggctgacatctgctgacttggtcatccctgttctccttccctgtccctaacacaggtgaagaaataccaccggttgaaagaagaagccagcaagagagcagctaccctggcccaggagctggagaaattcaatcgagaccagaaagctgaccaggaccgtctggatctggaagaacggaagaaagtagagacagaggtgggctatagttataagattagggatgatggtccacagaaaaggatatatataggttgagcatcccaaatccaaaataatccaaaatctgaaacgtttccggtcctaagcattttggattagagttacccaacctgtaatgatagtctttttttttgtttttttgtttttttgagacagagtttcgctcttgcccaggctggagtgcagtgatgtgatctcagctcaccacaacctttgcctcccgggttcaagcaattctcctgcctcagcctcctgagtagctgggactacaggcgtgcgccaccatgtccaactaatttttgtatttttagtagagacagggtttcactacgttggccaggctggtctcgagctcctgaccttgtgatccacccacttcggcctcc

SEQ ID NO: 50303 - DNA, 1023 bp, Homo sapiens
cccagaggtttggttgtgctcagtctttatggggacagaggagtagtctctcttcccattagtctgagtactgagtgattaggggacatttttgttcatctcaatatctttattccttttcctctcctcttcatcctgactttccctctactgcctcgtccctcttcccttaggtaagtcaaatctcatggatgccatcagctttgtgctaggtgaaaaaaccagcaacctgcgggtaaagaccctgcgggacctgatccatggagctcctgtgggcaagccagctgccaaccgggcctttgtcagcatggtctactctgaggagggtgctgaggaccgtacctttgcccgtgtcattgtaggtgggtgaggctggccagaaagctctccttgggtcctgggaggtggctagactagttgattgggacaggaaggaggcctgacccttgccaactcatgcattgtcttgtaggaggttcttctgagtacaagatcaacaacaaagtggtccaactacatgagtacagtgaggaattagagaagttgggcattctcatcaaagctcgtaacttcctcgttttccaggtgggcgtttttaacagttattggctatctggtttttgccagaccatgtcccatccccactctgtctgctccatctcaggctttatcatctctcccttgaactaatgtagcaccttgttcactgagcttcccaacttcagtctggcccctgagccaggttcatcttatgaggacacacatttgttttgtttcccctcccttttttccttaaaacatttcagtgattccgtattgccttacaatggtggttcttaaactgtagtctccagaccagcagtatcagcattacctggtaacatgttagaaaatgcacattctcaggccctatcctagacttcctgacttggaagaaactgtggagtggggcacagcagtttgtgttttaccaagctctccagtttattatgatgtcggccgaaatttgagaactattgcctt

SEQ ID NO: 50304 - DNA, 1035 bp, Homo sapiens
ccccgcctccttgaacctcaagaactgctctgactccgcccagcaacaactcctccggggatctggtccgcaggagcaagtgtttgttgttgccatgcaacaagaaaggggggcggaggcaccacgccagtcgtcagctcgctcctcgtatacgcaacatcagtccccgcccctggtcccactcctgccggaaggcgaaaatcccgttaggcctggacgtattctcgcgacatttgccggtcgcccggcttgcactgcggcgtttcccgcgcgggctacctcagttctcgggcgtacggcgcggcctgtcctactgccgccggcgccgcggccgtcatggggttcctgaaactgattgagattgagaactttaagtcgtacaagggtcgacagattatcggaccatttcagaggttcaccgccatcattggacccaatggctctggtgagataaacctggccgcggccctgcgcacgtcccggcctggaccccttatccggtgccggagtagtacaacccagcccatgtaacctgaaacgtcgcggaccttacgggttccttgcccgtccagagggggttctgctcgaacccactctccccgcgcgggtgctctaactcgaaccccttccaggtgtcacttgccgcttcctgcgcggcccccgccccggcccagtggtacaggccgagctgccagttaccccgcctacttccccctcccgccaaaggagtcgcgtctggaaccagcttcccgccagctcagtcctccgccgcgcggctccccgccggaccggccggagccggcttcccagccttacttgaccccctccggagaatgtggggacgctggtagctctcccgtggccttcggtcccaaacggtgcacttctgtttcagcccagcgtcctctctcgcctcgcattggtacactccaactcctttctactcttctctggaggcggcacttttgaatttcagacccagcgctccagtctttagaatgcttgaggtgtcgatccccaccccccaccgctatg

SEQ ID NO: 50305 - DNA, 1026 bp, Homo sapiens
tcgggtggggaggcccaagccaagaagttaggaaacaactgcgttttcgccccagccgacgtaagtggggtcacctctcctctcccagggtgtgcatgaggtcaccaacaccggcctgggaacctgtgggggtccctcccataagggtctcctctatgggggcggtagacccatctccttgtctcttttggcctgagccttcaagcactgtgggaccacctgtgataaggattctctaaagctgggattcacaacaatgaggatggggattggacgtaacaatctcctggaggagttatgtatggtttgaaaatgcattttgtgccttgtaattttatatttacaaagtcaaaaaacttgttttcatgaaacaaactacagaaagtgaaacttgatgaaatcatcttagcaggtaaggatacaaaaaagctagtttatcttcctatcaataattctcacaagagggttattttttatttttatttttgagatggagtctcgctctgttgcccaggctggagtgcagtggcacaatctcagctccttgcaacctccatcttctgggttcaagcgattttcctgcctcaacctcccaagtagctgggattacaggcacctgccaccacgcccagctaatttttttttttgtatttttagaagagatggggtttcaccatgttggccgggctggtcttgaactcctgatctcacgtgatccgcccgcctcggcctcccaaagtgctgggattacaggtgtgagccactgcacccagcctcacaacagggttgcattagtgctctgatccacagcaattaagaatcttcaggagcatgtgaatttatcaagaaggtattgatttgaaaaatgttttgcaacactgctctatattacctaatattttcacctttgacctactctctcaatttttttttttgggacagagtctcactgttgcccaggctgcagtgcaatggcacgatctcagctcactgcaacctctgcctcccgggttcaagcgattcttc

SEQ ID NO: 50306 - DNA, 1478 bp, Homo sapiens
ttcctacagatccagtggttctggagagcattgcgttctttcgatcaagctgaccgtgccaagttcctccagtttgtcacgggtacttccaaggtacccctgcaaggctttgctgccctcgaaggcatgaatggcattcagaagtttcagatccatcgagatgacaggtccacagatcgcctgccttcagctcacacatggtaaaaggaagggtttgtttctccttttcagtgcttaggttgagcttgcatacttgatgttttcaggaccctacccaagattgggaacacaaatgtggctgagtcctggaccttgggtaactcacaatttggtgtttctatggaggtgatgtttgagatgagatgtgctagacacagtgggggctggggagacactgtcaggtaaacagcaccacaagagagcatggtgtattccagggccagcgtgactggagcaaggaggagttgcagggagcaaaagtctaaagagctcagcagaggtccgattaccagtgactctgaaaaccaccttcaagtttgcactttagcctatgggcgagtgaggccagggtgtttaaggaggagtgacagggtcagatttttggttttggtgcctgatggccagtttgggagccagataaagggggacatactgggctgagacaagattgggagtcatcaagaagcagggagttggtttcttcagggaggggaggggctggtgggcaccatgggaacacacagatttggttatctgtcatccctcaccacaaactgatctttcttctttccttagttttaatcagctggatctgcctgcctatgagagctttgagaagctccgccacatgctactgttggctatccaggagtgctctgaaggctttgggctggcctaataaggccctgcccaactccgtggggttttttttaccattgttggacctggggaggggggagttaaaaaaagaaccagaaagaaattgtcaaaaaccaataaatgaaatccaccaactcaccgtgtgtgtcccagctgccccatcttccccagcgcatacctgttcctcttctcattctctccccgccgcctgtttcctcaccttctctcccctttccatgccgtccatgatccccaccccatgtgttttaaaaaggcagtagcctttgcagggacctgtctgtcccaactgtttgaacagtgtgctcctcagattctgtgttcagaaggatttgctgcattgagacttgaaacctttggataggggaaaaaattatatatatatatatttttttgttctgtttgcatttcttaatttgtgcttggaatgtgttgatgtgcacagctaatgattcaatgcgagacaagattggcgtctgtgttgtggaggtttcaaataaagagcactcttcataactcacttttcacaatggagtttttttcaaacttaaaaaaaaaaacaaaaaactcttaagcacatg

SEQ ID NO: 50307 - DNA, 1155 bp, Homo sapiens
tccccatctcttgtggtgtgggctctccaactgtgtaatcacaagaagtcagggagtctccctagacagactgtatgccatgttcttccaccaccaaatacctttagagaatttggactctgggcttatccctctctaataccacttttctcccctccccacttcacctaagcaaggcctcatttatttctctgatacctttcctattggtgttttctggaatatctgttaaccttgactattttgggacatctcctctgtcagtggtgcttttgtttgctcccagatctccaccccatttctgggctgtcctggcactctctgtttacctcttcatctgacactgcactccccagacactgcttcacagtctctcactcacacaaatgactggatgtatcctgggttttctgcacagctcttttctgcttctgctttcttatgcaggtatatagtatttgaaggagaagaagggcaggatgctggtgggctcctgcgggagtggtatatgatcatctctcgagagatgtttaaccctatgtatgccttgttccgtacctcacctggtgatcgagtcacctacaccatcaatccatcttcccactgcaaccccaaccacctcagctacttcaagtttgtcggacgcattgtggccaaagctgtatatgacaaccgtcttctggagtgctactttactcgatccttttacaaacacatcttgggcaagtcagtcaggtgaggatgaggcatagtcctgggactgtcttcagtcctgggggtctggtctttttgtgtcccatccttgtgctccttcttcccccccactcgcaaaccatgaccctgtataattgtgtttttctagatatacagatatggagagtgaagattaccacttctaccaaggtctggtttatctgctggaaaatgatgtctccacactaggctatgacctcaccttcagcactgaggtaggtcaggaaatcctaatcacagcacatcccagccaatctggaagatccattccaggttcaccttagaactagcactgcgtgaccttctcatagttctaaggaagcatcttgacttcttaaagctgtagcaggtgtttgtgagtgacatcacaaacaggaaaaccagaatttgcaggccatttcc

SEQ ID NO: 50308 - DNA, 1087 bp, Homo sapiens
acagcctactttccaaggccagctgtcagaattcaatgacaaaagtgtcctaaaacatcctgtgtaaactggaaggcaaccatccaaagctccactgttgttacattaccctgaaataatccacagattctcttgaaactagtgaggcagtgactagactagcactatctggatctgcagtagcacctgtggcttttgagcaccttaaatgtggctagcgcaactgaggaaccagattcattattttatttattctgtttaatgtaaatgccatccaatgcaggtcctagaccttgtttcagatgttgctcggtgagtaccactcagtggccagtggtcccctctacttgttctgtatattagttggtgcgtgtggtctagaaagatctaagcagaagggaaattttgaagactttctgactctcttctgtgtgccctccagcctccgatggaaccccacagggggagaaggaaaaggaagaaagaccacctgagttacccctgctcagcgagcagctgagtttggacgagctgtgggacatgcttggggagtgtctaaaggaactagaggaatcccatgaccagcatgcggtgctaggtgagttgtgtcctaaaggcccaggtcccaacccagtggtctgctctggggcccttcctgccagcttgtttttcttccttccaggttactcctctccctcagtgtctctgtaatgagaattcaaaagagaagtgttttttctctgacttcagtataaaaaagattgaccttctcttttaatagttggtgtctttcactttatagacaaggggaatctttataactggttagctatcccatttttctttggcttcaaggaagttcctctgtgacttgattctaccatatttccctgcaagttctcattgtttcttttttttttttttttttttttttaaatcagaaatgaggtctcactatgttgcccagactgatctcaaactgctgggctcaagcaattttcccacctcggcctcccaaagtgctgggatcataggtgtgagccaccacacctagcctagttttcactatttcttcttccttatttat

SEQ ID NO: 50309 - DNA, 1026 bp, Homo sapiens
ttgcctgaaaccaccacagaacctcagtaattttgagagatatatgggatttcaaccatggtctgtttagctccagaggagatactgtttctcttctacatgaaactcatttcatgcagattcagcagatccctgtggccataggtaaattggtagtcccaggtgacggttcgtggacacgcataataagctgaacagagcacgattccagctcactctaggttctctgcagctgagcaatgaagagtggcctaagcaggtgtcttagagagatttggcttttagccactttaccaggggagtctctgaacacttgctgactcctctgcctgctcaggtaccctgctggccgagctgcgggaatacaacctcgagcagcagcggcgagcccaatgtgaaaccctctctcctgatggcctgcctgaggagcagccacagaccaccaagctgaagggcaaaatgcagagcaggtgggtggtagccaccctttggctgggggcttgaatctgggatattctggaagatggctcttgctggtttcctggtcttttttatttctctgggtgattttcgtatctttcctatacacacttgacccatttttttctacttcctacttggaagatttccttctgagtttccttacccctctggttgacaccaggaagccttgcttgctttgggtgtttatactttgatgctgtcaatatacgcaagccacctctacactatccaggtttgacatggctgagaatgtggtaattgtggcatctcagaagcgacctttgggtggccgggagctccagctgccttctatgtccatgttgacatccaagacatctacccagaagttcttcttgagggtactacaggtcatcatccagctccgggacgacacgcgccgggctaacaagaaagccaagcagacaggcaggctaggtatggaactagagtgtccagttgaggggaagggttggtggcggtaaagccagattccttggaggtgcaggacttaacggcctgtct

SEQ ID NO: 50310 - DNA, 1045 bp, Homo sapiens
ttctttcaataataagcattgctgccatctatcaaaggcctgccttgtgccaggcactgtgcaaaatacatcatgtcgtttaatctccaacaactttgcaaggaagtgtagttatctccattttataagtgcgagactaaagctcaggaaaagtttgctcgtgagtctgtattgctacaaagccctcattcatttctctaggctgctttactgtctgttggataaaactcttatatgacatatcccccaatatttaccaaaattgtctgaaggagtctgggaaccagttgtcttttccctatcaggaaggctcatcctctgtgaagacgtcctagaccaagccttgtcctccttttcccggcaggtatttcccagccacttcacacagcagcggaccaaagaaacaaactgtgagagtgatcgggaaaggggcaataaggcctgtagcccatgctcctcacagtcctccagcagtggcatttgcacagacttctgggacttattggtaaaactggacaacatgaatgtcagccggaaaggcaagaactccgtgaagtcagtgccagtgagcgctggcggtgagggggaaacctctccatacagcctcgaggcctctccactggggcagctcatgaacatgttgtcacacccagtcatccgccggagctctctcttaactgagaaactcctcagactcctttctctcatctcaattgctctcccagaaaacaaggtgtcagaagcacaggctaattctggcagcggtgcttcctccaccaccactgccacctcaaccacatctaccaccaccaccactgccgcctccaccacgcccacaccccctactgcacccacccctgtcacttctgctccagccctggttgctgccacggctatttccaccattgtcgtagctgcttcgaccacagtgactacccccacgactgctaccactactgtttcaagtaagtgtggatgtagactgggagctgtggggtatatactgtggcacccacttcacccccttttccatccagatagttct

SEQ ID NO: 50311 - DNA, 1052 bp, Homo sapiens
ggatcacttgagtccaggagttcaagaccagcctaggcaacatggcaaacccaatctctactaaaaatacaaaaagtagtcgggtgtggtggcgcgcactagtaatcccagctactcgggaggctgaggcacgagaatcacttgaatcctagggggtggaggttgcagtgagccggtatcacgccactgcactccagcctgggtgacagagcgagactccatctcaacaaaaagctggtgggggtggggggcttcattctctaagctgtacagcagccctgaaaggatgatgtacagtcattgtaaagtgcctggtacatagtagacacctaagagggcagctgttactatgaagagcccttggactggacacccacctttctcaagcctccttggagatacctagctcattcccctcccccattcttatgcctaatcccagagctctagccactgaagtgttacccaaaaaccatgttctgtttccaggccttctggcagtaatgtagatactctcctccgcctccgaggacggctccttctggaccacgaagccctttcttgtctcttggtcctactttttgtggatgagccaaagctcaatactagccgtctacaccgagtactgagaaatctctgctaccatgcccagacccgccactgggtcatccgcagtctgctctccatcttgcagcgcagcagtgagagtgagctatgcattgaaacacccaaactcactacaagtgaggaaaagggcaaaaagtcgagcaagagctgtgggtcaagtagccatgagaaccgtcccctggacctgctacacaagatggagtcaaagagctccaaccagctttcctggctctcagtatccatggatgcagccctaggctgcaggactaatatatttcagatccagcgttcaggggggcgtaaacataccgagaagcatgcaagcggtggctccaccgtccacatccatccccaagctgctcctgttgtctgcagacacgttttggatacactcattcaattggccaaggtgagggtttcaaacc

SEQ ID NO: 50312 - DNA, 1035 bp, Homo sapiens
atccacagagtcagagctccagttcttgcattcttgggacagagatagcactgtgccttaaccttcatccttagtataccagaccagagatgttccttggagtatttttgttgtggggatgatcactggctgggtgggatacttatcaggccacatttgctgattggggtggctcccctcatcattggctggttgccccttaaccactattattgttctttccgagaaagatgggacgcctatgcctgacagctacccaacaaccccatcttcaactgatgcagctacatctgagtccaaggagacccttggcactctgcaatcctcacaacagcaaccaacactcccaaccccaccagctttgggagaggttcctcaggagctgcagtctccagctggagaagggggcagctctacacagctattgatgcctgtagagccagaggaattgggtcccacaaggccaagtggggaagcagaaacaactcagatggagttatccccagctcccactataagtgagtagaatttcaacatttggggaggatgaaacaagagggaagaaaggatgtctttgtagcttctctttgctcttttgcttgagagaaatagtaggagttcaacttctcaaataataagatctcgtcttgcgcattcactttcttaagtgaagttgaggtcctgaactggtgatagttgaatgtctaatgatattggtgatgataccaacagttcattgaggcaattactctgtttctgggctatcaccccaggcttattatttaaaaacaactctccagctgggtatgatgactcataatcccagcactttgggaggctgaggcagggggatcatttgagctcaggagtttgagaccagcctgggcaacatagaccccatctctattggggggaaaaaaaaactctccaaaatcgatggtgttatttacatgagtaaactgaaactcagaaatgaaataattagcccaagtcactctgtaagtggttgaactagaattaaaacccagatctgtc

SEQ ID NO: 50313 - DNA, 1034 bp, Homo sapiens
tcccccacccatatttcctcagaacattcttctgcctccctacacctgtctcctttcgcacttgagttggaaaatgattgtaccaaagcctgcacaatattttttaaagcagtgaagtagggtagatgccttggtacccttaatctagcaaaagatctttaaaagagtctgtcaccatgtaaaatggccttttgcctgctgcccttattagaggattctgctcatgccagggtgaggtagtaagttgtattgttgtggggtagggatattaggccccaattagaagataactatacaacttactactttccctggtgtgtggcatattcacacttagtcttagcagtgttgcctccatcagacaaagttgtagatgttccttggataatttggactggaagaaaagagacatggaaggggacagatggtgtttagggtgaggcagatgtcattataaagtgacttgtctttcattaattggagcatataattattttacctttgggcatgaactcattttgctattcttcaactgtgtaatgattgcattttattagtaatagaacaggaatgtgtgcaagggaatggaaagcatactttaagaattttgggccaggcgcagtggttcatgcctgtaatcccagcatttttgggaggccgaggcgggtggatcacctgaggtcaggagttcgagaccaacctggccaacacggcgaaaccccgcctctactcaaaatacaaaaattagccaggcttggtgacactcgcctgtggtcccagctactcaggaggctgaggcaggagaattgcttgaacccaggaagtggaggcttcagtgagctgagaacacgccactgcactccagcctgggcaacagagcaagactctgtctcaggaaaaaaaaaaaaaaaaaaaagattttgaagggctggacgcagtggctcacgcctgtaatcccagcactttgggaggccgaggtgggtggattgctagagcttaggagtttgagaccagcctgggcaacatggcaagac

SEQ ID NO: 50314 - DNA, 1050 bp, Homo sapiens
ctgtagggtgagaaagcgctgcctttcagttcttcaatgaagtccaggggctttctgcccctgagtctcagtagtgtaaaaagaatgatcattccctgagggtggccctttataaatctcagagggaaaatggcaaaggtaccctactgtcacctggctctgagggtgtatgtgttacttgtttttactttgttgatcaaggaaatcaaaggataaatggaagtagacacgtattcttaagttttacaaagcttttttatacccagtatcctctgtggtttcacaattagtgggattggcagggcagatgtgatcatcctgttttacagatgaggaaactgagactcagacaggtaaagtgactggccaagctcacctagctagctgacagcagacaatccaggtcttctccctcatccaaaaaaaagtggatatctgctaggtgtacatagctactttagacgcacccagtctggaaagggaagtcctctgttgttcagtgaaggctctgctctgtaaccttcagtgagcagaagtggagaggatgaatcacaagaggacgtgctgatggatgaagctccttccaacctcagccaagcttccaccttgcaggccaaccgagaaggtgagagtgccgaggccagaaaggcctcccttcttgccctgcacgtctgacagacactacactagggttttcctggaggcagctgcccacatgtgcagaataaggaagcatctgtctgcatgcgctgacatacaccatccactttatcctcagccagtttttcaaataacatgttactactgcttgcccaaagtttgtcacttcttacttggttcgctttcttctcacccacctgctatcatcgctccaggttccctcttgccaacaggatatagtcaatagcaaagtagggctgaaaaggcaagggggcaccagcagacttggccaagtcctagaccatggctcctcaagcaccaccctctagccagcctccacattcagccaccctgctcagtgtgttgatgcattgattggcactctcagga

SEQ ID NO: 50315 - DNA, 1025 bp, Homo sapiens
aatggcatgaacaacatcattcggcttttcctgaagaagggactggttaatgacctggccagagtacctcacagcttagacctgtccaggtaaaatcatgccccagccccaggcttttccttctcttcagcctcactacacgaatgatgtggaggtagctggtgtagtgggaaaactttgggtacaagtgggagacccaagtctttcttattgtggcttttagcacttgtctttcttaaagccttggttcttacttgctataaactcaagagttgaactataatagtgatttttttttcaagcttccccccactttaaaaattaccacttattagaagattatatgtatattataagaaatacagatgagtaaaaataagaagtagacactgtattcctaccacccagataccatgattaccttattggtttattattcagtgtttttctttgcatgcataaataatgtattctttactaacatgatatgatacatgctattgtgttgggggaaatttggggcattttcgtttttattttcagttactggtcacttccttgctatgaaaataagtttcatcctacctaatgcccaaatccataattaagcatttttctccaaaccagaatccaattaaggacttgtattacatctggctatgttttctgaatctctcttattctaaaacaattttttttcattatttcgatctttattttgtttttgttgttcatgattccagcttgttgaagcgaccgtgtttttgccttctaaacttggtgcagttgcttccttgcagtgtagtttaacttaatcctttacttcctgatattttctgtaaacttctagttagatctagaggctttagaggcttattgaagcagtttaaacattttgggctgaaatgtgtagcctaggtgatgtatagctcatattgtatcgtgggagacacatctcccatgataattgtcactttttgttcttactagaaagtcatctctgttgttattttggcactttacaa

SEQ ID NO: 50316 - DNA, 1045 bp, Homo sapiens
gagattgcgggaatcacttgaacccaggaggcagagattgcgggaatcacttgaacccaggaggcaaagattgcagtgagccaagatcgcaccatcgtacacctgcctgggtgataagagcaaaactctgtctcaaaaaaaacctgaaagagctaggccttttttcattaggttcactgagagagagagttaatgagatttgttctattgaaagtccctttttatgcattgtggagattgaagagggaagactggagtcagagagaacagttaggaatctgatagagtaatctagtaacgtacgatcttggtgaagttggaggaaaatgggtgagttgaagaaatatttttaaggtacaaatggacaagaattgggtttggaagatgaaaaaggaaattaagactcaaggatgtttcttgatttgtgggggtttttttaattgcttttatgggttggcatctaacaagaaaatagaatggggtggggaaggtttgaagagaaaatgaggagttttgagaagtatctgtgggacatctaagtaaaagtgtctaaaggacagttgaataaaccatataaataagaatataggtgttcatcttccagatgtactcacacatgtgcaaagacaccagatgtggtagcagtattggtaataaaaataaaggaaaagccttaaatgttcattagtagagctgtggaaaagaatgaagtgtcctgatgcagaattatcctcaggttagattttttaagtgagtggggcattttgagaaactgtatcacatgttcccgcatatgtaaaatgggtgcccaaatattttttcccgtaagggtgccttgttttgtggatcacattgtaattttatggttagtaagtggcaaaagggtctgagagtgagtaggggcactagtgttgccatctttgaaagcaaccgccatttttaaagctattcttactttaatccaagtttaatatacatagaaaaatacacaaatcttaaatagtctgtttttcctaggtaaccactagccaagttaaataaagca

SEQ ID NO: 50317 - DNA, 1033 bp, Homo sapiens
gtatgtgttttggttttcttctttctgaaccagcattcctaacgtgttaggaggaggagagttaccattacctaattaagtatagatttcagaaaatcgagtcttcctaaggtcattgattagaccttgggtctgtagcaatttgatactatccctcttagaaatgattttaagtgtttagtcaagggctagggagtggttagggatggtatttgctctgttggaaggtctacagttcattataaggccttgtgtatgccacttgccttctggggactttcaggttttttctctgtaaatgataaaggtgggataaattgccagagttccttcctgttgtagcattttacctgggagatgtccctcccctcccccacctttataattcatttttggtagaggtttttttaatgtctgtttgaattcctaggttaatgaggaaacagggaaccgacgccctgtgatgctgactctcctcagggtacctcggctgaataaaaattcaaaaaacagcaatggacaggaactagagaagacgctggaagaaagcaaagaaatggatatcaaacgtaaagaaaataaaggcaatggtatgtaccaagagtgttttacctaaagctaatgtgcctttgtggcttaaggtctggccaatttcattgtgagttattttcatcagcttgattaacagattaaagatacgtaggcctcccttatgctttttcatctgatcttaaaattggtatttggcatgcttctcttaataggacccaagtgcttggccaattacttaggagggaggcgtgggaggaaataaacatcaagttaaactgtctaaaactgttattttcccattttatagatacccctttggccctagagagtacaaacactgaaaaggagacaagcctggaggaaacaaaaatcggggagatcctgatccagggcttgacagaagatatggtgactgttttaatccgggcctgcgtgagcatgctgggagtccctgtggacccagatactttgcatgccaccc

SEQ ID NO: 50318 - DNA, 1304 bp, Homo sapiens
tttaattttccctgctggcacagaatatagaacagtgtctagaaatgattttgcgggaggtagtatagaatgctacaagtgacttgacagtgaaagttgtttgaagcatccctcccttctaccttccctgtcttgccttaaactttgtggctgccacatcctggatgaaagtatcaaccgcttgaggagaaggttgagggtaatcatatggtagagcaaaaacattctcagagtctctcttatctttcctccttcacctctcctgtgtattattcacacttccttccctgcttccaggaagttgcttgccggaaggaggaagaggaacggaaagctcgggaaaagcaggaggaggaagaggctaaatgtctagagaagttccaggatgctgacccgttggaacaagatgagctccacactttcacagatactatgttgccaggctgcttccaccttcttgatgagctgccagacacagtataccgtgtgtgtgacctgatcatgacagcaatcaaacgtaatggagcagattatcgtgacatgattctgaagcaagtagtcaatcaggtgagctctcaaggggtcagaagaggggagtatgtgaagtggtttgcctgcctgtgtcaaaacctgatttctgaaaaatcagcatattttcattctacctgatatgggtatattctctatttggattctttcgatctggtaatcctgaaacagtgtgttaactacatcgcacacacaaaaatgtctttagaagggaaaaacaaagctctccttttctacttttctcttaaaatgtctaaaatgtgcctcacccttgagtcaggttcgtcccctggactaatactgaataaatgttttttcctatgtaacagccgcttgaacaactgagtccccatcctgatgaatacttgtgacctgatatttgtcctctttttcttttctctcattatgaaattatgctaattatagaagtgggataagaaaggaattaccttaaatccccacacccagatagccagttaacatttcgattgtatttaagttactggaatcttgttttatgtaatgtttcattctagaagcagggaaagaaattaaaaaagggaaaacttttttctgggctttgtaaaatagaactttaatgcacaagaacacaagtaaaggaaaactggataaaacattttttcacagaaagttttagtgtctattttttaacaataattctgagagagagagataaaatgaaagattgctgatggaagtataagttgatagaacctttttggggttgactgtat

SEQ ID NO: 50319 - DNA, 1063 bp, Homo sapiens
ttctgcaagctttggaagcatggtgctagcatctgctgggcttctagggaggcctcaggaagttcacagtcatggcggaaggttaagtgggagcttgcatgtcacatggcaggagccaggaggtggagggggtggtacacactaactcactatcatgaagacaacactaaacaatgagggatccacccccatgacccaaacacctccagcattggggattacaattcagcatgagatttgggcagagcaaatattccaaactgtatcactgcttaaggttgagtaaaatgcctcttctctgtgcctccttagacctcctcatgttggccaattattttgttgctggtactagttgtggaaggactgttccataggtctttaacttaatccttctgagctttgaattgaagcaaaatgattttcacacacttttcaaattacttacaggcagcctttacttgcatcaaaaacttatggaaccggaaacccctgaaggtatatggtggacgaatggctgaatcgatgctggccattctatgccacatcctccgaggagaacctgtgattcgagagagactaagcaaggagaaggaggggtctcgaggagaagaggatacagggcaagaggaaggtggctcccgccgggaacctcaagtcaaccagcaacaactgcaacaggtagggtactggcctcacactccagggtccagactttgcacccaatggagtgtgatgcttacggattttctaagctcacataccactgagtccctggtcacattaaccaggagacagtttagatttcctccttctcttagtatttattttttttctcctgaggaaaactggagtatagtcctgatgctctgcacaggtaatactcctttcaagcatgttgatgagtattctcagtagcctcctgctgcctcagtggaggcaaactgtcctcagttactttctggttaacctgtaaagagaatggatattgtgaaccagatttattctccaacaagagctttctgaaaccttagtcacctacaaaacttttgttttcacttgcaaa

SEQ ID NO: 50320 - DNA, 1051 bp, Homo sapiens
gtgtttattgcccacattttacttttttactcttaaaaaaattctttgtttgaaacaaactcttccagagttcagtgtttcatttgcattatgcgtttcatttgcattataagcacatttgggggaaattttccatgatgtttgcctgcaggagagaggtaggcaaggagcactaaatagcaaattaagagattaaacatgattgtaccactaattcataatgtggccctgagcaagtcacttaacttctctgttatctcgaaatatctgattcttggtgtgcttgaaaatggagattgggcagaaattgtagatattctttacttcctggatgttttagaatccgtatcatacatctggtttatctgaggttttgatactctatagaaaacactaatatcatgactagaaggctaccccatccttattccaggctggccatttagttccacctgtcaggctctaacttctttaaaaaatttttattacctagatgaaatttgtggaatctattctgagcaacaatacaacagatgaccactgccaggaatttgtgaatcagaaaggactgttgcctttggttaccattttgggtcttcccaatctgcccattgactttcccacatctgctgcctgtcaggctgttgcaggtgtctgcaaatccatattggtaagaagcatctggccaaatgttttcatttctttctggaaatcaattttgcgatacttctgtatatatgtttttactatggtctcccttcaactaaaaaataatgaataaatttgtgttatgttgtataagtgaattttgtgactaatatatagtgtgccatgttatttctcattgaaaagtcaaagtattttttctttgttcatcggttgggtatgtagttctacatcattagagtttattggagggaaaagtgtatctccaagaaagcttttctagttgggttttattagtacctctcccttctttgttataggtgcattttaaacacattttatgtttatggttatgtttaaccatgtattttcctcccctttcaag

SEQ ID NO: 50321 - DNA, 1024 bp, Homo sapiens
agctactctggaggctgaggcaggagaatcacttgaactcgggaggcggaggttgtagtgagccaagatcatgccactgcaagactctgtctccaaaaaaaaaaaaagtattttagattgagaattgttttccttaaaaatttttttccatttaatgtaacctgtatataatgatttcttttatatattatatggacaagcagacatggcttagattaagtttgtaaagcatattaccctttctagtctccgtttgttgatccctgtggctgccccccacccccgccttattagctctgccagtttccttttagaattgttgttgaaattggtatataagttcctggtgcttggtgaattgggacagggagtcaggttcgtcagtcacttatacagccgtgtgacgctcaacaaattatttaagtttgcagcacttctattcccttgtttataaaatgtaattaatgaccatattctgggaattatgtatataacatgtatacaaagtgtttgggcaaatacacaacacatagaaaacgctctaaatatgttagctgtctcctcctccccattccatgattactaataagtaatcttatttcctgtgcctttcagttacttgaagaaatctgtaatcttggaagggaccccaaatacatctgtcagaagccatcaatccagaaggcagatggcactgccactgctcctcccccaaggtctaatcatgccgcagaagaagcctctagtgaggatgaggaggaagaggaagtacaggccatgcagagctttaattctacccagcaaaatgaaactgagcctaatcagcagtaagtgtttacagaacagatcatctagccatataatcgtgggcatgttatcacctctctaagtcttaatgaacactttcatctataaaaagcaagagagttgtattagatcattttaaagttctaaccggttctaagaatgtattagtttttccttttttgacccttgtgtgtcatttgtgctttggtatttaatt

SEQ ID NO: 50322 - DNA, 1057 bp, Homo sapiens
aaggcggctttaggcagaacttaaatggtacatttggaggttagcatcccatgactattcatgctccttcaccattctggtgttccattttcttatattaacatgtctttcatagcattttatacttttccaacaatttgcacattgattatcaaaacagccatgttggagggcagataatatccaaaatgggaactgagtgaggtaaaaaaaaagttgaacctttttactttgtaatttttcttttttactttagacttttagtattggtaaaattaaaagtattagtaatttttccaatttcaaagcttaattaagtattcttcctaacattcagagacctcacttcgaatgtcttctaattttattatagtgtatttggatctcttaaaattttgttttatgtgcttgatcattgtggtttaatggcgaactcagcataattcttttgtctttcttcattgccaggagtccagtgtattccacaacgagcagcacttctgaaatccatgttgaatttcctcaagaaggccatccaagaccctgctttctcagatggcatacgacatggtatttgattccagataactttttttggaggatattttactctctcaaagattggttcttttcatactattctggcacctgttgttttacaaggcagtctttggtaaaggccatgccattttcaatagcttttagttgttttgtgtcacttttcctagatgtaagtgttgcttagctattttcataatgatttaccctttttttccccttttccagctttcgactctgtgcttaattccgtcttattacccctttctgactcttaagtgtttgtgttctttctttttttaacccatgttagaaagcctattgcatggacaaataataaaataggaggagacaactgggggccattagattagaattaacacaggctttgaggaccacagtgtgataatacataacatatcactcaattatccccactcctcacacctttccagactattcgtattctccataatgttcacttttcttttagtgatgg

SEQ ID NO: 50323 - DNA, 1051 bp, Homo sapiens
ttggttcactttttgttcctaactatatctttttttttaatgtagatttcagaaagcccttctgaaatcatggaatctcttaccaaaatgtacagcattcctaaggataagcaggtatgatgtggctttaaaacatccacaggatgtggttgttatctaaatagattaatgatatgtactggggtgggagattgcatagcagaaagaatgtcagctttggagtcagaccatgggcaaattgttagcttctctgagccttagtttccttgtcttttatgaggttaacacttaataacttcctaggccttatgagagtttgaggaaaacataaactacctcaccgtgagcaggtaataagtggtggtagctttctgaacacttcggatatcaaaggagaaaacgtttagttgtgttgttttttgagttagccctcataaagaatattcacctttttcattgatgtttttaaaatgtatgtcttatctctctacagatgctgttatttacacacatacgactggcccatggcttttctaatcacaggaagcgattgcaggcagttcaggccagactgcatgcaatatctatattaggtaagagaagaatactttaattaccaggccgtattagacagtttgggcctgatttcctttgaacttcattcatctttgttgctatgagtcctattatagttacctaggtagcaacttaaatacttccacccctcccagtgttcactgtatttattcattatccttgagctccttaatgttggacgagaaagagggtatgatgatgttgattgacatgtcacctgggtttattcttggtattcgtctctttttttttttttttaatagatatgcttgtagctatcgttcactgtccccctactctttctcttgccattgtgtcttcctcctctctcatcctttcagggatatcattttgaattaagtcacaaaatattcagtagtcaatactgtgcatttaacttcttttactgtggcacagtaaaatggaaaacacgtggttttgtaatcagtcctgt

SEQ ID NO: 50324 - DNA, 1049 bp, Homo sapiens
tcattgaagaaatcacctttaggcagaccatcttgccttgattcttaagttcttatttctgttcgttttttcctcttgtttgactttcacattggatgtcttctcaacattatgttccaagcagccacacactcttaaatatatatatgtatgtgtatatacatagagagaaagagagataaggtctcactctgttgcctaggctggagtgcagtggcgcaaagtcaccataagcactgtcttaacactatctttttcctttttcaagagctggggtggaaaggagaatggctttggacttgcagaatgttgcagagacttgcatatgatggtaagtaactctttgggatatgggtgtcttttgacagagctgtggcctctctgtgaaccttactttacaatgaattgtggtatatgaagtgacgccttcacatcgagacctttgaggaacctaagatcagttcagacatagctgaaccacgtctataggaagcagtctagcagtgcttgggctcttgatgtgctggtggtagataaaaaaatctgagaaatagagtgtgtgttcatacccagttcttgagtaggtagctgtatttgttgaattaattttaatgtgattttttttaaatcccagaaagtatgttcgcttgcattctcacactggaactattgtatcagaactctggacagtgtggtgtgatttaggaatggctgcttggagagcagttctaccattaggtttattgagaacttataatgttttatgtgctttccttgtttatctctctgcctttcacccatgtttaagttatgagctcaggccatcctcctttctgctttgatatgttgctgtggagctacaaaacacaatttgattttcaataattattttgcatctggaagcaactatattttccacgtgggatttgtcttgtcagtttgtcgtgtttagcacaaatggctgcagtgaaatttagtgtatttatcttagcaagcctttttttcctaaagagaatggctcttttctggtctcagaaaaccacagatta

SEQ ID NO: 50325 - DNA, 1039 bp, Homo sapiens
ggatgttacagtaacactaccagataggtgaatactgtgaggctcagaagttacttatgtattttttttttgttttttgtttttttgagacggagtctcgctctgtcccccaggctggagtgcagtggcgcgatcttggctcactgccagctccacctcctgggttcatgccattctcctgtctcagcctcccaagtagctgggactacaggcgcccgtcaccatgcccggctaatttttttgtatttttagtggagatggggtttcaccattatttttggacaaaggccctgggctctttgcttctgctaaaatgtgaagaataatatctgttcttcctgtcttaggcatttggggattctttgagcatggtcatgttcgtttttttaaataaaaacaagcttacttagtacttgagaaagcaagataaatagataataaattaataataataagggcaaagaactagtgttattctgaatagtactgactaaaaagtaccctagaatcttaacatttaatatgttgattttgttggcagcgaaacaaacttgtcttcctgataaaaataggtgcttggtgttttatgtatgcaacaaaatttatcataattgtgtatctactcattttggtatattttcttagtctttatctgatgaatatttcttcacaagaaacatttctttatatttcatataatgttactagttcataaatataacaacagcacagactttcgtgagtcacgtttgagttggcagggttttttaaggatctcagcttaccaaaactttctaattaaaggtgcttgttttttatcaagttgcaaaagttggcaagaaggattttgtggtgacactaataaaagtattctgaaacaattagttggaataacagaagaaacaaaaggaaaataattgtgtagatacacagcctttcaagcttattctgccttgcagattcagacttttggtttgacttacctgtctgttctctgtagcatcaagcctttataccctcatccttactttatggtttt

SEQ ID NO: 50326 - DNA, 1079 bp, Homo sapiens
tgccttttagatgaatattttgcaaaatattcgacttagtttttgtgaaataattccctttctcatttaaatcagtcaaattgattaagtggaagtctgttaatagcatcaactgagacacagaaataaatgagaaaacactgataatgaatcagggtgagttgctgtatcagataatatcataaagctatagtggttttattataaagccaagtttttatcataaggctttttatgattaagccaagtcttgcagttggcacaggaatagacaatacatctgcaaaatgaaagagtataccttatgttgcttagaacagtgggacagtaggctgttttgaggggaaaatgtgtttagaacttttcttcacacttgacataaatcctaggaacgtatttagaggtaaatacaggtgacttttaagatctttgataagagtttgctaagaaagttaacagacctagaagtcattaaaaatacagctttgatcatgttaatttggttatttgtataggaccacaatagcatctgacagaattcacatcaccctacttttaggctgatacaaacacactaatatttcatactttaattaaatgttctgacaatttaagtagaagttaaaatgcaaactgtttttggtataagtggctcacatatataaagtatcgggtatgtttctttgttttgttttttaggtaattcagatccagttgttgttcttcctttggatgattttaccacagaaaggactgcttaaatgattgcttttttgtccctttgcatttttgacactttttacctttgagaggcttgctactttttgctctgaattgatctaaagagattgtagattggaggttaatttctagtcctggagaatttggaatcttgacaggtgcagtacattgcagcctttggtaatagattgatgtgtttggtgctttgcaataaaagatttttacaggtttttgaggtttagagataattaggtatttagtaatggtacctccaatactaatatccctcattaaaatttaaaaatttcatgtttctctaaaatgtaaaatttctctaa

SEQ ID NO: 50327 - DNA, 1727 bp, Homo sapiens
ctctgattcaatataacctaccaggcattctggttaactttcagaccatggtatagattccttaattgtttttttttttttttttagatgtttaacttattattgtttttgttgtcagcacctttccaaatagtttgtctgcatctacctttatccaaatccaaggtgggtttttgttttgttttttgtttttttttgtttttttttgttttttaagcccaggtggattgttgggggaataaaagcattttctcatgaggtttccattttaatcccaagagattgtctggcacatctcgttttcttaagtagtaaatcctagcaaaaggaaaattgctgtgtgagcttaagggttccttttctgattctccttatttgcaactccctcattccaaaacatcttttgtgaatacttttcttttctcagcctgcagactgcagagccttaatagacaaactcaaagtttgtaatgatgagcaacttctcttggaactgcagcagatcaaaacatggaacattggaaaggtatgtgaagtcaagctcccaaaagacaggactcaccatactaatacatcattttgtatgctctgatatggaataagaaaccacaatgggatagcctcattcagcaattaataagcatctagcatgtgccatgtgcctaacacagctttaaaccagtggcaaggaaaattttgctggctgaggatggagaattgatttcacaggtgatgcttaagaatctcaatcacagaattcctgtggtttgacaatataagtttgagataatttctggatttttagtttagaagaatttttattagataactctaaaaatgaatttttctgataaaatggattctggcaaggatagttctcttgtcttcgtagatcttagaatgtaaccggagttctccatctaaagacctagctctaggggttttatggtgtctattggtgttagcacatatatctagatgggtatgacaatgaactacagcacttttagctcagagtatgatctttctcatatgggcaagggtgggacgtgaacttgtctaggtgtcatgctcagcaatctcttgtaacaaagctcagttagaaagcacccatgcggcgcttctaccttattcttacatcctctttttcctcccctctccagtgcgagttatatcactgggtggacctgttggaccgcttcgatggaatactggcagatgctggacagacagtggagaatatgtcatggatgctcgtatgtgataggccagaaagagagcaactgaaaatgcttctcttggctgtgttgaacttcacagccttgctcattgagtacagcttttcccggcatctgtacagttccatagaggtaggggaggttaaagcctgtgtaccctgttcttgactagaattgtgtacatccagaaataaggaaattgctatttctattgcttctttccttttcattgtggagctctgggtttttcattgtcaaagataatagtagaatgtttcttggatatagatactatccttcatagggttgatgggaagattctgtactatcacctttgctttgccttttcaagattcaagaaatgaatgagaaatgttatatatgtattaaagtatttaaggaaatttgcatgaattgatttttgccctaggttgttagagcagccccacattacttttaaattcctagaaatagtttgattttctcatc

SEQ ID NO: 50328 - DNA, 1049 bp, Homo sapiens
tctcttactgaatgccatatatattgaacgtactcattttcatatctgttggaaatatcttcatttgcttttgattttgtttttgatgtgttttggcatctagaagttttgacaactgtgtacttgaatgtcttttactgaaggacaaaaagaaaacttgcttaagaaactataatttaaaaatttaaagtggaaccaatgtaagaatctactgctacgagaatagaagacctagaaaagtgatcctagtgtatataagaactagatatatggtaatagagggattataaattggaaagaagggacagtattaggaaaccatgctagaatgattatcttgtagagcatgtgggactattatattgcgataaattttagataaaccaaaagtcaaatgtttttaaaagaaataagctataggagaagtagaacatgtaggtgaatgtttactttgtcttaagtgggcatggtctttccaagcattaaaacaaaggaaaaaaaccataatggaaatgttaaatactgtatccaaaattaaaaagacatgacaatagccatcctaataggtgtgaagtaatatctcattgtggttttgatttgcattcccttgatttccttgatagggagcacctttttatatattttaaaactatttgtatgtaaatagacatctggataaatgtctattcaagacccttgcccgtttttaaattgtgttatttgggatttttttgctattgagttgcaggagttccttatatattttggaaattaatccctggaagacattaggcaaagtgaaataagtcagccgcagagggacaaatagtgcatgaatcctcttatatgaggcatctaaaatagtcaaaggtgtaaaggtaggcagtagaatgatagttaccaggaaatggtgggagagagaagggggagttgctgctcagtgggtataaaattataccaggcaagttcgttccagagatctgctgtagaacaacatagtgcctatagttaacagtcaggtattgagtatagtctgccctccgtgtgtg

SEQ ID NO: 50329 - DNA, 1881 bp, Homo sapiens
accctaaatatcaaccatagaaaacattttttcttcttaaggaatggtctctgcagaaatgttttagaacgtattctgaatttttcacaaactcttccttgaatgcctgctgattgaatggatacaggtcgtacaggcaaatacacgctatttccatagtactgagtatattggactaaatctaggcaaaaagctgcctaaaatttatactgtaattggtcagctttatattatggcagccttctcgggggaggaacattgatttctagtgactgccactgagttaaatacattgttaatagcagaatcttttgtgtgtaaagagcctgcaacccacttctacctctgtgcatgtgtcttagttgctaacaggagaaacttatttcttcttgtgctttggaggacttgtctgccatcaaagatctagggattatacagtggatctgatcaggctgttgtctgcttttgagccttccaaattacatggcttaataaaatgattgttttctgtgctcagaatatttctgttgtgatccttatacttcattttctagttgaaaaaagtgttgttttgcctttgctcttatgatacaactaatacatttttattggtaggaacagtaaaaggtgcataggtaaaacagtcatacttaatccttttggttaacaatgaattaatattctgatgcctagcacctctaagctgttttctttagacataagttttataccgtatgttctgtgttgtaatctttttatttcatcatgaacatctttgtgtattacatagtttgcaatatttttaacagttgtgtgacattccattttaaaccagtcgtattttggacatttgatcttttttttagccttgtgatggaacagtaggtctttttcagtcttttactattatacatggtcatgcagtatggattcttgtggttaaatatttgtgtacatctttacgactttctttggattaattcctagaaatggaagttatcaggaaactgcagggctatggtgaatttttccatcctgagatgtgttgcaaacattgtacactcttattttcaattaagagtttgagatgcttgtaaaagagaaaaaattttcattttgacctgatttggtttcagtcttgtgcaacatagggatgtgggccagtttgatctggagagattctttacctctctctacctgatagctgtgcctctgagttggcatagcatcataactccagtgtttttactttaagcattttgcattgctcttcattctgtattgtctgtgtccaagcttgtagagctcaagattgtagctttaagttctcacttcttttgggattttcttttttcagatcgtaaagctgaaaattgaaatcatgaaagtagacaggactaaactgaagaagacacctactgaggctgtaagtatccaaaagtttactttgcttattttttcttcattaaaaaataaaaaaatatttgtgaacagttcatccatgctcttcaaatctcatcacccatatatacaaaaggcagtaaaacaacaacttgtctagaaacagtaagattttcttttgaacttccctggatcaaaaaaatggatagccaagagaccagtggaaagtgaacaccgatcagttagttcttcgtagctgtgtgtgcctgaagtcagctctcaggctgctgtgcaattccttcctatgcagaaaggatgtgtggtataatggaaagagcagatatgggttcagatttttaatgtacttctgggatcttgcaattttgttttttagaaaatgaaagtggtaacatctttcttactagtttttttgttaaggccagtgttttagcttgtctttattactgattcttaatcaca

SEQ ID NO: 50330 - DNA, 1057 bp, Homo sapiens
aattccctaggtagcatgtctcaaactgtattctttggaatacttcaattggactttgagtagatgccacttgagaaaatggttctgtgcgctaataagcctcctttacctaagatgtcttagagccattaataatgtcaattagctatgtgactgccctagtggaagagaaattctgtctataacatttcccaaattacaggattcttgtctccctttatagagcaagacattctaacacactttggggaactccagtctcagtattgtctggcttgtaatggacactcagtatactaacgttcccccctcccactgttgaaaccagttttagaaatatgagaacacaacaacttctaaatttttaaagttgatgtctcatggacagtgatgtcttggttttttaaactacaaatgtttcttgcagtagaattatagacaccaaggtaggactgcacttgttatgggaacatttgtgtgtgtgcattcatattggctctgttattttattgggtgcatcaaatgcttacacttgggacttagagtctagcgccactcatgcaaataacctgagatgatttagaattatgccaccagcatagtttctaggcatccagagtcttgtgttggcagcagaagtaccccaagctaagctgtttccgtggggggtctggctgtagttccaggctccctagcttccttggttcctcttagttttctgcacgtggagctctagccttctgtcagttctgtgagctatcagatactctccagtaaattacttggctgcattaattatccagtctttctgtagttacagacacttgactagtatagtacactaggtcaaaacagcattagagcaagttgcttatttgtttgaagattcatcagtgactcatctgcattaaaaaagtaaaatggttgtgatttgcttatttcagtgcataagttactctgtgctcttgttttggaggattgtttttttaaaatagactttatttttagagtagttttacattcccagcaaaatcgagcagaaggtacagaaatttcc

SEQ ID NO: 50331 - DNA, 1115 bp, Homo sapiens
attcctaatagtcatcagtatcaccactgttaacacatttgggcagcaccatgcatggcaggtcagcaaacaggtaaatcttatttttttaaacattacacataatatctaaagtatagtatgtggcatgtaataagtgctgctgaataaatggaagtcattgttcagtttttagcttaatatatctttttttttcttttaacataacatttactgaatgttgctaagtataaggagtaagggacataaaatgaatgagacttggtctctgcccttgagaaactcacagtcgagttaaggactgtgaaatcatgtttaaagttccttagccttttcctttgtgtcatcatttcttcccctgcactgtctatgcatgatatagcctgtccattgtttctcacagctttcctaattctgtgtgcctccccagcctttgagactgctgatatgtgagaaagccaacaattgtcttctattaatacagggtaatatcaagaaaaacctttgggccaatattggatttcagagtggcatgtgcagttgacattacaataccagtttatggtctttagatgggcctgtacacctgggctccagcctctttcctgtgcctttaaactgccttacttccatctttcctcccctataccctacccttaatgtacttggtacataaaaatagaggctcccatacccaggtagtgatcaagtacaatgtaaagaaacagctgtacttcatataaactaggattcgagtgggcctagggtatatcactaaatttccattcttatctataaaacagtaatcggaaagcctatttcataggttgctgtgagcattaaagcgagatgatgtatttttaaatgcttgtaaagtacgaagataaggtcattataatttatataaaatacttagtagctatgttacttggggcaaattacctcatcactgagccagtttcctcatcctttaaatgaagatggtgatattcatttaacaaatatttattgaggacgtagtcattgcagctacatcctgggaatacaaagataagtgactggagaatgtaggacagtgtggtctaggggaaggagacttgcaaatcacacaaaag

SEQ ID NO: 50332 - DNA, 1030 bp, Homo sapiens
gttcccaggtgatacttctctatttcctgcaaattggcagctggatccagagacttgataaatttcaggttcgttccctttggcaaatatattgcgggggggtggggtgggggggtgttcattcacaacattgattatgttacgatgacttgaattttttggatccattaatttgttggggggctacaaaatggtgacgttctgatgctatcattttgttttcatctgttagctggaataattttgtttcccctcatcttttatttggttactcagcaatatagtttatataggaagagcaggataaatactcaattttttaaaacattgctttcaagatgatgaattggtcccctgtcatcttcaaaaggttacacatataagtgtatatataactatgcatccatagatgtaaacatttgatgggtttcaatacattgcagttctgatccttagcgaagttcaaattgcccttcttgtggctagtggaactctcttaaagttggctcctgattcttactgacatgctctctagtagtctttgatagcttccttgctatctggtatgtcaagatgtttccaggcgcattcttgtgcatttctgccccagacctggaattagctaatgggattaagataaaaggtgaagtcaaaagaaattctgtttttgccaagggtagcttggaactttctatcaagttccacttttctctttccacttaacctccctagcctgcctcttcattcttctctacctttttattagagttaaggtggaaaggtttgagaagccttgataatcataggaagatcatggagcccaggcagttccggatttggggcctggccacttactaggtctgtcagtttgggcaagttaacctatatcagttatgatgtggggaaataccttattcatatggttattggaattaaagagaaaatgtaaggtgttagtacatggtaggtgatcagtagatggtaatttatttaatgtactattttacttaactccttcaacagctcagag

SEQ ID NO: 50333 - DNA, 1033 bp, Homo sapiens
atgttagtgtctcagctgttctgacccataacttctaagctattaagacctaataatgagttcctggctgtcatacagttcttgaaatggcaatactaaaacagtttttgagagcttctacttacatgttgattttcagctattatacacaaccttagttttcctactgtgatttttcatttcatttcatctgaaatttatgtttccttagcataaagtcctttaaggacttttaggctgctttatgatgatctcactatctataaggttgatattcataagtacttgggcttttggtgttttgctgtattattcgttgtttcctcaacgactggttactagatgtttatatatgttaatgtcaggaataactcaacttttaagtcgtttgatgtttcataggtggtgttgttaaaacttgatgtacttgttgaccagcttggtcttctggatatagaaatcctttcaggtagtgaagaagtggctctatgagtaaaacaactgtaggttttgtttgggctgttaacctgagcattttcaacttttaagttctctttaaaagtttttagtcatttggctttaaaaattacagttggtggcatagaatgatcccataatgtgattttacagaaagttggaatgttttaatttattatgaatgtaccattacgtggagattgggattgtagatctgattcagtctggattgctgattgaactagatgaatgttaaaattcttcaactctgagattctgatggtataatcttaggtattgaaagacagcagtttttcctttcagtagtcattaagtaaatggtgactaaaagtagggagatgaattattctggaatgacctttcactataaccatttagatttaaaagattgatgagtctgaggatactgtcatgaatttatgtaccacctttagcacaatccaggttttaggtccttgtgattagatatcagagataattgccccagaagtgcgtgggtatattacatttggtggctgttaatgttttggaatga

SEQ ID NO: 50334 - DNA, 1083 bp, Homo sapiens
caaagttcaacctgagttgccaggatgtttatcgtttgtctcccaatatggccaaaaagcatgtatgaaggtgaagaataatttttatatgtacagttgttgttttttttcacagaaacaatgaaacaaatacgtccttagtgtttatattgagggtataaacttgtctaaaaaataaactgtcttctataatttcatttgggttgagaactcagttttcaggaatgttgtctaagcgttagaagtattagagttgttggttctgaattcctcagttacttctcaaagcaggtcctaaaaaatgcaaatagatatgtaaggactattgctttagaaataataactagttatgtttgaacataatagaatggttaaccctcctcacacaccctaataaatgtgttgtgtatctcactcctctcccccaactttttttttgtaggtcctccagcagcctgacctgagtgggttagtgatccagagaaaccagcaggccaacttggtcaggaaggttcgggaagctgttggagcagtgtggggaatttcccaccaggatgagtatgattggctgtgattttaggttagtttttgtaaatcttgtgggaagtatttgtattttacttcctggaatggagatagtaggggtggatgtattcccattctgtaatggagctactttggtttcttccattctctggatctgatgtggtactggttgcttctttttttaaagtggagctcattactgaattaaagggaattgtttaaatgaatgatgtctgtacatgattttttaaatcaccctaggcatcgttcaaaaaataaaattgcaagtcattatgtctaaccagttcttattaaagttacgaaaaatttcaaacatgcaaacattgaatagtataataatccccccacttacccatcaccagctttaatagtatcaacttgcacattctatttcatctatacttctgtttgtttggttttttttaatttttttaaattgagatggggtttcatcgtgttgcctagactggtcacaaactcctgggctcaagccatcctcccttcttggcctcccaa

SEQ ID NO: 50335 - DNA, 1046 bp, Homo sapiens
cttacagcgccaacacaggcatgtggtcttataatttgcagaaatgcgtgagaacttgtcaaattctttatggatatctcattctttagcttttttttaaccatttgggttaatctattgtttgtcacaactgttatccatcaccttaaacagctatgacattaagcacatgcctttaaaattcttttttaaacacccatcagggagggagaggcttttagtactaggctttgaaagaaagctctagctcctttctgctcactacattgctgggaacttggactgctgtttttcaaggtgttcactaagctggggtaaggtagatgtgtctagggcaagttaaaatgcacaaagctcattgttcttactgagattcagctgtttttcttgaatcaagtgctttccaggttgctgcaagccttttgttaatttccagagttctgaaaaaatttatcctgacaatttttgctagtttttttgttgtttttattggggagtgaattcttggaggtcctttgccatgtttactgatgtcgcccatcataacatctcatccttaatacttaaatatgcattgaatgatattttcttccataaccacggtgccattatatgacacctaagcaaagtaacatttatttcttttttttttttttttttttttttgagacggagtcttgctctgtcacccaggctggagtgcagtggtgcgatctccgctcactgcaagctccgccttccgggttcacaccattctcctgcctcagcctcctgagtagctgggactacaggcgcctgtcaccacgcccggctaattttttgtatttttagtagagacggggtttcactgtgttagccaggatggtcttgatctcctgacctcctgatccacccaccttggcctcccaaagtgctgggattacaggcatgagccacagcgcccggccaacatttatttcttaatatcatctagtaccatgtacttattcaaatttcccccagttgcaccaaaaatatcttttgtaattggcttacttaaaccagaa

SEQ ID NO: 50336 - DNA, 1039 bp, Homo sapiens
ttttttcttttctttttttttttttttttttttttttgagacagagtcttgctctgtcacccaggctggagtgcagtggcatgatcttggctcactgcaagctccgcctcctgggttcacgtcattctcctgcctcagcctccccagtagctgggactacaggcacctgccaccacacccagctaattttttgtattttttagtagagatggggtttcaccatgttagccaggattgtctcgatctcctgaccttgtgatccgcctaccttggcctcccaaagtgctgggattacaggcgtgagccaccacacctgtccgttttttgctgattttctaattgctctatccattattgaaaatgtggtattgaagtctccagctattattattgaatttatctattttctcccatcagtttggtcagttttcacttcatctattttgagcctctgttgtaaggtacacatatgtttgtaattgttataccttgttgatggattgacctttttatcattataaaatgctcttctttgtctttagtaatgatttttgtctcaaagtctgatgttagtatagccattgtagttttcatttgagtaccacttttattgttatctcttttttcatccatttattttcgacctgtgtcttcaaatctaaactgtgtgtcttgtatagatagcatatagtagggtcatttttaattcattctgccaacatctgcctatcagttggagggttctaatagctgccaaagttcgactcaatatccattttgctatttgttttctatgtgtcttattttttgttcctcaattcctccattagttactgccttcttttatgtttaatagctattttctaggaccccccccgcttttttttttttttgagacagagtgtcactctgtcacccaggctgaaatgcagcaacgcgatcttggctcactgcaatctctgcctcctgggttcaagcaattcttttcctgcctcagcctcctgagtagctgggattacaggtgcctgccatcacgcct

SEQ ID NO: 50337 - DNA, 1051 bp, Homo sapiens
gatccacctcggcctcccaaaatgttgggattacaggtgtgagccaccacatccggcttctaccatgaatttttgatccttggtaattcataagcaaacaacagtatctcattgatttaatttacatttttttgattaagcatagcctctatgttttattagcatcagagtttcttccattgtaaattttgtttacatcctttgcccacttatccatgtggttcttcaaggttttcgagttgcccattttatatagtaagggaatagtcatcctttgtttcatacacacacacacacacacacacacacacacacgcacatattttatacttataatgtgcttgtacttcttcctcattctacaggaaaatttgaatatttcagtatcaagtgttgatcatttgtttgcatattcagagagtagataattaacacccttgtattttttaagcataatttttaaatatctaatgtgttgatctacaaagaattgcttaatatatggtactgagcagaagatataaattggtattccccccaaaaagatgactgttggtgctagaatcacattcccactaagctgaaaatgctttctttgccatgtgtactgactcatacgtatcatgggttgtttgaggcacatccattttgtaccatcaaagttctgtctgctcttgtgctggtatttcacttattcactacctatttatgacttagaaaaaccacagacttttttattttgaggcagagtctcactctgttgcccaggctggagtgtagtagcatgatctctgctcactacaacctccgcctcccaggttcaagcgattctgctgcctcagcctcccaagaagctgggattaaaagcacccgccaccaccatgcctggctaatttttgtatttttagtagagatgggattttaccatgttggctaggctggtctcaaactcctgacctcaagtgattagcccgcctcagcctcccaaagtgctgagaattacaggtgtgagctaccacgcccagccaaaaaactgcaaacttttaaaaag

SEQ ID NO: 50338 - DNA, 1061 bp, Homo sapiens
aagtgagctgggaagttgtgcttctagcctcaatgcttgcagcatgtttcactgcctacaccatagcttacagtgtccacctcctacctctcattttcctccagtcccatctgtcaaaatcattcaggatagttaaaggcttaccttttctccagcgcctctcacttaaaccacaaaactttgggctggttggaagaggacttagagatagattatatgtggtccatgggctttcaaatgttttaaagcaatggaatcctttttttaaaatgacatcttaggtggaagcccaatattcaaagcataactgctttgaataagatgaaggtgggaggcccagggctccacttgttcttctcattcgccttctaccttcccccgattctcggggctcctcccaagaagctcaaaggagccacagaacatcttcaaaaatcacctttccagtctagtcctttaattttacagctaagcaaacagtctcaaatggtcagataactttcctgagctagttacagagctagctagcagcagaattaggactagaacctctccttctctcaaatcctgtagtccttagaatttgaaccacacagattagtacttgattattttctgtctcatgtcagctacttaatggagtattttctctccagttttgacagtagtgctttgctcgtcttcttacttgtcaatggctgggtaaagaaatgccacccaataaattcttgatgactcattatgtaaaagctagggtgtgcatatgtggagcatctataagccacttccatggcagtaccaccagtaccaggaacagacctctgctgttagtgttgagagaacccttgagtaagctctaaccccctcatgtactaacactcttgtaggacatcttccaacagaacgttgggaagacgagcaatatctttgggctgcagaggatcttcccagccggctccattcccctaaccaggccagcccattccacttcagtgtccatgtccaggctgtcactgccctccaaaaatggttcaaagaagaaaggcctgaagcccaaggaa

SEQ ID NO: 50339 - DNA, 1059 bp, Homo sapiens
gctgttgtttttaagatgcaaggttaaacaacctgagagtgtttaaaaactgtatttgtttgtttatacttcacttcatcctgaaagactattcaaggtagcttacagagatgtggagaagccaaaaaaaaaagagagaaaactagaacaaaagtgaaataagattgggaaatagaatgcatgtggtgggtgctcagcacatttcccggttggtggaaatggactatagagttttcagtgaatttcctgaaggtcagaacaaagagaggagtgcagtattgtaagatttgtggctttacgtaggataaaagcaacagatgtttcagagaaacatttctttacctggaactgagccctgtgaggttgctctagtggtttctcataaagaagacactatgagatggggatagtgcaataacttctataatccacatgccaagtgagtagtctggagtggggctggggagtatgagcatttagtggaggaaatgaacacctttgactggagaagcctgtggagcttggacttgggacttctggagatgagtagaatgaggatactgaccagacttacagaacagaaataagtgtcctatgtgcctttggggattctgtggagggaacttgttctctgacttatctgaccctcactgaactgtggggtattttattcaggcctcaatcttctcttcctaatcagctgacatctgctctccaccccttccttggtagactttctaaccttgtggagacaccgaagattgttcgaaagctgtcatgggtcgaaaacttgtggccagaggaatgtgtctttgagagacccaatgtacagaagtactgcctcatgagtgtgcgagatagctatacagactttcacattgactttggtggcacctctgtctggtaccatgtactcaaggtaggaatgcgcatggcttctggaggcagccaggccttgggcctccctgtacgtgtcacatggcagcacagaaacattttgaatcagtttgatttacattttgaataaaaaaaatttgatttggccgggcgcggtggctc

SEQ ID NO: 50340 - DNA, 1056 bp, Homo sapiens
acttagtagttttgtaattgccaacaatttacttaaccactcagacccagatttctcatctgttagattaggataatattaacgatgatgatgatgatagctaatacttaacatgtgccaggaactttaagtacttaactattttagctcatttaatcctcttaaccaccctgtgaagtgggtactattagtacttccatttcacagatgcagaaactgagatgcagaaaggtgaagtataaattgcttaagttcacatagctagtgagtggcagaggtgagattcaaacccaggcagtttggctcctaagcctgtactttaaacctctgcttctgtgtttaatgtctgtgaatgttgtacggaaggccctgatttgttgtggagattaaatgtgataatatgtgaagttcatagctcagtttttttctcagtgccttttatgctaacttcaaattcattcactcactatcctgttaccttgctttactgactttatagcacttacgaaactgttttgacactgcctctctgtctcccgctctaaaatgtccagtccatgagggcagtgtctgctcaatcaatatttgttgaatttatgcactcatttacttaacaaatactgcttaccgtgtgcttggctttgcagtataccatggggataactcatcttaatcacaagacctggtgctataataattatcctcttgactaaggaagctactcagagcaaatcagcatttaccacccttggtcccaggtggtaactatcgagacagtgcagccagaagcccgatttttcatttgtctgcctccctgatatgaggagttgtctagcacgttgatgtttgttgaataataagtaaggcaagactgagagatgggaaaggtgaggacttttggtaaataagatacactatctggcaaatgtagtggggacagacagcaggtaagtgagcaattccaaggcctcgtggtgaaggctgaaatagggatagtgttgtgggggtgccacagcagcagggaaaaggaagagcaggaatgttccaggtagaagg

SEQ ID NO: 50341 - DNA, 1022 bp, Homo sapiens
ggggctgagctccgcgggcgtggagtccttgcagcccaaagcatgaggaggtccctgtaggattctggactgaagacgttcttgtcaggtttggggcgtgaggaggttcctgtcagttggggaagcgttaagattcctgtaagttttgggggctgcgaggctattactgtcagttttaggatatactgtgaggtacctgaacatttggggagactagggagctctcatcagtttgagggggggctgcaaggaaacgctgccagtttccgagcgatgcaaaagaatccttgcttagtttcgggagtgtgaggaaattctagtcagtttgaggggttttgaatagatccttttgagtttcagggatgcagccagaaccctgtcatctttaaagtacagaacgagctggtcagtttagagatttatatttatttcagttttgggggtgatgagactcctgactggtcggggaaggaatgatattgagagtgatggaaaggattatttaaactctccgaacacgaccccagaactgtgatttgagttgggcgcctagtcttgtctgtcttgttcgtgaaggctttgagtaacctgaagagactttcagggatcccttatctctctctggttggccctatttcaggtggtgagaggagggtcttgtcttgagatacccccagcctcatttttgacgctgtggtttgcgtcataatagagggagccctgtgaaacaggggtcagctaggggagggttcagtgagagatgaaagaagcttcccgaaaaggcttcaggtattttcttgaaacccggaaagaagttatcactgacaacggggccgaagaaggtggggggtggggagtggagagtgtgggggcggtgggaagcctggaaggttgagctccgttctttacgtgtgaaagaaattctaagggccgggtggactttctctggttgccccctacagccgcaccagctgtgttgcatcccggcggcggtaactctattggagaactgagggttggtg

SEQ ID NO: 50342 - DNA, 1043 bp, Homo sapiens
ctaattttttgtatttttagtagagacggggtttcaccgtgtcagccaggatggtctctatctcctgacctcgtgatccacctgcctcggcctcccaaagtgctgggattacaagcgtgagcaaaatatttacactccatgactcagtaaccttcttttgagtgtccatctagagaaacatgcctgggcacaaagaggtccctacggcgatgttcactgcagccctgtaatagtgaaaaattaagaccactttaaatatccatcaagggagaggagaaatagattaagactgcctccttccccagtgatggaattccctgcagtagttaaaaagaagaaagttggctgggcgcagtggctcacgcctgtaatcccagcactttggaaggctgaggtcggtggatcaccaggtaaagagatcgagaccatcctggccaacatggtgaaatcccgtctctactaaaaatacaaaaattagctgggcatggtggctcgagcctgcagtcccacctactcaggaagctgaggcaggagaatcgcttgaactcgggacgtggaggttgcagtgagccgagatcacgccactgcactccagcctggcgacagagtgagactccatctcaaaacaaaaaataaagttgattttttttttgtttttttggtagaaagatctccaagacttattgtcaactgaagaaagcagttggccgcctaatttgattgaacagtatgatcctgttcatgtgaaaatgataaatacccacaccaacctccatatttctgtgttactatcctgccactacccacccggacccccactcccagtggagaggattttggtttgagcagtgaggctgtttgagtggcttcaatcccagttcacctcacaattaccaccaagtaggcatgggagtcagctacataattggtgaagcccagcacaacgtgaaaatggaatggagagcctcacgttcaaaaagcagaggagaaagccgggtgcagtggctcacgcctataatcccagcactttgggaggctgaggt

SEQ ID NO: 50343 - DNA, 1034 bp, Homo sapiens
cacactaaccaagattatagaaatagctgtgtggatatggctaaggggtgggggaagaagggggtgagagataaagaactgatttatgataagaaatagttatcacaatgtattacacatttactcttctaatcactcttacaaacacgtgagctcattgaaaccacataaataccctgtgaagtatttattattctccattttattattattatttttttgagacagggtctcgctctgtcacccaagctagagtgcagtgcactgcagcctcaacctcccaggctcaagcaaatttcccacctcagcctcctgagtaagctgggactacatgtgtgagccaccacacccagctaatttttaaatattttttgtagagatggggttttgccatgttgcccaggctggtatcaaactcttggcctcaagctgggtctcccaaagtgccgggattataggaatgagccaccacacctggcctgttccccattttaaacaggaggaaattgagactcagaagaatgaagtatcttgccccaaattatctatgaagtcagtatcagaattgacattacagcctgagctaactgattgcaaagccccgtgctatgctaattccaatatagtataacaactctagttgttagagacaaacatcagactcaagtgtggctgactctagtgtacatgcctttaaccattactactagagctttctttctctaagggcaagctacaagagaggccttggtatcagaagtttgcttgggggcatggaatcagaccaatgatattagctagctttttttttaatgagtcacctaggctggagtgcagtgttgcaatcatagtttactgcagcctcaaacccctgggctcaagtgatcctcctacctcagccttctgagtagctgggactagaggtgcatgccaccatgcccagctaatttttatattttttgtagagacagggtttcgccatgttggccaaactggtctcaaactcctgagctcgggtgatccgcctgcctcgg

SEQ ID NO: 50344 - DNA, 1044 bp, Homo sapiens
gggagaggcatgcatcaaggctttatcatttctagcaaaaattcattcaaatatcaacagttttccagagatggaacatgaaattggacaaggtttctcctctttgtttatgggtaaagttgaggaatctctcttgagaagcaaatcgtttaagaagcagtggattcactctcagctataacaagatatttggattaaccatgtgccatcccgatacatgaagaataaagatacataagaactagtgttcattcacttgacagaataattctaaagtccatcaggaaaggcaaatgaacaagattagcttagaaaatgtaacaaaaataataataagatatatcttggtcctgcagcaagactgttattggaaaaaaaaaaaaaagaggtgttttggacctattacgtaccgaagtgtattataaactcataccaaaataatgtagtattatcacaaaaattgacagctcattgttttagagcagataataatgaataagatccttgacacgttagaacttaaaatacgctaaagaaagcatcacaaatcaatgaggaagagatgcattttttaaataattatttagagaattggatttgtatttggggagaaaacatccatttagagccatgcctcacataaattccagatggattaattataaagatgaatgtaaaaaagataaaaggcagaataaaagctaagcaatgatttgctgaccttgagataggaaagggattttttttgttgttcatttcttttaggaaaggaattttttaaatgagagtacacaagccttaagcccagagtattgtcagagacagtaactatcttggtgacaggaaaggcaaatacctcagttgcctgagatataggcaaactgaaaactacaaaacactgttaaaaaaatcataaaagatataagtaaacagaaagataccccatgtttatagataagataaaatccttcttgttgatttctaactagaaaaaaagaatataaaatattgttaagatggcaatactccccaaattgatctaca

SEQ ID NO: 50345 - DNA, 1034 bp, Homo sapiens
ttacataagcataatgccattattactcctgacaaaattaatgctaatttcttggtatcatcttaatatccagtccattttcagattttcctgattgtcttaaaatggccttttgtgattagttcaaatcagaatccaaatgtcaactcattataatattacatttaatagcaaaaaagccaaaatgtctcatgaaaggaagcctgattaattgtgacagtgtcatatacagtagttatctctgcaggaagatggatgatatgtttttattgctttatacttttccatcttttccaagtgttctgtactgagaatgaaggggcaaaactatttttaaagaaaatattttaactgtctctctgtggatttaccaaatgtgaattccatatctcccctcaacttcactctttttcttagtgatccatctttgatgtcagtgtcccttgcttatcttgcctttctaggttcgagctcatcagctggttcttcctccctgtgacgtggtgatcaaggctgtttctgagtatgtcagttccatcaaagatccctcaaacctggatgtagttgggaaggatgttttcaaacagtctcaggtaagttagcattccccttcctaagagtcctccgttttcttaccttcttcagcaacaccagcaggtccctgatcttttctgtgacacctaagttttcctagctgcttgtcttctccatgcttacaaatgagagctccaaaatttcctttaaaaaacattacacagcctggattgaaagtgccctttacctttttttctactgatgattaaagtaatataagcccattctagtccgggcacggtggctcacacctgtactcccagcactttgggaggccaaggtgggtggatcacttgaggtcagaagttcaagaccagcctggccaacatgatgaaatcccatctctactagaaatacaaaaaattagctgggtttggtgaagcagaagaattgattgaacccaggaggcggaggttgcagtgagccgagattgcgccgct

SEQ ID NO: 50346 - DNA, 1064 bp, Homo sapiens
agcagtattatccctgttttccaaatgaggaaactgaggcacgggcttagaaacttgcccaaagtcacccagagataagtggcagggctgagatttgtgcctatgtggtcttcctccaaagctcatactctaaacaacagtgctgctctaaaatgaatctttctaaagtgccactgtgattagatcatttccccactcagctaaactcttccttggctcctgggtaaagacgtgttcaggtcattcacttacttttttatttgagtgcttgctgtaggctaagtactagctgcttgctgaggactgagaggtaaataaggggatcccgtcctcaaggaggacaaggtttagtgaaagagataataaattgcagatactgtgggctaattgcaagtgatgaaaaatgtggcccctatagggggcatggttaattttgagtaagggagtgaaagttggggaaggcttcaccgatggtgctaagccatgaagagggctgtagatagttcagatagcggacaagggtgtggagacccgaatagccagttatgagctctgaatagattttgattggaggttggcaggagagttgaacacttgagtatgggtttgtggtttccaaagttttttttgtttatataccccatcagtcaaaatctttagagaagcagcccttagtatatttttgtcatacttcactacacagtctcatttttaaaatcccagcagttaataaaaaagatggattgaatagatggatatgtgataaatcaggtatagtaaaaatagtagaatctcagtcacgggtattcagatgttcactgtaaaattatctcaactttgccatgtgtttgaagtttttcataataaaatgttggggaaaaattcccagcagtcctctttagtccttagaagcactcttggggaatgtataaatcttattccctgtgctagattataaacaaactctgatctttttgtattctccataatgtcctgtgtactttgggtgcagggtacattgtttttttccatagtgaataggtcaatgatcctaagagaatgga

SEQ ID NO: 50347 - DNA, 1067 bp, Homo sapiens
tagctgggattacaggcacgtgccaccacgcccggctaattgttgtattagtagagacggggttttaccatgttggccaggctggtctcgaactcttgacctcgtgatccacctgccttggcctccaaagtgctgggattacaggcatgagccactgtgcctggcctgacttattttatgagttatataatgtaggaactttaattttccttttctgccccttcaaatcacaaaagtaaccactaataatttgatgcttattcttcttgacttttcttaagcttatacagatctatttacatacatataacattatattcataaaaatactgtgctgtatacatactgttctgcaacttaattttttcattttacagtagatcatggacatctttctaaatctttattgctgtatctttttgtcatttttgttattatataagtaataatatatacttgtacatagtatatatgtactacgtacaagtaaaatccaccccatccccaaacctgtagacacagctgttaacaaatctttccagacatgattttaattaatatacaaatatttataaagacatactttttatatatgatatattgtatctttatatagatatagatacatgttaatatttatatacatatacttatttacatatatgctattctgcatttttttcatttatgggtatctatccatgtcagtacacatagttccatcttactcaactttttgaaacaactgcataatattccactgatacatataatttaaagatttaaaaattttttaaattattttaaataataaatatcacataatgtgattcgaatcttaagaaatgaactgttatttctgtcatttaaactttgttgcttgaaggagactctcccaagtgtcaaggtcaaatgaattcatttatttgtttcaagtgtctgttgctatatctggatcatacttagctgccactgtttctggtgtcatggaattcttcttttttcccctaaaatacttctatgagtaatattttcaaatatattgcatgagtatcctatttggtatt

SEQ ID NO: 50348 - DNA, 1074 bp, Homo sapiens
ccctcctgactctccccactacccttcccagcctctggtaaccatccttctactttctatctctatgagttcaattgttataatttttagctcccacacataagtgagaacatgccaagttcatctttctgtgcctggcttattgttcacttcatataatgacctccagttccatctatgacaatatctcattcttgtttattgctgcatagtgctctgttgtgtatatttgatttgactcttactttaacatatatctgcatcctgacttctcaacaccttcaccattgtcgtgctggtctaattcagctctttttttttttcgctgtcttgtccaggctggagtgcagtggcacgatctcggctcgctgcagcctctgcctcccaggtagctgggagtacaggcacccgccaccacatctggctactttttgtatttttggtagagaccaggtttcaccatgttggccaggcaggtctcgaactcctcacctcaagtgatctgcctgccttggccttccaaagtgttgggattactggcgtgagccactgtgcccagcctcatctcttgaataattgtagtagtctcctaattgttcttgcttttgcttttgttcttttgtagcctttttcttattgtaggaagcagtgatagttttaaaatgcaggtcacaacatgtctcagagacccacaacctctcgttgctcatctctttgatagtaaaagccacaataatgtactaatggcctgcaaagtcctacaggatctggactcccctgcacaactctctgacctcatgtagattttctttgacttccgttttcctcttttttttcagacggagtctcgctctgtcacccaggctggagtgcagttgcgcaatctcggctcactgcaacctctgcctcccaggttcaagcgattctcctgcctcagcctcccaagtagctggaattacaggcacatgccaccacgcccggctaatttttgtactttcactagagacggggttttaccatattggctaggctagtcttgaactcctcacctcaaatgattcgcctgcctcagcc

SEQ ID NO: 50349 - DNA, 1047 bp, Homo sapiens
gggagacggaggttgccgtgagccaagatcgcgccattgcactccagcctgggcaacaagagcaaaactctatctcaaaaaaaaaaaaaatacagaggagttgaataatataatccacaatccacaaactttatttgatggatgtatagaactttatatccttcaagcaagaaatatacattgttatatgtggcccccaaaaacccttaagttaaagcagagagattttgtacttgcattactcaataagattagaaataaataatgaaataaataaccaaaagattcttaactaattagagagcagaaatcacattcctaggtaaattttgaatcaaagagaaactgaaaactgaaaatgaaaatgaaaatgaaaattataaactagaaagcaatgaaaaagagaagacattacaacaaaacctgtgggtcattgcaaaagttgtacctgttagaaaatttatagcctaaaatatcttcattattaatgaacaataactaaaggaatttagtactcatgttaagaaattaggaaaataacagcaaaagaaaggaagagggaattcagaaaaactgaaattaatttaaaatttatatacataaaaataggataaatagattttattattttgggctttctgaaaaacgattaatgtacctgatgaagaaaatagggcagaaatacacaaggaaaggaatgagaaggccgggcgcaatagctcactcctgtagtcccagcactttgggaggaggccgaggcaagtggatcacttcaggtcaagagttcaagaccagcctggtcaacatggtgaaaccccatctctactaaaaatacaaaaattagccgggcgtggtggtgggcacctgtaatcccagctactcaagaggctgaggcaggagaatcacttgaccccgggaagcagaggttgcagtaagctgagatcgcaccactgcactccagcctgggcaatggagcgagactccgtctagaaaaaaaaggaatgagaaataaaacatagcatgctatgaaagagaataaaagaaatt

SEQ ID NO: 50350 - DNA, 1033 bp, Homo sapiens
gaggcgggggtggggggagacaggtatttaaaccagcctgcattttagccccagttctgacatgttcctgttgataacactggagccacggaaggttcctgagtaggggagttcctgagtaggggactgaagacagagcatatgcaaaaccagttagaagctggggcgggggaaaggtctagccccaaggtggccccagctctgtccctcctcccgccaggatgtgaaagcccagcgcagcctgcccctcattggcttcgaggtgggaccgcccgaggcaggggagcggcctgacagaaggcatgtcttcaagatcacccagagccacctcagctggtacttcagccctgagacagaggaactacagcgacgctggatggctgtgcttggccgggcgggccgaggggacacgttctgcccggggcccacactgtctgaggacagggagatggaggaggcaccggtggctgctttaggagccactgctgaaccccccgaatccccccagacccgagacaagacctagagggtttgggacaaactgggagcccccaccccacactctagttgcccatgtctgattgggggctctagccccttccctcccagctcagtcaatacttgaactcccatcacgggcactttcaatcccgaatgctgggtcttgggttttttaattcatcttttcacaaaacgtgggcttttaaaaaatatattcctacagtgatgtcaatttttattaatccctgtccccagggagggtgggagccgttgccagtcctacctgaattaggtcgtttttctccctcatccctcaataccctaccacagatcctgcctccacccagttccccacaaagcaccagaggtaggagacctggattcaagtgccagctctgccactgaccctggggccccgacccagccctgcctcctcagccagtgtcttcacacgtacaactccacgtggggtggcaactagacctctcctgcctctcccatggcttacagcttctacccggccccaaggcta

SEQ ID NO: 50351 - DNA, 1032 bp, Homo sapiens
caccaaacgcaggcaccactgcaaggcctgcgggcatgtgagtgttgggaggcaggggcagagctagggaggggacagaatggcagcccaaaggcccactgcagagtgggtaccctccaagtggggggaggccacaagtctgctgtgggagttggtatgctgaagggaagacccgctggaatcaggctactcttgcccacttgccaccccaggtggtttgtgggaagtgctccgagttccgggcccgcctcgtctatgacaacaaccgctccaaccgtgtgtgcactgattgctatgtggccttgcacggggtgcctgggagcagtccagcctgcagccagcatacaccccagcgccggaggtccatcctggaggtaagagccagcccctgactaactctcccacagtgggcaaatgggttccaactctacccagtgagactgaggaggcccgagtatttgggaaacagtagtgatcaagggacccaggcttggagtgaataaaatgacggcaagagtgaatgaaagacagtcatctttaagtacttagacatttaatccccacagtaactaatctgcccatgctattgttctctttattttacaaacgaggaaactgaggcccagaggggtcatttgcccaaattacacagcaaatgagtggcagcactggatttttttaaaattaaaaaattggctgggcacagtggctcatgcctgtaatcccagcactttgggaggctgaggcgggtgaatcaccggaggtcgggagttcaggaccagcctgaccaatgtggagaaaccccatctctactaaaaacacaaaattagccaggcatggtggcgcacgcctgcaatcccagctacttgggagggctgaggcaggcaaatcgcttgaacctgggaagcagaggttgcggtgagccaagatcgcgccattgtactccagcctgggcaacaacagcaaaactccgtctcaaaaaaaaaaaaaaaatttaaaaattgtcttttgttattacaaagtaggataagt

SEQ ID NO: 50352 - DNA, 1035 bp, Homo sapiens
tgctatgcctcagtttcctcatctataaaatggggggaaataataacggcctaccttgtagggttgttttaaggattaaataacttaatacataaaagagcttagaacagtaccaggtataggccaggcatggtggctcacacctgtaatcccagcactctgggaggccgaggcaggcggatcaccaggtcaggagagcgagaccatcctggctaacacggtaaaatcccgtctctactaaaaatacaaaaaattagccgggcatggtggcgggcgcctgtagtcccagctactcgggaggctgaagcaggagaatggtgtgaacctgggaggtggagcttgcagtgagccgagatcgtaccactgcactccagcctgggcaacagagcaagactctctcaaaaaaaaaaaaaacaaacaaacaaaacagtaccagatatatacagtaagtgctcaatggatgtaagcttttgttatttttacagtgctatgatagagcagagaatgggaggctgtgggaatccagacaaatggaccaagcctagcttggagattacagaaggattcagggagaaggtgatgcctaagctgagtcctgaggtagaagggcaaggtttacaggcagcctctcaggccttcttccaatccagcctttagagtccacaccatttgccagaacggtctctctaaacaagtcagaccatgtctctccctgcttaaaatcatgtccacattccccatacctacagattctccacacctacagagtcaagtgtgtccccctcaccagactgtgaccacagaaagccagcatgaagcctggttcctatatctccccacgagtctgtgaaccctgagggctgggaccaggtctggtttgctttgctcctgcaccagactgaccaatgaggagtacaaccaggcctggtctctttgtctcacctaccagatggtgaccctctcagggctcaaatgggtgtgactcatttctgtgtccccagcatcacccagcacacagttgataatcagtatatg

SEQ ID NO: 50353 - DNA, 1069 bp, Homo sapiens
gtactgggttttatttatataatttttattgttgtattgttattttttgtctttttttccaaacatttcgatcaatcagcctccatgcagaggccgaggatgcaaaacccatgaatgtggagggccacctgtatgccacatgtctgtgattgtgagttcgtgtttctgagtgtgtggtatcatgtgactttatgctgttttgccactgtatgtgattgtgtctgacatggtataattgactctgtgcctatagtctttgtgtgtaaccatgtttgcaggtgtgacatggtgtgtatgacactccatggccctgcaattgtgagacatagtgtaaatgacaatgtatatcttttgtgactcagtgaaaccatgtttgaagaatgtctaactgggtatatgattgtctgtggttgggcggttgtatgaagctgtgtgtgagatggcagaattgccattgtgtgactctgtgtctttgtgactgcatgaccatgtttgcaggtgtgtgtgatactgcgaggctgtgtgatcgtgtgtgaggttgtggccgcaggtctttgtgactgtgtgtaactaggctttcaggagggcgattacctgcagttgggtgaaatggtgtaaataacaccaagtgtttctatgactgagtgggcccatttgtgactagtcatttatgagactgtgtgtgatataagctaacagaccctttgtggctgtgagtgggaggccatgtggttgtggcacagcataacttacaccatgtgatggtggtacctccgggagctcttgactactgctcactctcttgtcctcacacctgtttgcctccatctctccctatgcaaggggtttttgtggctcccttctgctacaggatgaatgtcagcctagcatccaaggcctttcccactcctctctggccccacctgacttctctatcatttgaggcactcccacagccccctgcccagccaggaccacatgagccccacattcctttccttggggcatgccatccctggggtgggggtccctcactgcctcccagaccaaatcctctctcctaagcatg

SEQ ID NO: 50354 - DNA, 1022 bp, Homo sapiens
agcctgggcgctgctccaggccaccgggtcttgccctgcggtcccagtccacagcaccaccgggccctgcgcttctcttaccacctggagggctcgcagcctcggcctggtgagtgagcgactgagagagcatgggagcccgggccacgggcctggtactgggagcgggttcttgttctcgagccctctaagccccacctcggaacaggctcgcttacctcggccctttgggttccctcaaacccctcctcctccccacgtcccttggccttatgtccagtcctttcaacctctgtccccatctcctctctctgtcccttgtgcccctcaacctctccaacccccttctcctctgtctgctgaggctaatgggagagggagcactcgcgagaaaaagagggaggattgcaaggcagcaatccttggatatttggttggggaaaccagggtttcgtttggagaacagaagaaaaaaaggagccttacatttgccaagcgcctacattgtaccaggcactggactgggtgctttacatggattttcatttcagcttcaggaaccctcatgaagtagataccattagtcccattttgtagggaaggaaactgaagctcagagaagttaagcaacttgcccaaggtcacacagctagtatggagccacgattcaaaccagatctgtttgtgtccaaagtctgtggtctttctgcttccccaaactgaggctggagaccatgaaagtaatgccaagccttctgcttatgtgattttctcctgtactattcagcagccctggagtatgagcggaaaaaaaaaaaaaaaaaaaaaaaaagaaagacggtggattgatccaaggttgagattttgccaggtgtgtgtggcgggagaacaagggaaggaaggagtagaaggtgctgagagagaaaggtggaagaggtgggccttgggagtcaggctagaggagaaggctggaggggctgataggtagggagacagcagaaaagccaacagaggcagaagcc

SEQ ID NO: 50355 - DNA, 1033 bp, Homo sapiens
actcactacctctctacatcgttggagggcttctaacctctcatcctagagacacatgaaattcctctggacctgaaaccagccctgaccactttcacctttccccctgcatttgcaattttgctctgtttctctaagacctaactcttgtcacttcgatgaaaccttctctgactttcgcagatgagttagaaacccagagcaccttacctatacagctaagctagcacttatcacaatactgtagttgtttatgtgactgtgtctccacaggagggtgaactccctgagagcaggggccatgtatcttcaagctttcaacaacacccagcacaagactggtatgaggcaggcttcaacaactgtttgttaaatgggtgagtttacaggcctgcaccacaaaaaatgggaaatgggctgtttagtagatggcattgggaaatttggctctccatgaaaagaaatataaaactggatctctatttattccacctaagagggtagactgtgaatgtgaaaggtaaaactatgaagttaatatatgcaggagaatatctttgtgacttgtgactggggaaggactttttaaacaaaatcccaaatgcacaagatataagggaaaaaatacaatgaaatcttgtggaaactagttattacgactttggaaaacaattaggaagtatccagaatagctgaagatgaccctgggacccagcagttctagtattggagatgattgattaataggtagatagatagatagagatcacctctaaactttaactcctagagaaattcttatacacttgctcaatgagcatgtggaagaatgttcattgcagaactgtttgtaatagagaaaaaaatgtgaacagcccaaaattccaccaacaggagaatgaataagtaaattatggtatagccatatgacagaatactatgcagaatactataatgaaaaagaatgaatcatgttgcatgcattgacccagctaaatttcaaaaacacaatactgagataaaatacaaattg

SEQ ID NO: 50356 - DNA, 1025 bp, Homo sapiens
tcatttgttcaacaaatttattcagtgcctactttgttccaggcactttaactaggcatttgggatatatcatgaacaaagcattcagtgatgcctgttctcatggagcttacattcaagcaaggggaggctaacaattaaaaaaataataataataagtaaattatgtgggatgtcaaaattgataactgttataaaaaagaaaattagaacaagataagagggaagggaagtggtaggtcaccatggtaaatagggagattggggtggacttcatggagaaggtaatatttgagcaaataaatgaaggaagtgagttagccaagcatatatctagagaaagagcatactaggcaaaaggaactactagaggaaagggcctaagagataagtgtgtttttggcatgttcaaagactaacagggaggcttatttagctagagctacataggtgaaggagaaagacataagagaagtcagagaggaaataagggtctaaataatataaggcattgtaaagacttggtatttactctgcatgaaatggggagcctgtcacaagttgggttttcccaggaaacagacccagaaacaaagttaatcttgtagaaaatttattaagcagcgcccttggggtcaatacctggggaagaaatgggaaagcagcaggagcacaaagaaaatgaagctctaaaaagactcagttacagtgtcaaccacacccacaggaagctgtggaactagaatggcccttcagagttggggtaatatttacaggcctttcaacccctacactaatccgtctttggatatgggctgccccaggaaggggtgttgcattggacaaagttgctttcagcagctgaggcaatctctaatgggggtgagagctgaagcagcataataagtccatcactgaagcataacctgggtgttgcatcccatgtccacaaacccactgtggattttcagcagagaattgacctcacttatgtttctaaaaaaatctctctgctgttttaagga

SEQ ID NO: 50357 - DNA, 1023 bp, Homo sapiens
actggacagttaagagagcagggttattatcctgaatgcaatcattcattcattcattcagctactttttgatggatttgcccaatagtgattaatgagatagatactgtccattctgtcagggagcttacattttcatagaggggagaaaagcaacaaagatatagacaaataacctaaataacgtgtataatttcagagagtgataagttgtatgaagaacaaaaaagcagagcaatggatagagatgaacggaaataagggaactacttcagcaaaaggttttcagaggaaggcctgagtggatattagcaaataactaaagaagccagcccatgcaatgatttgaggaaggagtgttctagagagaaaaaaaaaaaaagttgaaaggctggaatacctgatgtcatttatccatagctattaattcagtaatgtgtttaacattgaaacctagggcctgtgattcttctctactgttctgcacagctaacactatacctctgctgttttctggtatgtttttggagtttttaaatatgtttttgtttgtttgtttgtttgtttgttttttgagacagagttttgctcttgttgcccaggctggaatgcaatggcccaatctcggctcaccgcaacctccacctcctgggttcaagcaattctcctgcctcagcctcccaagtagctgggattaaaggcatgcaacaccatgcctggttaattttgtatttttagtaaagacatggtttcaccatgttggtcaggctggtcttgaactcctgacctcaggtgatccgcctgcctcagcctcccaaagtgctgggattacaggcatgtcccaccatgcccggccttaaatatgtttttctattgttatcctagaaagcaagtaaagtggctaagaggtcactgattaaatggaaatggggcagatttcttcctctaccccaaatctatgaaacaggtgcataacataaagttgaagctcacatgtaatgtaatgaatgtgtatacctattt

SEQ ID NO: 50358 - DNA, 1049 bp, Homo sapiens
aggcaacggcgaggtgtccgatttgtgcacttgaggcccgcaatccgggacggtggggaatctgcgcctcctggccgggtagtgttggaagcagggcgaggggaatggggaaacgcttcgtatttcaccgaaccgcagatcttagccagactgagctggggaggaaggttactgcaggcactcagccagggtgccttgatttccagctttgctatctagctttcgggaaaaacaggtgtgggtttactgggtgcgctgattaggagaaaaagctctccgtgttatgcattgattttgttaatttcctttctcggtccacctggcaactgtgctcctcttcgcaggcatgaagaccccgtttggaaaggcagctgcagggcagcggtccaggacgggcgctggccacggcagtgtgtctgttaccatgataaagaggaaggctgcacacaagaagcataggagccgacccacctcccagcctcgggggaacatcgtgggctgcagaattcagcacggatggaaagatggagatgaacctctaacacagtggaaaggaaccgttctggatcaggtacctgtaaatccctctctgtatcttatcaaatatgatggatttgactgtgtttatggattggaacttcacagagatgaaagagtgtcatcacttgaagtccttcctaatagagttgcatcatctagaatcagtgatacacacttggcagaaataatggttggcaaagcagtggaacatatttttgagacagaggaaggttccaaaaatgaatggagggggatggtcttagctcaggcacctgtcatgaacacatggttttacattacctatgagaaagatcctgtattatatatgtaccagctcttagatgattataaagatggtgacctccgcatccttcaagattccaatgattctcctctggcagagagggagccaggagaagtcatagacagcctggtaggcaaacaggtggaatacgccaaagacgatggctccaagagaactggcatggtcattcatcaggtagaagcaa

SEQ ID NO: 50359 - DNA, 1053 bp, Homo sapiens
ttttgtgccttatttttggccagatggaattttggcagaaatgacaggtgtcatgtataggcctatctcataaaatgactagagctatactgcccaatatagtagtcactagatacatatggctattgatcacttaaaagatggttgttataaattgagatgtgctttaagtgtaaaacacaagattttgaagatcttgtatttaaaaataactttaaatacatcattaataatctgatattgattgaatgtttaaattatagtagtttgggcatattgagttaaatacaatatattattaaaattaatattacctgtttctttttgcctttttaaaatgtgacaattgatacattttaaattatatatatattactcatcttaatgtttctattggacatcgctgctctagaaaacttcctctctgtctctctttctctctctcactcttgctgtcttcaatttttggccagctggatagacaggatctggcagaggactatgaagtcacagaaaatggtcaatctttgactacatggaagacagatactgtctttcctgaattaccaattatagaaaagctgcctaatgaccaggaacacctacatttaactgttttatgtgtgagaaataatttttttgtatgtcaagccactaagatgtgtatggtgtttgtaacagaagtaattatacactgactaatacaaatagtatggggaagagttgagcaagataaagatgatcagaatgttaaggtccctaagatagcccaatttgtgaagataaggagcagagacctgaagatagtgaaaaaataaattttaatatagaagtaatacaggtccaaaggctctgaggtgagagacatttcgcttgctcaaggaacagcaatgatgtcagtgtaaaagaagcacagtcagctgttaggatgaaccaaacacttagaattgctgatatttgaccattttgacctatgaatacagaaattttatatggttcaatgttatgagtgagagtagtagaagatggaattttaaaagataagagggtaaa

SEQ ID NO: 50360 - DNA, 1039 bp, Homo sapiens
gggacacgaatgagttgtaatttgttctctttacataatcccatatttctcagagattttgttcatttatttttattctttattctctattcctgtctgcctgtcttatttcagaaacccagtctacaagctctgagattccttccttcacttgtctactctgctattaatacttgcgattgcatcatgaaattcttgtagtgtgtttttcagctctatcaggttggttatgttttttttttttctatactggctattttgtctgtcagctcctgcattgttgtatcatgattttttaacttccttggattgggcttcttcattcctatctaaaatctgaattctgtttttatcatttcagccatctcagcccagttcagaacttgcttgagaggctatgtggtcctttggaggaaagaaggcactctgtctttttgagttttcaggatacttgcactgactctttcttatctttgtgggcttacctaacttcagactgctgacacttgaatgttttttttttcttctatttgatgtccttgagtgtttgactgtggtataagttgaattcagccaactgactttgtttctgaaagattttaggagcccagtgctcagttcccaatttctgggctgcatgctctaactctgtagcacttatattgggccccaactttgctctctgccatctcgaggttaggaatccactgtgctgaggggcctatgtgctcctggactgctcctcactaaattccagtgagtggtgtcagccaaagcattttgtagtgttgtgacagtggaatccatcctcgttcgctcatgccagcagcagtcctggaggcagctgctccagagcactagtgggtgccagggtgcttgcctccctgtgggcgttcatcaccttggcagaggcaatgcatctgggggtgctggcgcctctgctggtcactgtgtgcacagtcatgctgaaggtggccgttgactcggtggcggagcactggcagttataggcctaagtgcattatctgtaccccacaag

SEQ ID NO: 50361 - DNA, 1030 bp, Homo sapiens
gggaaaaaataccgcagaggacattaaggctaacatggtcacaaacatggaatcgggtttttgtctggccttgatgctccagtagtttctcagcttcctgcatggttttcttgagttgtccccaggttatgggggttgatgtcgtcatgacgctggtcaacctctccgtctttgtactcaggctcagctggctcatggctcataccagagggaccgggcccatggttggccaccctgggttcctccagtctcccattccacggctgcatccaccttgaggacacccacacggtttgtcaatctcctgtaaaaacacaagcataccctcgtccccacatcagtaaatccaccagacctttccattgtccctcttctgcggatttccataacactttcagataaatttttgtctttgcctctaacacttgtcaatgcctttctgctggagtcttaccatctgtaccaggaatcaaaaaatttaaagtaaataagtctaaatgtagttttgattgaggtggtagttgtcctcttataccccctttttgtcttttcaacatgtgttgtaatgtttgattgtaatgccttgtcctctaggattataaggaattcctgttttatgggttattgtccaaagctgtaagaaattttgaaaagcatgactagtataagtgggtccattgtcagttcttaattgtttacgtatctccatatgagcaaatgatgacagacaatgttgccatacatgaccagctgtctcatctgtttggcatgtatcatgcagcatatgagaataagtgcctatagtcacacgaacataaacaaattatgcagttttgggtctagtggacttttaattgtagcagtttctatgtgactggttacatttacaacataagctgaatcactgacaatgttgataggatctgaaactgtaagctataaaacctgaatgattgcaattagctctgagcattgagctgaaaccccagaggtcattattgcttctggacttttttggaataacaaatac

SEQ ID NO: 50362 - DNA, 1887 bp, Homo sapiens
tgtctcataggaatttggggatatcccacaatgtgccactcagagcaagatttgaccctagttctgactcctatagattgaggatatgaaagtgagatagatgaagtcaaaatgaacattcaagcctacatagcttcagaattccactgtatattctgaaatgatatggcaaaaatgtcagagactagagcaaagaatgctggctagaagattacaggagtaagtcagacagaaatttttagttaataattttagaaatgcatattaaggtgcattgtgagggagagttaacattgtagctgattaattttgtaaggaaactgactatgtagtaatcaaaggcctccaggattatgagttatctgcaaaaatcagagagttaatgtacgggaacggacaagattttaagagtcagtttaaaacaaaacacaagaataagggctagataagtaagtataggtgtacagtgatcatactttttctccattttagtctgtatctaaataggctcaaaaaagtgaatgaagtgtgaaatgtctacattgtctattgtttggacaaaatattttctttaaagatagaaaaaagtttgctatctgtaaattggctatttcactgaactaattaattctaagtatggatttctttttttttttttaaacagtgtcctgctctgtcatccaggttgaagtgcagtgggcgatcatggctcacggcagcctcgacctcccaagatcaagcaatcctcccacctcagcctcttgagtagctgggagtacaggcacaagctaccatgcccagctaatttttgatattttataaagatgaggtttcgccatgttgccctggctggtctcgaactcgagctcaaggcaatccacctgcctcagcctcccaaagtgttggtattacaggtgtgagcaactatgcttagccctggttttacttttaactgtatgacctatattcaggacttttgaaaatgtaaagaatccatgttttctctccttcacaaattttccacatgcatccttcattctcttgttgactgttcataccataaaagatttaggttcatttttaaagacatctagataactgcaaaaggaagtgacattagcgcttctcataaatcagggtttctggtatgattactttgattagtacttgtttatttaatcattcatttatttatgaaataataacccaggatcctctgacaaaatgtgcaagatgtttttctgggtgccatgctgggaaaccaagatgaataacacatggtcttttatatgttcttttatggccttcaaatcaatagcagagacaaaaagttgcctttaaagcaatagcagaggcaaaagatgggtataaaaccctgtataacaacgtaaaaagaatgtgataaatgttatttaaagggtcacaggggtacatatatactgttaattcaggtgacagagagagagctcatttcatagaagttgatattaatcttcattatgttacacaagcaagagggtttctaagttgatgatttcatagtaccaacatagcaaattatatatatatatatataattttattgagatataattacatagagcaaaagacacagtatcttgaatatataacacactgacttttcagtttttcttctgtcatttatttacggcatcattccattgtaattagaaaaaacactttgtattattttaatctttcaaaatttgttgagaattgtttagtagcctaacgtgtactatcctagagaatgttctatgtgcacttgaaaagattatgtattctcctgttgttgggtgaggtgttataagtctgtcaagtctagtttgtttgtagtgttgttcaaatcctctattttctattgac

SEQ ID NO: 50363 - DNA, 1130 bp, Homo sapiens
cgcattcaacacggctggaaggaaggcaacgagccagtggagcagtggaagggtactgtgctcgagcaggtttccgtgaagcccactctttacatcattaaatatgatggcaaagatagtgtgtatggactagaactgcaccgcgataagagagttttagcgctagagatccttcctgagagagtgccaactcctcgtatcgattcacgactggcagattccctgattggcaaggcagtggagcatgtgtttgaaggtgaacatggtaccaaggatgaatggaagggtatggtcctggcgcgagctcctgtgatggatacttggttttacatcacctacgagaaagatcctgttctctatatgtacacgctgcttgatgactacaaagatggtgacttacgcattattccagattccaactactatttccctacagcagaacaggagcctggagaggtggtcgacagtctcgtgggcaagcaggtggagcatgccaaagatgacgggtccaagagaactggcatttttatacatcaagtggtggcgaagccatctgtttacttcattaagtttgatgatgatattcacatttatgtctatggtttggtgaaaactccttaaattctttgtgctctttagagaagttgtggatctgttagatgtgaattattttgtgttctcgtagttgtgaacgcagagaagagtttaggtgtcagaaattcaggaaagtggataaattttattgtgccaacaaatcttaccttgactagtttcacaattttgcctcaagtgtactttgctacttttgatattgccttgttctgtaacttaacagttaaattgggtgctaatagaaaattaaaaagtgtttgcaaccattggaacaatgcaaaaatagattaagaaaaattaatggtgtaaacccacaccccgtccttaccccttcctttccttaccttgtttcttcccagaaaacaagtgttgaggatgcgaagtacatccttccacctattttccccatcttcatgcagaaagtatgttctagtagtttctgtaaaaatggcaagccacatgcttttctcacttgacatgtagatgatatctcttcttatcagtagcttcagtctttc

SEQ ID NO: 50364 - DNA, 1085 bp, Homo sapiens
caaggatgacgcctagtaaaaaatatgactaagaggaacctgtctaaagtttagtctttgcctcaattctgccaatactttaaggagacaaaaggtcatcctaatttttgaagctaaaaggggagaaaattcactacatgttaaatatgccttactataattttgtttcttatattttcttgctttctgagttcaaatatacatgcatgagcataaacagagacctagagaaatgaagcaatgaagcactttagttatggaaggcaagtacctcctctctctctctctctgtcacacacacacacacacacacacacacacgcacgcacacctgtatctcgagatctgaactagtctaatgattggcagcatgacaagagctgattgttaaatattccgaaatttggatgttaaactgtctgtatcttgaaattggctaaggtggaagtatttacacaatggaaactggcaaacactgcaaattaagtttttttcccccctaaagagcaggtttaccagcacaccactggatgtaagcaacaatgtatttaagaggtctctctggttgtataaaaataactttctagggctggtctttcatttttctttattttctttctttaatttttgggcttctttgccactttttaaagaggaccagaaggtaagtatagcttaaagatgtgttgtcctcccagcgatcctgctcttggtcttcctctctcctcttttaaagtattcaatcagcattagtagttcttgagaacttttcaagctttctattgttttctataattagcatgatcttaaacagggatctgcttaacacatttttgagtttcaaaaaactcactagcaagagctatcagccacacaaaaccattcataagtttcaggaacctattttctcaattcagaaagacattaaagcaaactataaagataaggatacatttttataaaatagtatgctatcactagtaagttttcatttcccgttgattttctagattacaaatcatgcctacatttccttagttttattccatgccccttaattcatttcttccttattttacaataaa

SEQ ID NO: 50365 - DNA, 1033 bp, Homo sapiens
aagactatatgattttaggaattaatttggtaatgttatttggaaataaaaaatattgcatatacataacatacatacatacccaaacatacacagacagatgcaaatagacactatagcttttattctgaaatttgtcatgagtctgataaatacagtaatataaaactcaacagtttatttaaaatagctggttctcatcttctctctgcttcatatttttatctgaattgtattgctggtgataaaaaaatgttaccttctcaatatttctttttaacaatattcatggaggagacttttaagattttcttttgttccaatatgtacttggttttaagttccccaaataccttgagagccctaatgggggaggaggggcctaaagttcaagtgactgtagggaatttaggagctggaatgggaagggaaaagtctggcagggatggatggatgtgtggaggaggtagactgttgtgaaggaagacatttcaaagaatccaaggaaactgaagggaagatggaaggtggtaaaagaaggagggaggagcagaagttatcggaagggagaggtcatagatgagcaagtttggatagatttaagttttctgaagaagccaatggagttccaattttctcagtaaaatcatgccaacaaggtagaaagtgggcagttagcaccatagtggtagaacatatagttaccaagggttcaacaaagggaggttcagttgacagaaaatttcctatgggaaaagcaggatcaaatagaacaaagaggcctcacaagcagccaagaaaaaaaaaaattccgagccacgggtaagtgaatatccactcaaaagttccaggaggaacttccagcttaggaagtacctttcaagatatctaattgagcttcggagaatgtactcagaatcctaggaattaaaatctgtccttaacatgcttcagtggactgtcatccagagcactggctcaagagttggactcaccaatggatctctgatcaataactaaggagtgaagacaa

SEQ ID NO: 50366 - DNA, 1347 bp, Homo sapiens
ccctgctattcaagaatagtatgctcatcaaagtaagccttcataaattcagaagaaataaattacttccaagacaagcaaaaattaagggaattcattaccactacactggccctacatgaaatgcttaatgaaatcccacacctggcagcaaaaggatatctatcatcctgaaaacacactgaagtatacaacacactggtagagcacatgcaaataaagaggaaggactcaaatgttaccacttaccaaaaaccaccaaaccaaaatcataaacaacaggagaggaattaagagaaaaagaatattcaaaacaaccagaaaacaattaacaaaatgacaagaataagttctgctatatcaataataaccttgaatttacattgatttaattttaatttaaagatatatattggctgaatatatatacatatacatatatatacatacatatatatacacatacatatatatacacacacacacacacacatatatatatatgtgtatatatatgtgtatatatatatatatgtattacccaacttctttatggtacctatggtacccataggaaactcacttcacctgtaaaaacacatatggactgaaagtataggaattgaaaaataaattccacacaaatggaaaccaaaaggaagcagtagtagctatcttcatgttaaataaagcagactttaagtcaaaatagtaaaaagagacaaagaaggtttttatacaattttgccagagtatataacaattatatatatatgcacctaacactagagcagcaagatacataaagcaaatattaccatatctaagtggagatagagactcaaatagtagtcagagacttcaccaccccactctcagcattagacatattagatagaaaattaacaaaatgctttgcattcaaagtacactttaggccaaatagacctaactgacatttagagaatattttattcaacagcggcacctgctgctgtttattttgacacgtggaacattctccaagatagagcatacattaggccaaaaaacacgtctcaacaaatttttaaattcagtcataaaaggtatctttacagatgacaatgaattaaaactagaaatcaattacaacaagaactttggaaattaaacactatactcctgaatgactattgggtcaatgaacaaactgacagaaatcaaaaagatgcttgaaacaaataacaatgcaaatacaacattccaaacctaagggatacagaaaaaccagtgctaagaggaaagcttatagcaagaaatgcctacttcataaaagttgaataatttcaaataaacaatttaatc

SEQ ID NO: 50367 - DNA, 1024 bp, Homo sapiens
tctctggaaattatttcttcttctttgaagcttaatctagctggatataaaattgttgattgcagctttttgttaagcgtttgataatactatcccattctgttctgactgttaagttttctgctagtatgttttcacttagtctgatagggtttccttgtgggtcagtagatacttttctcttgataattttacaattctttttttcacattttttagacagtctgatgagagtatgctatagtgaattcctttttataatgtattttccaagagattgttggtccccccgtatgtgtatgtctacatttctttgcataatctggaagctttcatcaattatttctttaaataggttttatatcatttttaaaatttttattcctttttgggaatacaaataatttgaaagtttggtagctcttagtcccatgagtcttgaaggcctttctcattcttttttattctttttaaaagtttttgtcttcatgggctatttcaacacacctgtcttcaagttctgagattctttattttgcttgttctggtatattgttgaaaatttgacatgattttttaaagatatttatattcttgataagttgattgtttatattctgaattgattttgtatttctttgtattggtttcagattttttcttgcatttcattgagctttttaaaaatcaatattctgacttatttggcattttgaggattttttgttagaatctattgctagagaattattgcgatcctttgaaagtgtcataataccttgctttttcatgattcttgtatctttacattgatcactgcatatctggagtattagtctttttttatttctgaatgtactttcatgggggaggctattcttgatgtgactctggtgtatgttgtgtaaggctgtttggctgtgttcagtggcaaagattgtatgatttccttgcttctaaatacccttaatatgatctttctcaaaagccagtaatctttctcaaatgccaagtatactaaatg

SEQ ID NO: 50368 - DNA, 1031 bp, Homo sapiens
agtgtacataacatataatgaacacttaaaacaacaataaaaagagaaaaacaaaaataatttggtcagttaaaacataaccaaattatgtgaatagatacttctccaaagaagacgtatatatgacaaatgaacacacaaaaatatgttcaacatcattaatcatatagggaaatgcaaaccagtaaggtattctttatatccactgggatggctataaatattttaataaggaaataaatggtattggtgatttgcaaaatttgaatcctcatatattgaaggagggaatgtaaaatagtgcagctgctatggaaaatactttcacagtttataaaataattcactgtagaatgccaatgtgacctatcaattctaatcctaactctataaccataagaattgaaaccatatgttcaaacaaaatcttgtacacaaaaaaaaagtccatcaatggttaaacaaaatgtggtctagcaaaacaataatatattgggccataaaaataaattaattactgatatgtgctccaaaatggatgaatgttgaaaagatgctccctggaagaaaaaggatgtcaagtgtaggcaatttcatggagatataaagtagataaatgtttgccaatgacttagagatgaagatgatggagagtatatgttaatgaacatgggagtatggaaatgttctctaattagatagtggtaatagttgcacagcattgtgaaaatactgaaaactgctgaagtacacattttaaaatactaaaatttatgttatatatcaataataaaaaatagaaaaataaaaataatataatgttattatatttcacagtgtacatgcataccagtaggctgtatgactgtattcattttattttatttgtataaatttatggggtacaagtgtaataatgttacatggatatattgtatagtggtgaagtcagggcttttagtatatccatcaccagaataatgtacattgtatccattaattaatatttcatctgccaaatccccatcctt

SEQ ID NO: 50369 - DNA, 1497 bp, Homo sapiens
tggttaacattttgttagcattttattgaggatttttgcatctatgttcatcgagaatgttggcttaaagtttttattttttgttgtgtctctgtgaaattttgatatcaggatgatgctggattcatagaaagagctaaggaggagttcctcctcctcctcaattttttggaatagtttcagtaaaactgataacagttctttgtatgtctgctagaactctgctgtgaatccatctgttccagaccttttttggttggcacctgtttttttgttgttgttctcattgttttgtttgtttgtttgattgtttttctcattcaattttgaaacccattattggtctcttcaggttttcactttcttcctggttcattcttgggaggttctttgttttgaggaattgttatccatttcctcaagatattttaatttgtgtgcatttaagtgttcataatagtctctaaggatcttttatatttctttgggattagagtgtcatctttgtcattcctgattgtgcttattcggatcttttatttatttattttttgttaatctagctatcagtctatcaatcttacttactctttcaaagaaccaaatattgtttttattgattttttgtatagctttttacaccttgatttcattccgttgttgtcagattatagttatttcttctttctgttagctttggggtaaatttcttttttttttccttttaagttcctctaggtgtgatcctagattgttcatttgagacctttctaacttcttgatgtttgtatttagcactgtaaactttcctcttcacactgctttagctacattccaacaattttggtgtattgtgtctccattttcattcatttcaaataatttttaatttttaccttaatttagaatttttttaatttctatgtacttttgtagttttgcgggatcttgatattgatttctattttttttcactgtagtctgaaagcgtttggtatgaattcatttttttttaatttattgagatgtgctctgtggccaagcatgtggctgattatagaatatgttctgtgtgcagttgagaaaaatgtgtaatttgcatttagtggttggagtatttgttaatgtctcttaggttcaataggtcacatattgagtacaattccagtatttctttgtaagttttcttcctcaatgatctatctaacactgccagtgggctatttaagtcttccactcctatagtgtggttgcttgagccttttcatatgtcgagaagaacatatgaacccctgacctcaggtgatccaccttcctcggcctcccaaactgctaggattacagacatgagccaccacacccggcccattaaggacattcttgattcaagggaggagatcaaaatatcaacattaagaggagttcggaagttgctgatttcaaccctcatagatgattttgaggagttcaagacttcagtgggagaagtaactgaag

SEQ ID NO: 50370 - DNA, 1046 bp, Homo sapiens
ataatatattcttcctttattcatcaatagatacttagattgattacatgtcttggctattatgaataatgctgcaatgaacatgggagtacagacatccttttgaaatactgatttcatttcctttggatatacccagaagtgagacttctggatcatgaagtagttttatttttaatttattgaggaacctccatactgatttccataatggctgtactaatttacatctccaccaacagtgtgcaggggttcttttttctccacatccttgtcaacaattcttttacctttttgataaaaggcactctaaaaaatgcgaggtcatatgtcattgtggttttaatttgcacttctctgcggactagtgatttagaacattttttccatatgcaagttggccatttatatttcttcatttgagaaatgtctcttcaggtccttgtcccattttttatttactgttatttttattttattttttaaatttttttatgtttgtgtgtacttagtaggtgaatatatttctgcagaacatgagatattttgatacaagcaaacacttcctaataatcacatcagggtaaatgggatatgaatcatttaagcatttatattttctttgtgttacaaacaatccagttataatcttttagttcttttaaaatgtataagaaattattgaagactgtagttaccatgttgtgacatccaatactagatcttactcattttatctagctttatttttgtaaccattaactttccactgcactattctttttggcctgtggtaaccattgttttagtctctagctccatgagttcaattgttttaatttttagctcctacaagtaagtgagaacataagaattttgtctttctctgcctggcttatttcacttaacataatgatgtccagttccatctaagttattgcaaaggacagaatctcaatctttttatggctgaatagtgctccattgtgtatatttaccacattttctttatatattcatctgttgatggacatgtagattgcttt

SEQ ID NO: 50371 - DNA, 1060 bp, Homo sapiens
aatacataaaatcaattagtgtaaaaaagctgcttatgtttctttcagataaatattatgtatatcaactgaggatacttaaatatgaatccagtgaaattgggaatgacaatgccttggagcaattcattgttcaagaatctttggactgaattcaaaattagggatttctgcttgaattgttatttgcaattttatacatatacacatatttggagagaggcagtttccaagacaatgtcttcttccctgatctcttgctctctcccatttctatagtagttagctgcagacaggcttgtcagtgattgcaactgatagagtaagaagttatctgggcttcatttttaacatcagcacagttattaggcaatctaagtggaattttggccacaagagagggagcacaagtcaaagtattttaaatcagagatttccaatatactttattggatatgagagttgaagaagaggaaggaatcaaattcaggcctaaagacatggaattactgtgtcttaaacaaaagtgggaaaaatagaaaggaaattctgcctctgctactgatacaaagaggcatggatgtttgcattgaggtgtattgaggcaatagtgaatgtttttattggaatggatctttggcacactttgatagtgtatctatgccattatactgacagttcaccttgagctcacacacatcactctcttcccatcatacttcattccacagcggccagatcatggcttcctctgccatttggaatgctccgaccttaagcagttgtctcagcaatgctttttatttgtttttccttgaggccatgccaaagcaaagctcattgagatatagccaaaactgccagatgttgctggatgttattttatgctctctggggaaagcattgttttccagtgaaactcctcaattatttcctccaaaaactttctgaaaattttactgaaataagtaaaaaatgtaacaaaccttcagagatatgagattctatgagacgttgtttctgtgtctcagatacatctgcctggtgtcaatcccaaaag

SEQ ID NO: 50372 - DNA, 1095 bp, Homo sapiens
aacattgtcaaattcactgttgttctcaactgtcagagagtctaagttctactaaattctgctgtgtatgtcttcatctatacttagcacaaccagctaaaacaggatatactattcttttttcatcttacatttctttgatttccatagaggaaaaataatttttatatgttctctgataactaccttctctcagcaaaataatttttcttaagttctttcctgctgctctagcagcccctattgcttagtgctgttctctgatattcaggtattctgctgtgccaactgtttttaggaagcatcccgttgtatgctgtaatttgcagaaaatgttcccttggaacttacaatggtcatgttaaaagaataaactgagattccagttggtaaattagctttgtggattgggtatacatgaatacatttggagtttgatcataatagcctgaactaaaacacaaaaaggttttttttttttttttttttttttacagtgcaaaactgaggacaaaagtagagaagcagtagctgtgtagttaagccaacccagttaaatttcacttatcttgggtgattgtatgccatacatactatatgtccaatactgctaaacactgaaggtgttctggaagtacagatcttctgcctcagggaatttatattctagttaggaagtttaagcacttagagacagcaataacttgaatgctaatgcatgttataaataagtactgaggaatgtagaaaagagaaaaactccacctgaactttaaaaataatactatcgaaatgctcattttatgcttagaaaaattgaggcccaaaactgttaagagacatggccaggatcacacagtgttttagcttctcaaaaggaactggaatccagatctcctggctcattccaggttctttacactagagacgtctcctaatttaagcctcagttatttctttgacaatgatttcaagtcagtccttaactcagatgcttatttcccgaaggacgaagtaatattttgacataaaattcctagaaacccatttaatacaatgaaatatcaaaattgataataaaaagaaatgaaaatt

SEQ ID NO: 50373 - DNA, 1062 bp, Homo sapiens
gacacaaggaggggaacaacacacactggggcctgtaaggagggtggtggctcaggagagggagaccattaggacaaatagctaatgcatgcagggcttaaagcctagatgacaggttgataagtgcagcaaaccaccatgacacacataacctatgtaacaaacctgcacattctgcacatgtatcctacaacttaaaggaaaaaacaaattatcatgtttgtatccttgctttgtgctgcagcctttcacagcttttagtgagcccactttagcaacccctctcccaactttctaaattatggtttctattctgctacatgctaacagattaaatcattaaacttgctagaattatttgtgaattaagactaagttccatgtaaagatatagagcacatttgctaccataggtctgctcttgtccatggcaaacaatgacaatttatcatagtttctattctcatagagtccacttaagatctcaaaatttcttcttaacactgctctgtgtttcaggcagcagttacctaattagtagaactcgttaagcatgattaactccagtttttatgactagtctaagagctctcttttgagtacattctgtgggtcttaacgctggagctatttggtttcacagaggttttctttgtcatttaatttccgtttctcagctatggtcacagagttgtgagtgtcagagagtgcaggtgttcctgccccaagcactacatgttcatgcactttaattgcttaaattattaagcagattaaacttttaaattatagcctggcctaccaacaaaactccaggcaacgaaaggcttttatgagcattcttgtgatttggtctaggaaaaactggtctgagcgtcacagattattaaaactacgaagtcccataaaattactatctaattttactctactaattttgcggatgtgaaaaaatgtaaccagagaagctaagtgactttctctttttttttttattttaacggtagttatggttttttttttttaatatactttaagttttagggtacatgtgcacaacgt

SEQ ID NO: 50374 - DNA, 1084 bp, Homo sapiens
tatgtgtctttgtatggtcttggtatcagggtaatactagcttcatacaatgagtttgcaagtactccctcctcctctatctttcataatagtttgagtaggattggtattagttcttctttaaaagtttgattgaattcagcagtgaagccgtcaggtcctgggcttttgtttactggaagaatttttattatggctttgatctcgttaactgttactggtttgttcaggtattagatttcttggttcaatcttggtaggttgtatgagtctaggaatttttttatttattctagattttccaatagttgctcatagtagccactaatgatcctttgagttcctgcagtatcagatgcaatgtctcctttgtcatttttgattttatttatatgaatatttctctttttattagtctagataaagttttgttatttttttttaacttttcaagaaaccagggtttcttttttttcattgattttctttctttctttctttctttttttttgagacagagtttcactcttgttgcccaggctggagtggaatggtgcgatctcggcttactgcaacctctgcctcccgggttcaagcaattcttctgtctcagcctcctgagttgctaggattacaagcatgcaccaccacacccagctaatttcatatttttagtagagacggggtttctccatgttggtcagcctggtctcaaactcctgacctcaggtgatctgcccacctcggcctcccaaagtgctgggattacaggtgtgagccaccgcacccagccacactgatttttttttatttcaattttatttatttattttttgctctagtctttattagttcttttattctactaattttgggtttgtttcctcttgcttttctagttttttaagatgcattgttagattgtttacttgaaatttttcctcttttttgatataggcacttaataactataaaattcactctgagtactgtttttgctgctgtatcccagaggttttgatatgttgtgtttccattgtcatttgtttgaagaaatttttcaatttccttttaatttcttcat

SEQ ID NO: 50375 - DNA, 1033 bp, Homo sapiens
ccccaccccccagggctcctgaaaatcaaatggatgagtaaaagtgtcagtcatctctctactaatcaatacattagagcagtatgcgggagcagcagggagaataatctgttcccagggactgcagtttctgggaaatttctatttctaatttccatgatgctgaggtttggttgagctgtcactttgccaccttgcacactcatttaatccacttgaaaacaagggaaaggtaacatatcctggatagcttctttttaatctttttttttttctggagatttgtagcaggaacctaacattgtagctcatatttgggagcttgattgtgtgtggttgtaatttcctctttgtgggatccctctcctcccagcctggttgtgtaatacccaaggacctgttccactttgctatttgatgactgaatccaaagaagttggaggaaacaagaaaacccaacatgatgaaggcagcaaaagcatctacttaaaagctaaagtggcttgatgaggcatactcctgggacaagaagatcaaatgtagggctagatggatttgttactcctctgccttcctgtcagtaggcagcattgaaaataaactagttaaaaagtatggcattccccttgtcctttccctggatctgctcagattacagccccacatcaattggcctataattagaatggggtgaaatcaggcagaatggggtgaattagaattagaatggggtgaggcctcttcgctcgggctctgaccccaaggaaggaaggtagataagctggcaagaaagctttgggtagtttttggtggccactgttcattccacacctattgatttagttgtcaaacagtatttattgagtatttaaatatcaagtactctgtgtcagaccttattctaggttctgcaaagacatcagtgaacatgacaaagtttccactctcattgatttatattccagtagggaaaagaggcaacaaacaaacatatatcatcaggtagatgggcctctgaagaaaaataaagtag

SEQ ID NO: 50376 - DNA, 1050 bp, Homo sapiens
tagatactggttattaattccttgtcagaaggatagattgcaaatattttcttcaattctgtaggttgtctttttcactgttgattgtttcctttgctatacagagctctttagcttgatgtaattccatttgtctattttttctttgtttcttgcactttggaaatcttacctaaaaagtctttgctcaaaccaatgtcctaaagcattttctcaatgttttcttctagtgttttcagagattggggtattacatttaagtctttaataatttttatttttatatggtgagatataggggtctaattttattcttctgcatatcattatccagttttcccagcataatttcttgaagagtctgtcctttcttcagtgtaagttcttgatgactttatcaaaaataagttggctataaatgcatgaatttatttattggttctctagtctgttctattggcctatgtgtcagtttttacaccagtatcaggctgttttggttattatggctctgtagtacatattgaagtcaggtaatgtgaaacttccagcttttttctttttgttcaggattcctttggctatttggggtctttgtggttccacacaaattttaggatttgttttcctatttctgtgaagaatatcactggtattttgataaggattacacaaatatacagattgctttgtgaagtacggacctaataacaatattaattcttccattccatgaactatgggaaatcttttcatttctttctgtttcctctttaatttctgtcattggcattttatagtttttattgtagagatctttcattctttggttacatttattccttggtattttatttttgtagctattgttaatggggttgttttcttgattcccttttgagattattcactgttggcatatagaaatactactgagttgtgcatgttgattttgtatttggccacttttttgaattcatttatgaaactcatttttagcagctaaaaactgtttgttctaaagatttttttaaatgtaaaattatttta

SEQ ID NO: 50377 - DNA, 1056 bp, Homo sapiens
aatccagcaacataaaatataattaatgatgacaggattaaatccacacatatcaatattaaccttcaatgtaaatgggctaaacgccctaactaaaaggcacagaggggcaagctggataaggaagcaagacccaatagtatgctgtcttcaagagacccatctcacatgcaatgacaaacattggctcaaaataaaggaatggagaaaaatctaccaagcaaatggaaaacagaaaaatcaggggttgcaattctaatttcagataagacagactttaaatcaacaaagatcaaaaaagacaaagaaagaaggatattacataatggtaaaggtcttcttgaaccagaagacctaactatcctaaatatatatgcatgcaaaacaagaacactcagatttataaagcaagttttagagaccttcaaaaagacatagaatcccacacaataatagtgggagacttcaacaatccactgacaatcttagatcatcaaggcagaaaattaacaaatatattcaggacctgatttcaacactggaccaaatggatctgacagacatctataggactctctaccctaaaacaacagaatatacattcttctcatctgcacatggcacatactctaaaattgaccacacagtcagacataaaacaatcctcagcaaatgcaaaataacaaaaactataccaaccattctcacagaccacagtgcaataaaaatagaattcaagactaagaaaattgctcaaaatcacataattacatggaaattaaacagcctgcttctgaatgacttttgggtaaataatgaatttaaggaagaaatcaagatgttctttgaaactaatgaaaacaaagatacaatgtaccagaatctctggaacacagctaaggcactgttaagaggaaaatttgtagcactaaatagccacatgaaaaggttagaaagatctcaaattaacctaacatcacaacaaaaagaaccagagaagaaagagaaaaactgaccccaaagtgagcagaagacaagaaataaacaaaatcagag

SEQ ID NO: 50378 - DNA, 1027 bp, Homo sapiens
cttagccactaggtttactgtgaggaagcaaagagagaatgtgtagagaatcacatagaaaatataatgtgctcagaaaatgctagagaccataatattgaaaccgaacaactccacctgacctcagttttcttcttaaaagcctttgctctgaaaattagggttcagacaactctttcttgctcctctcattgtgactcaggggaagtcacgtaactgtgcctgagtttgtcatccctaaagttgaggtgataattacagtacttgccttaacattgggatgataacacagcaactgccttaaaggattgctgtaatgagaagatggattactatctgtaaagaattcagaagaatccctgtcacagacactgtactcaataaaaatttgttatttattttacagaaatcagaggataagtgtctgtctgtgttgtggggatggaatttttcactaataatattttatttgattgccatagccattctaggagagagaaagaatactgggggtggggggggcaacattaatactataaatgttctgtacattgagtctctcccagcctcaaactatggatcaaatttcatattattttaagagactgaagctatactcaaataaaaaaaaaattgtcttcaacctccatcttattttaagggtcatactagtgttaaatatgtaacttgatatcaattacatgccttaaaaaattagtaaaaaaaaaaaatcagtgaatagattggaaattaagatccctcgacctcaatctgatatctgatatctgtatcttactgtgtgactttgggctcctttcttccctttttggtacccttgtttcctgtctgagcaatggaggaggagagagcctttcagttctaagattctgtgatcccatctcaatctccccttgacttctttttgtccctgagtaaacctttcatcttagtttgtttagtattgctacaaagaaatatctgaagctgggtaatttataaagaaaaaagatttgtttggctcatgatt

SEQ ID NO: 50379 - DNA, 1031 bp, Homo sapiens
aaacccttgcataggacttcctaggagctcagttgattgtgacattttcccagaagagaggctttggggaactccttcacccctcttgctgctttgggggaatctcctcccctaccaccattccccctcccctgccctgctccagctcacacgtggatggtactttggggaacagtgactttcagggtgatggcttgctggcctgatccctgactttccaatcctatagtcactccaaagaagaaaatccacatggtatgtatatgtgtgagggttgggtctattgagaggtgggactttaattattgttattattattggtgcttatttttcctgctgtatatgggggtgggggtgggggggaataaaacaggaatgtatatttaggtcatgttaaataaaatggctggaggaaggagggaagaaattaggaactgcagtacatcatcaccccaggtgtaagagttatttctctcccagtgcagaaaggggagtgtggcccctggctgtacctgagcttcctcttctccatccctgagacatcacagaatcacccgggttctgacctctccacttctagctctcactgacatctggatatcttgatgcactgcctgtttgtaacaacatatacttctttgctgaatgctaataaacttctgggttcaagagggaacccctcagtcactaatgtgcattcttgtggtttgttccacagtagtgtgcctgtaacccatggttgttgggattgcccttggagagaaattgagaaaccaaggaggtggtgggtggaggtggagtagggagaaccagcaggggaaacagaagccagggctgaaattgaaagtagaggaaattgcagtttttcatccaagccatgccttatatcccagtcagatgccatattggcaaactctctatcacaccttctatgccttaagacctgccccttaagtccctgtgcactgccaggggctggctagcacttctaaaattagcctcaatttctgcaagtatgtggcctccctacc

SEQ ID NO: 50380 - DNA, 1116 bp, Homo sapiens
gaatctgggcctcaactagctcgtccctcacacctacacctgcccatgggcccttgctataacctccagccacaggcctcccagagcatgagggccaggcctcgagatgtgctgctgcctgttgatgagcccagttgctcttccagttctggaggcttcagccccagccctctaccacaggccaagcctgtgggcatcacccatggcattcctcagctgcccagggtccggcctgagcacccccagcctcagcccactcactatgggccttccagccttgacctgtcaaaggagagggctgagcaaggtgcctctcttgccaccagctactcctccactgccatgaatggaaacctagccaagtagttattatcaattctggagtagggacacggggcctgagcatgtgaatggggatcaggggttgggcagaagggtgggggggtgggggttgttgtttaacttgaaaaccctttgggccaaggaaaactcctgtgagttttcaccttggttttcccacttgcctcttctgccatctatggccacgttcaactcaagtgcatctgcccagggaggctgctgctgctactgcactccagtttttgctttcgaggtttcttcttgtgacccacgctgggtttgggatgctgtaattttgtgcctattccagttgccaagttagtgattatatatatatatatatatatatatatatatatatatatatatacacacacacacacacacacacacacacacatacatacacacacacacacaaacacacatgcacacacatatatagcatgcatccttgacacaggctaaacctttagtgccccctgcccctttcccccaatgaatgatgaaccactgattagcagccaagtctgcattgcctcccgcttggggaagtggggcttatttgctattagcaatgtgaaattatggtacagatcctccccacccctattccttttggcctggcatagctgccatcattatatcagatgactataagctattcatcccagctagctgtccttagagaggatcaagtagcgtgtgtctcacagcctatcgctgtggactttggcatcatgaccagatgggggc

SEQ ID NO: 50381 - DNA, 1050 bp, Homo sapiens
ctagaatatatcaagaactcttaacacgtaatagtaaaagcaagcctagttaaaaataggcaaaagacataaacatttcactgaagaaaatataacagatggaaaataagcacatgaaaaggtgtgcagagattgaggccatctcactctcagcatgcattacattccgccaccgttgctgccattccgctcccgtagttgtctccacctgatctgctctcatgctggggttgaggaagggagttgtacagggagaggagaaggcctcagctgaggcagttgaggaggaggaaggaagcagtggcacagccggcatagcagcacaggcagcctggttcctgggagtgtcggtgtggcatggtggttggggcagatcctgtggggcctgggtaggggaaggagtcatcagctcgttcatagtggacaatgaaaaactagacagccaatggctcaagaattttgagaacaaagtccacaacttggggattatgagaagacagcaaaatgaagttgtagttgaattaaggaagaataaaagagatgaacatctcttaaagagaaggaacgtactgaatgaagatacctgtgaagactgatacaaatgatgattatggagtgtaaaatacctctctagtagctattattcaaaatgcttcaagtgataactaagaaattcaattaaatgcagttcgggctgctaggaagctttgtccagtgatcgaagtctaccaatttataaaaataaaatctggaatactacctgttctagtctattgtcttgaaagagatgacaatgctttacagttagaagctgcatgggctttgacaaacactgcatctagaacctctgaacaagctcaaacagtagttcagtccaatgctgtgccacatttcctgaggctcctccattcacttcatcagaatgtttgtgagcaagcagtgtgggcattgagaactatcataagtgatggtcctcccgatgtagagattatgtcataagtcttggagttgtgaaacctttattttacttcaaaacattttttttttctg

SEQ ID NO: 50382 - DNA, 1027 bp, Homo sapiens
ataaataatggctgataatattccagtatggcaaaaggcttatacgtatagattcgagaagctgagtgaacatcaaacaggataaaccccaaataaagttacatgaaaatacatcatagcaaaatttgtgaaaactaaaatattcttttttttttttttttttgagacacagtctcgctctgtcatccagtctggagtgcagtggcatgatctcggctcactgcaacctctgtctcccaagttcaagtgatcctcccacctcagcctcccgagtagctgggactacaggcacacatcaccacgcctggctaactttttgtctttttagtagagacgggattttgctatgttggccaggctggtctcgaactcctcacctcaagtgatccaccttccttgacctcccaaagtgctatgattacagccgtgagccactgcacctggcctaacaaactattgaaagcagcaggagagaaattacaccttacttataggggaaaaacagtttaaatgacagtggatttctcatcagaaatcatggaagccagaaggaagttgcacatttttaagtgccaaaaaaaatatatcaatgcgaaatcttataaatggtgaaaatagtctttttttgagactgggccttgctctgtcacccaggctggtgtgcattggtgcaatcatggctcactgcagccttgacctcccaggctcaaatgatcctcctgcctcagcctcctgagtagctgggacaacaggcatgcaccaatcatgcccacctaatttttgtattttctgcagagttggggttttgccacattctccaggctggtcttgaactcctgagcttaagtgatttgcccaccttgggctcccaaagtactggtattacaggtgtgagccactgcatctggcccaaaaatattctttaggaatgaaggagaaatgatgatattctcagatgaaataaaacgtgtttgtcaccagcagacctaccttaaaaggaagacttaaggaagttctctaaagagaa

SEQ ID NO: 50383 - DNA, 1052 bp, Homo sapiens
aatcttagttttcccatcggtaaaatggttacaggagcaggcaaagttcaggtttatcttcacgtaacctagaaaaggaggagaatagaagtctagatagatggggatataagcaaataagtaattaaccaatacaaatcagtatcttccctctgcaagacagttgatgagctataacaagaacccttgatgtttttatgcccttcagcctggtaaccctgttcaaaggcaatatagagtagtggatggtatggatggtatgtaggctttggtgttagagagccctggttcaaatcccaacatccaatttactagctctgtggtactgggcaagttaccaccctgaacctcactcaattcccttctctacaaatgggataacacccaccttttaacccatttctaaggttacaaaaaaaaaaaaaatacaataacatgaaaagatgttttcttagtatagaaagagaaacttctcccaccatcctacccacctaacagttctttctgtagttctgtgccattgaaggctacctcttgaggcaagaggcacaggcaatgtcaagaaaagagagactgaagacaagcaggctgatggcagaagccagagtccagtgtgtggagttggatcacccataggatagactggggcagaggggaagatcagctactgagggagaagaaaggagactacaaatctgagtaaggggataatggctaggcagatcctgagaagcatggtagggagccagtgggaagacaacaacatgccttagagggtacccctttcaaaactttgtagccctttcccagaggcaggcttcaaattatgttattaaaggcccttgaaactgtgtttcttccaaatctttttcttatttagtcacatccatgtatgttttgaaattgtaatcttagtgtgtacactttttcagcgagtatcttatcttcaacattttctatgtcacaagtcttcagtggctgtcaaatatcctaattttgctgaaagcccagaaagtacacctctgtgtattaactttttgcttccttgaatt

SEQ ID NO: 50384 - DNA, 1022 bp, Homo sapiens
ttgaatgagctttgggtcaacaatgaaatcaagatagaaatttaaaaattatttgaaatgaatgataatagttacacagcttacaaaaacctgtgggatacagcaaaagtggtgctaagacaaaagttcatggtgttaaatgcatcaatcaaaaagtctgaaagagcacaaatggacaacccaatgtcacacctcaaggaacaagggaaacaagaacaaactaaactcaaacccagcagaagaaaagaaataacaagatcagagcaaaactcaatgaaactggaacaaacaaaaacaatgcaaaagataaatgaaacaaaaagctgattctctgaaaagataagcaaaattgatagactgttagtgagattaaccaagaaaagatccaaatgaactcaatcagaaatgagactggagatattacaactgataccatggaaatacaaaagataattgaagtgtactatgaacaccttttcacacacaaactagaatgtgtagaggatgtggacaagttcctggaaatatacaagcctcctagattaaatcaggaagaaacagaaaccctgaacagaccaataacaaaaagcaagattgaaactgtaattttaaaattgccaacaaaataagttcagaaccaggtggattcacagctgaattctatcagacattcaaataagaattggtaccaatcctactgaaaccattccaaaagacagtaaaagaagaaatcctcattaaatcattctatgaagccagtgtcaccccaatacccaaaccaagaaagaacacaaccaaaaacgctacagaccaataccctgatgaacatagattcaaaaatcctcagcaaaatactagctacccaaatccaacagcatattaaaaagataatacaccatgatcaagtcagttttatcatagggatgcaggtatagtttaacatacacaagtcaataaatgtgatacatcacataaacagaatcaaaataaaaaatcatatgattagctcaatagatgcagaa

SEQ ID NO: 50385 - DNA, 1724 bp, Homo sapiens
tgtgtgaccaataagagatttataattctttttacgagtttgtctcttaaatcatgtagaaaataaaaagaagtgttagaaaccaaaaatatgatattactggctgttagatttgcctgtttggttacctttaccagaaatctttatttcttcatatggttttgagttactgcctagttttcttttatttcaacctgaaggacttcctatatgttttctcataggggtggtccagtgttaatgaattccctcaccttttgttcatctgggtgtgtcttgatagtgccatcatccttaaagtatagttttgtcaaatataaaattcttgattaacaattttttcttttagcaatttaaatgttttcccactgccttttggcctccatggtttctgatgagaatcagctgttaattttattgaggatcccatatacagaatgagttgcttttctcttgttgctttcaagattatctctttgtctttggctttcaacaatttgattacagtatgtgtcagtttgtatcactttgaatttatcatatttggaatttgttgagcttatgggatgtatagaatcatgcctttcatcaaattttggaagtattcagtcattatttcttgaaatattgtttctaccatttctctctctctcttttttcgttctaggattcccaaatttgtatgttggtccacttaatggtgtaccacaggtcccttaggctctattcacctttctctattatcttctgtttgtggttcttaggactgggtacttccagttgtcctatcttcaggtttgctgattctgacttctgcctgctcaaattttctactgaacccctgtagtgaattttttttatttcagttattgtacttttcagcttaaaaatctgtttggttcctttttaaagttaatattcctatatgaatattttaattttgttcatacattgtttactgatttcctttagttcattgctcatggtttcctttagttcttttagcatatttatgacagttgtgttaaagtctttgttgcttcctcagagatagtttctgtttattttctttttgaataagctttcttttcctgtttattttttgtgacttgtgcttttttgttgaaaactggacatttggatattataatgtggtaactctggaaatctgattatttctctttctcagagttgggtgggttttttttttaacactgtaatagcctgtttcattacttttcctatttttgcagatactgtatttcttgtctgtggttactgaagtttctgtttcttagcttgtgttcacctatggttttgacatatttccttgaattccaagagctaaaacaaacaaacaaaaaattcacctatttctgtctttacaaattttctatgctgggccgctccttcatcacttagcctgatcttagcctttgaacactgagcctagggatcagcccacagtggaaatctgtgctcttatcaggttttttctgagtatgcatcttgtcttgggcataagtgtggctctctaaattatttcatatacagatactttgaatgccctgatttcccaagcaaactcccccagatttttctcccagacctgttgcatatttcattgctaatcttttgcctcaagcatcttcgtgttgtttatttgccttgctttacgatatttttaagcaatgctcacaagttttctgccctgagaggattcc

SEQ ID NO: 50386 - DNA, 1087 bp, Homo sapiens
aaaaaaggaaggtgattggggagaaaagtttcaaagatgttgttttagcttatgacatgtgttaaaaagagttgttggctgggcacagtagttcaagcctataatcccagcgctttgggaggccaaggcaggaggatcgcttgagcccaggatttgagaccagcctgggcaacatatggtggaaccttgtctctacaaaaaaatactaaaattagtcaggcatggtggcataggcctgtagtcccagctactctggaggctgaggtgggagaatggcttgagccctggaggcagaggttgcagtgagccaagagggcaccactgtactccagcctgggtgacagagccagaccctgtctcaacaacaagacatagaattgttaccttttattgttactgattgaaaaaatccacaaatgaatgtattaaagactggcatactttggaaaatcacattagtcagatgaaattatagaactggatgtaatttgttttaagaagctgagagctttgtcaccagatagccacgtgtggaagatacagagcttgcctataacttgtttaagaatatgatcaagcaaatgattgcaaacttgcatctgaatctaaaaaaagcagagaaacatatgcaggcaaaatctgctaaaagtgacctcgaagaggaatttccaccaagaaaaaaagatcaaagtcttctactttcttctctctcccactaatctttttattaggaaatacaacttattcagcttgcgtttgcatagggaaattttccaagattagtcttcaggttctactaaaaacttgacttcatcttttccagaatctgccaaatgacatcttatacagaggcagaaatatctggccatttctagtgagccaaaacctttggaaatattcaagaaagcccattaaccacatagaacagagttacccagcagtaatcaagtcaagaacaaaatagtaagttctcaattatctgcaggtggccaagccacttgttattgtgtttggtaaatgcatgttttgatagagacttagggatgcctacttagacagctgcccttcccgccacttatagcaattt

SEQ ID NO: 50387 - DNA, 1044 bp, Homo sapiens
aatactgtgtggtaggcgtctcagtgatacgacagagagggatgggggatgtccggcatccccattctaaagtggagcatctgtatatggggggatgtgagttgtgaatgtggaaagtctagaacattaactctttccctttctcctttgccattgctccttatgtgtgtacacatgtgtggggaggtagggacaggaagattgctggttgtatgccagtgaatgaggggtgtgggaggcagggagtgaacaggacagtcactgagtgaaggacttgtgtatgtgtgcttctgtatacatatttgggtggctgtgaggggtgggatgtgtggtgagacagccgttccctagaaaaggggtgtaccttgtgcatcttggggcaagaactgcagggggcaggggaacatactatctcagggagtccaccctgagttgggcatgggggtgtgtgtgtatctctgcattaagaaaatatgtggtattcaaacaggcaggggagtgtgtgtgtagatttgtaggaaatctaggtcattcagctactctgaggtactggtgggtttggggtttgagggggaggtgctttgggaattctgggacatccagaccctccatgatgtgtccctgtgtgtgtgtctacagacagggaaataggggtgaagatgaaaagttgaagcagtgatacagcctggtcagaagttgttgtttgtgtccgtgtggaacatgcctggggaagtaggaaaagagcaaagagggacaaaaatgtctgtagttgtatacttgtatatgtaagcacatagagggggagaaggaccataaagaatgtgtggtgaagcactctggtggagaggggctcatgagaagtgataccgagagcagtgaagctggagatcctgagagagcccacctgtgctaagtggggtgggtggatggacagggtgagcaggcctgtgcaccagtcggagaaccagctcatcagcccagtcttgccacttccctttgctccacagaagacgtgcgatgggacacatttcccctaggccgaat

SEQ ID NO: 50388 - DNA, 1049 bp, Homo sapiens
ccctccccctctcccatttcaccctagcttcctcgagcacatggaggcatccggcagggccccctcgacctgaggtccagccctcgtgaactgatctgcggctgcactcaaccttctcgccagtctcaggatgaggtggccttgccccacctcaaagcctgctcctccacctgtgctctggagccacctctgccagcatcgctggggcctcaccccagcctctaccttgctctgctggctcttgctcttcaacctaggaacgtgcctgagcttttctcatcttaaacaaaacaacaataacagcaacacaagcaaaatctcctttgaccctgcatccctctgttgggttatcatcagcttatcattcccacccttcccatcaaaacatctcaaaagagtagtctacactcaacactctccatttcctcactaccctcttactcctcaacctgctgcaatttgacattcacccccagagttgctttgacctcctaattaccaaatcagtgggcccttgtcagtctctgtgtctgctgcattgatgctgtttaccaccccctcctcaaaaaatgcctgtgcttattactagttcctataaagtgctgaaacccaaatctgtctagccctggcccctcccccaagattcagcctcctgtactcgactacatgtcagacatctccccttggatggcccacaggcaccttactgtgaccaaaagagaattggtcgtctcagtccccatctcaactctaaagtgatcttcctcctctgttccctatctcacttggtggcggcaccatctaccctgtcctgttgactctcgaatacttcccaaatctgaggttttgtgttgccgtgtctacttcccttagtgtctccttccctctatcagactaagcttttcaagggcaaggactctacatcagctgtccgtgccctagcacaccacacaagtctaggcaccaaacaggcctcagtaaatgtcgttgaattgaaccgtgctctgctctctcattcccagcagtgctgtccttggtgggagctgacc

SEQ ID NO: 50389 - DNA, 1665 bp, Homo sapiens
gaagaatggtcaagataaacagactgcaagaactgagtctaaaagcccttgaccccatgatcccaggcatttatttccttctgtggatgtggaactttttcctgtctgtgtgttgaagtgtattcagacactactgctctcgttatgggccatagatcagcattagtgcttggtaagcacttgttcaaaacccactgatcccagcctctaaccagcccctgcctgaggaggctgaagcctaagatccaattgtcaactcccttcctccccactcctacccacccaccacccctcctccctatgctgcttcagccacttgagccagaggcattagctgctttggaggtgggtggaggagtaggagagggtcttctgccagcatcactttgctaaactagtgtcctcttgttccagggaggctgtgctggatgcttttctggatgatggcttccttgtccccacatttgaacagttggcagctttgcagatagaatatgaaggtagggttctgggggctcactgcacccttagggttctgattcctgggtggaaacagctggggtgggctggggggccctgggttggggtgtgaaggctgtttcctgccattccatggcctctgaaagtccctcagccttcctggctgagcagaacaggtagccccactgacagttgtggggctgcccttaagtgctctggaatggggtggggtgggatggggtggggtcggggagtcttaatgacattattgtgccatgttcgttgtgatttagctgctagctagagagctagaacagcagaattggaggggccttgtgaggtcatctagtccaacatcctcatgttacagatggtcagactgaggtccagagaggggaaggtactgacccaaagtcacacagtgagttattgacaaagctgaagctagaaccagatctctgttttgtttatactttattttgagtcagttgttggttgccagatactaactggtttctctctccccactgttctgctctcctctttcctttgttctgcggtggcaactctgttgttggtggggggcttggctcatgcgcgcgcacacattctcttgctctcactctcacttcctttctcttgctgtctcttgctctctctttcgtgctctcctgctctctctctcctattgcccccccaaatgggtgtcccttacaaaccagaaaacgtggacttgaatgacgtcctggtgccaaagccgttctctcagttctggcagcccctgctcaggggcctgcactcccagaacttcacgcaggccctattggagaggatgctctctgaactgccagccttggggatcagcgggatccggcctacctacatcctcagatggaccgttgaactgatcgtggccaacaccaagactggtgagggagactagccctagccctagggcctaaggcagcccaggcaggagcctctgccactgtcctcagctctctgctaagaagcaccaggcaaacacctcccgtgttaaaggtttaggtttgcccaagagggccccacggcagcagtggacaaatctcccttttccttttcttctcagagccaactaaactgggctggggcaaagtgccctgaattctttgagcagttgggaggtataggtggggagtctggggg

SEQ ID NO: 50390 - DNA, 1050 bp, Homo sapiens
agataggattggatttgttgatttctgggttcttttccaattctttatatctatactagtaggtataaattctagagcatgtcatgaattgaggaaggcttggctatatctgagatacgactgtaataaaagtggttgaggtctaaggccactgctatcagtataataacttcacaaatggggataactgaaagccctatgtccagagtagttggcaaacctggactttctccctcagataatactgatgtcaagaggtctagcccagtccatatcagacagccatgcaaaattccagatggaaaatcatatttaaagtcacagtaacattgtgatctctattaagcacaacttcagctactagacaagaatgtgggacagaaaagccagctcactgaggacaaagatgggggaggtgggaatgtggctgatcaggaccaggcaaagagttagaactccagccaagagtaccaaggttcagtgcagcttcattgccattaagggaactgagagttaggcagggacactgaaacaggaactcagatcagagaatgaagttgatttataagggggaagataaagtttactagataaaagagtgctcaggactccttttcagcccactggatactgtgtgcaaagctgcagtatttgtgtgggaagatcctgctaatgtaaatttgccttgggtcagtttggctctggggcctagcagatgatcttgaaaagcccaagaggtatgtttggttgtgccctggcttaattggagatgaatatagcatttcatgggctgcaggatacacggggaacactgttgttcctttatgatttttctcaaagtctacttcttgctagctcctgggacactgtgactcaaggtagaccttcctgtctctgactttggaggccagtgtcccagataagagttgttgcttaggccctgggtgcatggacatgaaacatgagcaatgaagcatttggactccagggtccagaagatgaaaatgagaaaatatcagagagctgcctcagaagaagagagatgggtaa

SEQ ID NO: 50391 - DNA, 1046 bp, Homo sapiens
agaagaaaagctttcagtctttgaccattgagcatgactttagctgtgggtttttaacatgtgacctttactatattgaagtagtgtccttctattcctagtttgttgagtattttttttttaattatgaaaagggcttgaattttatcaaatgtgttttctgcacctattgaaatgataatatgggcatcttttcttcattccgttattgtggtatattatattgttttcttttcatatgttgagacatccttgacttcaaaaaataagcccattttggtcatggtgtataattctattaatgtccttttggatgcattttgtcagtattttgttgaggatttttgaatccatactcataagggatattagttcgtaggggtttttttcttatagtgtcattgtatagatgtattatccaggtaaggctggctgcatagaatgagttaaaaagtcttccttccttgatgtagttcagatgtttttcccctccaaatctcatgttgagatgtgatccccaatgttggatgtggggcctgatgcgaggtgtttttgcaaagggagtggatccttcatggatggcttggtgccctacttgtggtagtgagtgatttctcattctcttagtttatatgagagctgtttaaagagcctggcaactgctccattccttcttactcctctcaccgtgtgtcatgtctgctcctccttcctcttccactgtgattgtaagcttcttggggtcctcaccagaaacaaatactggcactatgcttcttgcacagtctgaagaactgtgagcaaaaataaaccttctttctttatcaactacccagcctcagatattcctctatagaaaccccaagcagactaatacactcctcttcaatttttttgcaaggttttgagcaggattggtgttaattctttttaaaatggttaacagaattcattagtgaagccatctggttttgggcatttcttttttggcaggttttcatgatttggtcttggtgtgtttgtgtttccagatattttctcatttc

SEQ ID NO: 50392 - DNA, 1160 bp, Homo sapiens
tgttagaagcactcaggccacatctttaattctttactgcttaaaaatttcttctgccagataccctaaatcatctgtctcacgttcaaaactccacagatccctagaccaggggcacaatccttccagtctccttgctaaggcacagcaagagtgacctttgttccagttcccaaatagttacgcatctccatctgaggctaccttagcctggacttcactgtccatatcaccatcaacattttggtcacagccattcggcaagtttctacgaagttctaaacattctctcatctttctgtcttcttctcagccctccaaactgtgtcaaccttttcactacccagttccaaagctgcttccacaatttcaggcatctttatggtcatgccccccttcccagtaccattttttggtattagtttgttctcatattgctatcaagaactacctgatactcagtaatttataaagaaaagaggtttaattggctcacagttccacaggctgtacaggaagcctggctagggaggcctcagaaaacttcaatcatggtgggaggtgctatactcttttaaacaagcagatctcaagagaacttactcactatcacaagaacagcaaggaggaaaatcacccctatgatacaattacctctcaccacgtccctcctccaacattggggattataatttgatatgagatttgggtggggacagaaatccaaaccatatcagatatcatcagcttcttgagaaacccttactataatggattgtaaaaataaacactttaaggacagaattctcaattttaagtgttgcagaacgaaacagcatgtttgagttgatgcagggcctacagctcaccattgaacaattactgatgaacatatataatatgaatgcacaggtggttattcctgagagaatacccaggctagtagactggatttacaccacagtaaggtctgttaccctgagaaggggactgcctgactcttcttaaaaaatatcaagtggagctccccaggtgaagcagttgatatgcttcatatgcaagccatgtgggactgactttatgatgactgggacattctcctacagaatatgcctgtgaccatccaagatggctgaatagggacagctccagtctacagc

SEQ ID NO: 50393 - DNA, 1030 bp, Homo sapiens
gtattctctcccattctgtaggttgtctgtttactgtgttgattatttcttttgttatgcagaagctttttagtttaagtcccattcatctatttttgtttttgttgcatttatttttggggtctttttcataaattttttgcctaggccaacgtctacaaaagttttacctaggttttcttttagatagggtttcaggtcttagatttaagtatttaatccatcttgagttaatttttgtatatggtgaaagacgtggatcaagtttcattcttctgcatgtggctatccaatttttccagcaccatttattggatagtgtgtccttttccctgtttatgtttttgtctgctttgttgaagatcagttggttgtaggcatttagcttcatttctgggttctctattctgtttcattggtctatgtgtctacttttatactagtaccatgctattttggttactgtagctgtgtagcataatttgaagtcaggtattgtgatgcttccatatttatttgtttgttttgcttaggattactttcactgtgtgcgctcttttctattccatacaaattttagaattttttttctaattctgtgaaaaatgatatttgtattttgataaaaattgcattgaatcttagattgctttgggcagtatggtcattttcacaatattaactctttgaatcgatgagcatggaatgtttttccatttgtttttgtaatctataatttatttcatctgtgttttgttgttctccttatatagatctttcatgtccttggttaagtatattcctaggtattttgttttattgttagctattgtaaatggtattgagttcatgatttattttcagcatggttgttatttgtatatagtagtgctactgatttttgtatttgaattttgtaactgagactttacttaattcatatgtgaaacctaggagtcttttggaggaatcttaagggttttcaaggtataagattttatctttggcaaggagagatagtttgattttc

SEQ ID NO: 50394 - DNA, 1024 bp, Homo sapiens
ctttgactaattagcttactatatttacaaaaagccaacaattatactttgaaatcaagactggtttcatttatttcccccaagaagagcctgactcagcaacatactcagaccattctgaagcaatggggataaagagtgtcagctatggccttaggggtgcctatgggctctgggccatttcacatttgtatgtgtagggcctttgccagcaaaggcaggggctggcattggtgtcccatctggttcagagtctcctgtcctttctgttggccattggttctcacgtgtataccaaagcaacttatgggacttggttggcttctgtttgcagggtggcttccaggaccaggttttttgaaacagcttcccggaaaacaggaaggtaagatatggaggtgacaaaagaaaaaccaaatcgccttttaataactgcatccttagcatacaattgtgctcactctaacatctttctctttttgtttctctacagctctgtctctgtctgtcactttctcttccccaattctgtctctccatccctatctgtctgtcacctgttcacctgtgtgtctatttgtttctctcatattctttttctcacttggtgtctctgtccttttttttttttttttgagatggtgtctcactctgttgcccaggctggagtgcagtggcacgatcttggctcactgcaacctccaactcccaggttcaagtgatcctcccacctcagcctccctagtagctgggactacaggtgcacgccatcatgcccagctaatttttgtattttcagtagagacagggttttgccatgttggccaggctggtctcgaactcctgacctcaggtgatccatccacctcagcctcccaaagtgctgggattacaggcgtgagccactgcacccagccagtgtctctgtcattctcaatctctttctgtctgtctgtgtttctttgcctgtgtccccatagttgtctttatctgtctgtttctctgttcatgtcactctatatgt

SEQ ID NO: 50395 - DNA, 1049 bp, Homo sapiens
ttaataatctactgtttggtttttattctctacttttcttggagcctaacgccaaattgttttataaggataaataatggctaaggaagcaggaaggctttaaggtgagcatggaggagtgtcatagaaaaaaagaggtaattctaggtgactgggggaatctacaagaggaatcaacctcctcctactctgtgccttcaggttgggtatagaggaatataaggaaaggtggaaaaaagttgctaaggttgaatactgatgaccatcaggtcccaagaactctgcaaatgttaagattctttggttatggtcatttgacagagattagagagagagggaacaggtggggcttgagaaggagatcaagtttgtagtaaaagccaggtttcggaccaaagttgaaaagaaattaaaaagaagtacagcttggtggaaagcctataggctcaagtgacttagtggttaaaagctcaggctcctgaatcttccagatgtgagtttgaatcctggctctgcctcttcctagctgtgggactttgggcaggttacaacctctctgaaccttagttttctcatttgtataatgaggatagtatttgcgcccataggattgctataacaacaaagtgagtcctctacatgcctagcacatcaagagtactcagtaaatgatagcagttgttttgctttcataggagactattactagctacttgatcttagttagttcagctttacttctttgagccagttttctcaactgtaagtggggacaataccaccattgaaggcaaggattttgcatggattaaattagattaggtatacaaagaatctggtaaaataatagaggcttaagaagtggtagtattactaggtaacaacctcttaggaaatggcagacatggaagatggggtgtctactcttctgtattcgaggccctttgagaagcctcaagcctaaaatgtagatggcataaaagagttcagagttatattttcaacccacaacctgtccctaccatgccaaacacctaggaagaggcgaa

SEQ ID NO: 50396 - DNA, 1044 bp, Homo sapiens
tcagcaaggcatttatctttcaattccctctcccaagtttgctctccctttaggttttcaagaatcaaaggatgcagatggctttctgtggagaatgatgtgagcacatgggcccactgaatgtggatccataccaacttgatcatggcagatttttccacaaatcccttgtttagaaaagtagcagaaaaggctggctggcacaaaaatatctcccactgaaatatctgtgggcatacacacatatgcagaacttattttaaggagaggctgttcaaacagactcttaacagatggcatatagagggctcatttcctgcaacctcacattactaatgttgttgctcctttactaaacactccagttcactagtcttacaaatctcatccatgcctttgcctaaactgtcaaagaagatcagggcttgaaggaatgtctactccaaccctgatcactttactgatataaattttgagatctggagaatggaaagggcatgcccaaaatttcctaagaggtagaggtagagccaggactagacttcaagagtcaacagtcttctttctggtctctcacatagctatcacagcacatactccaagacaacacagacaaatcttggtgtattcatggatctctttcagatggacatttgcctttccacagagaagtattcatcaaccagtctttgagggtgggagattggtgttaggaacatttaaattttataatgcccattagacaggtacatagccatgaggaaaacactttcctggtctcttgctttatcataaaaatgccccaggtgttacataagtaaatatctaagatggattagctaaaactgtagctatggtgaactgtgtgaaattcagtgtaattttcagggattgttcaagtattttctttctttcttccttccttccttccttccttccttccttccttccttccttccttccttccttccttcctttctttctctctctctctttctttctttcttttttttttgacagagtctcgctctgttgcccaggttg

SEQ ID NO: 50397 - DNA, 1048 bp, Homo sapiens
ggtttgtgtttgactgcgtttagcgctatactgggtaaacaccatggagttttttgttgttgttgtttgtttgtttgttttttgtttttttgagacagtctcactctgtcccaggctagagtgcagtgatgcaatcttggctcactgcaacctccgcctcccgggttcaagccattctcctgcctcagcctcccaagtagctgggattacaggcgtgcgccaccacggccagctaatttttgtatttttagtagagatgggatttcaccatgttggtcaggctggtctcaaactcctgacctcacgatctgcccgcctcggcctcccaaagtgcagggattacaggcataagccaccacacccagccacaccatggagttttttggtgagttcatgtttcttttatttagtttattagaagatgctggtgataaagttatttttacatgttttccctaggtcttggcctttcttcatagtctgttcatttctaacagcctgactgtggagctcacacaggatttcctcccatacaaacaacagctccaactcagtttacagaatgtgagtttgcatgtggatttttctcaccggtctttccattccgattgaatttcagccctagcgaccttgattcttggaattctaggttactgcatcctagccaatttgttagaatatactggtgtggatcacaaatatttagtatatcagactgttcttgctcttccactttcacatctttcctgtttttgaggctgactgctgttcaaacccacccttccacacaccaacaccttcatctatgcaatatttattaagtattgctaatttgctgcatctctctcagatcaggacatagctataggcttatttgagcccaggccttaagctacttccctgctcagtcaaaacactctcactgtagactttattaccacaaacactcattttatcttctctttcttttctcagtacttattagtagagtcacataaattacttttaaaggttttctctaccttctttgtcatgctggttcttacag

SEQ ID NO: 50398 - DNA, 1042 bp, Homo sapiens
tttctttctttctttctttctttccttctttcttccttccttccttcctttctctctctctttcttttttttcttcctttctttttctttctccttccttccttccttcctttcttcctttcttaatttcttttccttccttcctgccttccttccttctttctctctctctctttctctctctctcatccaggctgtagtgcagtagtggcatcttggcttactgaagcctctgcctcccgatttcaagcaatattcctgcctcagcctcctgagtagctggaattacaggcacctgccaccatgcccagctaatttttgtatttttagtagagacaagtttctccacgttggccaggctggtctcaaacttctggtctcaagcagtccacctgcctgagcctcccagagtactaggattacaggtgtgagccaccacacctgcccctagggcattttctaaaaccattcagtggcagttgtttagtactacagtttccacagacaacaaaaagaataaagtagcaaataagaagctgaacaataaaccaaacaggacaaaatggagaatgaattatccttggagagctttgaagagctgtgagatattcctggaaatctaggagtcatgcacatgagaggggctttgtacatacccagcgtttgtatctgtctagaagatacaaacaaggagattagacttgagacatctaatctcccacttctggctgaccttcagctctttgcaaggaggagtgaaggctaaggcacagttgtaaactgtctggctgaatgttgaaggcacaccccacaatacacagagagcccttcagcaaaggcttggagatatttgttcaaaccatttaaagaaatctctgtccaatcacttgttgaccagtaagcttactgaccagagactttagtggtttcatatgacaaagaatgcagactatagaatgagtccatgaagccaatgtaacaacaagcaaccacaagaacaacaagctctggggaaagagaggagttctgatttccaaagttg

SEQ ID NO: 50399 - DNA, 1027 bp, Homo sapiens
atctctcagtagccgtactcacattccttatgctgcagcctagtatttctcaaagtgtttcgtagcctagtgttcccatgccctgtagggacattagatgatccaaggtggtgtatggataaaaagttattttaatgcatagagaataaaagcaaattcatggtagcgatataaaatttcctgttaaaatacattaatttaggctacagagatgacttaatttgaaggaaaagtatgttaagtaataatagcataggtggtacacagctgtggaaagagccagaagatgggacacaaatggctaaagtatgggaaacgggcccgaccacctttgtctacttcccattccctcaactcaccatgtaattcacatttctgtgcctttgatgatactgttcccttatttttattactctctttccaactttctgcttatcaaaattctctcaggctttatggtttagctcaaatgacacttccttgtgatatctttgctcatctcccggtcagaattgaggactccctcttctgcacactcccaagacattactcgtgcttctttctggttctggttcattttgtttgatggtgtaattagtacctcatatgtctgtctctctccctatcagacagtaagtttggcctttagcacagtgccaaacacagagagatagcttatgataaatgttcattacattgaattatagtaaaggaagaagttcaatttcacaattctccaagttgcaggtgaaagttaataggaagagaaaccgtattccaaacaaggaaaggctatctgaagttataaggtgtgcatgtgtgtgtaaggatataggcaacgagttatttccagtgtaaggtgaaaacctataattcttatgggtgaaaacattatgtttcatgtttcggggcaatgacctaaatctgaatgttggcaatgcttgcctaatctagtcagttggctcaatgccttcagaaatttaaaaaaaaaaaacaaaaaaacaaaacaaaaaaaaaacaaaagtag

SEQ ID NO: 50400 - DNA, 1046 bp, Homo sapiens
acatcttagttaaaagtatttttattttcaaatacataaataatggttgtgaatgattcatgtacacttgtaaagaaaatgtaattccctgacttgctcactaagtccttaccatttgaaagcctagtctacgttatttattgtattattcagctctgtacttttcagccttatcacaaatcaatccctatcaaaaggctatggaagaatgaaggaaggagtaactcattcggtctggtgaaggcttcactgggaaggtgagatttgatgtaggcttaagagatgagcacgatctcagctcactgcaacctctgcctcccaggttcaagtgattatcctgcctcagcctactgagtagctgggactacaggcatgtgccaccacacccggataatttttgtaattttaatagagatggggtttcaccattttggctaggctggtctcgaactcctgaccttaggtgatccactcgcctcggcctcccagaatgctgggattataggcatgagccaccgcacccccacagaattatttttttctgtgcaatattcattaacatctaaggaacattattggtacccagagtggaggtattgtaggaacagtaaaggatttaagcaggggaatgaaaagtcagatataagttttagcaagattgccctggaaatagcatgatgggtgggttgattaaagaggacttttctagagggagtggatatagtcttggaatgttgagggccttgactagattgtgactgtagaaggggagaaggggacaggttggattaatatgaaggtggcaaaattgatacaacttggtgataagttatgaagttgggagaaggaagatgactcaactggtattgggtatgttgaggttgaggtgcttgttggagattagtaaattggatatatcgcactgtttgcttatgaggaaaatatgggttagaaatagatgtctcagacctgaaacagtagaatgtgagagaacaggatgggacccaatatttaaaggttaagcaaaggaaaaaaaaagctagtag

SEQ ID NO: 50401 - DNA, 1028 bp, Homo sapiens
acctggtcactcaccatgagatggcttcggatggatcaggaccaagggtagctccacaccaacatcgctgcaaggatcccaaggtggagttacatctcctctctctacaagcccaatccctgaacctccctcccttagttttccagtctttggatgccctcagaccctccagaatcaatcattattttgctctccttatccccttgtcctcctcttcttgcccaagttcccccaccccacagtctctcacctggctgtcaggtctcctaggatgctgtgggtagaatgacacccaaaattagcagcgggaaatagagaaggggcaacctagtttcacaaggggatgagggatcataagacctaatgagccagccacagaatgggtttctggaagggaaagtgacttgctcactgagctcacaggtttgggaacctggtctgggagaaagggtggggaatggtttgattgggtcaatctaactgggagaaaaacagaggcgaaaagcccttgactcttcagcccctgcccagacagacccagaaccctcacttacccaccacaggacaccatcaggttgactctgactttgtaggacaccaggatccccagcagctctttgtccattcccggtctaatactggaggttgtagtattcgttttagggtgtttggggcatgaagagtaattcattctgtccccagtttcttctcatgcattcctatcaccacaccctattatgtttagtcttatcccagaatatctcccaggctctaacctttcctacccgttgagaccacatttctcttcctgacattcacttttaccatgtcactctctgctcaagagcctaccttttgaatataacaactactctgcctgactttcaagacccctaacaaccttgccctatctagcctctctaaccttttctcccctaactcctgggatacaacctaagcagacccatcttctctccgtgatcagaacatgccatgtggattcccaccttctagcctttgcccatgct

SEQ ID NO: 50402 - DNA, 1066 bp, Homo sapiens
caaaaagaccccaaacccctggtcttttgccacagatagttttcatttttgttttttactgaagatgggatgttgctgtgttgcccaggctggtctcgaattcctggcctcaagcagtcctcccaccttggcctcccaaagtgctgggattacaggagtgagccactgcacctggtcaccacagatagtttgagaagcactgattgaggtagattccagtttggggttgtcatttgccattaactcttttttatggacaatgtttctctaaggtaggtactgaagagtagaattacagggttactggattgaagagtatgtacattttacattttattactgcaaaattgctcttcgaaaaggccaaatgcttctaacaatggtacatgagtcctttttttgtgtcagaaatgatattcaaaaaaagaaaactaaaacagtatatgagagtacctgtttccttacactcctgccaacacttgatatcaatctcttaaacttttgttagtctgtcaggcaaaaaatatctcctctttattcacagttttatgattattagtgaatttaagtattttttcatgtttattaactttaaattttgatgtagtcagatatattattcctttcctttatggcttttacttttttgttgtttttttgtagagacaagtctcactttgtcacccaggttgtagtgtagtggtgcaatcatagctcactgcagccttgaactcctgggctcaagaaatcctcccacctcagcctccccagtagctgggaccatgggcacataccactacacctggctaattaaaaaaaaattttttttgtagagatggggtctcactatgatgcgcagggtggtctctaactcctgacttcaagcgatccgcccacctcggcccccaaagtgctgggattataggcatgaaccactacacctggcccagcttttgcttttttagtcttaagatggctgttcttgctccaaggttttaaacatattcatttatattttcttctcatgtgtttcttcccccctttttcttacagctttattgaggta

SEQ ID NO: 50403 - DNA, 1050 bp, Homo sapiens
aagagcaagtacctgctgtggtactgcaaggtaaggagggtcagcatgcgagcgaggcgggaaagagggcagtggggagcacgggctgtggtactgagctcggggtgtggacagatctccagggagggcagccagccttccatctctaagctggcccgatctccaaggggaggagcatggcttatcccgggggaaagaaagggcccaacgcattttagggaggcaggtctgaccatccttttgacatcctcaggctgcccggtgccatgcgtgtaagcgccaggggaagctgctggagaccatccactggcgtgggcagatccgtcatttctgcaaccagcagtgtcttctgcgtttctatagccagcagaaccaacccaacctggatacccagagtgggcccgagagcctcctgaacagtgagtcccaggcagggggtacactctgttagagggagcctggactctcctaatcctaagcctagcccctttctccttcctcttgcgttcagctcacccctggccagatagggtgctagtactgtgaactgtattctcttttagcttccgaaccctgcaggtaccgggggagtcttatttaaagcttcttggagttagcatctactgattgtctatgaaatatatattgttagggagtgggtgcctttcctggtaggatggagcatataggggttatggttacgtttctgagataaggaaatctcagcataaactctacatttagtgagactgaagactgctatttctagaatgttacccctgcccctccacaactccagggataacagactcttcaggctatctaagtggaaggtctcaaatgtgggttttgggggaaaatgtaatgtttcattctccaggaacaaataatcttttaggctgctattgctggggcatagaggagactagatctgggatggcaagggggtcaaatcctagaagttcccatctgtatttggtgtacctgttaatgaagctctcctggaacaggggtaaggaaaatggagagctagtcccttggatgagagca

SEQ ID NO: 50404 - DNA, 1049 bp, Homo sapiens
gtacaccggctctgcagcgattcttgcttctccaaattccgggccaacaagggactgaaaaccaactgttgtgaccagtgtggggcttacatctacaccaagaccgggagtcctggccctgagctcctcttccacgagggccaacaaaagcggttctgcaacacaacctgcttgggggcgtacaagaaggtggggccgagggagtagtgcattagagggctgtggaagggggtgtggttcttgggttataaataaaggtggctgatgggtcaagggctgggagaaataaaacaaataaagggggtttcaattgtatccgttatgttttatttttgaagctggctggtggatacacaggtctttgttacatcatcatctatactttttttgtatgcctgaaatatttcatgtttaaaacatttaaaaaataaaagtgaagggacaaatccagcctcagcctctccttccccatcctcacagaaaaacacacgtgtgtacccatgtgtctggtgcaagaccctgtgtaagaactttgagatgctatcacatgtggatcgtaatggcaagaccagcttgttctgttccctgtgctgtaccacttcttacaaagtgaagcaggcagggctcactggtaggtgcaaagccctcttctctgagtcccctgctggccttctctctacctcccatactcccctcttccagagtaatccttgctgcccgacctcagtcccaaccacatctccccatggattttctgttcgtctcttacactgccttacaccttctgtgtgctctctctctccctctctctttctcttttcctctctctctttctctctatgccccaggccctccccgaccctgcagcttctgccgccgcagcctctctgacccctgttactacaacaaggttgaccgcacagtctaccagttctgcagccccagctgctggaccaagttccaggtactccagaccctggaccagggatagaagggtttggcaacataaagagggttggagaattggggtaggcaggcctgggcagagc

SEQ ID NO: 50405 - DNA, 1060 bp, Homo sapiens
aaatgcaggtggctgctgggattgtagcatccaggctcctggctggctctgctgaacctagtgcaaagcctcttctggataggactcacgcagagctgggctgagtcataatgattagccttaggtactactaaactttgactcacttgaataaatggtaggtgcctgctatgcacaataaacttctaagacattaattctgaagggcatacggtgagtttcataggacagccccagaaacccaagcagtgggtgcttttggtaaccagcatctgtgtcttgcaactgcctagctgatgccaagcactctcacaaacaggcttcagttctgttaagtgaggtgacaaatgtagcatgtgccaagccactatgagttggtgtgtggtgggttttgattctgcttgttttctcttccagggcaacaaaccatggatttctcttccccgaggaaagggtatccgcctcaccattgctgaagagagagacaaaagactggcggccaaacagagcagtgggtgaaatgggtccctgggtgacatgtcagatctttgtacgtaattaaaaatattgtggcaggattaatagcattttggttttgtgggttgtttttttttttaattcagtttcctgctattttactgtataacatgaacagtgattaagttctcaggcaggcttaggcagtctgttattggctgggcttagttagtggtgggaagtagaagataccagacttgggaaaggaacagcaactaaccaaggagtagaaagagccaagaaatcccggagtatttatctcccccgccttgacttggccaagaacttctctacacagtggacccctctgccctgttaagttcccttggctttctaaaaatctgccctcattttcttctccagtctgtattgcactagcccatccacaagcctggctcatctgtttttcccactcctgtgcccatcttgccaaacgcaggatgaaaatctccagttgccattaaaggtggtcataaatgggctgttgatgttgcaaagcattgcagttccttggacttagtgc

SEQ ID NO: 50406 - DNA, 1030 bp, Homo sapiens
aattgaccggtgtgtttgtaagtatcttatataaatatttccgtggccactgtttttaagtgtctcccaggactcatttggggaccaggctaggggaggaatatctattcttggcttcctctgcccttgaaggagctatactatctagctgtcctccacttccaatcgatttaatatttttgtgcctcatttattccacataccacatagtacatttacatggactcaggattcatgttcttaatgatcctggtcctctgacagggaagatgctataaaactttaaggtatgaaatagttttggatgctttttacacctcctgtgtaaaagtccaagttgggtgtaatatggacggtcttggtgttcagttagtggatctggtggactaggaggtaggtttgagtgctttagtgaatcccaacagtgattatcatttttaacgttacaggctcctcgtccatccaccggtccccacaagttgagagagtgtctccccctcatcattttcctgaggaacagacttaagtatgccctgacaggagatgaagtaaagaagatttgcatgcagcggttcattaaaatcgatggcaaggtccgaactgatataacctaccctgctggattcatgggtaagaagttttaaatactctggagacgcatattgatggcagccctatggtatccaaatactgtcttgatcatttttctaacctttgtaatctgtcaagtctcagaaacaaagcctgaccttccctctgttttttacttaaataaaaaacatgcaaataatcatgaaacgcttttcaaaactaaatttcgattcacttttaaattttacatgcagtcatggggttttgaaatattgaagatctggccgtgatctttaatcttcagaatccttgttggattagaactgggaggcacatgggggttctttttgtttcgtagagagctatggttgttgctcggcatgaggtagtggggatcactgtatgtagtaaccggttactgcttgatttcagatgtcat

SEQ ID NO: 50407 - DNA, 1080 bp, Homo sapiens
gagactgtgtctcaaaaaataaaaataaaaaatatatataaagaactttccaaactcaacagaaaaaaaaaaaaacaattaggaagtaggcaaaagacaagacatgaaaaggatatacagtcagcaaatgagcacatgaaaagatgttcaacatcattagccattgggaaaatgcaaattgagatcacaatgtgatatcactatacatctatcagaatggccaaaataaaaaccaacaccagatgccagcaagaatgctgagaaaccagatgactcaaacattgctggagggaaagtaaaatggtaccaccagtctggaaaacagtttggcaatttcttataaagctaaacatgctactaccatacctcccagcaattattctgttgagcatttgtcccagaaaaatgaaaactatgttcacacaaaaacctgtatgtgaatgttcatagtggcttgattctatagccaaaaactggaaatgactcaggtgtccttcagcagataagtagttaaacagattgtgctacatccatactgtggagtactactcagcaaaaagaagcaacaaacttgatacacaccacaacttggatggatcttaagagcagtatgctgagtgaaaaaagcctatctatctcaaaagtttatatactgtatggttccatttctataacattctcaaaatgaccaaattttagagaaggataacagatgaatggttgttgggacttagggatggtgaaggaggagggatgggaatgactgtaaaggaggtagaggagggaaatctttgtggtgataaaatagtttcgcatcttgattgtggttgaggttacatgaatctacacttgcgattaaatggcctagaattatacacttatacacacacaaatgagtgcttgtaaaactagtgacatattaataagatctgtgaattgtaccaatgtcaatttcctgacttggatattgaacagtaattatgtaagatgttaacatgtggggaaacctggggaagggtgtgtagaacctctctgcactattttttttttgcagcttcctgttattctataattatttta

SEQ ID NO: 50408 - DNA, 1068 bp, Homo sapiens
aacaacacaagcgaaggtgtggaaacaggaaagcatggatggggcccatttacgctaaggagttggacttcattcataggtggtaggtcgggaactgctaaagtcttttttttttttttttttttgaaatggtgtctcgctctgtcacccaggctggagtgcaatggcaccatctcggctcactacaacctccacctcccaggttcaagcgattctcctgcctcagcctccccagtagctggggttacaggcgcccaccaccacacctggctaatttttttgtatttttagtagagacgaggtttcaccatgttggtcaggctggtctcaaactcctgacctcaggtgatgcatccacctcagcctcccagagcgctgggattacaggcatgagccaccacgcccagcctgctgaagtctttttgagcagagaaggaatgtgatcacagctagcaattgtgcagggaatagctctagaagcaggaggaccagataagaggttgtcgcagtgacctgagtaacaagagatgtgactaaagcagagacagtggaacagaaagaaggggatagattggagagacatcttgaggttaggcttcacaactcataagatgtggagaaggcgtgaactaagaaattaaggatcaaagattatccagagatttttttgaggttagggggttgaaataccaaaagcatgatccaaaaaaagaaaaaaaattgataaggaattggagctcatcaaaatcaacttttgctttacaaaagaccctgttaagggaatgaaaagataagttacatactgagataagatatttgcaaatcatatatcccacaacagatttgtatctaaaatatataaagggctgggtgcagtggctcacacctgtaatcccagcactttgggaggctgaggcgggtggattatttgaggtcaggagtttgagaccagcttggccaacatggtgagatcccctctctactaaaaatacaaaaattagtcgagcatggtggcacatgcctgtaatcccagctactagggaggctgaggtaggagaatcgcttgaa

SEQ ID NO: 50409 - DNA, 1051 bp, Homo sapiens
ggtgtggtggctcctgcctgtaatcccagaactttgagaggcttaggagggaggattgcttgaggccaggagttcaaaaccagcttgggcagcatagcaagaccccatctctacaaaaaatttaaaaatattttaaaaaaataaaaatggacaaaagatattaataggcacctcaccaaagaagatatacagacagcaagtaagtgcagatgctcctctgcctattgcagtggggttatgtcccaataaatccattgtaagttgaaaatataagtggaaagtatgttttcaacttacagtatcttcaacttatgatgggattatctagatgtcaccccatctcaagttgaggagtgtactgaatgcattattacttttgtaccatcataaagttgaaacatcttaagtcagagactatatgtgaaaagatgcccaatatcatggtcactaaggaattgcaaattaaaatgagataccattacatatctattagaatggctaaaatccaaggcagtgacaacaccaaatgctgttaaggatgtagaactacaggaactctcattcattgctggtaggaatgcaatatggtacagtcacttgggaagacattttggtattttcttacaaaaataaacatattcttaccacatgatctagcaatcacactccttagtaattacccaaatgaattaaaaactcatgtccacacgaaaacctgcacatgaatgtttgggggtcttttttgttgtttgtttgggttgttgttgttgttgttgttgttgttaatttttttttttttttttagagacagtgtttcactctgtcacccaggccagagtgcagtggcacaatcatagctcactgcagccttgacctcctgggttcaagcaatcctcttgctccagcctcttgagtagcttggactacaggggtgtgccatcacactcagctaatttttttattttgtagagacagtttctcactattttgcccaggctagtcttgaactcctggcctcaagtgatcctcccgcctcagcctcccaaaacac

SEQ ID NO: 50410 - DNA, 1001 bp, Homo sapiens
actaatagacaaaattataaatatatgtcacctaacaacagagcaccaaaacatatgcaacaaaaactaaagaagtgaaaaagagaaataagaaatttaacaataatagttggagatgtcaatactccattttcaataataaatagaacagctagggagaagatcaacaaggaaatagatttggacaacgtgataaaccaactagagcagaatatacattcttttcaagtgcacgtggaacattttctaggacagaacataagttaaatcacaaaagaagtctcagtaaatttaaaaggattgaaatcatacaaagtactttggaattaaattagatggaaaggaatgaaattagaaatcaataaaagaaggagatttgggtaattcataaatatgtggaaattaaacagcacactcctaatacaaataggttgaagaagaaatcacgttgcttcatggccttttggctaagttcaagtgtagtatctgtccttatcagtttaatatctgatacatcctctatctgaggacaatacattaaagggatttttggagcagggagatggaataaggactagtttcctccactccatgcatcaacctggtattgcagtacctccagaaatggtgcacccctcccaataagaaaaaaaaattaaaagaaaagaaatcacaaataaagttataaaatactccaagatgaatgaaaacaaaaacaaaacatgccaaaacttatggagtgcaatgaatgcagtactcagagggaaatttgtaactgcaaaggtctgcttaaaaataagaaagattacaaattaataacttaatctttcatcttaagaaaatagagaagagcaaactaaacccaaagcaagcagaggaaaagaaataataaaaattaggtggggcatggtggctcacacctgtaatcccagcactttgggaggccaaggcgggtggatcacctgaagtcaggagttcaagaccagcctggccaacatggt

SEQ ID NO: 50411 - DNA, 1050 bp, Homo sapiens
ggtagttctgttctaagttctttgagaaatcatcataatgctttccataatggttgagctaatttacattcccaccaacagtgtataagcattcccttttctccacaaccttgccagcatctgttattttttgactttttaataacagttattctgactggtataaaatggtatctcactgtggttttgatttgcatttctctaatgattagtgatgtggagcattttttcctatgtttgttagccattagtatgtcttcttttgaaaagtgtctgttcatgtctctgcccactttttaatgggtttgggtgttttttgcttatttgtttaagttccttatagatgcatagtttgcaaatatttcctcccattctgtaagttgtctgtttatttggttgatagtttctattgctgtgcagaaactctttggtttaattaggttccaccttgtcaattttttgttttcattgcaattgcttttggcatctttgtcatgaaatctttgtgtaggcctatgactagaagactactttctaggttctcttctaggatttttatagtgtgaatcttacatttaaatatttaatgcattttgagttaatttttgtatatggtgacagataggggtccaattttattcttctgcaagtagttttcccagcaccacttattgaataagatatgctttccccattgtttatttttgtcaactttgtaaaaaattagttggttgtagttgtgcagctgtatttcaggggtttgtattctgtttcattggtctatatgtctgtttttataccagtaccatgctgttttggttactatatccttgtagtatagtttgaagttggataatgtgatgccttcagcattgttcttttggcttaggattgctttggctattcgggctcctttttggatttacatgaattttagaacagtgtttttataattttgtgaaaaatgacattggcaatttgatagaaatagcattgaaacagtaaattgctttgggcagtatggccattttaaaaatattgagtcttcct

SEQ ID NO: 50412 - DNA, 1048 bp, Homo sapiens
aaaagatgcagaaaaatatttgacaaaaatcagcaccctttcataataaataagcaatcaaaatattaggaataaagggaagttactcaacatgaaaaagggcatttatgaaaaacctacagctaatgtcatactcaatggtgaatgactgaaaacttttcctctaagatcaagacatgaatattaacttttaccactgctattctatgttgtactggaaggtctatccagagcaactagacaagaaaaatgaataaaaggcatccaaattagaaaggaagaagtaaaaccatcctgtaggttgtcttttcgttttcttgatatgtcttttatagcacaaacattttaaactttgaagtcatatttaccattggttcacactgtaaccagcagcattgcaggttacaatgtcattacacaaaatcagatgtgcttttatctaccaataatgaacaatccaaaagaaaaattttaagtaattgcatttatagtaacatctaatagaataaactcaaccaaggaggtgaaagactagtacactgaaagctacaaaacattgctgaaagaaattaagacctaaataaatggaaagacatctcatgttcattgattggaagacaatattattaaggtgtcaatactacccaaagcagcctccatattcaatgcaatccctatcaaaatcccaacagcccttttgacacgaatggaaaaaccaattctcaaattcatatggacttgcaagaaacccaataaccaaaacattcttgaaaaaggacaaaagttaggagatccaatttcaaaacgtaatacaaagctatagtaatcagaatagcatggtgttggcataaggatagacatataaaccaatggaatagagtcgtaaatcctaaaataaatctctacctctataaccaattgttttttgacaagggtatcaagtccattcaatggggaaggaatcatctcttcaacaaatggtgcttggacaacaggatatccacatgcaaaagaattaagttgcacccctacttcacaccatatacaa

SEQ ID NO: 50413 - DNA, 1023 bp, Homo sapiens
aacttctgtcatgggggtttgttatacagattatttcatcatccacattatattaagcccctgctctggctcagcaacagtattgaagacagcagcctgtgtttgcagtgtgggaccctggaccatggttccagggggaacacagcagaccttattcaaaaattattgtgtaggtctgctctaacctgtcagagggctatctaaatgacagatgtaaagaacttatctctgttgcacctaactcagaactcacccaagccagaaaattaccaggcattgctcaaaaaccctaagatggatgaacaacccagatgcctgaggcaaagggttacagttgaggcttacaagagacaacctaaggcctgagaagaaaagccatagggagagcttctttgggaaattagggcaaacaaaagtatccatgtatacgggaaaatatagaaaaatatgtgaataaattgccagggaaacttgcatgttcaggaaagacttgagaggaccttaaagactgggagaggtgttttacttgtctggattttttttttagctcctggcattcaaggatagcaattcactagaggcttcaggcacaagacagaatcagtgcacttggaagataggataattgaaatgaaccaatctgagggacaggaaaaaaaagaacgaagaataattagcagagcctaagggacctgtgggacaccatcaagtggtccaacatacacattatgggagtaacagaaaaaagagaagaggttatgaaagggatagaaagaatttttaaataaataatgaccaaaaacttcccaaatttgatgaaaagcattgaacataaggatccaagaggcttaatgaactccaagtagaataataactccaagtagaatagacccacatcaagagacattataatcaaactgttgacaaagacaaagagagaatcttgaaagcagcaagagagaaacaactcatcacatacaagggattctcaataaggttcataactgatttcttatctgagac

SEQ ID NO: 50414 - DNA, 1049 bp, Homo sapiens
ggataacggtaatggttgtgcagtgttatgaaaatacttaataccactgaactgtacactttaaaatggtttttaaaaatttcaacaaggagttggaagatatagatgaagaaatctctaagaaaacagaatttgaaaatagggaaatgagaaataggaaagataaaagacaagaaaattatagtcaacagatgaggtccaatagccaataagaattcctgaaaaagaaaagagaagaaaaatatggctaggaaattatcaaagaaataattaaagaaaatctgtccaaatcctgaggatacaactttccagactgacagggcccactggttgcccaacattatgaaggaaaaaagatccaaagacattatcatcataaaactttacaacaaaggagaaaaaaagctatcctaaaaggtaaacagttgtaaggagaaaaattgaagatcacataaaaagcttcaagaatcagaatggcattggacttctccacaacaatattgaatacttcaagacattggaggagttcctttaacattgtaaaggaaaaattatttcaaccttgagttctatacccagccaagctaccaagcaattggaaagatcaaatacagatattttcagacatgccaaggtcaggaaacttggagtagatgtccaccagaatgaagataataagccaggaaagagaaagacatgggacacaggaaacagatgctccaatgcaggagagaacagcagagatttctcaggatgacagtgaaaggaaactccaagacaccagctctgtagaagggccagaagtcaaacagttcagattggagggctccagagggaagactctcaggtgaatatggaattcacagattgcctggtgtggttgatagtactaagaggactaataattctgtcaaagaatgtagtatgagttagtgataagtacatagaaagctaagcaacatttctaaggtgaggcaactattaattcaaaaaaattgtccaaggaagtaaaagtagtcataatacagtacatagctgagctgtgaaca

SEQ ID NO: 50415 - DNA, 1042 bp, Homo sapiens
tttctggtgagggctcgcttccttctctgtatgtcttcacatggcctttccacttaatgtgtgcagagagagagaagaaaatctctctctcttcctcttcttataaggccacccatcctattaaattaggaccccacccccattacctcatttagtctaaattacctcctaaaggctctatctccaagtatagtcacagtgggggttagggcttcaacatatgaattccgggataacacagttcagtctagtagatgggatgcataaaacttgtgactgcatacacagccatactcactgtttataatactgctaggaggtttggacccttcaaaaacaggaattatgataaatgccattttgcacaacttttatgaaaaaagaaaaaatacagtttgtatatactcatatatgctacactattgactctgttttttaaaggagaaaattttattttgactaggcattgttaaaaaccaaatcctccacttaaaattttaatatgctcattggaagaattttacacaaactttgaactctgtacatttcaaattttgtttctcctctactatccaatgtatctaaccccagatgctataggacacatttatatcatgatgctacctctggctctgtcctttttgtgtaaggatgctggatgagtaaacaccttaggttataggaccattcctgaagccattcctacaccattagcagtaagttaactatacacaataagtgattgcaagccacataaatgtatctctctaaacccaaactaaatgtatcctcacctcaacttcctcttcgccattccagttacactcaaaacaagggagaagtctgatggaaaagtcagactggaaagagagagctgtcttaaatgaatgtggttaaataccttactttgaaaattaggggaaaaatataaccttgtaaaaaaccagtggtggtacccctccctggaccttgagagggatctgtccagtgaggggctttgaagatttatgattagcttcatggtgaatcagcttctaaggaa

SEQ ID NO: 50416 - DNA, 1055 bp, Homo sapiens
caatcatcacacatgagacactcacaagtataaagggcctaagaaccaacatttcttgaagtatatccttttcttgcttgattaaagtctcctacaaaactgctcaactgggttgagcaagatgaattcgtctcaacaattaaattactagctgaatatgtaaattgttgttacctaaaaggccaaaaataaagtttatatagcccctctgctttattgattggatgtttgacttatcaagtcattcagtcattcagtgactatttattgaatactaacaatgtgccagacactgccaagtgctggggctacaatggtgaacagtgtagatgtggtccccatgccatggaacttataatccagtaagaaaggtgcactaaaaaacacgcaaaacataagtcaaaagaattttaacctgtaataagtgccataaaggaagcatatggggagtggagatagaaactatcaaagggatttaaatcaggtctctaagaaaggcctttctgaaggtgtgacatttaaggccagaacttcaggggtaagaaagactcagccaggtgaaaaaaaaaaaaataactaaagggcaagtgttccaggcagagtaggcaaccatgtacaaagatgctgaggtaagaaagagctcagtgtattctgggtgctgaaaggaggccactgtgactaaggctaatgagtgaaggataagaggtaagagatggaatgggccgggaccagaccctcaggggcccctgtagaccacggtgaagagagtgggatcttattcttagagtcagaagccactgaaggcttttaacaggagaggtaccaggatgtgatgtgtgttttaaaactactctgagccaggcatagtggctcatgcctgtaatcccaacactttgggaggtcaaggcaagaggatttcttgagcccaggagtttgagattagcctgggtaacatagtgagaccctgtctccacaaaaaaaaaataaaaaattaattgggtgaggtggtacatgcctgtagtcctagctaatcaagaggatggggaaggagaatc

SEQ ID NO: 50417 - DNA, 1030 bp, Homo sapiens
ttttctctgccttcatttttgaagaatatttttgtaggatttaaattctacatttacagtttttcttttcttctggcttctgttgtttctgatggatattagtcttattattattgtttccctgtatataatgtatcttttcccctctggctacctttataaatttatatttggtattcaaacctttactgtgggctaggcacggtggcccatgcctgtaatcccaacactttgggaagctaaggcaggcagatcacttgaagccaggagtttgagaccagcctggccaacatggtgaaaccccatctctactaaaagtacaaaaagaagcccggtgtggtggcacatgcctgtaatcccagctactcgggtggctgagtcatgagaatcacttgaacctgggaggcagagtatgcagtaagctgagatcacaccactgcactccagcctgggcaacaatgcaagactctgtctcaaaaggaaaaaaaaaaaaacagagagaaagaacatcgactgtaatatgcctcagtgtacatttgtttgtatttatcctatgtgggattccctaacttcttggatttgtgggttgctaatttttatatacaggttgggtatcacttttttaaaacacttgggaccagaaatgttttggatttcagattttttttcagattttgtaatatttgcaatctggaaattcaaaatctaaaatgctccagtgaacatttcctttgaacatcatatcaggactcaaaaagtttcatattttagaacatttcagattttggattttcagattagggatactcaacctgtgatttggaaaaagtatcagccagtatttctttattttttttttaacttattctccctttcctgttcttctgggactctaattacaaatatgtttgattgatgctgtcctacaagacactgaagtgagcttactatttttttcagtttttttctctccaggctacagtttgtttgatttctattgatcagtcttcaagtttactgattccttagt

SEQ ID NO: 50418 - DNA, 1725 bp, Homo sapiens
catatggtatcctcctttattgttagtacagtaaattgcactgattttttaatgttaaactgactttgcattcctggaataaaccctgcttggtcatgttatattatcctttttatgtattgctggattcattttgctgaaacttggtcaaggtttttttgtgtctatgttgataagggatgttggcctgttgttttcttttcttgtagtgtctttgtctggttttgatatcagggcaatgctgatctttggtttctctggggtttacatctgggcatctgtttgtttttgtttttgtttcgttttttgttttttgtgagacagaatcttgctgtgtcgcccaggctggagtgcagtggtgcaatcttggctcactgcaacctccgcctctcgggttcacgcgattttcctgcctcagcctccccagtagctgagactataggcgcgcaccaccacacccggctaatttttgtatttttagtagagatgaggtttcaccatgttggtcaaactggtcttgaactcctgacctcaagtaattcgcctgccttggcctcccaaagtgctgggattacaggtgtgagccaccatgcccagcctatagtatgcatttttaacttattagagtcaacttttaaatagtattacattacttcacatataatatagtacctttacagcagcgttcttccatttttttcctttctctttctttgtgctattgtagtcatatattttacttttgcatatgttataaacctcttgatacattgttattgttttgctttgaacaatttttttagtttttaaaatatttactaattcattttaagtagaataaatccagcatatattagcacaaataacatgttttgatgaaaaataactgtattttcaaagataaaaagaaatttcttaagaaaaatgtcattgttatacccttttgcccatttctttaacatctggcttaatagaagacagctgacttctcatacctgcttctacattcagtgtgttttgagatgttgtttttttaaaaatatataaagaaaatccagcttcacatagatatgtaattggaaaagggaaaatgtattttaatacactttcagataattatggatattcttcgatactacactaaaacttcacaaatgaaagtttcttaaaggttaatccagtgtggaatctgaaaccgtatcagtgaactttttatgtactattacattaaaactcattggtcatcttattctttgagtggatatttgacccatcttatacatattggttatttggaaaatattagttcactaagttatgcaaatattccaaatgctaacacattttatgcagtatcaaaaaatcagtcattgatctcaccaccgatctcactggaaaaaaagcttaagtattgagaagctgttatgctcccagtggcagaatgaagtttcctaaaattctaattttcactcaaaaaatgtgaatattatcattggcaagaaatgctgtcagttgtttgccctgaagtgacaaacttatttcatttttgagaaaatatttgccaaatgtccaagtatttaatcatgccttatccatcattctttcaagcaaaaatgatgttctatgaaaaatgtggctagttaagctcaaaacttgacatgcttttcctcaagacaaccaccatagcacagtttataccagaagcaccttacgtatacctccaat

SEQ ID NO: 50419 - DNA, 1047 bp, Homo sapiens
gataggacaactggatgtatcaatatacaaaagaataaagttgggccgggcgcggtggctcacgcctgtaatcccagcactttgggaggccgaggcgggcggatcacgaggtcaggagatcgagaccatcccggctaaaacggtgaaaccccgtctctactaaaaatacaaaaaattagccgggcatagtggcgggcgcctgtagtcccagctacttgggaggctgaggcaggagaatggcgtgaacccgggaggcggagcttgcagtgagccgagatcccgccactgcactccagcctgggcgacagagcgagactccgtctcaaaaaaaaaaaaataaataaaataaaataaaaaataaagttggacccttacctcgcaccatatataaaaattaatttaaaatagatcaaagacttaaatgtaagagctaaaactataaaactcttagatgaaaacatagatgtaaattttcatgatgttgaaataggaagtggtctcttggatatgacaccaaaaacataagcaaaaaaagaagaaatagataaattgaatttcgtcaaaatttaaaactttgtgctgcaaaggacactatcaagagagtgcaaagataacccacagaatgggagtagatatttgcaaatcatgtgtctgataagagacatatttagaatattttaagaactcttacaactccatattaaaaagacaacccggtttgaaaatgggcaaagggttgaaatagatattatttcaaagaagatacacaaatatccaataagcacatgaaaagatattcaactttattactaatcagaaaaatgcaaatcaaaaccacagtgagatgctacttcacacccactaagatggttataattaatttaaaatgaaacaaaacaaaaaatagcaagtgttggtgaagatgtggagaaattggaaccttcatacattgctgatggggatgtaaaatggtgtggcccactgtggaaaacagtctagctcttcctcaaatggttaaacatagagttgccacatgacccagcaatt

SEQ ID NO: 50420 - DNA, 1031 bp, Homo sapiens
tgacaataacaagaagaatgacattaaagctgtttctttttccaggtgatttttatggactgttaacagatcacttatgcttactatactagtagacaccccatgcaactcctaacatcctgaataattgcagtgataaattgatgttatgtcaacctaaaaagcatgaagccaagcaaaggagttaatctcttattttttcatttgatccagtaaggtgaaaactgaggtttttcagtttccttatgatttgcctgcttctccaagattgtttacaatacttacttctttatataatttttcttaatttctttccctagaaatttccctatcaggaaatcctttaagttttctgggttctcatgttcctaataactgatcatagtgctcttctcttttataggaacaggtgacgtgtctgatgttggcctagggaagggacggtactacagtgtaaatgtgcccattcaggatggcatacaagatgaaaaatattaccagatctgtgaaaggtatggcagtaacactagccagtaataagtggattgcagttctgtaggatgaaatggcccccatctcacaatgtaaacaagaacaatgtaaaaaagaaaacatctatatacctataaagcttttgtatactggtcattatgcttatttgatcagtagctatccgctgtatggcagagccaagcagttggaccagagccatgctccaggttggatcttactcaatatgattaagcccatcccaagagcagagctttttttgctatcctgaagaatcccttatttgctactttcttagctaaataaacctacatgtgtcttatttcattaacctggcagggttcatttcagttgtcagggttcattatggagacctgtgctttcttctactggtgtaaatattagagaattgactattattattcatcatgcattcttaccttctatccactgtgttaaaattggagtcagatacctgttctttctacaccatggctaaggattaagttacagacaatcgt

SEQ ID NO: 50421 - DNA, 1244 bp, Homo sapiens
aatgtatgtttatcatcaccagtaagcagagatatagaaattgaagcaagatatattgtttcccctaccaagtttgaaaaagattctttatttcaaaatatccaggtggtagaaggattacagtgaaattaatacaaccccttttgaaaaccttggaagtgttaagaatgggaaaaaatgttcataccagttgggccagtaacaatattcttggcaatctattctaaggaaataaaccaattctacctgcaagaaatttatatcttaggagtaagacagcaaataattgcatttgaaagctaaaaaaggatgattttcaaagaatattctacaaaagaagagtaacgaaggactaatactattagatattaagcatccaaaactacagtaatgaaaacactggtacaaaaattagacagataggttatagtacaccccccaccccaacaaagagaccaattatatagaatttaatctattacaaaggatgcattgcaagtgaatgggagttgaaaggtctgttgagtaaatgaatggtattgtgacagcttgtaccattataccctcatctactgtaataaactaaaatgagtgacagctagattgaaaagttaaatatttaaaaaagcaaattttaaacactagagtgaatggatatttatcaagcttctaaaggggaagaattttctaagcttagaaagtaattttttaaaatcacaaaggaaaagatcaaacccgactgtacaaaattttaaaaccaaaataacttttaaaaggttttttggctattttcaaaatctaaacacagactgaaaaagcctatgtatcataaatatgacaaagtgtaataggcttgtattatctaacccactcctacaatataatgtataagaagaaatctgcacaaagaacacgaatagacaatttacaaaggagtttaaggacaactggaaaacattggaaaatgttcatcactactaatcaaagaaatgtaaattaaaaccattaggtaagcctcttttttttgagacagaatctcggctctgtcatccaggctggagtgcaatggtgtgatctcggctcactgcatcctctgcctcccgggttcaagcgattctcctgcctcagcctcttgagtagctgggattacaggcgcgtgccaccatgcccggctaatttttttatttttagtagagacggggtttcaccgtgttggtcaggctggtctcgaactcctgacctca

SEQ ID NO: 50422 - DNA, 1021 bp, Homo sapiens
taatttctgaaacacttttcaacacttttaaaatcagaatctatgtctattctgccctactgtatgagttcttcctcccgattgccctctttcttatattgctacctctagtcttttctttacccagagtttacatttaagagttttcagcaacccttttccatcttcctccctctcaccaatatccaagtaataaaaaagtcctgttgaacctaccctgtacattatttctcctttgttcccattgcccccaccctagtttaaaatcattatcacttcttatttggaccattgtggcactctaactgcccctagccttttaatgactaatctttcctacacactgctgctatagaaatcttttttccttactatttctgtctaaatatgttttcccatttcccacagaatgtagtctattctctttagcctggtattcaatgttcttcatgatctggcccttttagctaaactcgactagaaattttcccttttgtgttactgtttatgctgttcattctagtcagcatgccctctcctggctcccatcttcaccaagcaaaatcttgcccacctcctaagaccctctcaaatgccatcaaagatgaattctagttaccatttattaaatgccagttatttagtacttaatgcttatttattaagtaggctaagcatcctacattcattgactctgcattgcctttggtttcttgtgtacttgccccatcttctgtataagaatgcaaattctggctgggcgcggtggctcacacttgtaatcccagcactttgggaggccgaggcgggcggatcacgaggtcaggagatagagaccacggtgaaaccccgtctctactaaaaataaaaaaattagctgggcgtggtggcgggcgcctgtagtcccagctacttggacaggctgaggcaggagaatggcatgaacccgggaggcggagcttgcagcgagaggagatcgcgccacggcactccagcctgggcgacagagcaagactcctct

SEQ ID NO: 50423 - DNA, 1047 bp, Homo sapiens
tttgaattaagtcgccttagaaagaaatcatgatcaaatgcaggataaaagaatacaagctgaaattagtagtactagaaggagtcagaccaaagctctactacggtgatttgtgttaacatttgtctattaataggtatgactcaatagatgaatgattatatttaacttttagaaattgatcataatggggaaaattctaaacaattaataatttttaaataatttacatgatttggggacctagtgaaaaatgcctgcatacaaactcatattcacccttttgtccataaacctatttcttcctggataaacagtctagggcccaactaattggtgttggggaggaggttctgaattatgctaatcaggactttacttagtaagattggtaatttttcctttcccctatgttcttctacccttaaaaaccaaacagaaaacccttggcgcagatgataccatgttggcaaaggatcccgcatctggcatctgtactcttctgtatgacagtgcacccagtggcaggtttggcaccatgacctacctctccaaggcagccgccacctacgtgcaggagttcctgccccacagcatctgtgccatgcaatgagggctttggttcctggcttctgggagccttttgacagctggtccctgcctcggttgattgtgcatggaactaaaatgttattgcctaatcactccaaccctgcccctttctgtcccatccttcccaagaagagagaactttttcgataaactaactactgtagaagaagtgaacacttacctggaggctcaccttgcagaaccagtgacaatcttatgagtataatgaacactcagccaggcctgtcatgattggctttatttctttcatcattcataaaagtttgcatgtgtttttattctctagatctgttaccaatatagttttctaactcctgtttggggagcaagtgttaataataacttattcctaaagcttggtttttcttttttgtgattttattgtgtatatgagtggtgggtactttgggacat

SEQ ID NO: 50424 - DNA, 1052 bp, Homo sapiens
tacaaatacaactaatttttttattatagtaagacatttaacatgagatctatcctttaaaaaatttttaagtgtacaatatagtatcattaactataggcttgatgttgtacagtagatctctagaacgttttcatcttacataactgaaactttatacccattgaatagcaagttcccattttcccctctacccagcccctgacaactaccgttctactctctgcttctatgagtttggctgtttcagatacattacataactggaatcatacagaatttgttcttctgtgactggcttatttctcatagcatagtatcctgcaggttcatcgacactgtcatattttgcaaaatttccttcgtttttaaagtctgaataatattccattttatgtattaccagattttcttttgccattcagttgttaatatatatttaggttgttttcatatcttgactattgtgaataatgctgcatttgaacatgggcatgcaaatatctcttcaagattctgacttcaattcttttggataaatatccagaagtgggattgctgaatcatatggtagttctatttttaatttttgaggaacctccataatgtgttccatagcggctgcagcattttacattcccagcaacagtgtacaagggtcctaatgtcttcacattctcaccaatacctgttatctttgggtgtttttttaaccacggtcatcctaacaggtgtgaggtgatagctcattgtggtttgatccgcatttccatgatgattagtgatgttgagcatctttacatgtgtgtggtggctatttgtatatcatctttggtgaaatgtctactcaagtaaaatttaattgatttttgttattgatcttatatcatgaaacttcactgaactcatttattagttgtagttgcttgttagtgaattccttagaatttctatatacaagatcatgtcatctgcaaatagtttttacctcttcttttccaatctggatgccttttatttcttttcttacttaatctccctggttcaggccc

SEQ ID NO: 50425 - DNA, 1031 bp, Homo sapiens
tgaaaaattatgaactctcctacataagcacagtataattgccaaagtcaaggaattgtttaacattaaaccaatactattaactatctacagatactattaagatttgtcatatagcccaatagtgtctttatagaaaagaacatctaaaatcatgaattttattgagttctcaggtgtcttgagtctccatttatctggaacagttcctgagtcttcatttttcatgttgttaacatttgtgaggaatacaaaccagttattttgcagaatatccctcaatttcagtttatgtgttgttttgtcatgattaaattcagattatacattactaaggtaatgccaagttcttttccatgtgtcatatcatagtgttgattagtcccattgctgatactgtaaactttgatcgcttggttggatcatttggttaaggtagattcttccatgtacctacactgtaaagttattatgtcatcttttgtaattaaaaaagtatcctgtagagatgtactttgagactacgtaaatatacggttactcttcaaacttttgctcactgatatttttcatccattaatgactcttcctatagcacattttatttcatgttttttaatttaatatattgaatagatatattcctatggttcaaaaatttttaagtacaaaagaatatacagtgagagggtaaaatgtctttctcccatctctgttcccccagataccctgttccccttctcatgggcagtcagtgttgtgtgtgtgtgtgtgtgtgtgtgtgtgtgtatcctcccatggacatttatggatatgtaggtaaacacagacatatatggggataattttacccctatttatccaaaaggtagcatagtatacacacagctctaccttgctttctttcactaaaactatatatcttgatgataactacatatatattccaattatctattgcttcataacaaatcactctgaaactcagtagcttaaaataacaaaaatttaaaaatttttaaattatcttt

SEQ ID NO: 50426 - DNA, 1058 bp, Homo sapiens
ttttcccactagattatcctgattcttctctttctgttattcccttgccccactctgagggtttaccaagattccattcttgagcagtttgctcatttcatttagtgctatttcacaaagctcatctgtaacttgtacttcatatgtcacctctaggaaaatgattcccaaaccctcatctctagttgcccttctaaacatttctacttgtatgtcctattattacaaaaaacttaacaaatataaaaccaaactgaactttattgcaaaccaatcttatttcttcatacaccctcttgtgatatcattgctatcccaattccgctagttagaagtcgcatcatagagtacttgctaagggaagggagtatgtacatgctctgcttcctgaacaccttctctaaaacaatcagtaatgaaaacccgtattataatacctctgagctaaagatatacatctaacctctgagtgatgacagactttattgtgtttttactaggatcccaatcgtctgtactatgaaccagctgagctgaagctatttgaaaacattgagtgtgaatggccattgttctggacatactttattcttgatggggtcttcagtggcaatgcagaacaggtaataagctggggaaagagttttcagcagaatgtttttgttatatcttcttacagctaatagtataccaaccctgtgtccagttggaagtcttcctaataggggagagacagttgttccctacaggctactagttgagggcactaagagtaaaaagacctggattatttttttcttctttttaaaaaaattttggtttcggccgcgtgtggtggctcacgcctgtaatcccagcactttgggaggccgaggcgggcggatcacgaggtcaggagatcaagaccatcctggctaacagtgaaaccccgtctctactaaaaatacaaaaaattagctgggcgtggtggcaggcgcctgtagtcccagctactcgggaggctgaggcaggagaatggcgtgaacctgggaggcggagcctgcagtgagccaagatcg

SEQ ID NO: 50427 - DNA, 1028 bp, Homo sapiens
aatggtggttgacaggaatactgggattctctgtactgtttttgcaactcttctgtaaatctaaaattatctcaaaatgtaaaaaatatgtgtttttttaaaaagcttatggagtcttatgacttatgagctgtatgtgtcttatgaacaggaccacatagattagtaattatgctgtcagacttaccctaggtggatagccatggagaggatactgttaggaacactgctttagtgaagagcctgtcactttgccttcacttgaaatcacattgctgaaatctgtttctgctgctggattgattttttggttttaagcattattatattattataggttttttggttttaagcattatgcctttatcggtgataggttggtggtacatatagatgttgcaaggatgtatttctgattaattacatggccgtaccagtgtacaagctgctgaccttttttctttgtattcccagggtcgttatggttgctgtcgctttctacgagatggatataaaactcctaaagaggtaggtttcttttctccaaaatgaatccaaggtagaatggccacttctacctgcagcctcattcagagaaaatatttacctcactgatggtacttatagagatcactaagtaggataatgataactgatgtttgctatatttgttgaacttggcttagctgccaagttctcagtttgtaggcctttctggattaagtaaaatagaggaaggtgtagtccttccacctcttgcattggttagtttcgggaaagaactacagatacatggtaaaatcagtggatgaaagcttatacagaaatagtatttgcattgtctcaaagtatctctcccaaaatatttaacaattacaaagggaaaaatctttccatcagtagatctttctggccccacattccacctcttgtagttggttagttctaaacagtacttgattttgaaaagtttacgttccctttattcaactagtcaaaagttcaccttggaaatatcaatgagaaaa

SEQ ID NO: 50428 - DNA, 1033 bp, Homo sapiens
tactcaaattctgcagtcagctctgtggaacccatctataagaaaagtcagccttccatatacatgggtttctcacccctgaatcctgtatttttgatccgtgtttggttggaaaaaagccacatataagtggacctgcacagttcaaacttatgttgttcaggggtcccctgtatataaagaatgagtatagttatgtttgaataaaacttaattcataaaaatagcaatgggctagatttgtccctgatctagatgagtggttccaaactctgactgtactttgagaagctttttttttttttttttttttttgaagactaagtcttgctctattgcccaggttggagtgcggcggtgcgatctcggctcactgcgatctccatctcccaggttcaagcgattctcctgcctcagcctcacagtagctgggatcacaggcgtgcaccaccacacccggctaatttttttgtatttttagtagagatggggtttcaccatgttgaccaggttggtctggaactcctgatctcaaatgattcacccacctcagcctcccaaagtgctgggattacaggtgtgagccaccatacccggccaggaatcttttaagaaatacccttagtacaccacagcttagaacaatttaaatatgaatctctggaagtggagctcagtagcatcaatatttttaaaaaactacccgggtgattttaatgtatagccagtgtgaagaatgactagttatggcaaaatatgaacatagattaaatccaataaattcatagattaaattcccacctactgcaactttctattactgtgtggattttcccaaaacattgattgttaattatttctacccttccttccaattcttaccttggtttctttctgagaaataatgtcagagaattgaagagaattctggaagaaaagaggacaagggtttaggcaactactgcatcctagattgagagtagaattatgcacatgtatgtttttacaaatgtctttctctaaggtatataga

SEQ ID NO: 50429 - DNA, 1024 bp, Homo sapiens
agatttattctgagccaagtaaatatgagtgaccaatagctcatgacacagctccaagagacctgagaacatgtacccaaagtagtcaggctacagcttggttttatacattttagggaaacataagacatcaatcaatgcatgtaagatgtacattggttgggtctgaaaatgtgggacaactctaagtgggggcttccaggtcataggaagactcagaggttttctgattaaagtcttgaaatcaatagaagggagtatctgcattaacataaggggcttctgagactaaggctcttatgcagatgaagcctccaggtaggaggcttcagagagaatagattgtaaatgtttcttatcagacttaaaaaggtaccagactcttagttaattctctcctggataagcgaaaagatctggaaagggaagggcattctctacagaatgtaggtttccccacaagagacagctttgcagggccatttaaaaatatgttgaataaatatattttggggcctgctatctgttgtgttcatatcttattgctacaaagagtctactttgtcaatcttaaggtctctgttttaatgttaatgttggtcatttgtgtctaaattccaaagggaggaggatataatgaggcatgcctgaccacccacttccatcatggcctgaattagtctttcaggttaactttagaatgcccttggctgagaggaggggtccattcagttggttggggggcttagaatttcatttttggtttacagaccttatatattcttatttattttacttagttatatttgactattcttatttccttgaaagagtcaagaattgccaagatgaaacacctttggggtatctggacaggttttacctctgtcaacccttgcaagaaaattagaattgacttaccttggggatggagaataggtgacacttgtgaatgaagaaaatattgtagtgaaggccttgtgattgggaaaatcagagggcttggtgagggtacaaatgttgg

SEQ ID NO: 50430 - DNA, 1048 bp, Homo sapiens
aagactggtatcaagcaagaggtcccatatcctagaggttcaaaacagatgttcactggtagggagaaaagtgggcagatttacctgataggctgattaaacagatacaaatgccatttagatgcttctataactcttgcctatattctgattccttctcaccttagtgtttatagcttttgccccatcaactgttttctctgtacatttcctaataaaatctctgaaacaccccaatctcatttttatagagctaaactttatataagtagagctgtctagtgcctgtgtggtgtgatttcatacaagaaggccttctttcccaagcctatattttccctccttggtagctgatgtctgaaattctgttatctggagacgaatctttgattctacattaagtgataaagcagggacaagtttatttttgtacctaacaaaagtacctttctcatagtggaaaatgcctgtcaaattttttggaattatatttaaacttcaggaccctctaggaaagaaaacaagacttccatttcacacttaaggcaagatcagctaataccataatatgggtggatgccacagtttttttccaactcgtggaaaatttcattaattaatcatagcattgattcctgttaagcctagtaagggacaaaaatgctcgttgcccaccaaaatacattctcccattcttgcttgatgtgtggctgcccagctagggtacatttttcagcttcttttgcagttctgtgcagccaaatgattgttatgatcaataaaatgtgagtagaagtgatgtatgccatttccatgcctgggtcctaagacatagggtatgctctcctttccatactttctcccaccagctgcaactcagatgtaatggctacccagtttcagtatacagatgggagtgattccctatgagatgaaagtacaatgacttggaaggaaatcaagtccctgaatgactaagaaacagaattccctctctgatttgaactttttacattgatactgtcatgtaagaaataattaacactct

SEQ ID NO: 50431 - DNA, 12082 bp, Homo sapiens
gatttgcttaactgtttttgtggcgtgtattttttttttttcgcagtttcgctcttgttgcccaggctggagtgcaatggcgcaatctcagctcactgcaacctctgtctcctgggttcaagttattctcctgcctcagcctctcgagtagctgagattacaggcatgcgcgaccacgccaggctaattttgtatttttagtagagacggggtttctccatgttggtcaggctggtctcaaactcctgacctcaggtgattcacccgcctcgacctcccaaactgctgggattacaggcgtgagccaccacgcctggccagctgttgttataactggagttctatgtgcttgtgaccattcttggtttctccgaatatcctagaactttggtggcgccctattatacaggttgttgaagaaatgttaccatgtggattgagtaggaaacaattctctttatcttggcaatattatggcatggcactacttaaagtacaaattaaaagagggggatgctacagaactagctgacaggcactttgatagaggtggatttctcagttcttaaaatagctctttataaaggaagccagaggcattgtggaggagaattcttacataactcatagggttagaccacatccgaccttttctgtgtggcttcatggctctcttggttgagaaagcattagtttctccttccattagtttcaacctcttgatttcttgacccccctactatattttgtgctgagaacacaagggtattaacaacccacattgtagaggatcgctcagtaataaagactggagaataaaatgcagcatgggaatattggcaattactcagttctaaatttctcttggaaatgagggaaagcatacagaatagagctggaatgaataggataattttttttttttttgctaagttggtagccagaatataacagctccgcacaactgtaaatgtccactcttcaatccacatgaagaaaagggtaaaaatatggttgaactcaaccactagttgcccattagaacagactttcccagtgtactgcatttcaatactttttcttttatctcttttcagatcttcctcagaagaataggcttgttgttttacagtgttagtgatccattccctttgacgatccctaggtggagatggggcatgaggatcctccaggggaaaagctcactaccactgggcaacaaccctaggtcaggaggttctgtcaagatactttcctggtcccagataggaagataaagtctcaaaaacaaccaccacacgtcaaggtgcgtaagctgtccctaaaagcataataagtagtcttaattttgattttgttttccagtatacattgcacttagtgtttcactgaggtcgtattcatcattattctgcatatgatttggtaaaaacagcttcctaactaacctgggaagcaactgggtgtgagattaactggttaaagtgatgatgtaaagagggtagcgggttgcatgtgttcgggtgtttggagtgggactatagcacgtggcagaggcttacagctaagttgttcttttaggagaacatggacaactgtcacatcagtgacattgatcacatgggcaaatcattctgttccatgtggtccccaaagtctctcttaaagccttacagaagaactttgccaatcatttacatacttcaggatggcttgggatgccatggtgtataatacaacaagtgagaggtgtgtctttttatgctatggttgctgattgatggaagccgcataaatacaaatggaaacctgactaaaaatggcacaaagttatctgtcatcaggcaggagctaaagaaccaggaccctacattctctaggtcagtgttgggagaggctgattagcgagtgagaattggcagataaaggtgaccattcggtgcaataaatcctgaacgtataggctttgcccagcattcttcgtaaatagtgggtagctataaatttcatgaaatattttcatgggtaagaactcttgaaatgttataattgactagaaatctctgtagatttagaaatagagagttactaacaaattgttagaaagtctaggaactagaaagctaagttgagagttatctaggaagatctatctattgtactcataatctttagataaattctcctagggccagtagtctatgtgaattttctttttcttcttcttcttcttctttttttttgtattttagctgcaatgttaaacaacctatgtgaattttcttattgtgagaatatttgccttccagagtgactcacctttatctcaaagagcaatattgtgagttttgaaaatgctgctctaaggctgtgttttgttagtcctgagccaggagacttaaagcaaacttgaggggtcttaaaacatcgaagtgagccttaaacattgggaagaccttatgtttttccctctcatatctattatttttgtgatctcagttattaatcatttaaagggactctttcctagctgattggcacttaaaacaggatggaagtctttttttttttttttttttttgagatggagttttgctcttgttgcccaggctggagtgcaatggtgcaatctcagctcactgcaacctctgcctcccgggttcaagcgattctcctgcctcagcctcccaagtagctgggattacagtcatgcaccaccacgcccggctaattttgtatttttaatagagacggtgtttctccatgttggtcaggctggtctcaaactcctgacctcaggtgatccgcccacctcaacctcccaaagtgctgggattatgggcgtgagccaccgcgcccggcagttctggtctttaactaaggtataaggctatgactggtagtggtgtctctagtgactcatcaagtgatatttggcaagacattttcccatttatgccagtttcctattctgttgaatgaggaaattttctctctaaagacctaaaagttttgactttataggtttcaaagttctgtggaaacattttctattgcttattaatttgaatcttatgtaactctagcacagtactcaatatttatggcatttacatggtttatctcatgtttttttatagctcttcattgttcctatctgccaaatcattatacttcctacaagcagtgcagagagctgagtcttcagcaggtccaagaaatttgaacacactgaaggaagtcagccttcccacctgaagatcaacatgcctggcactctagcacttgaggatagctgaatgaagtaagttgttgatgttgcagtcctgtgaggatcacttcagaactgttataacagctgttttttgggagctggtgttggatggggtgtgttggtctaatgtgaagtggggctaaatgtgagatggaaagatgaccagtcttccatattactgactgggttcactgaagcaactcaaagacattatggtcttcttaccagttgtatcacagaagaatttagcctttgcttgtgtgttctatgtcttcactgtataggccctctgtcattcttagagccttaaacgttgagaagcttaaaacaccatttctgctttctgctgaaagggtaaccctttctcatctccgtttgtgagagactctgtcgtcagttaagattagtgtaaaaagaaaactaaactctgaagtagccattataaaagtgtgagaatgaagtcagttttctaaagagttggggaaaggtgatgctaaaggaggggattgagcaagtcctatcaaagagccttttatgaaaatacttagtcatctgtgacatcccatttggctcttccagaaatcctagtaaatagttgtaacaggatgttaagaggcatacattgtgtgttttaaatcctctgctactcattaggtatatgacctttgacaacttaaagtctctagacttctctgtttgtgagggttaaatgaaatcatgtatgtaaagtgctcacctattgcagtgcctggcacatgtcaagtaaaaggtaacccaagaagactcataagttcatttcccacaatataagtgaccactagcactatcaggtagcaggcagagttggcatgctttggttctatgtaagaaatccctaaggtaaaagtttataaatagaagagcatctgtgttggtattggtggttgttattattgtagtactataagtagtattcgtagtaacaatagtttattataattactaatgacactttttgattttttttatctttctgtgatgcttttcatgcctcttgtgcccctcactgtatcttgcctcttctactacttacttcctctgaatgtctgcctttgcttatctcttgcactcaagtgtgtatttctttgtctctttctttcttgtctttgctctttgttctctatctaaagtgtgtcttacccatttccatgtttctcttgctaatttctttcgtgtgtgcctttgcctcattttctctttttgttcacaagagtggtctgtgtcttgtcttagacatatctctcatttttcattttgttgctatttctctttgctctcctagatgtggctcttctttcacgctttatttcatgtctcctttttgggtcacatgctgtgtgctttttgtccttttcttgttctgtctacctctcctttctctgcctacctctcttttctctttgtgaactgtgattatttgttaccccttccccttctcgttcgttttaaatttcaccttttttctgagtctggcctcctttctgctgtttctactttttatctcacatttctcatttctgcatttcctttctgcctctcttgggctattctctctctcctcccctgcgtgcctcagcatctcttgctgtttgtgattttctatttcagtattaatctctgttggcttgtatttgttctctgcttcttccctttctactcacctttgagtatttcagcctcttcatgaatctatctccctctctttgatttcatgtaatctctccttaaatatttctttgcatatgtgggcaagtgtacgtgtgtgtgtgtcatgtgtggcagaggggcttcctaacccctgcctgataggtgcagaacgtcggctatcagagcaagcattgtggagcggttccttatgccaggctgccatgtgagatgatccaagaccaaaacaaggccctagactgcagtaaaacccagaactcaagtagggcagaaggtggaaggctcatatggatagaaggcccaaagtataagacagatggtttgagacttgagacccgaggactaagatggaaagcccatgttccaagatagatagaagcctcaggcctgaaaccaacaaaagcctcaagagccaagaaaacagagggtggcctgaattggaccgaaggcctgagttggatggaagtctcaaggcttgagttagaagtcttaagacctgggacaggacacatggaaggcctaagaactgagacttgtgacacaaggccaacgacctaagattagcccagggttgtagctggaagacctacaacccaaggatggaaggcccctgtcacaaagcctacctagatggatagaggacccaagcgaaaaaggtatctcaagactaacggccggaatctggaggcccatgacccagaacccaggaaggatagaagcttgaagacctggggaaatcccaagatgagaaccctaaaccctacctcttttctattgtttacacttcttactcttagatatttccagttctcctgtttatctttaagcctgattcttttgagatgtactttttgatgttgccggttacctttagattgacagtattatgcctgggccagtcttgagccagctttaaatcacagcttttacctatttgttaggctatagtgttttgtaaacttctgtttctattcacatcttctccacttgagagagacaccaaaatccagtcagtatctaatctggcttttgttaacttccctcaggagcagacattcatataggtgatactgtatttcagtcctttcttttgaccccagaagccctagactgagaagataaaatggtcaggttgttggggaaaaaaaagtgccaggctctctagagaaaaatgtgaagagatgctccaggccaatgagaagaattagacaagaaatacacagatgtgccagacttctgagaagcacctgccagcaacagcttccttctttgagcttaggtgagcaggattctggggtttgggatttctagtgatggttatggaaagggtgactgtgcctgggacaaagcgaggtcccaaggggacagcctgaactccctgctcatagtagtggccaaataatttggtggactgtgccaacgctactcctgggtttaatacccatctctaggcttaaagatgagagaacctgggactgttgagcatgtttaatactttccttgatttttttcttcctgtttatgtgggaagttgatttaaatgactgataatgtgtatgaaagcactgtaaaacataagagaaaaaccaattagtgtattggcaatcatgcagttaacatttgaaagtgcagtgtaaattgtgaagcattatgtaaatcaggggtccacagtttttctgtaaggggtcaaatcataaatactttagactgtgggccatatggtttctgttacatatttgttttttaaacaacgtttttataaggtcaaaatcattcttagtttttgagccaattggatttggcctgctgttcatagcttaccaccccctgatgtattatttgttattcagagaaaatttctgaatactactagtttccttttctgtgcctgtccctgtgctaggcactaaaaatgcaatgattattgatatctaggtgacctgaaaaaaaatagtgaatgtgctttgtaaactgtaaagcacttgtattctactgtgataagcgttgtggatacaaagaaaggagcaagcataaaaaagtgctctttcaaaaggatatagtactatgcagacacaaggaattgtttgataaatgaataaattatatgtatatttgaggccaatttgtgtttgctgctctggtaattttgagtaaaaatgcagtattccaggtatcagaaacgaaaacacatggaaactgcttttaaactttaaaatatactgaaaacataagggactaagcttgttgtggtcacctataatgtgccagataccatgctgggtgctagagctaccaaagggggaaaagtattctcatagaacaaaaaatttcagaaaggtgcatattaaagtgctttgtaaactaaagcatgatacaaatgtcaatgggctacatatttatgaatgaatgaatggatgaatgaatattaagtgcctcttacataccagctattttgggtactgtaaaatacaagattaattctcctatgtaataagaggaaagtttatcctctatactattcagatgtaaggaatgatatattgcttaattttaaacaatcaagactttactggtgaggttaagttaaattattactgatacatttttccaggtaaccaggaaagagctagtatgaggaaatgaagtaatagatgtgagatccagaccgaaagtcacttaattcagcttgcgaatgtgctttctaaattataaagcacttgtaaatgaaaaatttgatgctttctgtatgaataaaactttctgtaagctaggtattgtctctacaaaattctcattgtatagttaaaccacagtgagaagggttctataagtagttatacaaaccaagggtttaaatacctgttaaatagatcaattttgattgcctactatgtgaactcactgttaaaggcactgaaaatttatcatatttcatttagccacagccaaaaataaggcaatacctatgttagcattttgtgaactctaaggcaccatataaatgtaactgttgattttctcacttggtgctgggtactaggtttataaaattgtatgatagttattatattgtgcaaataaagtaggaaaatttgaataacaatgattatcttttgaatacgcatacgcaagggattggttgtctgaagaatgccactatagtagttatctattgtgtgccaatctcattgctaggcattggggatgcaaagataaaccatctttattgtgtcttgggtagcagaagaaaatatgtgtaaaatcaatttataatttgtaaactgccacccatatataagctatatctgctgaatgatcattgattactcttatccttagagataacaactgggggcacaaacatttattatcattattgaacctacaacagagatctatgtgtagatttacaaagcctacagttctatacagataggaatgaactattggcttactgaatggtgattactttctgtggggctcggaactacatgccctaggatataaaaatgatgttatcattatagagtgctcacagaaggaaatgaagtaatataggtgtgagatccagaccaaaagtcatttaacaagtttattcagtgatgaaaacatgggacaaatggactaatataaggcagtgtactaagctgagtagagagataaagtcctgtccagaagatacatgcttcctggcctgattgaggagatggaaaatttttgcaaaaaacaaggtgttgtggtcttccatccagtttcttaagtgctgatgataaaagtgaattagacccaccttgacctggcctacagaagtaaaggagtaaaaataaatgcctcaggcgtgctttttgattcatttgataaacaaagcatcttttatgtggaatataccattctgggtcctgaggataagagagatgagggcattagatcactgacagctgaagatagaagaacatctttggtttgattgtttaaataatatttcaatgcctattctctgcaaggtactatgtttcgtaaattaaataggtctggcccagaagacccactcaattgcctttgagattaaaaaaaaaaaaaaaaagaaagaaaaatgcaagtttctttcaaaataaagagacatttttcctagtttcaggaatcccccaaatcacttcctcattggcttagtttaaagccaggagactgataaaagggctcagggtttgttctttaattcattaactaaacattctgcttttattacagttaaatggttcaagatgtaacaactagttttaaaggtatttgctcattggtctggcttagagacaggaagacatatgagcaataaaaaaaagattcttttgcatttaccaatttagtaaaaatttattaaaactgaataaagtgctgttcttaagtgcttgaaagacgtaaaccaaagtgcactttatctcatttatcttatggtggaaacacaggaacaaattctctaagagactgtgtttctttagttgagaagaaacttcattgagtagctgtgatatgttcgatactaaggaaaaactaaacagatcacctttgacatgcgttgtagagtgggaataagagagggctttttattttttcgttcatacgagtattgatgaagatgatactaaatgctaaatgaaatatatctgctccaaaaggcatttattctgacttggagatgcaacaaaaacacaaaaatggaatgaagtgatactcttcatcaaacagaagtgactgttatctcaaccattttgttaaatcctaaacagaaaacaaaaaaaatcatgacgaaaagacacttgcttattaattggcttggaaagtagaatataggagaaaggttactgtttattttttttcatgtattcattcattctacaaatatattcgggtgccaataggtacttggtataaggtttttggccccagagacatgggaaaaaaatgcatgccttcccagagaatgcctaatactttccttttggcttgttttcttgttaggggcatggcttagtccctaaataacattgtgtggtttaattcctactccgtatctcttctaccactctggccactacgataagcaggtagctgggttttgtagtgagcttgctccttaagttacaggaactctccttataatagacacttcattttcctagtccatccctcatgaaaaatgactgaccactgctgggcagcaggagggatgatgaccaactaattcccaaaccccagtctcattggtaccagccttggggaaccacctacacttgagccacaattggttttgaagtgcatttacaaggtttgtctattttcagttctttactttttacatgctgacacatacatacactgcctaaatagatctctttcagaaacaatcctcagataacgcatagcaaaatggagatggagacatgatttctcatgcaacagcttctctaattataccttagaaatgttctcctttttatcatcaaatctgctcaagaagggctttttatagtagaataatatcagtggatgaaaacagcttaacattttaccatgcttaagttttaagaataaaataaaaattggaaataattggccaaaattgaaaggaaaaatttttttaaaatttctctaaatgtaggcctggctgggctttgaccttttccgtttttaaatcactcacagagggtgggacaggaggaagagtgaaggaaaaggtcaaacctgttttaagggcaacctgcctttgttctgaattggtcttaagaacattaccagctccaggtttaaattgttcagtttcatgcagttccaatagctgatcattgttgagatgaggacaaaatcctttgtcctcactagtttgctttacatttttgaaaagtattatttttgtccaagtgcttatcaactaaaccttgtgttaggtaagaatggaatttattaagtgaatcagtgtgacccttcttgtcataagattatcttaaagctgaagccaaaatatgcttcaaaagaagaggactttattgttcattgtagttcatacattcaaagcatctgaactgtagtttctatagcaagccaattacatccataagtggagaaggaaatagataaatgtcaaagtatgattggtggagggagcaaggttgaagataatctggggttgaaattttctagttttcattctgtacatttttagttagacatcagatttgaaatattaatgtttacctttcaatgtgtggtatcagctggactcagtaacacccctttcttcagctggggatggggaatggattattggaaaatggaaagaagaaagtaactaaaagccttcctttcacagtttctggcatcactaccactactgattaaacaagaataagagaacattttatcatcatctgctttattcacataaatgaagttgtgatgaataaatctgcttttatgcagacacaaggaattaagtggcttcgtcattgtccttctacctcaaagataatttattccaaaagctaagataaatggaagactcttgaacttgtgaactgatgtgaaatgcagaatctcttttgagtctttgctgtttggaagattgaaaaatattgttcagcatgggtgaccaccagaaagtaatcttaagccatctagatgtcacaattgaaacaaactggggagttggttgctattgtaaaataaaatatactgttttgaaaactttgtattttgatgtgacaatttctaactcactgtccctaaccacactaattaccgtaagttcttcatttcttttttctttttctttttaaattaataaattaatttattttttggagatggagtctcgctttgttgcccaggctggagtgcagtggtgccatcttggctcactgtaacctctgcctcctgggttcaagcgattctcctgcctcagcctcaccagtagctgggattacagtcatgagccaccatgcctggctaatggttgtatttttagtagagacggggttttgccatgttggccaggctggtcacgaactcctgacttaaagtgaaacacctgcctcggcctcccaaagttct

SEQ ID NO: 50432 - DNA, 20531 bp, Homo sapiens
agatggtactaacctcaatgtattactcctttctagcttctttggttcaaaagtttggtggaggagttacaaattctggtttgaatgatatatttggatactttatcaacacatcaaagctctacctatcccttcccccattctcaaaaccaagctgaattaacatctttacatttattatgcagtttatggaggattttagcattaattattgcttgatttactcaatgtccccatgttatagatgagaactggaaaacccattgaagttgtgactcctggtctagaaatgaagtctacttccagttaatgttctttctggtatgtctttgctttcttgaaatttcccttttttgtccttactgggtaaattttgaaccaaccaaatcacaaagatgtccggctttcaatcttctaggccacgcctcttatgctctctccgccctcagcccccccttcagttcttaaagcgctgcaattcgctgctgcagccatatttcttactctctcggggctggaagcttcctgactgaagatctctctgcacttggggttctttctagaacattttctagtcccccaacaccctttatggcgtatttctttaaaaaaatcacctaaattccataaaatatttttttaaattctatactttctcctagtgtcttcttgacacgtcctccatatttttttaaagaaagtatttggaatattttgaggcaatttttaatatttaaggaatttttctttggaatcatttttggttgacatctctgttttttgtggatcagttttttactcttccactctcttttctatattttgcccatcggggctgcggatacctggttttattattttttctttgcccaacggggccgtggatacctgccttttaattcttttttattcgcccatcggggccgcggatacctgctttttatttttttttccttagcccatcggggtatcggatacctgctgattcccttcccctctgaacccccaacactctggcccatcggggtgacggatatctgctttttaaaaattttctttttttggcccatcggggcttcggatacctgctttttttttttttatttttccttgcccatcggggcctcggatacctgctttaatttttgtttttctggcccatcggggccgcggatacctgctttgatttttttttttcatcgcccatcggtgctttttatggatgaaaaaatgttggttttgtgggttgttgcactctctggaatatctacacttttttttgctgctgatcatttggtggtgtgtgagtgtacctaccgctttggcagagaatgactctgcagttaagctaagggcgtgttcagattgtggaggaaaagtggccgccattttagacttgccgcataactcggcttagggctagtcgtttgtgctaagttaaactagggaggcaagatggatgatagcaggtcaggcagaggaagtcatgtgcattgcatgagctaaacctatctgaatgaattgatttggggcttgttaggagctttgcgtgattgttgtatcgggaggcagtaagaatcatcttttatcagtacaagggactagttaaaaatggaaggttaggaaagactaaggtgcagggcttaaaatggcgattttgacattgcggcattgctcagcatggcgggctgtgctttgttaggttgtccaaaatggcggatccagttctgtcgcagtgttcaagtggcgggaaggccacatcatgatgggcgaggctttgttaagtggttagcatggtggtggacatgtgcggtcacacaggaaaagatggcggctgaaggtcttgccgcagtgtaaaacatggcgggcctctttgtctttgctgtgtgcttttcgtgttgggttttgccgcagggacaatatggcaggcgttgtcatatgtatatcatggcttttgtcacgtggacatcatggcgggcttgccgcattgttaaagatggcgggttttgccgcctagtgccacgcagagcgggagaaaaggtgggatggacagtgctggattgctgcataacccaaccaattagaaatgggggtggaattgatcacagccaattagagcagaagatggaattagactgatgacacactgtccagctactcagcgaagacctgggtgaattagcatggcacttcgcagctgtctttagccagtcaggagaaagaagtggaggggccacgtgtatgtctcccagtgggcggtacaccaggtgttttcaaggtcttttcaaggacatttagcctttccacctctgtcccctcttatttgtcccctcctgtccagtgctgcctcttgcagtgctggatatctggctgtgtggtctgaacctccctccattcctctgtattggtgcctcacctaaggctaagtatacctccccccccaccccccaacccccccaactccccacccccaccccccaccccccacctccccacccccctacccccctacccccctacccccctctggtctgccctgcactgcactgttgccatgggcagtgctccaggcctgcttggtgtggacatggtggtgagccgtggcaaggaccagaatggatcacagatgatcgttggccaacaggtggcagaagaggaattcctgccttcctcaagaggaacacctaccccttggctaatgctggggtcggattttgatttatatttatcttttggatgtcagtcatacagtctgattttgtggtttgctagtgtttgaatttaagtcttaagtgactattatagaaatgtattaagaggctttatttgtagaattcactttaattacatttaatgagtttttgttttgagttccttaaaattccttaaagtttttagcttctcattacaaattccttaacctttttttggcagtagatagtcaaagtcaaatcatttctaatgttttaaaaatgtgctggtcattttctttgaaattgacttaactattttcctttgaagagtctgtagcacagaaacagtaaaaaatttaacttcatgacctaatgtaaaaaagagtgtttgaaggtttacacaggtccaggccttgctttgttcccatccttgatgctgcactaattgactaatcacctacttatcagacaggaaacttgaattgctgtggtctggtgtcctctattcagacttattatattggagtatttcaatttttcgttgtatcctgcctgcctagcatccagttcctccccagccctgctcccagcaaacccctagtctagccccagccctactcccaccccgccccagccctgccccagccccagtcccctaaccccccagccctagccccagtcccagtcctagttcctcagtcccgcccagcttctctcgaaagtcactctaattttcattgattcagtgctcaaaataagttgtccattgcttatcctattatactgggatattccgtttacccttggcattgctgatcttcagtactgactccttgaccattttcagttaatgcatacaatcccatttgtctgtgatctcaggacaaagaatttccttactcggtacgttgaagttagggaatgtcaattgagagctttctatcagagcattattgcccacaatttgagttacttatcattttctcgatcccctgcccttaaaggagaaaccatttctctgtcattgcttctgtagtcacagtcccaattttgagtagtgatcttttcttgtgtactgtgttggccacctaaaactctttgcattgagtaaaattctaattgccaataatcctacccattggattagacagcactctgaaccccatttgcattcagcagggggtcgcagacaacccgtcttttgttggacagttaaaatgctcagtcccaattgtcatagctttgcctattaaacaaaggcaccctactgcgctttttgctgtgcttctggagaatcctgctgttcttggacaattaaagaacaaagtagtaattgctaattgtctcacccattaatcatgaagactaccagtcgcccttgcatttgccttgaggcagcgctgactacctgagatttaagagtttcttaaattattgagtaaaatcccaattatccatagttctgttagttacactatggcctttgcaaacatctttgcataacagcagtgggactgactcattcttagagccccttcccttggaatattaatggatacaatagtaattattcatggttctgcgtaacagagaagacccacttatgtgtatgcctttatcattgctcctagatagtgtgaactacctaccaccttgcattaatatgtaaaacactaattgcccatagtcccactcattagtctaggatgtcctctttgccattgctgctgagttctgactacccaagtttccttctcttaaacagttgatatgcataattgcatatattcatggttctgtgcaataaaaatggattctcaccccatcccaccttctgtgggatgttgctaacgagtgcagattattcaataacagctcttgaacagttaatttgcacagttgcaattgtccagagtcctgtccattagaaagggactctgtatcctatttgcacgctacaatgtgggctgatcacccaaggactcttcttgtgcattgatgttcataattgtatttgtccacgatcttgtgcactaacccttccactccctttgtattccagcaggggacccttactactcaagacctctgtactaggacagtttatgtgcacaatcctaattgattagaactgagtcttttatatcaaggtccctgcatcatctttgctttacatcaagagggtgctggttacctaatgcccctcctccagaaattattgatgtgcaaaatgcaatttccctatctgctgttagtctggggtctcatcccctcatattccttttgtcttacagcagggggtacttgggactgttaatgcgcataattgcaattatggtcttttccattaaattaagatcccaactgctcacaccctcttagcattacagtagagggtgctaatcacaaggacatttcttttgtactgttaatgtgctacttgcatttgtccctcttcctgtgcactaaagaccccactcacttccctagtgttcagcagtggatgacctctagtcaagacctttgcactaggatagttaatgtgaaccatggcaactgatcacaacaatgtctttcagatcagatccattttatcctccttgttttacagcaagggatattaattacctatgttacctttccctgggactatgaatgtgcaaaattccaatgttcatggtctctccctttaaacctatattctaccccttttacattatagaaagggatgctggaaacccagagtccttctcttgggactcttaatgtgtatttctaattatccatgactcttaatgtgcatattttcaattgcctaattgatttcaattgtctaagacatttcaaatgtctaattgattagaactgagtcttttatatcaagctaatatctagcttttatatcaagctaatatcttgacttctcagcatcatagaagggggtactgatttcctaaagtctttcttgaatttctattatgcaaaattgccctgaggccgggtgtggtggctcacacctgtaatcccagcactttgggaggctgaggtgggaagatcccttactgccaggagtttgagaccagcctggccaacattaaaaaaaaaaaaaagtaagacaattgccctggaatcccatccccctcacacctccttggcaaagcagcaggagtgctaactagctagtgcttcttctcttatactgcttaaatgcgcataattagcagtagttgatgtgcccctatgttagagtagaatcccgcttccttgctccatttgcattactgcaggagcttctaactagcctgaattcactctcttggactgttaatgtgcatacttatatttgctgctgtacttttttaccatgtaaggaccccacccactgtatttacatcccagctggaagtacctactacttaagacccttagactagtaaagttagcgtgcataatcttaggtgttatatacacattttcagttgcatacagttgtgccttttatcaggactcctgtacttatcaaagcagagagtgctaatcaatattaagcccttctcttcgaactgtagatggcatgtaattgcagttgtcaatggtccttcaattagacttgggtttctgacctatcacaccctctttgctttattgcatggggtactattcacttaaggcccctttctcaaactgttaatgtgcctaatgacaattacatcagtatccttccttttgaaggacagcatggttggtgacacctaaggccccatttcttggcctcccaatatgtgtgattgtatttgtcgaggttgctatgcactagagaaggaaagtgctcccctcatccccacttttcccttccagcaggaagtgcccaccccataagacccttttatttggagagtctaggtgcacaattgtaagtgaccacaagcatgcatcttggacatttatgtgcgtaatcgcacactgctcattccatgtgaataaggtcctactctccgaccccttttgcaatacagaagggttgctgataacgcagtccccttttcttggcatgttgtgtgtgattataatcgtctgggatcctatgcactagaaaaggagggtcctctccacatacctcagtctcacctttcccttccagcagggagtgcccactccataagactctcacatttggacagtcaaggtgcgtaattgttaagtgaacacaaccatgcaccttagacatggatttgcataactacacacagctcaacctatctgaataaaatcctactctcagaccccttttgcagtacagcaggggtgctgatcaccaaggccctttttcctggcctggtatgcgtgtgattatgtttgtcccggttcctgtgtattagacatggaagcctcccctgccacactccacccccaatcttcctttcccttccggcagggagtgccctctccataagacgcttacgtttggacaatcaaggtgcacagttgtaagtgaccacaggcatacaccttggacattaatgtgcataaccactttgcccattccatctgaataaggtcctactctcagaccccttttgcagtacagcaggggtgctgatcaccaaggccccttttcttggcctgttatgtgcgtgattatatttgtctgggttcctgtgtattagacaaggaagccttccccccgcccccacccccactcccagtcttcctttcccttccagcagggagtgccccctccataagatcattacatttggacaatcaaggtgcacaattataagtgaccacagccatgcaccttggacattattggacattaatgtgcgtaactgcacatggcccatcccatctgaataaggtcctactctcagatgccctttgcagtacagcaggggtactgaatcaccaaggccctttttcttggcctgttatgtgtgtgattatatttatcccagtttctgtgtaatagacatgaaagcctcccctgccacaccccacctccaatcttcctttcccttccaccagggagtgtccactccatatacccttacatttggacaatcaaggtgcacaattgtaagtgagcataggcactcaccttggacatgaatgtgcataactgcacatggcccatcccatctgaataaggtcctactctcagaccctttttgcagtacagcaggggtgctgatcaccaaggccccttttcctggcctgttatgtgtgtgattatatttgttccagttcctgtgtaatagacatggaagcctcccctgccacactccacccccaatcttcctttcccttctggcaggaagtacccgctccataagacccttacatttggacagtcaaggtgcacaattgtatgtgaccacaaccatgcaccttggacataaatgtgtgtaactgcacatggcccatcccatctgaataaggtcctactctcagaccccttttgcagtacagtaggtgtgctgataaccaaggcccctcttcctggcctgttaacgtatgtgattatatttgtctgggttccagtgtataagacatggaagcctcccctgccccaccccaccctcaatcttcctttcccttctggcagggagtgccagctccataagaaccttacatttggacagtcaaggtgcacaattctaagtgaccgcagccatgcaccttggtcaataatgtgtgtaactgcacacggcctatctcatctgaataaggccttactctcagaccccttttgcagtacagcaggggtgctgataaccaaggcccattttcctggcctgttatgtgtgtgattatatttgtccaggtttctgtgtactagacaaggaagcctcctctgccccatcccatctacgcataatctttcttttcctcccagcagggagtgctcactccataagacccttacatttggacaatcaaggtgcacaattgtaagtgaccacaaccatgcatcttggaaatttatgtgcataactgcacatggcttatcctatttgaataaagtcctactctcagaccccctttgcagtatagctggggtgctgatcactgaggcctctttgcttggcttgtctatattcttgtgtactagataagggcaccttctcatggactccctttgcttttcaacaaggagtacccactactttttaagattcttatatttgtccaaagtacatggttttaattgaccacaacaatgtcccttggacattaatgtatgtaatcaccacatggttcatcctaattaaacaaagttctaccttctcaccctccatttgcagtataccagggttgctgaccccctaagtccccttttcttggcttgttgacatgcataattgcatttatgttggttcttgtgccctagacaaggatgccccacctcttttcaatagtgggtgcccactccttatgatctttacatttgaacagttaatgtgaataattgcagttgtccacaaccctatcacttctaggaccattatacctcttttgcattactgtggggtatactgtttccctccaaggccccttctggtggactatcaacatataattgaaattttcttttgtctttgtcagtagattaaggtcataccccatcacctttcctttgtagtacaacagggtgtcctgatcaaccaaagtcctgttgttttggactgttaatatgtgcaattacatttgctcctgatctgtgcactagataaggatcctacctactttcttagtgtttttagcaggtagtgcccactactcaagactgtcacttggaatgttcatgtgcacaaactcaattctctaagcatgttcctgtaccacctttgctttagagcagggggatgatattcactaagtgccccttcttttggacttaatatgcattaatgcaattgtccacctcttcttttagactaagagttgatctccacatattccccttgcatcaggggcatgttaattatgaatgaacccttttcttttaatattaatgtcataattgtatttgtggacctgtgtaggagaaaaagaccctatgttcctcccattaccctttggattgctgctgagaagtgttaactactcataatctcagctcttggacaattaatagcattaataacaattatcaagggcactgatcattagataagactcctgcttcctcgttgcttacatcgggggtactgacccactaaggccccttgtactgttaatgtgaatatttgcaattatatatgtctccttctggtagagtgggatattatgccctagtatcccctttgcattactgcaggggctgctgactactcaaaacttctcctgggactgttaataggcacaatggcagttatcaatggttttctccctccctgaccttgttaagcaagcgccccaccccacccttagtttcccatggcataataaagtataagcattggagtattccatgcacttgtctatcaaacagtggtccatactcccaacccttttgcattgcgccagtgtgtaaaatcacaggtagccatggtgtcatgctttatatacgaagtcttccctctctctgccccttgtgtgcccttggcccctttttacagactattgctcacaatctcaggtgtccatatttgcagctattaggtaagattgtgctgtctccctcttcccttccctctgccctgccccttttgcctctttgctgggtaatgttgaccagacaaggccctttctcttggacttaaacaattctcagttgcactttccttggtcccacccattatacatgaacccctctacttcctttcgcattgcttctgagtatgctgactacccaaagccccttctgtgttattaataaacacagtactgattgtcccatttttcagcccatcagtccaagatctccctaccactttggtgtgttggtgcagtgttgactatgaaaagcaggcctgaactaggtggataagccttcactcattttctttcatttattaatgatcctagtttcaattattgtcagattctggggacaagaaccattcttgcccacctgtgttactgctttactgtgcaaaatactgaaggcaagtcagacccagggagctggattgccatcctttattttgtgtttccagtgtacactataaaattgtctccccaggaaggaaggttggcactttctctgcattcttctttccagagcagattgcctggttaagaatctcttgttgtcccctttgtatattgttattgtaaagtgccaaatgccaggatacagccagaaaaattgcttattattattaaaaaaatttttttaagaaagacatctggattgtagggtggactcgataacctggtcattatttttttgaagccaaaatatccatttatactatgtacctggtgaccagtgtctctcattttaactgagggtggtgggtctgtggatagaacactgactcttgctattttaatatcaaagatattctagagtggaactcttaagaccagtatctttgtgtgggctttaccagcattcacttttagaaaaactacctaaattttataatcctttaatttcttcatctggagcacctgcccctacttatttcaagaagattgcagtaaaacgattaaatgagggaacatatgcagaggtgcttttaaaaagcatatgccaccttttttattaattattatataaaatgaagcatttaattatagtaataatttgaagtagtttgaagtaccacactgaggtgaggacttaaaaatgataagacgagttccctattttataagaaaaataagccaaaattaaatattcttttggatataaatttcaacagtgagatagctgcctagtggaaatgaataatatcccagccactagtgtacagggtgttttgtggcacaggattatgtaatatggaactgctcaagcaaataactagtcatcacaacagcagttctttgtaataactgaaaaagaatattgtttctcggagaaggatgtcaaaagatcggcccagctcagggagcagtttgccctactagctcctcggacagctgtaaagaagagtctctggctctttagaatactgtaagtactacttcgtagctattaagtaatctttttcctattctattttctttctcttagatgccacctatagaaaagtcagagggtccagtaagtttctttccttcttcccacctcatctgcaatatatatatatagagagagaaatagatacatacatacatgcataaatacacatatgtgagttaaccagcagaactgtagaattaatattgtggacccagctctatgctaggttacactgataacctgggtaggaatgatatcatcctatataatttcattcctgagatgattttatcgttgaggagctaatgtgagcacatttgaaataactttagaaaataataagtgctgttttgtgtgaatcataagtagtagttttaggaagggaacccacaaggatttgaagttgatagaataaacttaaggaagtgggtttgctttttctctttaagccaagataggattaatattgcagccatctggatagtccagttggtttattttaatttcatttgttttttacctcttttggagccatggaaagagatgaaagggatagagcatagccattgtgtttggctatttgcgaaggttggcaaattagtgattgctaaatctcataagcttgagtattttaaagttcagagattgagggcataaatctaatacttcggctccttccacaattttactacatttctgcccaagaacagatgaccatggataatgcatatcgtagatactttttaagtttggaacctttttgccaagagggtagtggagaagtgaagtcaaaaccttgaccttccttgcctactttatgctgtagtttatataccttctttcctcccacctttcgtaaagctaaaagaagcttagcctccttaatgttttccagctgacaaaatattgtttaacataacattcgaaactttttttctggtgcacattcatgcatcacagcaggagcaacaagaaccatataagtgaactggcttcacttatagcccgttttaattcatatccatatttcctcagggcttgtttccatgcctcccagccccactccatatgcttaacaacattgtctggctgactgagggttatatacatcatggtcttgaaccttcttggaaacatggtctgtgccattgtttctcaaacccaagtaatgcttcatgatgaaacaccttctaaaggaacaaaattttctgagatcctaaaaaaatgtgttttgaggaacactgacttaacaaagatatttgaaatgtaaatatgttttccaatttcacgttgtctttgtcaaagatgtgttttatataacttatgtagaacttggggatccattagaatatattcacaaatccccagggttatcaccccaatttgagaaaccctggtctatgcttatgaaatcttctattggtaattaaattgtcattcattgtcaacatacaattataattattattggaatttgttttaaatgaatgaatttggaggtgattctgtaccttaagtcaagaggaaggatggcttgattttaggtggattgattatactagatagcatccaaaggtgaatcttgaagctgtatttaaattcattgcttgaaataatttccacccttaagaaaaatctctagcaattgtaaaaagggatgctctggaaatgtgggcatcttcaaaatagagataattcttgtgttagttcaacaaatattattgtaccaggtgctggaataaatagcaaaaccaaagacaggatttatatcaaggaatttgctttcttatggaggatgcagaaggaaatcattatggttttgggcagaaatgcttagactttagtcctggctctgagtttggttcagatcaccatcaatctgaccatctcgagactgctagtgaaataagataggggcttatatcaaatacctaaatccctgaaaatgacattttgtgatttggaaaattttcaaaagtctaatgaaggaaacttttttggcatttctttaaatgattattgtcatttcttttctgacttttccctttataaaaccttaacatgtaggattggaggaagttttctgaccattttctcatatcctctttcagctttatctttctgtaacttccatttctctagccacctccctaaattacagaagactgtgagacccagggctgctgtgattaggcattcataatttcttttcagggtgtttgtgccctgattatcaaatgtacagcttgaagggagttcatgtcttaaagtaatgaattaagagttgacctttgttgactgctaaaatattcttatatgtgaaagcatcctggaaaaatacgttaccagcttaaagagaaagaaactaatgattatatctgaactgagctaatgcctcttctcttcccccaaaccttatcagtttggatggcaaagagtaatgatgtgtcagttaaacagagctaatgccttcctctgccttgtcttaaagactggattgggagaaaattgatattctcactaccatattttgggctgtaggcaagtagcattttacacaggtttccttcaaaaatccaactcaagttggagctcatgtatttaagacatagctggcctgctgaatttaacaagttaaacttcagtggccatgtacagttatatatcactatatatatgtgtattaggctgtcgagttggtcatgtttttgttggtgacttaggctttacttgatagctcttccttgacctttccaaattgagtactgatacatggagcttgggcttcttctgcatcttatacaaatgagtttggtaaagaagcctctcctttactgttttgatgtttatattagaaataacttttgattattttttttcatgttaggatgagaaactgaaacaaaatgtaaatttgaccggtgctagacttcttaaattatgggtagacttaaagtattattttccttaaccaattagaatgctagtcttctagtgttcccggaaacatgagaggttatgcagtagacccaagcaataccctcttattacataatcaagtgcgtataagaatttaaaaatagggatatgactggaacatcactgtactttaccaggtcccattataaaattatctatgttactttacccatagctttgaaaactagtggcatagtatattttatagtatgctgttagtgtgattggcattgaacagtgatgggatataatcactctacaatctatatgttattaaagttttccagccttatagatctcccttgactgaaaattagctactaacttacgacttattttttacagcagattgactaggtctttccaggaaatctgttgatgtacaaaaacaaagtttaattgctaatgtttttttaaaaaataactttttgatattacggatacctggttatttgggccttgtatattttaacatcaaaattacctattataaatccatataaacagaaaagaaagagagtaagtctttagatcagatctgcaaacaatgatggtacgtactgtagaaaaatctggaacatagacttaccagttcttaggttccattttgcttgctttttaaaaactgtgtcttataagtcttcagcaactggttgggagatttttagaaaaaataaccttttaatgttagaacagtgtagagatttacagaatgattctgaagatagagtttctgtgtacttcacacccagtttttcccagtgttaacattttacattagtttggtacatttgtcacaacaaaccaatattgatacattattattaactagagtccatattttattcagatttccttagtttttccttaatgttctttttgtgttccaggatcccattgaagataccacgctgcatgtgtccttagtagtcatgtctccttaggctcctcttggtaatgacagtttctcagactctttgtttttgatgaacttcacagttttgaggactaatggtccagtattctatagaatgtctctctattggaatttgtctgatgttcttctcatgactagattgggtttatgagtgtttaggaggaagaccacaaaggtagagtgccattcttatcacttatcaagagtacatactatcaacatgacttatcactgtttatgttatccttaatcacctgtctgaggtactatttgtcaggtttctccagcgtaaaattagtctttatttctccatttccctactatactgttcacataggaagtcactatgtgcagccagcacttaaggaatgggaaattaccttccacctcattgagggcagagtatttacataaattatttggaattcttttgcacaggatgtcttttctccacaatgtattgtgtttattcagtcatttatatcagtatgatctcagggatattttatactctgggttataatacagtattactttattctgttgttcaaattgttccagctttggccattgggaggtctttcatttggctttgatataaccccatgaatgtgggttttttgtttgagcactttcttatttttggaactacaacatgcttcagactcatttgcatatctcctgcctggacctaaaatgatgtatttctgcaaggagccttgatactttttattggagagtaatattagaaatcaagaagtgaatgctaggtgcgctcattactactggagtgtcattccttcaagaccttttcagttgacaagagcaaggagatatatatttgcattctaacgtgtgtatatgcacatagctataaatatatataaccatctgtatctatattaaactaaatgtgtttatacctacgtctccaactctaatcattgccacatggatcattatagtctcacctccttgcttatctgttacctcccatttctacagtgagaaacctggcttggttgggaaatttttctgttaatattacggtagtgagtgtttgacatttgcttctatggttaagtttagggagagtttagctgtagggtattcttgaaactagaaatgacccttctgccctaaatgtttctgccagttttgaaacgtaaaataggttgcagaaacaaactttatcttaagaaccagaatttacttcaatccacattttgacattgattttcagattaaattattctgatatcgccaggtaagctgttccttgggtatgcatttcttctttccgtttttttctaagagctaaaggaccctgagaacactggaggtgggaaaggaagggaaaggcatgttcacacgtgggataggaaaggttcatttactgacctccagctagccttccaaagtgcctatttaagacccaaggagtagatgtcttccttggcaattgtaacccaaatataatttttaacctttcaattttagtcaagaaagttggtgtgctgttacaaaaagtgccctgattaacagcattgtcatgtgcattgcatattaatcagcaatttaaaataacatgaaattatgttgagtataattttaatattttatattagatattagtttgagacagtgtttctcaagtctgtataataagtttgatagtagggaggttttctctcaagaaaagaattattcagtgtgcacctacataatcactgcttagattctacaattaatattttgctatatttgattaaacgttttctgtaaaagaaaaatattattatgtactatttaggtttatgggaataattgttaagttaaagtgtatgaacaaacctggaatgaaatctgtttgcctacatctataatacaactataaaacatagcagatgtacaaattagtagttaatagataactaaaatgcaaatatggcactactattatagtattatagtttcttttgagtggcgtgtctgtaatatcacatgctgtgttgatgcacttcaccaaactgctgttttcaaactgctttaaatcctgccattatagcacatagcaatgctatttcactttcatttggcacaaaacacatttatatattgtttgcttctcttcttttctgtaatccccaggcaacaaaactagaacatttgccactaatctggcaacgtggtcctatattatgaagtagtcatatagctgatctaaactatccttacagtgaaatgagagtattgtgaaagttttgtagaaagctccccatatgtcctgagaatctatgcacagaccccacagttaaaagacctttgaattgtgggaagacatgggtttaagtatcacttggttaccttctatttgtgtaacattgaggtagtttcatcttctgggttcccagtttccttagagaatgaaaatgttgaattatgtgatttttttttttttttgagacggagttttgctctttcgcccaggctggagtgaagtagcacgatctcgactcactgcaacctccttcccccatgatcaagcaattctcctgcctcagcctcccaagtagctgggattacaggcacccgccccccaccccccgcccccagctaatgtttgtatttttagtacagatggagttttgccgtgttggccaggctggtctcgaacttctgacctcaggtgatccactcgccttggcctcccaaagtgctaggattacaggcatgagccactgcgcctggcctatgtgattattaatatcacgtctagctgtgacaattctgtctgatgctggagtatttgaaccagatggctggctgtgccactcagttattctctccataagactttgatattttgttggtctgcaagatgacggattctcaaaattcttgtcagtgaatattgaaccctagtgaaatgtatggttctgtatcagttccaaaatgtaaccactttctctagccttagattcccagttccaaaatgtaaccattttctctagccttagattcccgttaagggaaagggaatgctctttgagtatgtcatcaccatagtaacaggcaaaactagagggctttgatgctaaagcaagatactccataaatatgcttaagaagacttggggagactggaatagttgttcccttttagatgccagtgtataaatgaatttgagctaggatccgtttatttaaaatttctttaggtgtatttgcttgcatatggagtgcacatttactctcattaatggagttttaggaagcagtagagtaaatgcataaacatgtatgaaccgccatgtttaactggaagcctgcatttggaagtcaagtatctaatcttagattaaattaggatggggaaggatgttggcaagagattttgaagcttgttctgcttatattgagaacatcatagaacagtttggcctttttaaagctagagaatagtgttgaataagtgatgttccatatattcctgtttgacattgacataaaggtttcctcatgatacagtaatccctgatcagggatctggaagcctgtattcatttaaggtactcaggtttaacatactgggtgcttttcacaccatactatacagtaccatgcaaagtgctttcaagactgcaaatttggcttagatcccctttagtgagctcctatgctatagtaaaggtagatagccaattattaaaaacagtcaagacaattgcacctctaagcagtagtagcagttgccacaccaccttgaatcttgaagtattttcagcaacaggatgaccattagccacaaatttagtgtcagcccttaaggtcggtattggtttgacccatattttcatgtagttctttttcttcacttgtctaatcttcccgtgtactgccagggcttgtcattagaggactttagggagaccaagcaggctagaaagtagagacaggagatacctatgtctaatgcttcagtttatacttcctaggtttttttcattggggtttttgtaactcttttggtatcctaccggtgctttggtagcctactgaaccctgtctttcttcttaaggacattctgagcatgtgagacctgaggactgcaaacagctataagaggctccaaattaatcatatctttccctttgagaatctggccaagctccagctaatctacttggatgggttgccagctatctggagaaaaaggtagtttggggaatttattgttgtagtgcttctgtctttggattgaacttcccacaactctcctttttaaagcagaacacagctgggcatggtggctcctgcttgtaattccagggctttgggaggttgaggtggggggatcacttgaggccaggagttgaagacccatgtctctacaataaaataaaattagttgggcatggtggtacgtgcctgtagtcctacctactctggaggctgaggcagcaggattgcttgagcccaggagttcaaggctgcagtgagccatcattagccactgcactccagcctaggtggcagagcgggacccagtctcttaaaaagaaagaaaagcagaacgtgagccagttttcatcaattcctatactttttcttttgcatgtacacatacattttaactttacataatgagttcggcctgtttcatttatccctcagagctgggctccagtgaggtctgtaagggcaagcatacttgatccccaatgaagaatgagagatgcaaagcactaaattatttcttttctcaccacacagcaa

SEQ ID NO: 50433 - DNA, 1041 bp, Homo sapiens
tatactctctcttccttctgatttttaataacattttcttctctagctaattgcaagaatatagtagataataaattaccatagaaagtatgtgttaattgactatgttattggtaaggcttccagtcaacagtaggctattagttaagttttggtggaattaaaaattttatgcagatttgactgtatgaggggttggtgaccctaacccccccattcctcaagggtctactatatatgatcccacttgtatacaatattcagaacaggcaaatccataaacagaaagcaaattagtagccatgggatagagggcaaagggaatgagtacagggtttcttttagaagtgattaaaatctgttggaactagacagcagtgatggatgcacaacactgtgaatgtatgaaatgccactaaattgtatactttaaaatggctaaaacactaatgtgtattgtgccacaattaagtaaaaaaatactataaagtgaaaagaaaagtagctaactgaaaaaaatatctgcaggccgggtgcagtggctcatgcctgtaatcccaccactttcggaggccaaggcgggcggatcaaaaggtcaagagatcgagaccatcctggccaacatggtaaaaccccatctctactaaaaatacaaaaattagctgggcatggtgccacacgcctgtagtcccagctacgcgggaggctgaggcaggagaatcgcttgaacctgggaggcggaggttgcagtgagccaagatcgtgccactgcactccagcctggcgacagagcaagactccatctcaaaaaaaaaaaaagtctgcaatattataacaaaaaaaggcgaatttccttaatttatgaagagtgtctacaataagaaaaagtccaaacaccaattttttttttacaggaccaagaatattaacaaatagttcacccaaaaaaaatacctttcaaatggataaaaaaaaaaagttcaaatatctttaacactgacattctccgtttccccttcaattttctcacaactggcattc

SEQ ID NO: 50434 - DNA, 1709 bp, Homo sapiens
atttcatgcaattccaaactcccagcatatttgtggatatcagcaaactgattgtgaattttatatggagagccaaaagactcaaaatatccatcacaatattgaaggggaaataataaagtcactgcgccaggcacagtggctcacgcctgtaatcccagcactttgggaggccaagacgggcagatcacttgaggtcaggagttcgaggccagcccggccaacatggtaaaagcccgtctctactaaaaatacaaaaattagttgggtgtggtggtgtgtgcctgtaatcccagctacttgggaggctgaggcaggagaatcgcctgaatccaggaggcagaagttgcggtgagccaggattgtgccactgcacttcagcctgggcaacagagcgagactcagtctcaaaaaaaaaaaaaaaaaaagaatagtcactgcttgacttcaagacttaataaaaagctatggtaatccagacagtgtgaaattggtgaaggaatggataaatggatcaatggaacagaataaagagcccagatagagacataaatatagtcaactaatcgttgagaaagaagcaaaggcaatacaatggagcaacaaatagtgttggaatagctgaatatccaaatgccaaaaaatgaatctaatacaaactttacacccttcacaaatattaattcaaaatggatgccagacctaaatgtaaaatgcaaaactgtaaatagaactccaacatttgagaaaatctagacatcactgggtatggcaattactttctagatacaataccaaaagcataatccataaaagaaatcattgacaagctaaatgttattaaaattaaaaaaaaattactccacaaaagacaccattaaaatatgaaacgataagtcaaaaaaaatctgcaaaacacataactgataaaggactgttacctaaaacatacagacagcacttaaaactcaataaatagcccaatttttaaaatggacaaaagatgtcaacagaaatctcgccagagaacatatacagatggtaaataagaacatgaaaacatgctcaactttgtatgtcattagggagttgcaaattaaacagtcccattgcacacctattagaatggtgaaaatccaaaacactggtaacaccaaatgctgttgagattgtggagcaacaggaactctcattcatggctggtgggaatgcatcaacagtacagcaattttggaagacagtttcgtggtttctcacaaaactaaatatactcttaccatatgaaccggcagtcatactccttggttttttgttttgtgttttttttctttttgagatggagtctcaccctgtcacccaggctggagtgcagtggcgtgatctcggctcactgcaacctccacctcccgggttcaagcaattctcctgcctcagcctcccgagtagctgggattataggtgcctgccaccacgcctggctaattgtttgtatttttagtagagccagggtttcaccatgttggccaggctggtctcaaactcctgacctcaggtgattcacctgcctcagcctcccaaagtgctgggattacaggcgtgagccaccatgcccagccatgcatgatttttaacatcctaaatggatcatttacaaaatactgtttcactgagcaatgcagatgtttcaaatgttgacatatttcattaag

SEQ ID NO: 50435 - DNA, 2210 bp, Homo sapiens
aacaaggcaagaaccccaggatacagaaagttctctgtccttgccataaggcagggggtttaattgtgctgactaacacaagctacctatggacggctaaactaaaagagcaccctgtaacaaatgcccactggggcttcagctgtaaacattcactcctagagggccgggtgcagtggctcctgcctgtaatcccagcactttgggaggctggggcaggtggatcacgaggtcaggagttcaaggccagcctgaccaacatggtgaaatcctgtctctactaaaaatacaaaaattagccaggcatggtggcacacgcctgtaatcccagctatttgggaggctgagcaggagaatcgcctgaacctgggaggcgggggttgcaatgatccgagatcgcaccactacactccagcctgggcaacagagtgagtctccatctcaaaaaacaaaaacaaaattcaaccctagacactgccgtggggtcagagccccgcagcctgcctgactgcatgctccacctagagttttgagccagcaggcactgaagaagcaatccacaccctcatcgcgtgccctgcgaggggaacaagggaacttttcctgtctcacttccagcaggggaagaacatacaaccattttgaaatacataacagcattctgttcatatcaaggcctccactcaagacaaactacttaattagagcctaactgacctggagaaagggaaatacccattacctgcccctctagcctttctcttggggtaaaggaactacccaactcagccccctctagccatcatatcccatataagtggaggatagagaagactgagaagcagttgcaaagttcgcagcccaggagcacaggctaagaattaatcgtaggtatacagaacatttccacttaccatacatcttaccaccacatcactaaaggcctgtgtaccgaagttccttttactcaatacatcatgtctggctttcaaaaaaaaaaaaaaaattacaaggcattttaaaaagtaaaaaacattgcttgaagagaaatagcaagcatcagtaccagacagatatgtcatgggtgttgaaattatcacactggaaatttaaaataactccgatttgattaacatactaagggctctaaggaaaaaagtagacaatatgcaaaaatacatgtgtaatgtaagcagagatgcagaaagaatcaaaaacaaatgctaaagatctaaaacactacaacagcaatgaagaatgactttgatagactctgtacactggacacagctgaggaaaagaatctctgaacttgaggatatgtcaataaaaactctcaaaactaaaaatcaaagagaaatgactaaaaaaaaaaaaagaacaacaacaacaaccggccaggcgcggtggctcacgcctgtaatcccaccactttgggaggttgtggcaggtggatcacgaggtcaggagttcaagaccagcctggccaagatggtaaaacctcgtctctactaaaaatacacaaattagctgggtgtggtggcaggcgcctgtaatcccagctactcaggaggctgaggcagagaatcgcttgaacctgggaggcagaggttgcagtgaactgagatcgtgccactgtactccagcctgggcaacagagtgagaccccatctcaaaaaaaaaaaaaaaaagaacagaatattgaagaaccgtgcaaccataaaaggtgtaacatgcatgtaactggaataacagaggagaaaaaatggaaaagtagtatttgaagcaataatgatggagaattttccccaaattaatgtcagacaccaaactacaaattcaggaagctaagagaacaccaaacaatataaatgccaaaacaaacaaacaaaactacacctaggcatatcctactcagcctgcagaaaatcaaagatacaggaaaaaatcttcaaagaaaccgcccagtggagaaaaaaacaccttaccatagaggagtaaagataattatatctgacatctcagaaaacatgcaagcaagaagactgaaatacttaagagtttttagagagagaggaaaaaaaaaaacctagaattctgtacctgcaaaatcatccttcaaaactaaaggagaaatactctttctcagacaaaaacaaattgaaggaatttgttgtaagtagatctagcttgtcagaaacgtttttcaa

SEQ ID NO: 50436 - DNA, 1083 bp, Homo sapiens
cagcacccagactgttttgttttttttttttttttggagacagagtcttgctcagttgcccaggctggagtgcagtggtgcaatcttggctcactgcaacttccacctcctgtgttcaagtgattttcttgcgtcgtggcgcatgcctgtaatcccagctactcgggacactgaagcaggagaatcgcttgaacccaggaggcagaggttgcagtgagccgagattgcaccactgcactccagcctgggcgacggagcaagattctgtctcaaaaaaaaaaaaaaaacaaaaaaaattagctgggtgtggtgatgggcacctgtaatcccagctacttgggaggctgaggcagaagagtcacttgaacccgggaggcagaggttgcagtgagccgagatcatgccactgcactccagcctgggcaacagagcaagactcggtctcaaaaaataaatatataaataaaataagcaagtatgagagctaatctcaaataagagtcagatatcactgtacattcatgtttactttaatggacacatagctacatacatgtgtatgtaaaaataattaaatagatccaaacattactatgcatacatatattttctagctttctgtttaggaggtacagaatcagtgctacctcagtaactaaaagggcactcagtgctcagaccatggtttctaaatgtatttttcaataaaaagtacccgggctccttattaaaatggctaaaagtaaggctggtgcagggagaatacaagataagcctatactaccttgtaccagaaagtaagcaatagctccaaaaaaaagatgtgggattatgtataattaacaaattaataattattcacgaatccagaatgatagaaacagatgaccaaataaataagggagagaaaaaaaatcttccttagagaaaatttcccaaaaataaatacatatatacaggtagatacccctccagatatggaggttaattctgcttcccttaaatgtggactaaatttagtaactcacttccaaagcatagaggatggaaacagaaaaacagtaactttacagtggagaaacc

SEQ ID NO: 50437 - DNA, 1091 bp, Homo sapiens
accaaagaaataggttgaaaatatttattaatatgaaacaaaatagacatcagaacaggaaagattatcaaaggataaagagaaacctcatgaaaagacagttatttccccaagaacacataataatcttataggtatacgcacctaatcaaaggttttcaaaatgaataagacaataaatgaggtatgaaaaaacaagtaggcatatctaaaattagtttgagatttgaacactgctaagaaattaataaaacaagtaaaaaatcacaaatgatatggaaggcctgaacattactatcaaacaacttcatataatgatagaacactttaagcaacaacagaatacatattcttctcaattatatgtagcattcacaaagacagatcatgttttggcttattaaataaacctcaattaattatttaaacatagaaaaaaatacaaggtgcatcctgagatcatacaaattagaaatgaaaaaaaaaaatctggaaaattccctcaaacaattggatatgaaacaagaaactttcaaataacacataggtaacaaacaaagtctcatgagaaattaaaacatggattgaactaaagaacaatataaatacaatatatcaaaacatataggatgcagacaaagcagtgttaacagggaagtttatagcattcaatatatacattaaaaaataatatctaaagtcagtaaccaaagtttgtctcaaaggaaccagagaaagaagagcaaagtaaatataaagcaagatgaagaaagggaataataaacattgagagcaggaatccaaaacaaaaaacgaaaaaacagaaacatacaaaagaaagaaatcaataaaaccaaaagctgaggctgggcacggtggctcatgcctgtaatcccagcactttgggaggccaaggcaggtggatcacctgaggtcaggagttcgagaccagcctggccaacatggcgaaaccccatctctactaaaaatacaaaaattagccgggtgtggtggcgggcgcctgtaatcccagctactccggaggctgaggcagaagaatcgcttgaacccaggaggtggaggttgcagtg

SEQ ID NO: 50438 - DNA, 1032 bp, Homo sapiens
gatgggcaccagtaatcccagctactcgggaggctgaagcaggagaattgcttgaacccgggaggtgggatttgcagtgagtcaagatcgtgccactgtactccagcctgggtaacagagcaagaatccatctcagaagaaaaaaaaaaaaaaaaaagatgcgttattatagctaagatggtaattctcccaaaactaatctatatagattcattacattccctatcaaaataacagcaggcttttttcagaaattaacaagtttattctaaaattcacataaaaatgcaaaagaccctgaacagacaaaagtacagatttggacaacttctattgccagatttaaaaattatgcaaaagatttaaatacacatttcaccaaagaagaatggctaataagaacatgaaatatttcctactccattagtcattaaggaaatgcaataaaaccacaatgagataattttactttcacaaaaatggttttaataaaagacagtaataaatgtagacaaatatgtagaaaatcactaaccctcatatattgctgataggaatgtaatgtagtacagtcactttggaaaagagtttgccagattcttaaaaagtcaaattaccatattatccaaaaaatcctacataagagaaatgaaagcacgtccgcttaaatatttccacatgaatgtcaacagacgcataattgataattgccaaaacacagaaactacttaaattcccatcaagtgtttaatggagaaagaaaatgagacatattgacacaattgaatattatttacaaataaactaaatgaaaggctgatacatataataatatagacaaacctcaaaataattaacccatgtaaaagaactgagacataaaatactatatgttatatgattctaattgtatggaaggtccagaaagggcaaatcaacatagatgaaagtagattagtatttgcctgggggtgaggatgggaacaaaggttaactgtaaagtggtatgaaaaatgttactggggtggtaaa

SEQ ID NO: 50439 - DNA, 1057 bp, Homo sapiens
tcaggctggtctcaaactcctgacctcaggtgatccgcccgcctcggcctcccaaagtgatgggattacaggcgtgaaccaccacgccccaccaaaaaaagttcttcatttacagaaaagatcatgaagcagtggaagggaatataaagcagaccaaaattccccagaggcccgtctcctatctcgcctaagaagcaaaaaccttagagcaatttgcagggacaccctggagtggaagcaacaggggctgggtaaggaggtaaggaacacataaagctttagccataggggaggaatgggaataaatactaggcattgactggaaaagaaagacttatgacagccacacccacaagacccagattcacagtgcctacttaagactgagtttaaattagaacattagagaacatgcctctttttcgccccaaccacagactaaacatcaaataaaattaaagtaatgcacaggggaaagctgaaaaccacaggccttctctagagaagagtgaaaaggtgaaaacccacgccaaacaaggacacaaaaacaaggtatcattatagggtttgaagtttctgatacacagagagtaaccatggtaacaacaaaacttcaatcccagaccaactcctgactaatttcacaaaaacctccacgctaatagcctagatgaaggaaaggtgtgcttatcgcaaagaaaatacatatatatacctcagtatctactactttatatgtttgactctcaacattataatgtatacaaaaacaaagaaaaaaataccatctgaaaagaatgcaatcttgaaaaccagacttaaatatgagatgccaaaactaacagaaaatgaaaagtaactgtaataccttgtgtccttcttactcccatttgttagttctaggtttctggagatgctctaaaaacgtctatgtagacaatcttataatctacaaataaagatttattttttcccttccagtctatatttccttttcttgtattaggagtggtgagagaggacatctttgcattgttcccgatctgagcagtatgtc

SEQ ID NO: 50440 - DNA, 1035 bp, Homo sapiens
tgctcttctagttcaatacttacatggattcaatgaatagcaccagcccactgtcacatttcttctattccagtgttatttttgtttacttcttggttaactataattgactgttaaataccttgatcaagaagggtttatagatgttaatcccaatagttattttatatttgataacatctgccagtctccttaatatttgcaggacaacttgtctggttataaaaaaaattgtgatgtgctccagtcgtcatggtgaacttaagtgctatagaaaacctcacccaaagcaacagaaagtagaaatgctgaataaaacaaaacaaaacaataaaaatacataagaaataccaaaaggatgagaagaaattcctcaggtaccagaaacagggcagaactcaaagccactgttgtaaagtctgagtaacaaatgtggcctcaaagcatgaagaggtgcttaaagcaggagctccctgatgaggccaaagcactacctatccaaaaaagaaagtgaaaattcacagttcccacaagcaatatataaaagtaacctttccccatcactgccaacagtagttgtatccagttaattttatcccaataaagtagatgagaaaggatcttgtactaacactacaaatttgcatttacttcagtatcatttttatgtcttttattgattggataagcactgccattgaattaactattcatttattttacccattaatctacgatttttcttactaattccttgaaatggcataaatagcaagcctttatctttttttggaacagggttttactctgtcacccaggctggaaatggcgtgatctcagctcacagcaacctccacctcctgggctcaagggatcctcctgcctcagcctcctgagtagctgggactacagacgcacactaccatgcccagctaatttttgtatttttggtcgagattgggtttcgccatgttacccaccaggctagtctcaaactcctaagctcaagtgattgttgtctcagcctcctgtgag

SEQ ID NO: 50441 - DNA, 1074 bp, Homo sapiens
aactgcgtcaactaatgtgcaaaataaccagctagcatcataatgagaggatcaaattcacacacaataataaccttaaatataaacaggctaaataccccaattaaaagacacagactggcaaattggataaacagtcaagacccatcggtgtgctgtattcaggagacccatctcatgcaaagatgcacataggctcaaaataaagggatggaggaatatttaccaagcaaatggaaagcaaaaaaaaaaaaaaaaggcaggggttgcaatcccagtccctgataaaaaagactttaagccaacaaagatcaaaaaagacaaaaaagggcattacataatggtaaagggatcaatgcagcaggaagaggtaactcctaaatatatatgcactcaatacaggagcacccagattcataaagcaaattcctagagacctacaaagagacttagattcccacacaatagtgagagactttcacaccccactgtcaatattagacagatcaacgagacagaaaattaacaagaatattcaggacttgaactcagctctggaccaagcagaactgatagacatctacagaaccctcaaccaaaaatcaacagaatatacatttttctcagcaccacatggcacttattctaaaattgaccacataactggaagtaaaacactcctcagcaaatacaaaagaatgcaaatcataacagtctctcagaccacagtgcaatcaaattagaactcaggattaagaaactcactcaaaaccacaaaactacatggaaactgaacaaactgctcctgaatgactactgggtgagtaatgaaattaaggcagaaaaataaagatattcttagaaaccaatgagaacaaagacacaacgtaccagaatctctgggacacagctaaagcagtgttaagagggaaatttatagcactaaatgccaacaagagaaagcaggaaagatctaaaattgacaccctaaaattacaatttaaaaaactagagaagcaagagcaaacaaattcaacagctaccagaagacaagaaataactaaaatcagagca

SEQ ID NO: 50442 - DNA, 1188 bp, Homo sapiens
cttggtgagtttgatcactatgtgtcggggatggttgtcttgtatagtatattgcagaggccacctgaatttcttgaatttgaatgttgacctctctagcaaggttgggaaacttttcatggatgatatcctcaaatatgttttcccatttgcttgctctctctccctctcttttagagatgccaaagagtcataggtttggtctctatacataattccatatttcttggagattttgttcattttttaagtttttttttcttatttttgcctgactcagttaatttgaagaaccggtctttgagctctgagagtcctcagcttgatctattctgcagttaattctccccattgtgtcatgaaatttttgtagtaagtttttcagctctatcaatcaggtcagtacggttcatttcataaaatgtctattttgtctttcatgtattgaattattttactgtattccttagattccttagaatgggtttcaactttctccaaattttgatggtctttattgccatccagattctgaattttatgtctgtcatttcagccatttaagcctagttacgtactattgctgggaaactagtgcagtcatttggtggtaaggagacactctggcttttagagtttcaaaggttcttgggctggttcttcctcatctgtgagggcttacgcttctataaatgtgggataacttgggtatagtcagttgatgacatttttatatgttttcagagagtcaaggctttgttcagggtctttatttgtgactgaatttttcaccttgattttgcagggcggatatattaggaaagaatttttggtgttgaagtttgggctgcgaccttgtagatggtgcttaagtgtgatgggtagtaggtaggctcttgctcagccacacagctcccctgtattccttcacagttgcagccatgcttcttctaagtgctctgagagtgttggctcctatcccacttcattgctggcttcagatctcaccttggcaccatcaggctgcacaccacagccacggggcatgctcaggctttctgtttcctttccatttgggggcagcagtggtggggccttgacaatgacaatggcagaaaaatgttcacttgtttcttgaggtgccaacccagagaaatgcagactcactgctgactggatcaatcagcc

SEQ ID NO: 50443 - DNA, 1051 bp, Homo sapiens
agggaggaggaagggacctggtgtctccaggtccctttccctgggacaacctcccacaacaggacaatgagcctccaccattcttttcttttaagtaaaatctttagaatggcttgtatttctaggtgactaaaaacattctcttttctctctctttttggatgtttgcctaacaagctcctggtggttccaagtggctcctgttgtgaccagtggcctccatttgtggttttcattggtcctgttgtaggtagctgccttgctctccaaggcatcccgatcaacatcatctggatttggatcagcctccactagtgcaacagtggcaggatcacttggcaaggccccaagccctatttctttaatagtttgctaacctcctcagagatcatgggagagttggcaaagaaatgttctggccttttaatttgaatcattaagttctttgtcatcacacacaatggggttaaaccaatagggtaacacatagggtaaggggatcaagagtgacagaaggaagagaagacagaaacatatcgattgtagatcacagtgccactgctgccagtgagatgctgtcatctccccagtgaagtaggcacccctcttgtcatactggaaagtctagccccagatactgcctcaccaattcagtgggtagtcagagtatatcttcctcttgccatctgctaaggcttacactggcccagtatcttcctgacagccccttagcacaggttactccctttaacctctcagtaataagccattcgaatctgggcaaggccttcagaatacagtcaacttaactgtgactagtagttcccattcaggagagtgatagcgatcatggttgcctctcttgctgtactaaggcaggtgattgttggttcttggagagaactccaactttctaggacgcactcaatttagggaggggagttttggcggtacttaataaagacaataagcagtaggatgcagcagcacagacacacatcagcaagccatggagccttctcaaatggtgttagccaggtgagagggccag

SEQ ID NO: 50444 - DNA, 1795 bp, Homo sapiens
aaatcccagtgcttggtatatacccaaaagaaagaaaatcagtatatcaaagagatatctgtgtgcctatgtttgttgcagcagtgtttacaagagctaagatttggaagcaacgtaagtgttcatcaacagatgaatgggtaaagaacgtgtggtacatatacacaatggagtactattcagccataaaaaagaatgagatccagtcatttgcaacaacatggatggaactgtagatcattacattaagtgaaataagccaggcacagaaaaacaaacatttcatgttctcatttacttgtgggatctaaaaatcaaaacaattgaactcatggagataaagagtagaggaatggttatcagaggctgggaagggtagtgggggcatgtgggggcagtggggatgttctatgggtacaagtaataatcagaaagaatgaataagaactactatttgatagcacaacagggtgactatagtcaataataacttaattgtacattttaaaacaacttaaagagtgtgattggattgtttgtaactcaaaggataaatgcttgaggggatggatatttcattcttcattatgtgcttatttcacattgtatgcctgtatcacatctcatgtacccaataaatacatacctctactatgtgcccacaatttttttccaaactattgcatttattataaacaagggtgcagactctagactctcagaaacacaacagatacgaagctgagacagctctggtgaaacaataactgagagacagggaataccgaggtattcatgtctgccatccaggaccccacaccccacctttggtccagatggccccttggcccaggtgtccctgctgccagaacacactggactggggtacaggagttgcatattccatgaggctggtgtcaggggaagcagggactcacagttgccaggttttccctcttctcctggccaatttccctccacaacccaggggtttcagtctcacatcaactatcacattttaaaacagaaaacaggcaaaatgtttggttaaaataaaatgaaaacactgcagggaagagacctgagtgtgctggtggacagagcgccctgttcacctgtgggaagggcagggccagcaagggcaggagagctccctgtgggtagctaggctgtgtgtgtggccctccaggtggtcctagggaggatgtagggacaggaacagtccaggtagacagctatcaggtaagcagggctctgcctgaggtgttctggcatcaggaggctgcctgatccccagtcggcatgacacaggctccaggaagcaatgggacatctgcccaaaggatcaaagcccaacttggtcagatcccaagcttcacctgcatcatgtctctggctctgcaaagggtacccccaactctggggacaaaccatgcccctgagcagcagctggctacgttgccaaaaccaggacacatctgtatcatactcacagaaagctgcaccatcctggtgtgacaggccacacttggtcaccctagggtaagctggaaaagaactccagatgtgccatggagagccccccacctctcaggggccacctcacagggtgctccccaccccattctttgagtttggcttgagattttaggaagcataatttcaggtgaggaagagaagaaagtctggtcccagcccactctggcaaggaacgttccccacctcgtcagcatcaaaggaagccacatatacaggcaggacacacacagcacgcacggggcgtaaggaaccgtgc

SEQ ID NO: 50445 - DNA, 1035 bp, Homo sapiens
aaggaaatttatagcactaaatgcccacatcagaaattgggaaagtgggaaagatctaaaagtgggaaagtgggaaagatctaaaatcagaaagtgggaaagatctaaaatcgacaccgtaacatcacaattaaaagaactagagaagcaagagcaaacaaattcaaaagctatcagaagacaagaaataactaagatcagagcagaaatgaaagacatagagatatgaaaagcctttcaaaaaatcaatgaatccaggagctggttttatgaaaagattaacaaaatagataggctgcttgccagaataataaagaagaaaagagagaataatcaaagagatacaataaaaaatgataaaagggatatcaccactgatcatacagatatataaactaccatcagaggatactataaacacctctatgcaagtaaactagaaaatctagaagaaatggataaatttctggacacgtaatcccttccaagaccaaaccaggaagatgtcaaatctctgaatagaccattaacaagttctgaaatttaggcagtaattattagcctaccaacaaaaaagagcccatgaccagactgattcacagccaaattctaccagaggtacaaagaggagatggtaccattccctctgaaactattccaaacaatagaaaagaaggactcctccttaactcattttatgaggccagcatcatccttataccaaaacctgacagagacacaacaaaaaaagaaaatttcaggccaatatccctgatgaacagcaatgcaaaaatcctcaaaatactggcaaacctaatgcagcagcacatcaaaaagcttatccaccatgatcaagtcagcttcatccctgggatgcaaggatggttcaacatatgcaaatcaataaatgtaatccatcacataaaaagaagcaatgacaaaaaccacatgattatctcaatagatgcagaaaaggccttcgataaattcaacacccctttatgctaaaaactctcaataaactaggtattcatg

SEQ ID NO: 50446 - DNA, 1058 bp, Homo sapiens
aaagatagcaaaaaacagacctgactggagtcaccaactccattccctcccccaccctgtggcagtgcagcatggtacagagagcatctctgggcactgtgggagggagaacacagttgtgaggcattgaattcagtaccagagtagagtagaaaggaaataaaactgaaaatcagtaacaagagagattttggaaactacacaaatgcatggaaattgaataatatgctcccaaattaccagcaggtcaatgaagaaattaagaaggaaattgaaaaacttcttgaaacaaatgataatgaatacccaatatacaaaaacccatgggatacagcaaaagcagtactaagaaggaggtttgtatttataagtgcctatatcaaaaaagaggaaaaacttcaaacatcttataaatcctgtcaaaaattaaaagcaaagttataaaccaaaattacaatattaattacaaaattacaaattacaatattacaataatatttggttatgtatctatatggacatctttacctgagaccttttactgtcagatagctttgtgttactgtcaagtatctttttattttaacttgaaggactttctttgcatttctcatagagcaagtctaatgataatgaattacctcagcttttatttatctgggaatgtcttaatttctacctcatttttatttttaaagtatagtgttgatggttgtagaattctcattagacagattttttcttttaatactttaagaatgtcatcccactgtcttctggactgtaaggtttctgctgagtaatctgctgatattggagaatcccttgaatgtgatgagtcacttttctcttggtgctttcaggattttctcattgtcttttgcttttaacagcttgactataaagtgtctaggtgtatttctggtttatcctacttggagttcattgagcttcttgaatttgtacattcatatctttcctcagatttggtaaactttcagccatatttcttcaaataatctttcctttttctgtatctcttcttcttctggaactca

SEQ ID NO: 50447 - DNA, 1050 bp, Homo sapiens
agagttcagagctgatactggcctgagagctctagcagtgggtggctggagtcccggaccagtgagtcttatcctccgaggtgcagcagaggcaaggcctgcaggctctcgctgttcagccctatgtatttggcacatttcctgagtgcacacgagggagcctgacttcctccattgctggagatgcagccaccaataccaggatgcctggggatccaaggcttctgggactccacgtgtacctgaacagtggtgctgcccagactccatgtagctctgcatatcagtgtaaaggccccagtggcatgggctcatgagggctcatgaaggttgcaaaggtctgtgggaaaagtatggatctccagggactttcactcactcaccatttccctgtgctggaaaaacctcccctggcttgatgctactcccaggtgggcagtcatcttgtctcgctcctctccattctctgtgggttgagttgtttctttgtcttcctggatgtttcagttgaagatctagtatttactcaccactttttcttctctccatgaaagtggtgcacattagttgcttctagttagccatcttggccctgcccccaataatactacttttacaaaaatatgtttcagagctgatcctgctaagttaattatcctggttatcttgtgactcattttgtatcaattatctgttgctgcataacaaagtaccacaaatttagcagcgtaaaacaacacacatacattcattatctcccagctgttgtgactcagcaatgtggggctggcttaggtggatcctctgactagttctcataggctgcaattaaggtgttgcccagggctgagtactcatctggagacttgattaggtcccaaatatgtgagaacatatgatatttgtctttttgtgcctggcttatttaccttaagataaagtcctttagttccatccatgtttcagcaaatgacatgattttattcttttttatggccaattagtatttcattgtgtgtgtgtgtgtgtgtgtgtgtgtgtgtgtgtatt

SEQ ID NO: 50448 - DNA, 1124 bp, Homo sapiens
atagccacatggcaaataaaggaaatgatttttggggagaggaatccaagcaggctgcagagcaagcacttgctagagagatttgcctgactaaaaggaatccaggtgctgatagccaagacaatagaaaaaaggcctcaatggcatttcggagatctttaatgcagcccttcccatcaagggcccagaggcctaggaggactgaatggtttcattggccaggcccagggcaccagtgccctgcaccacccagtggtatgattttgtttttgtttttgttttttgaatatgctttgcattgttttatgtttgattgtcccgtcaattttagagtatgtgccctgtggcaatgagacggatgtatattctgttgttttgggtagaaacttctgtagatgtctattaggtccatttggtcaaatattgagttcaggtcctgaatatctttattaattttctgctttgatgatctgtctaatactgtcagtggggtgttgaagtcttctagtattattgtgtagtcatctaagtctctttgtaggtctctaagaacttgccttatgaatctgggtgctcctgtgttgggggcatatatatttaggatagttagatttcttgttcaattgaatcctttatcagtatacaatgctcttctttttcttttttgatctttattggtgtaaagtctgttttgtctgaaattaggatagcaactcctactttttttctatttgccattttcttggtagatttttctccatccctttattttgtgcctatttgtgtcattgcatgtgagatgggtctcttggtcacagcatgccattggatcatgcttctttattctttatttattcagcttgccactctgtgccttttaattggggcatttagcccattttcattcaatgttagtattaatgtgtgcagatttgttcctttcactatgttgttagctggttattatgcagacttgtttgtgtggtgctttctaatgtcattggtctgtgtacttaagtgtgtttttgttgtggcatggcttctaatggtttttcctttccatatttcacactccttttaggacctcttgaaaggcagatctgttggtaatgaatttccttagc

SEQ ID NO: 50449 - DNA, 1079 bp, Homo sapiens
tcaattgtgtttattttttcaaaaagcctacttttagtttcattacttttttgttttagtatcaatttaatttatttctgctctgatctttatcatgtcttctactaattttgagtttagtttattcttgcttttctagttctttaggtgcattgttaggttttttctttgaaatctcttcactcttttgatgtaggcatttattgctctaaacttcccttttagtactactgcttttgctgtattccatagattttgctatgttgtgtttccattttcatttgtttcaagagaatgctaactttgacatttctttgtttatttacccactggatgaactgtctgttactgagattgggctgttaatgtctcctattattattttgttgtatttctccctttaaatttattgtttgttttatataattgggtgctccagtgttagctgtatatatatttacaattcatatgtcctcttgttgaattgatttatttatcatttaaccttcgtttctatttatagtttttgacttgaagtctcttttatctaagtacagctactcatgttcctttttggtttccatatgcatggaatatctgtttccatcgcttcattttcagtctttatgtgtctttttaggtgaagtgagtttcctataagcagcatatcattgagtcttgtttctctagctgtttgtccactctgtcttttattggagaatttagtccatttacattcaaagttatttttgatatgtaaagtcctactaataccagcttgttccttgttttccggttgtattgtaactctctctttcttactgtttccctttcaggaaaagttattttacctgatggtatgttttaattttttcctttttattttttagcgtatctatagcaagtttctgctttgtggttaccatagtacttaaaaaatgtcttatggatgtagcaagttattttaaacagatgagaacttaattttaattacagacaaaagaatagaaagaagcaaacaaaggaaaactaaaaacaactctgtactctaacttcatccttatcacattttggctttt

SEQ ID NO: 50450 - DNA, 1249 bp, Homo sapiens
attattgattttttttttgccattgagttgtaggagttacttatgttataagcatattaaccccttattagatataaggtttgaaaatatcctcttctattctgtcagtagtcttttcatttttttgaatgtttcccttgctgtgcagaatcttttagagtttgatgtattctcatttatttgtgttcttgttgcttgtgcttttggtgtcatatccaaaaaattattgccaaaattaatgccatgaaggttccccccatgtttgattccagtagtttcatagttttaagtcttatgtttaagcctttaatacattccaagttaatttttgtgaggagtgtaaaatagggatcccgttttattttatttttgcatgtgtatatccagctgtccttaaaccatttattgaagagactgtccttttctaattgtgtattcctggaaacttaaacttaactcagatattagttgatatggttagtctatttctgggctttcagttctgttgcattggtgtaggtatctgtttttatgcctgtgctacattgtttggatttctatagctttgcaaaatagtttaaaatcagtaagtgcaatgcctccacctttgctgttctttctcaatatgcattagctatttgggatctttataattccatatacattttaggattgttttttctatttctgtaaaaaatgtcactcagattttgatagagattgcatttaatctgcaggttgctttgggtagtatggacattttaacaatattaatttttctgatccacgatcatgggatatgtttccatttatttgtgacttcttccatttctttcattaatgaatgttttatgcttttcattatgcaaattgtttgccttcttgattaaatttattcctagccttttaatgttgattttgatgctattttaagtgggattgttttatttatttttctgatagtttgttgttagtgtataggcaattctaatttttgaatgttgattttgtatcctgtatctgtattaaatttgttgttaattctgaaagtttttggtggagtcttatagtgtttttatatataagacctgacatcttcaaacagagcaattttactttcctttcctatttggctatattttttctaattgatacataatagttgtagtatttgagaggtacatgtgatattttgatacatgcaaaagtgtgtaatgattaaatcagggtgattggtatatccatggcc

SEQ ID NO: 50451 - DNA, 1026 bp, Homo sapiens
ttgagtttagtgcttttctgagtttctcgtccctttaggtgttacattaggttgttaatttgagatctttctatcttcttgatgtagacagtaagcactatacttttgccacatccttggggttttggtgtgttgtgtctctattatcatttgtttcaaagatattttttgatttctgccttaattttgttatttatcctacagtcattcaggagcaagttatttagttttcatgtatctgtatggttttgacagttcccgtcagtattgatttatatttttattccactgtgatctgagaagatgcttgctatgattttgatatttttaaatttgctgagacttgccttttgactgcatatgtggtcaatcttagagtatgttacatgtggaaatgagaagaatgtatattctctggttgttgggtggaatattctgtaaatgtatattaggcccaactggtcaagtgtcaaatttaagtccagaatttgttagttttctgtcttgatgatctctgtaatgctttcagtggggtatggaagtcccccatagttactgtgtggctgtctaagtcttttcctaatattagtagtgattgttttataaatctgggtgctccaatgttgggcgcgtatatatttaggatagttatgttgggaacaggccccccaaaatctggccataaactggccccaaaactggccataaacaaaatctctgcagcactgtgacatgttcatgatggccgtgatgcccacgctggaaggttgtgggtttaccggaatgagggtgagaaacacctggcccacccagggtggaaaaccgcttaaaggtgttcttaaaccacaaacaatagcatgagcgatctgtgctttaaggacatgctcctgctgcaggtaactagccagacccatccctttattttggctcatcccattgtttcccataagaaatacttttagttaatctataatctatagaaacaatgcttatcactggcttactgttaataaatacatgggtaaa

SEQ ID NO: 50452 - DNA, 1031 bp, Homo sapiens
gagagattatttgtcttcatctcttcctatttggatgccttttctttctttctgcttccctttcttcttgatttttcatcagggatattgttctatcattttctttttgtgtatgtctttgtcagattttcgtatcagaatgatattggtttcacagaatgagttaggaaggaatccctgctcaaatttttaaaacagtttcagtaggattagtaccagctcttctttgtatgtggtagaattcagctgtgaaagcatctggtccagagattttttttttttttttttttgatggtaggttttttattactgattcaattttgtaagtaactgttagtctgttcaggaattctatttcttcctgcttcaatcttgggaggttttgtctttctaggaattttggcatttcccttagattttctagtttgcgtgtatagaaatattcacagtagtctctgaggcttttctgtatttctgcaggattagttgtaatgtcacctttgtcatttctgattatacttacttgcatcttttctcttattttatttcacttttgagacggagtctcactctgttgcccagcctggagtgcagtggcgcgatctcggctcactgcaacctccacctcctgggttcaagtgattctcctgcctcagcctccggagtagctaggattacaggcccatgctaccatgcccagctaatttttgtatttttagtagagacagggttttaccatgttggccagggtggtctcgaactcctgacctcaagtgatccgccagcctcgacctcccaaagtgttgggattacaggcgtgagccaccatgccagaacttctctctcttttttgaaaatctaactagggtgggccaggcacagtggctcacgccttaatcccagcactttgggaggcagaggctggtggatcacccgaggtcaggagttcgagaccagcctggccaacatggcgaaacccgtctctactaaaaaatacaaaaattagctgggtgtggtggcaggcgcttgta

SEQ ID NO: 50453 - DNA, 1049 bp, Homo sapiens
tccagataataactttctaatgctttaagagaactagattgtttttaactgcatggaaattagaagagatcttaaaaaaattcacaaacgtaactagtgtatgtacaaataaccctaattttagggatatgcacacaaaaatgacattctgatattaaaaataacagttttactgtccctcctgagtggttacacacctggaaggatgccatgtgctttcactggaagtaccacacttgcatttctgtgttgtgaggtcagtagcagaaacccttagttagagctggcaatttagctcccttttctcctgcttggaagaggcatcaagttactaccctgtagagatacttcatttttctatttggttttttaaaaatcacctgttctgattgatctttaagaacgaacgacataaacagccattaaattttttttcaaattcataaaactattcatacttttttgaaacaggagttaatgccagtaatccatcagaagtatctactgtttagaaggaaatggggcagcaccaaatgggtctaattcgactggttgggactgttgggactgctgtagagtgatgctttgcaccacaagttctgtaaagggcatggcaccaaaatcatccattgtcaatacatctgcactatggaatgacccatgtagtgaattttgccttggctgcttaggcaggacagtattgtgatcagcacggatgtcattcaggccctgatgtagagggtgccatgacaggtctggaggatggaagggcttggcaccaaaggggtccaacagactctcctcgagttgtaagacgttccccctatcgttcccatcagtcactgcggcaccaatgttctccttggagtctgagatggttacaaattcattgctggtttgagagactcggcgacccacttttttgtgcctgcgagccctctctggagtgcggtaggtaggcttcaaagtcttctttttgctagttggcgtgccatgatgccgcttcccattacttttggacatatcctgctttgtgcgcctttggcgag

SEQ ID NO: 50454 - DNA, 1042 bp, Homo sapiens
tctgacaggccccagtgtgtaatgttccctccctgtgtccatgtgttctcattgagagttataactacatcctaaagaagcacaggggacacccaaatattattagggaaaaaaacccatatatatatatatggtctttgctatatatatacatagatatttatatttgcttagtggtatatatatataacctttcttacattcttaaaccagaatttgaacatcccataatagagccaaacttattattgagtgctgtatgccaggtactgtgttaagcactttcacataccttgagagctttattctcataattctcataatgcaatgacctgagcatcagctgtgtggagtgacctacactttgaccatgattctgggggatgatgaatgaaaatgcaaagtataaatatatactttttaggaaaatgcctctatttcaacacaaaggaatctctccacttctatccctttgaacccccaatggaatcctgtgtcttttctctgagctacaatcttgaaagaagaaagttactgtgctgtgttataacataagaatgtaaatattttaagctgtcagagttgtttcctcagaatttatccaacattataagccaaagggtctacatcagtgtctgaaccatttaaaattattcagtgtattgagaagcgagtaaaacgctaggtatttcatgtttacatctgaaggagaccacactagttcatcccctaccccttttctaaatgatgaaactcatgagatctagcaaagaccaaggactaaaataagaagcatattgtgcacacctcaaaagattttcatttaaaaagttattctgtttgatacaaacctactgtagttcatgaatttactatgtgtaatcatcaagtcttcacttttaaaagaaagtattccttgaatctattttgtaaagtttttaaacatctacttgagcatttgcattagcagtattaatcaacctgagaaatgaaaaaaaaaagttgcaaatatatttgcctttggcatgaggacaagtaattg

SEQ ID NO: 50455 - DNA, 1028 bp, Homo sapiens
tagacccaagcttgaggccacccctgacagtccagcagaatcaggatccaggcctgccccaggaatctcagtaaccataacggtatgaatctagaaatcaataacaagaaaaattggagaattcacaaatatgtagaaattaaacaacatgctcctgaacaaagagtcaagaagaaatgaaaaggaattgaaaaatatcttgggacaacagaaagcggaaacaacatgccaaatgtatgggatgcagcaaaagcagttctaagaggggactttatagcaataaatgcctacatcaaaaaagaaaaaagacttaaaaatccaaactaacattatacctcaaggaactctaaaagaccagcctaaactgaaagctggcagaaagggaataaaggtcagaacaggaataaaaatgaatagagactagaaaaacaacagaaaggataaacagaactaagagttagtattttgaaaagataagcaaaattgacaaacttttagcttgactaagaaaaagagagaagactgaaatgaataaaatcataaatgaaagagaagaccttacaactgatactacagaaatataaagtcataagaaactatgagcaattatattcccccaaaaattgataacctagaaaaatggatacattcctaaaaacatacagcctaccgagactgaatcatgaagaaacagaaaatctgtatagaccaataacaagtatattaaatgattaatccaaaactcccaacatagaaaagcccaggacctgatgacctcactgctgaattataccaaacatttaaggaagaactaataccaatccttctcaaaatattccacaaaattgaggaggagggaatacattcaaactcattttgaggccagcgttacttggataccaaagccagacaaaacactacaaggaaagaaaacagcagaccagtattcccgatgaacatagatgcaaaatcctcaacaaaatgctagcaaactcaattcaacaacgcattaatgggtcattcaccgt

SEQ ID NO: 50456 - DNA, 1050 bp, Homo sapiens
aggcatcatacttcccaatttaaatttatattacaaaacgagagtaatcaaaacaatacagtattggcataagagatacacaggacagtgaaatagccagaaataaatccaaacatgtatggttaatgaatttttgacaagagcaccaaaaagacaaaatgagaaaagggtagtctcttcaataaataggtgctggaatttccacatgcaaaagaatgaaattagactcttacattacaccatacacaaaaatcaatccaaaatggataaaagatctgaatgtaagacctgaagccataaatctagaagaaaacataagggaaaagctccttgacactggctttggcaatgtttccttggatatcacaccaaaacctcaggctacaaaagcaacaataaataaatgaaattatatcaatctaaaaaacttctacacagaacgaaaacaatcaacaaaatgaaaaggcaatgtacagataaggagaaaatatttgcaaaccatatatcaggcaaggttttaatattcaggatttaggaagaactcatacaactcaatagcaagacaacatataacctgattaaaaaaaagtggggaaaggacttgaatagacatttcttcaaagatgacagaaaatgaccaacaggtatatgaaatggtgctcaatatcaccagtcatcaggaaaatgcaaatcaaaactactttgagataccacctcatacatgttaggatagctattatcaaaaagacaagagctaacaagtgttggtgagggtgtggagaagagggagcacttgtacactgttagtgggaatgtattatatattggtgcagccattatggaagacagtatggaggttcctaagtaaattaaaaatagaactaccatatgacccagcaatccctcttctgggtatatccccaaagggaatgagattatctctgcactcccaagtttattgcagcacaattcacaatagtcaagatacagacacaacctaggtgttcatcaatgggcaaatggataaagaaactgtgatatagagagatc

SEQ ID NO: 50457 - DNA, 1042 bp, Homo sapiens
aataaagctgttataaacattcatttgcaggtttttgtgttatcatgaatttccactcatttggttaaatacctaggaatataattgctagatagtatagcaattctgtttagttttgtaggaaactgcaaactgtcttccaaagtggctgtatcattttgcatttccactaacagtgactgggagttccttatgctaaacatcctctacagtatttggtgtggtcagtgttatagattttggctattctttcaggtgcatagtggcatcttattgttgttttaatttgcaattccctgatgatgtatgaggggacttcaaaaatttatggaaaaattgaactaaaaggtaaaagtaaaaaatataaacttcttaacataagctccatcgagttcaagatactttgtaagcaatgataccagccatttggttcatccctaaggaactgagggttctgagaatttaatcaggtcaatgaagtcttttttacgttatgaactgaagaaaaatgtgtgcaatttaaaggtttgttaagactttgaaacaaaaagaagtcagaaggagccaaatcaggactgtaaggtggatgaatgcctaatgatttcccatcaaagctctcacaaaattgcccttgtttgatgagaggaataagcagaagcattgtgatggggaaggactctctaatgaagctttcccaggtgtttttctgctaaagctttggctttctcaaaacactttcataataagcagatgttgttgttctttggccctccagaaaaccaactagaaaaattcctttaacattccaaaagactattgccatgagctttgttcttgaccagtccagttttgctttgactagaccgcttccacttcttggtagccattgctttgattgtgctttatctttaggatcatactggtaaagccatgttttgtctcctgttaaaattcttcaagaaattgctacaggatcttgatcctacttgttaaaatttccattgaaagctcagctcttgtctgcagctgatctgggcacaac

SEQ ID NO: 50458 - DNA, 1082 bp, Homo sapiens
tcaggtgatccgcctgcctcagcctcccaacgtgctgggattacaggcgtgagccaccatggtcagccttcattcattttcatggagaaaaatatttcattgtatgagtataccacattttgtttatccatttatccattgattggttgtttctacttttttttagctattatgaataatattgctgtgaacatttgtgtacaaggttttagtggacacaagtttttatttttcttgggtatatatctaggagtggaattgctgggtcatattgtaattctgttcaactttttgaagaacttcccaactgttctccatggtggctgtgccattgtatattcctaccagcagtgtatgaagttacaaatttctccacatcctgagaacccctttattattttctgtttttctttttgattatagccatcctagtaggtgtaaagtggtatctcattgtgattttattttgcatttccctaaatgattaatgatattgagcatcttttcatgtgcttcttggccactagtatatcttctttgaagaaatgtctattcaagtctttggcagtttctaaatgagttattgtctttttgttgttaggttgtaagagttataatctggataacagatccttattagatatgtaatttgcacatattttctcccattttgtgggttgtcttttgtcttttttattttttattgcttgtgttttggtatcattattgataattcattgttaaattaaaggtcatgaagagttactcttactttttcttctataatttttagttttagctcttgtattcatgtctgtaatcaattgaagttaatttttaatatagtatgtgttaggagtccagcttcattgttttgcatgtatctatgcaattgacccaaagtgatttgttgaaaaatattattttctgatggtatggtcctgacacccttgtagaaattcaattgaagatatatgtatgagtttacttctgcagtctcaattctattctattggtctaaatgtttatctttatgccagtaccagcctgttttggttattttagttttgtaataaaataga

SEQ ID NO: 50459 - DNA, 1078 bp, Homo sapiens
gacatggacttcagagagttcttggtagaagactcaaagagccacctgtcatgagacatcccacttccttccccaggttacttccaagactgagcagccaggtttttggtagatgagaacaaatgtttcttcctgaagccctggggcttcaggtaggaagaaggactgctatacttgttctcacccttggcttctggctgctccagttaaacatggttcccattgatacagacattagagtgggaaaggacttcgttcatagaccgaagaccctcaaaggaaagtccttccattttgggaagggtgacattgatttcgtttagctgcttaagatatgtacttgctgttgtcttgtgagacatgacatctgaagctgaagaggagtccctctcattgttgtcattgtcccaccgggactgaaagtctcccagttgaggcagcattttagctttgatgtctacagggcaatcatggatcaggaaatttctgcaaattagacttggaaaacaaggtcttgatccttcttgtctttggacgaagactaatcatcacttttgactgaaggtgtagtgctggagactatgttggaggcagcacctgatgcactatccatattcttccccttgatcttgtcttaaagttttccaaatggattccgaggcttgtctttgatgaaaaggtcaaacatactggcagtcatgttgtttctcataagctggatgtcaacctcaatttctcctctttatccttctctcctggtttggatttcaaggtataccaccgcatcttcctgctcccctagtctgggtgcaggtcctgcaggtacacctcggcgaagcccaagtacagtagcagcagcacctcaaaggtggcctcctcctctgacactgaggtggcatacttctccttacccacctgaatcaccgagtacatgttgcttgtaccgtcaggctcttggttcttggcccctggccctatgcctgcaacactgtcacctgcacgtggattgggaaccacatagcccccggacctgctaaggccattaaggacaggatggtgatgcctcggctgactgacg

SEQ ID NO: 50460 - DNA, 2386 bp, Homo sapiens
agtggcgaagaggggataacctcttaggaagttataaaaatttagtcatgcattgcttagcaatggggatatgttctgagaagtgtattgttaggcgattttgtcatgtgaacttcatagagtatattaacacaaacctctctaaatggtatagcctattacacacctaggctacaaacctgtacagcatatgactgtactgaatactgtaggcaattataacagaatggtaagtatttgtgtacctaaacatatataaacatagaaaagctacagtaaaaatatgatatgattttgtggtgggacaactgtgggacaactgtcatatatgaggttcatcattgtcctaaacattgttaggcagcacatgactgtatagacataatagaacttataggaaaagttatagaaaaacttatagaaaaagaccttgatgaaaaatactgtcatattctttggatgaatgttgcaattaactccttttagatcataacttgactgtacagattgtgcaagattgttttctgggaacagctgtatatgaaatgttgattctcagggagacacctagacacctgaattgcagcagacattttatggtgttgctaagttgctggtccttctcatcagtagcaggcctactctcactgtcacatatctcccacggtttttttttttttttttttttttttttttgtaattaaccaaaagtgaaggcttttatatcaaagactcaattgaggaagcagtggccttagtcattattggcataattgctttagtttgcttatggatcttaaaacgtttatgactatatctgcaagtaaaaaaaaaattcaataattaaaaacctaaacatatcgagtgtttattttctctttttgcaaaggtatattctaaactcaatgttcttcgggaaattttccaattaaggctctgagtattgatatttgggatttagagaatggctttctatgaccagaatggttagtgatgagattttatgtaagtaggactgggtttttcagggggccttgtgtaacttgccatcaagagttgggaaaggaggccctgagcagtgcagcagagctatgtaaagtgagagtttgggtcttgggaccaggtagcctgggctcaaatctgctctcacacttagcaatgtggtcttgagcatgattcttcacttccccaggactctgttttctcttatgtaaaataggaataatatttattttcaatgatgggggtaaaaagtacttaaagggactaattatgtaaattgcttagaacaggcctggaatatacagctaaatgctgtgtcaactgttgttgctgataatggtgttgactatgacaagtattaaaagaagagatttgactagaggtacttatattttgaatgatcagtgacgatgttagggttgagaaagaaaaacagtaactgacttgaaggttttcaatggtatgtaagtgtgaggtcatttcaccttttatttctctgccaggtagagtgggaaaccaaattaatcactccatgatctagtgactaatctattgcctttgcttttagttccaaatagaaagctgttgaaaagttgttgtattacacctgcataaaggttatcctgaaaacagaaaaatgcattagactttgtcaaaactggatttgaaacctaattcaactgcttgctggctgtgtgacttaaacttgttgaacttcagtttcttcctctaatataactattaattttcagagtttccatgaagatatttgtaaagtgtttgtcataggcactctatacattaattacagctattattgttagatcttgggacacccagcacgtgacaaaaacaacagcagaccctggtgcctgggaggacttcatggatccagcagcaacctggagtggtgctcctctgaagaaatcctactcggatggatataatacaacctgctaagtgtcctagcacttagcaggttgtattatcattgtccgtgtctatggctctcgtctaccagactttaaattccttaagggcaaggacagtgccttactcatctttgtattcacagtgcctaatccggtgcacattgtaggcctcattaaatgtttgttgaatgaaaaaatgaatcatcaacagacattaattgggcgcctgctctgtgatctccatgggctcagcttgtccccgccagttgccaacaacgtccaagctctcttcagaatgcttactcctgaagcttattcctgtcttctaattcttttgttgaggacttttctgtgtagtgcaatgatagcaaatacacttcatctcaagtaccatctccaattgattgataatgcctgccctgattatgttttataacaagattctgaaacca

SEQ ID NO: 50461 - DNA, 2521 bp, Homo sapiens
aggttgaatggttcctgaggtactttaacttgccatattatgaaagcacagcccatgatttgtcatactgcaaagattgacttaactactttaacaagaaacgtattccagaattttatcgtggtgtgcagtcattgcttctatcttgctgtcctttattaaatagtattaatttacaccatagtcaccaagaagactatattttggtaggctttggggtttatctgcctgcaagaaaatttattttccactgctttatactggtaattagatattattgtactttcaaatctttcactgaaaaatatctagttaggtcagcatgccctatgtattgtagatgcggttctgctatggtttttcaccaccggtggttgaatgtagggtggtacctttatctagttttgagtttctttagtgactcatttttgcagtcttacatctgctactcctctattagattattatttagcccaaaagtattatgggatcatttgacttcatggcgtcactggaaaacttaaatgttctgttggatgaaagtgtttcacttatagtactaatcgccatgtggtattcctttactttccctaacatttgcttgtttgtttttattgtgtatctacatgtattgagtagttaggtgcttgtacaaatcttctaccttcactcatggtcaatcaactgtaaaccttacctggggccaacttgccaaaggttttacagttaacaaatggtatttgaaatttgtagtaagagtaaatgctttggagtaggaatgcctatctcagcaatcctgctaagcactatactctggataaggtaattaccttcttttgtagaaaagaactcgtgatataattcatataatataaagttcaccattttaaagtttagtgacttttagtatattcatagagttgtgcgaccattgccactattatagtttacaacactttcatcaccacctcattagcacttattccctatttcccttttgccaaccctgacaactactaatttagctttttgtccctatggatttgtctattctgggcagtcatataaatcatgcaatttcttacccttgttactggcttcttttaactaccatgtttttttgagattcatctagattatggtatatattactgttctttattgatgaataatatttcactgtatggatatatttcattttgtttatccatcatttgacggatgtttgcatttacagatgttgtcttttgtcagtaatggtgctaaaaacattcatgtacaacattttatgtgggcatgttttcatttttcttgagtatacattaaggagtataattgctttgtcatggcatgtctaggtttaatgttgtgggtaattaacaaattttaataaggtgcctgcaccattttacattttcatctgcaatatgaggaattacatttattcatattctcacttgttattttctgccttttaaaattatggccacctagtggatatgaaatatcttattgtgctgttgacttgtatttctgcattgagcaacttttcatgtgcttagtggtaatttgtgtatctttggagaaatgtctgttctaatcctttgctcattagaattgggttatatgtggttttgttgttatcagagttctttatataatctggataacagactcttattggatacatgatttacaattattttcttccattctttgtattgcctttccacctttttgatgacattgtttatagcacagaagtttttaatattgatgaaatctaatttatctatttttttttgttagttgtgattttagtgtcataacaaagaaaccattacctgacctaagttgtagctcttacatttaggtgtgtgattcatttggaatttacttttgtatatagtttaaggaagaagtccaacttagtccctttgcatatggatatccagttttctcagcaccatttgttgaaaagactacttcatcattgaattgtcttggtacccttgttgaacatcagttgattctaaatataagagtttattttggactctcaattttattttatttatctctatatctatccttatgcctgtactacacagtattgattattgtagctttggagtaaatttcaaaatctggaagtatgagttctccagctttgttctttgctttggccttgattattctgaaggctttgaatttccatatgaattttaggatcagcttgtaaatttctagaaaatgccagaattttgctaaggaaagcatttaatctgtagatcaatttgtggagtattgccatgttagaaatattaatattcccaatccattaacaatagatacctttctattcattttatttttcataatattgaaaatggaattattttcctaactttaattttggattgttcattgctagtgtattaaaatacaattagttttctgttgatcttgtatcctccaatgtttctgaacttattggaaaagcttttctaatagtttcact

SEQ ID NO: 50462 - DNA, 1433 bp, Homo sapiens
aaaggggtgattctttttgctggacagtttgagatttcattacattactctcaacggcagacaatttggaatttatgaattgtttattcttggaattttccatataatgtttttgaaccacgtttgaccccaggtaatagaaactttgtaaaggaaaaccatagataaggggagaatactgtaacgttaggcttctttccccccatttctgttttattttgtttcccttattgtcagaaagtatgttcagtatggcctccttgtgtacacaaagtaatttttggtggaaaagaaagtactaccattagtccacagcatgtccttctgaaattatgttggatgcttgttatcatggatttggttctcatagggatattaatacagtaccctagtcagtgtgttagtgagccaaaaatatgtttgaaaatgttcatggatgtttgcgtcttttttttttttttttttggcttgttacaagttctggtttataggttttgacatcctttgcattgttggaagtgtgcccagtgttgctacctaatttgtggaaattctgtagtaccaccttagtccacagtgcgtccttctgaatagttgcatagcttgcataactaatttggtgtgaaattctagagtgaaaactaatatggtaacctaatcactgtgctatgttgaggatttccaagggtgcatgatgtattttacgcatttttctaattacaattcctggcttatagactgcataggtatttaatattgtctagtaaagtgtgttgatgtacaatttcttgtttaattcagtactattattagctacatggttctgctttatcgttgccattaaactaaatatatactgattattttcatcaggcaccagcgttaatgtgtttctcctaagtgagttgacctcatgggaattcatcacatctgtggactatattttagtgttaaaggcttaatgtactactgtttcaaaacttacaagtattggtatttcacatgcttttaaaagtactgttgtactttttttttttttttaagacaaggtctctctgtcacccagactggaacatggtggagcaatcatagctgatggcagctttgaactcctgggctcaagccatcctcccgcctcagcctcctgagtagctgggactacaggtgtgcactaccagcccaactattttattttatcttattattttatctgagacagcatctcggtatgtgacccagggtggtatcaaagtcatgggctcaagtggtcctcccaccttggcctcccaaagtgctggaattaccacacctggcctacatgttgtagttttgttgcagtaagttcagttgacttttgttaaatgtaccccagtaagcacatgccctgtggtaagtcctgttgtgtaataaaaaacatggtatgtatcaatgtg

SEQ ID NO: 50463 - DNA, 1038 bp, Homo sapiens
aagtgtagaggtatatatgctttgatcctttagcctgaatgtttcataaccaaatttgatttcttaaccattgtcatttgcaagtaattttagaactccctcccctgtaatggtagcatgtatttatctagcacatttgtaatcttaaaatttttaatttggtgcttcttcagggacttggtaatgaatcaactggaagttttgtactaaatttgtctacacagcagcgctctttagctggtggcatagagtccaaagttaagaatctgtatctgctcctaattaatagaaatatcattcttgtcctacagacaaaaatagtttttataaggacttttgacaaagtatatacagtataggtgaatttagtcaaaaatatttgccagattctcttggttctcatatggccatttgttcaatcccagtagctccaggataatagtgttcagttttcataggttgtaatatattgggcctttccagatttgttgtggaattctggacagttgatgtctaatcacaagttctgtggtacataatttgtaccatgcagtgttgcattttgctgatatagatggttggaggttcatgtgagtttaggaaatcagttccattagcactacagtttaatggctcagtgctatttgcccagaaatatattgaaattggtagagaccttcaaagttttaaaatgtaattttttattgtacactggtactgtaattctttggttccctgttgtctcattacagttatgcccttttaaagtcctctaaaattaagggccctgtagaagtgatggtcaactctattttccatatgaattattagatttggtgctgtcttgtgaagtaacttgatacgatagatgtgtagtatgaattttgtccacatggttgtgcccttggcagaactgcacgtacctgaaatggttccctaatttttttctagtattactatccaacacttcctctcataatcactagtgtattgtataattgttaagtgtcctttattcatatatttaaattaaaagag

SEQ ID NO: 50464 - DNA, 1062 bp, Homo sapiens
cagttacttgggaggctgaggcaggagaatcacttgaacccgggaggcagaggttgcagtgagccgagatcatgccactgcactccagcctgggcgacacagcgagactctgtcttaaaaaataataaattgtccatctgctcctgttatacatgttgatatatgctgctttgcagttgcattgtcaacatccattcccagattattgctgtcctgaagtaggataaacattttaagtagtgctactctatcttctagcttcactggttactttttaaattttatgtggagacaaggttttcttgctatgttgcccggggtggtctcaaactcctgtgcgcaagctatcttaccacctgggctcctcaagtgctaagactacattacaggggtcagccacggcacctgccctggtttttcaaattggatttaacatccaattagcagctaaactcagcaaatgggatattttgatctgtgtataattgaaattccaattttggcttctctggacaaaatgggaaacaatggaaatctttcatatgtatttgcatggccttgtcttttggaaataacaggtacagtgctgtcttctaatgttgagacagtaaaattttagtaagatttttcagctgaggaaaatacaggatcttaaggacttcttggagatagtattcatgctttctcatatacacagtgataggtgaattgtgtttagggttttgttttgggttggttttggtgcaatgtctaattacatttgccaactcatgttacctagtagggatatttccattctgtgccaattgatatttggtacagtgaatgtactcaataaaattaaaggtttggtacttgtttttgagatggtgaacaactaacgtgcaaatctgtagtccctaatgtagccttttgctatctgacatctgtttgacatatgctttgtcaaattgattcaactcaaacttgaatacttatgttttgccaaatttgtgtgatcacattgtgttactaatgtgtaacatcagcctgtaacttcagccacctactttttatttgtgg

SEQ ID NO: 50465 - DNA, 1271 bp, Homo sapiens
tattctagatgtgatatctttggcatcactgttcattcttttcctccttgattaaagtgaaacaattacattaaaatagttttatgatttaaaaatcattctttttttaagctattatttttaatgtaggtcagtgtgttatgtaaattgatgtccactacctgaacatgtgatgctttctcttttattccttggtatttcctccatattctctgagggccttcagtcaatttttttaaaggaaataataagttcaaatatgtatctatgacttagggttacaaagaatattttctttgcctccagtatactttgtattaaaaaaattataaaaggccataggtattcattttcaaatatttgaaaaaaaaaggcatggcacaattaaagcatatgcagaaccaacttggattattgctatatttctttctttctagtgtgtacggatattgatgacatttttaggtggctcttaacaagaacattttcctctctttagatgtgaatgcatagaattctttcatttggaccaggatcgttttaaaacatttcctttattttttgattaaatttttttccttttaaatattaggacttagttttttattaaatttgaacataatatatttaacatacttacggatacatttttgtgggcatatttctctgacaatttctcttattacaaaccaaacttgttagtgacctgattttgtgtgtgtgtgtgtgtgtgtgtgtgtgtgtgtgtgcgcgcatgcgcgcgtgttttgcatttctattctttgttttctagtttcatccctatgctaggacatggctgtgttcgtttctctttcactagatttttttaatgactgtaaggttattctacgcttgtaatctgcttttgcagtacttttccatcaaaaacaactgtgttacttctcatttaaatatttatttatttatttttgagacagggtttcgctctgtcacccaggctggagtgcagtgtcgtgatcttggctcactgcggcctctgtctcctgggttcaagcaattctcctgccccagcttcccgagtagctgggactacaggtggacaccaccactcctggctaatttttgtatttttagtagggacggggtttcaccatgttgaccaggctggtctccaactcctgacctcaagtgatctgcctgcctcagcctcccaaagtgctgggggattataggaataagccactatgcccggcctcatttaaatatctcttaatcatcttttacctgtt

SEQ ID NO: 50466 - DNA, 1336 bp, Homo sapiens
ttccctacttcaacagtttactagtctccatcttgaatgtttttattaatctattttgtgttaattctacccaggttttttgtttttccttgctactattatatatatttctgccagatgtcacatggtataaatgcctatatggacttttgtaacagaaaatttacttactagaattaatgtagggggctttttaataagagtgcatgtaacatagtaacagtagcagagctatatcagaaacagttctgataatatttcatgatctatagtttgttgcatgcccattgcttcatactgcttgtgttcttggttgagtcataagtaatttttatggggtgtgtcatgactgtcatattcatagagagttgtctgccttgccccatggtctttgcatggcttaaacaggaccccttttcatacacaagtcattcaattttatgtttttaatagcatcaattttagtgtttaacatgtgtctctggactatgcatcagaatacttgactgttagtgtgaaatgaaaattcatggatatcataatttatgtaacataatttaacatttctttattaataagactttagattgtccctttcacaaaaaaatggtgcggttaaaacttaatccttgtgtctttttgtgagtagttctatgatttctatatgatggcatccttgaaaaagttggtaaaaataagaatagttcttatttattaaagttcttctcaaattgctcttccaaaacattttagtttatactgcaatgttaaccattttacacttgcttaagtaattttcttcaaatacacacgagtccaggctatttaaccttattttaccgctatagcacaaaacaggttttccaaaattgtccttgcacacctgggattttacaaggatattataatcttggttcagtttgacttactgaatttgtagtaagtatattttagcacatagaaaattcaaaatatgtgttaatctgtttatagggtaaatttttatgagggtggatgtcatcctgttttttttttttttaataaatgttttgtttcagaatgttttttatttacagaaaagttacaaacatagtacagagagttcccaaatgctccacaccgagttttccctattgtttttttttttttttttgagatggagtctcgctctgttgcccaggctggagtgcagtggtgcaatttcggctcactgcaagctccgcctcccgggtgcaccccattctcctgcctcagcctccggagtagctgggactacaggtgcccgccaccgtgcccggctaattttttgtatttttattagagacgaggtttcact

SEQ ID NO: 50467 - DNA, 1050 bp, Homo sapiens
ggagtgcagtggcaagatcatggctcactgtaatctcgacctcctgggctcaagcaattcttccactccttccacctcagcctcctgagtagcccgtgccaccacgcctggctaattttatttttttgagacagggtttccttttgtcacccaggttggagtgaagtggcaccatcttggctggctgcaacctccacctcctggcctcaagtgatcctcccaccacagcctcctgagtagctgggactataggcgcaggacaccattctccactaattttttaattttttgtagatatgagattataagttgttttaaaaaaagtaatatgtgcaaatggtaaatagtacaaaattcaatttgtactaaagttgttttagttaaaagtcttctttctgcttttagattcccagttctcaatcttccttcctccttacaagatacaagcaaccttcaaccttcccagagatggtctctgtatatgaaagacaatggtcttattatgaagtcggcatatttatagcttgataaaaactgaaaaatctgtagcctatttttaatagtgatatataaggaaataacataaataaaaatttggcaacaagaatccaggagcaaatttatgatcaatacacaattgggcaagtggtgttcataccaaccatgcaaaaatggttcaattttaggaaatctttgaatatagcttttagtaggtcagaggaaatcagtatctcaaagtactttcatgatttagttatttttaagttattgatcattttggattttattttgaggttgatagccatataatgatttcacattttattttaaatggctagctgttgtcccaatactatttactgaaaaatctacattttgctcactctttttttttttttttaagagacagggttttaccatgttgcccaggctagatttgaactcctgggctcaagtgatcctctcgacccagcctcctgagtatctgtgactgcaggcaagtacccctgtgcctgctcacttatttaaagttctacacatcaaatacta

SEQ ID NO: 50468 - DNA, 1050 bp, Homo sapiens
atattagatttttattgtgtggtttcacatcagtgtaattagaatataggaaatttgtttaaaataataggccttttcatttgacgagatttaaaaacacagattggctgtggtatctgggcataatttgatatagataatagtattttcctccatatcgaaaattgaggtaagttttataacctctttgatgcattttcctagtagagttaaaaatgttgaagtatagccaccaaaacattcatgttggttatccttttttttttccttaatgaaaatgtactactttggtggaaaaaagttaataatttcgttagttggtaggtgaataatgagtgatagagactgttctgacaccaattgtctgacaccaactgggtatcctgcaattcatttcaattctgacactaactacccagagttaacacaaactaccaggcacacaaagtgttcatccaccaggaagctccttgaactttgagtttgcagagttttattggccacatgattaacttccttctccagctcctctttaatctctgaacatctgggggtgtggctaaaagttccaaccctctaaccatatgcttggtctgtctggcatggccagctcgtcctttcaaactatgtgagggcctaccttgagtcacccccaagtataaactcagatatagtccaaaggggcttcttatgaataacaaagacacttccattaatcaggaaattccaagcctctctaagctctgtaccaggaacaggagacaaagactagatttattcttcattatatgacagatacatttttatattttgcctctggttttagtaaagtttttgttgtgaagaacacaaatgccagatcaaatgagggggctgtaattagcaaggctgcaagggattgtgagcagtaagggagatagggattttactggaaatccaccaaaggaactggtatgtagctatgcctctcagtaaggggaactagaaagctattaggaaatcaaggcatctggagaaactatgtgtgtgtgcccaccaacatgttcatgt

SEQ ID NO: 50469 - DNA, 1274 bp, Homo sapiens
atgattgaattttccttttcccgcccatgcaccaaaatgatatggctctgatgagtggaggaacaccagggttcttgttcctcaggctggtttagataaaacaacatggacacatgtggagtggttttaaggagtggagagtttaataggcaagaaggaagagagaagacagatggaagaagctcccccttacagagacagagggaggggggcaccaaagctgaaagaggaggtcccccaagttcctgtttttattagcctggaacttgatagtaatgacattaactgaaagtaggacataaactatatattttagtttaatatgtaaaaggatcttctgcatcactaaagaagaaaagtgtcttgctgggaatgagattaggaaacaaatttgggaaataccattgttccttttttgtggagaaaggtaccctgtccaaaaagaaaaatgtcttgctttgctagataaatgcaccgttttgcctaaaaaccagtgtaacattttattctaagtcagaagtaattactgagctgtggttttgtgttctgtatgtataatctcatttattgacagttctaacctagtaatgaaagtgcaacaggagaattataaccagaaacatctaactgttatattatacatacatgtactgtttaactgtaattgtgaaaatgcattttgaaagttggaaaaaaagaaaggttgcctctatggtttggcagcttaataccgaaaagtagacagtgtcttgcgggtcatagatcatgggactcaacataaagtcatacagctaagacttgttacagcaacataataagcatatatagcctttctaaggttagcataagggaaaaagagaaggtagagtctggaggaaccagcgtgcaggtctccttatgctctctccctctcatgagtggtcatacagagcgcattcttgtagcaataaaaatttggcaacacgtgtgccatgtttctgctcgaggagcccattagagacttggcacccaaagtttctattgtaggttggtcctgtaggcactttctgctttgcatgtaccaaaattccacattcccagaaggaaagcaggtattcaacatgacccacttttatttgcacaaacaatctagtaaaaggccaaccttggcagcaggtcttcctaaggatactagtctcagtctgtgcacataagctgaatgtgtaaaatggttaaatactggacccttctgtaactgatcacatgcaaactgcttaagggcagaagtgggccag

SEQ ID NO: 50470 - DNA, 1050 bp, Homo sapiens
tgctgggattacaggcgtgagccactgtgccttgccacctattctgttttgaacttcattttcctaacaacatcctgaattactgagcttttgtatcacttcatgttaaagttttcattcttatgtaccaaagtactaatttgaatttgtaatgagtctgatggtatatttcaattttttgctttgagggactggctgctacattgcagaatatcttatatccctgactgctttccactaagtgtcagtggtgaccccaatccaattattatgacaactgaacatgcttatgcatccctcatgcctttattttttattttgggaaatctttcagcttcagtttttgctgatatttatgtgattctttgttctgcaattcaaatttctgggagccaaacagtctccttggttcagattactgttttttgactagagcttctcacttcagattctgtcataagattatggcttaacctatggttgtcctttgatttggtgccatatgaaataaaacattattttctatggctatgtattaagaattttgtgcaattctgtttttcttagaaggctgagggtgtgttgtcagacaccatgactgatgtgacaggtgtattttattatgcggccgccaggcagacaggcatttcttcatatttatatattacttaaatttaatattatttacataatttttttttttttgagacagagtcttgctctgtcgcccaagctggagtgcagtggcacgatctcggctcactacaacctccgcctcctgggttcaagcgattctcctgcctcagcctcctgagtagctgggattacaggcacccgacatcatgcctggctaatttttgtatttttgtatagatgggaggtttcaccatgttggccaggctggtcaagtgatccgcctgccttggcctcccaaagtgctgggattataggggtgagccaccacgcctggctatttacatatttttaaactagagccccttaacatattacaattttcatgtatggaatctctaatgtattcacccctgc

SEQ ID NO: 50471 - DNA, 1021 bp, Homo sapiens
tttcttactatgggttaaacaactttataagacattgtgaggaacctggtatcctctggactagatcattcccgtagacagttccattgtgcacacatagtatttcgttaaaatcaggtgactgtttaaaaattaaaaagattttagataaaaatctagatttttactttctcctgaaatatcagaagatggggtctaaattcacactgaggccaagcagtggtaggctcattttaaagaagggctttctgctctctggtttaccccattgtatactaattagcctggtcttacttttatatattacctgaatagccacttagggcattttgaacacgtggcttgcattgctttgtctttttgaaatccgctgtggcaggcccaaaccttgcctttggtgggcttaagtaaggtctggtttccagtacaaaggcaaaggcaaatgaggattattagtattccattttgccctatggatattctcagtgctttctactggaaactcacaaccaattctgaatatgccacatactgtgtgatttgcccttgctgtccaaccctgttcttgctgccatttaaaaataatcaggccaggtgtggtggctcatttctgtaatcccagcactttgggaggccaaggtgggtggatcatttgagctctggagttcgagaccagccagggccacatagcaagacctcgtctctactaaaaattaaaaaaaaaaaaaattagctgggcatggcggtggttcatgcctgtagtcctagcactttgggtgccaaggcgggaggatcgtttgagctcagcagttcaagaccagcctgggcatcatagtgagaccctgtctctatttataaaaaaaaaatgaaaaaaaaaaaaaaaaaaaaaaaaaaagaaaacaatcaggccaggtgcggtggttcctacctataatcccagcacttcaggaggtcaaggtgggtggatcacttgagcccaagagtttgagaccagcctgggcaacatagtaagaccctgcct

SEQ ID NO: 50472 - DNA, 2070 bp, Homo sapiens
gttacagaaaaaggtagtgggctggatttggtttattggcggtagtttgccaatacctgctttatgacactgtactcttacaacttctgctcacctagtttctgcttcgtcatagtgggctttctcatagttatgcctctgattttcccttgtaacttcttagaataccttcttcacctctcatctttgctactgattacctgtttccatatttcacaattttaagtttccgagagcacaggcgatagctaaattaagatgctttgcatgttaccactattatgtactttgcttggctgtctaccctgttgcttcaatataaccaattccaaatagctgcattccttttgagggtctcttccttgcaatccagagttcattgcaagaaatggggtgatttggatcattttaaggaagtttatggaattcaactctagtgtggtatcattaatgtaattaagctcttctctccttatgtgtatcatgttggtcctactacagtttggtttcctcatactctgtcttcctctaacctcctggttactgaatacttagattttttttctcattcataacttgagcttttgcaactactataggtgtgaccttccttctacattatctttctctctacagactatcgactttagctcttgctactctccatgttgccaagttgtcattaaactgagaatctgattccctgtgggttaagtttcctgagaccgcagggatagtagttgctatttggcaggtctaggacatttccccctactgattactatgtgcaaatgtatctctttccctatttatgatgcaaaattgctttagcctaacacaatccagctactataagtgtatccagaatcaagctctaaaactagaatgcaacccagtcatgtagcatccagaagtacctgaaccatctttggaacttgacagtttcacagttaactctgcaaccttactctccttatatcctgatgctattttatatgcctgttaggttgtatcagatctacattctgatctatagtttggagattataattttctaagcaaccctttgtgaggtcacagatactttttgtttgttactggttataggcattattggttctcatcactcagtattctttcccttttcccttacaccagatcataatatagtattctctctctctttttttttttttttggaaacagggtcttgctctgttgcccaggctggagtgccgtggtgcaatcttggctcactgcaacctccgcctcccggctcaagtgattctctcacctcagcctcccaagtagctgggaatacaggcgtgtgctaccatgcccagctcatttttgtattttttgtagagatagggtttcactatgttacccaggctgttctcaaactcctgagctcaaagcgatctgcctgcctcagcctcccaaagtgctgggactataagcatgagccaccatgcctggcccataatatagtattctgacttgacaacttagctaagtttattaggaatgtctttatttaattaatttggtaaattactaggaatgtagtagtttacattactgctatgaactcccttcttgctacatactcacttcctcatttctattctttatcccattgctaatggatagtttctgcttatttatttatttatttatttattttttaactaatagagacagggtcacgctgtgttgcccaggttattattgaactcctggcctcaagtgatcttcctgccttaacctcccaaagtgctaagattacaggcatgagccaccatgcctggccagtttttgcttatttatagcttctgactcctgtgcctattcctcacaagttgatcttatttaaatctttcatgcttcttacgtagctgtggtatgttcttttaccatgtatccattcacttcagctgagtttctgttcttctgtttttcccaattgcaaatttaatctaattttctcacgtcatccttgtttggggagggctttcatgttacaagtcataggctgttgatcagcgtgtagacatatgcctttgagtc

SEQ ID NO: 50473 - DNA, 2200 bp, Homo sapiens
gccactgtgccctccctacaggttttaaaatttattattatctaaatattcattttaaatgttaattttagtgtacttctttgattattttctttagagaaatttctgatttcagaaccaagtttattagcattcactgtatacattagcaccattaaaactagctagacccaagaagcagtattgaatgggtaccccttctttactttcctctgattcactctactctggtgctcacagctaagtaagtatgtacagcaatggcctgtcatttggtcgattatcttttgtgctctgaaatgtctttgttttttcatctgctctcaatacctctgtgctctgatcctttgtatataagggtaaccatatttgttctttcctgtgaaataataattcttttccttccattcagagtagctgcctgactcatacaatgaataaagtcacatagactcaaagagtggagatggaggtcggatgtggtggctcgtgcctgtaatcccaacactttgagaggctgaggtgggaggatcgcttgagcttgagcacaggagtttgagatcagtctgggcaacgtagtgagatctcatctctgccaaaaaataaaaattagctgggtgtggtggtgcatggctgtagtctcatgtagtcccagctacttgggaggctgaggtggggggtcacacatactttttgttgttactgcttcatcattggttctgatcactcagtgttctttcccttacaccagatcataatacagtattctgactaggcaacttagctcagtttattacgaatagccttaattaatttggtaaattactatgaatgaacatttcattcattctgctaggtctaggttttgccagctgttccattaagggacactatggcacgggttggcaaactttttctgtaaagggctaggtagtctctctattcaactctgctgttgtagcatgaaaacatccatagacaatatggatacaaatgagcatgattatgttctgataaaacctgatttacaaaaacaggtagtaggttggatttggcccaggggccatagcatgctgacccctgctctacagtatacatacacaaagactttcaaacaaagatgtatacaataaaacaaccattcagagttatttgattcacagtgtgtataatataataaaaataatacagctgtatttgagtcagcactgaaaagtctcttgtgatctgtgtcttacgtgcatgaattgcagaatattcatacgaataccatgaatattcttcacgggccatgttattaccatcccttagaggaatctcttccttgtcgtgggtctttctttgtatggcttagaagtgatgttgtctttatattgtgttatttgttcttaactttacattatcagctctggtgtgcttacctttttcaccaacgtgtcttctaccctacttacctcataagtgaatctaatacagaggttattttggatataatcattatcttaacaggcaagatagtgggctgtgctatttcaaaccctaaatttggctttcaggattatgaagtattaattcttccactgatatctcaaaaggtgatctggacaaaggaacaggtatctcaggtaagcaattgttgaatatgaaagtaaatattcttctttgatcgtttgttgtatttgttatgtttaatagctttcctaataatgaaccaactttgcatttctggaagaagattcgtacttttttgagacggagtcttctttttttttttttgagatgtagtctcgctctgtcgcccaggctggagtgtagtggtgcaatctcaggtcactgcagcctctgcctcctgggttcaagcaattctccagcctcagcctcccgagtggctgggattacaggtgtgcatcgccatgcccagctaattttttgtattttttttagtagagacggggtttcaccatgctggccaggctagtctcgaactcctgacctcgtgatctgcccacctcagcctcccaaagtgttgggattacaggcatgagccaccacgcccggccagattcatagttttcaagaattttgaattatatttgctaaatttgatatttcaaattttattttctattttatttattatttttttcctttatttatttattttttttgagacagggtctcactctgttgtccaggctgg

SEQ ID NO: 50474 - DNA, 1172 bp, Homo sapiens
gtgctttatgtaccctgtctcgttgaatttttacaaaaaactgaaagagttagttttgtgttattactacctccatctcaaagatgagtcttggaaagcttaagtaactttaggtcacattgtaatcagtggcagaactgggacttaagaacataattcatgactgcattttcttttctttctttctctttctttctctctctctcttttttttttttttttaaagagatagcatctcactcactatgttgcccagactggtcttgaactcttgggctcaagcaattcttccacctccgcctcccaaagtgttaggattataggcatgagccctcatgcctgccccttgcattttctatttaagtgatcttgaagtttttttttttcttttttaaatctcggaatttggcctttagtaagcatagaatagcaaagtgtaatacctgagctgggggaaaaagtccttgaattctttaggaaagacttaattggtgggtacaaagtgaaatgctcactggaatcaggaatcagaaaccagttctgatcacctatccctacatatccttcttcactctgccctggcatatcatggttgatgtacatagcaatgatcatcccttctgtaatcccacttgacagtttagaagtggattgataatactcttctggcttaaaacccttcttctctgggcaggtgtggtggctcctacattatcccagcaccttgggaggccgagatgggaggattgtgtgagcccaggagtttgagaccagcctgggtaacatagcaagaccctgtctccacaaaaaaataaaaaattaactgggcacggtggtgctcacgcctgtaatcccagcacctggggaggccgaggcgggtggatcacgaggtcaagagatcgagaccatcctggccaacatggtgaaaccccgtctgtactaaaaatacaaaaattagccaggcgtgatagcaggcgcctgtagttccagctatgggaggctgaggcaggagaatcagatgaacctgggagacggaggttgcagtgagctgagatcacgccactgcactccagcctggtgacagagtgacactccgtctcaaaaaaaaaaagaaacgatcacatccagatgtcctgttactggaagggcaccatagtttatcctgcacctaa

SEQ ID NO: 50475 - DNA, 1022 bp, Homo sapiens
tattatctattttgtatttaataacattctaactttttttttccagtgaaggatgaggattattggatttagaagtgccaaatgagctattacttactgctttttgctatccggttacactgggttaatccagttagttgtaagctcccatttttcagcattttgctagctgtagatattaaaccaggctcatgtgggtagtagggtggggaggttaagaggagtataagcaaaaaggaaaaaaaaaagctcatattttagaggaggggattgagaagttcctttattggaagtctgtgcatggaagtcccattttacatcatgccagtgtctagttcccaattccgtctatggccacgggttagggaaagcctgaatatttgaaataaccgaaaagcatttaacctttgatttctataatttgttcctcacctctcttgatgttacagccagcagcagcctggagcagcaccccctgggaagaaattttacatcggccattataatacaacctgataagtgttatagcacttatcagattgtattgtaattgtctgtgtatatgcctgtctctcttcctgttatcagttagactgtgagctccttgagggcaaggaaggtgtcttcatctccagagcccagcctggcacattagtaggcctcagtaaatgtttattagatgaataaatgaatgactcatcagcaaacatttattgtgtgcctgctaaagtgagctccacaggctctggattgtcagctgtttcttcaaaaagcatgtggtcagaaatttgatatttctgtatatatcttcctaagagtttctcatgagacaatgccatttttgtgtttggatttcagtccttgatatttacagatgttgcaactgttgctattgctgacacttgctttcttggtgggacttgagtgataactgttagattggggcctcatcctcagggcccaggtaatcatccaaatagtattcttagataggactttgcatttttctttctttttttttt

SEQ ID NO: 50476 - DNA, 1033 bp, Homo sapiens
tcgagttccagttccagttcgagttccagttccagttcaagttccagttccagtcctagttccagttccggtggtgaaagttcagaaactagctcagatttatttgaaggcagtaatgaaggaagctcatcatcaggctcatcaggtgccaggcgagagggtcgacatagggccccagtcacatttgatgaaagtggctctttgcccttccttagcctggctcagtttttcctcttaaatgaggatgatgatgaccaacctagaggactcaccaaagaacagattgacaacttggcaatgagaagttttggtgaaaatgatgcattaaaaacctgtagtgtttgcattacagaatatacagaaggcaacaaacttcgtaaactaccttgttcccatgagtaccatgtccactgcatcgatcgctggttatctgagaattctacctgtcctatttgtcgcagagcagtcttagcttctggtaacagagaaagtgttgtgtaattaagatctgaactctcagctatgtagctgatatagtgatgggcaaacaggaatcacttgcttttatgtccactttttgagtggtacttaaatgtaaagtaacaacctgaattgagtcattgctttctgaaggaatcattgtcctttctccagtttttgttccagaataaaaggaaatattttaaaagccacgttataggacctaaaaatctgatttccgtaccagttaaattggtagcatcactgttactgataatttatcatatacacttgtcaatttttcctttgttatcttaaaagatctgccttagcaatggctcctttttcatgttgatctttaaattttcccacaccataagagaggagcaaaggaaattaccagtttagactaagttacagtatgtgtttcataagtgattaaagctatatcattcccagttattagttaacacaaattcagccacattctgagtattgtttgttcacctttcagacttggtgatactggacatgtcagtgtaaataacactaa

SEQ ID NO: 50477 - DNA, 1072 bp, Homo sapiens
acgtccttcagttttcaaaatgggaaagcgaaggttcccacaattctcagaacgcaaatttctcgccacaattcaaaatggcggaggagggtggggcctgtcacatggtgggcgtcataacagctttccttttccaaaccgccgcccgccttgccgcgtcgtctgccgtccccctcctcctcccgcggagccttttcgaggaatcgactgggattggctaataggctgggagtggggctgcggtgccgggacgcggcatcatcacttcctgttgtgggcagtcgtttcctgtcgctgcttggtaacaatggggaagataatggctgcctgagcaacgtctccgagcaggcgctgggctagaggcgggtctcaaccagctactcattggaggcgggcttgagagcggcggccagggaggtgcggagcagcctcggcggcggcggccgaaccaaccgagtcggatcctgaccctaaaacctagtaagtgaagacttgggaatcctgtgagaaatgatgtagagcgagaggaagacagcggagccgcggctgccgcgttctctcaaaatggcccgagtgacgcgtcgtggcagaggctcagcgccgcctccggaccccaggcccgttgctgcggggggctccgtggcgtagtcgccgctgccattttagttgagtggtatagtcgacaggctctttgaaggggaaggaggtgggtagtacttcctctcggtggccgcgcgagctgcagcccaggccctccggagccttaggaaatcgggggaggcagtttttgagttttggcctcaggcgtcagaatcttagaacgtctcaggctttttcttctctgttctctggaggcttccctgacctccccgcgttttccatggcgggcttgggtttgggaaaagggaagtaaaaaatcaggctgccccaagtgagatgctggcaactcttgggcctttagatttccaaaacctcattttgagcccttctgcagggtattaccaattaggcgccccctggggccgcgatgacatcttccctgaggatctgaggcaaatgtggtttactccct

SEQ ID NO: 50478 - DNA, 1025 bp, Homo sapiens
aaggaattagtgggagccttttcatgtattcctttataaactgagcaggagagaaaagaaagagctagaaaacttttctctcttactacctgaccactccttcaatcttaaaaccagttcgtgcaaaccagaaattgtagtatgtacagaatatttcaagtcacaactttctgggatgaatggtttccatacccaaagagcctcctgcctttaaggagtcatcagttgaaaagaaacagtcagatatctgtggcattacctactggccagagtgggatggagaaagtggtctgaagtttagttagcaaatgttgaatttcagggttgaggaaggggaagtatggtatctagataaggaagaaggcagcaaaggggctgagagcttttcaactttggtgacaaggatggggaggagtaagtgggaacagacactatccttacttggagagtggtggttgctgaggagaaggacttattgctttatattgaattttagcattaatactttctggatctctgagatggagagttgacagaagaacctaggaagcatgactaagtggttgaatctgctatggaaaaaggggaaacggggcaggcttttacttatttgaacctaggtactttgtttctttgccacctaaaagttctgggatgaactgaatgaggaatatgaattgagcagataagattccttttactggagaaaaactaagtcctttggaaacttgaacttttttctcattcaaattcatttctaggccttattcattcattctatgtttttttttttttttacacagtagccaccgcccccgcttcacacccctaccccctacccttcccagcctctggtaactatccttctactctctgtcttcatgacttcaattgttttgatttttaaatcccacaaataagtaagagcatgtgatgttcttggcaactttgtggaaaatgagttcactgtaggtgtgtggaattgtttctggattttttattctgttccattggtctatgcacct

SEQ ID NO: 50479 - DNA, 1032 bp, Homo sapiens
tgatatttaaaattgggtctgtaattggatcatcttttaaaaatccattctgacaatctgttttttttaatgccatcagattcagccatgatgacaatctgtgttttaattggtgtagactattcacatttaaaatgattaactgatattgttggattaatattgaccatatgtgtaactgttttctgttcatttcctttcttctttggtttttgcttttattttactttttcttcaatctttttcttccttctctggctttaattaaacattttatatgattttgttttttctaatcatttaacattccgattatactttttaatttttaagtggttgccatagagtttgcattatacatttataggcagtctaattccactttaatatgacactattactgcttcatgggggtggtacacataacagtactcccaattcattccccctatcacttacacactgctgtgattcatttcacctatttataagctttaattaccaatacattgttgctgttattattttgaagaaacttatctgttagatgaattaagaataaagataaattattttattttacattaatttattccttctctaacattgcttcccaattaaatgtaaatctgaggttttgaccaatatcatttgcattctctctggaaaactttatttaaaaacaattcttgcaagatccatgtactagcaacaaatttcctcaatttttgcttttgtagagagtgtatgtttttccctcacttgtaaaggacagtttcactaggtgcagaattctaggttggtggattggtttttttcaacagtttaaatatttcattccactctgttcttgcttgccttcactgttatttttattcttgttcctttataggtgattcccctggcttcttttaagattatttttgtctttgatttttgtagtttgaatatgatatgccaggctgtaccttttgggagttttttttttgttgttgttgttgttgtgtttttttttttgtttcttttgttttg

SEQ ID NO: 50480 - DNA, 1044 bp, Homo sapiens
ccagtattgttttcttcttcagtattctgttggctgttttgagttttttgcctttctttataaactttaggatcagtttgtccatatccacaaaattacttactgggattttgattggggtcacattgaatctatagatcaagctggagaaaactgacatctcaacaatattgagtcttcccatacatgaacatggagtatctctccatttatttagcttctttgatttctttcatatgagttttgtagttttcctcatatgctttttgcacacatttgttatatttgtactgaagtatttcattttttgttgttaatttaaatggtgttgtattttttatttcaaattgcatatgttcattggtggtatgtgggaaagtagttgacttttgtatatgaccttgtatgctgcaaccttgctgtaattgctttttagttctagtagggttttttgttgatttttttttttcagattttctgtatagacaattatatcacctgcaaacaaagacagttttattttgtcctttgtagaatgaatacctttatttccttttcttattgcattagctatgacttctagtacagtgttgaatataatgtgataaaagaggacatccttgccttgttcacagtttagtttcccaccattaagtatgttgttaactttaaggttttttataggtgtttgtaatcaagttgaagttttcctctattcctagtttgctgggagtttttgtaatgaataggtgttggattttgttaaatgattttttttcatctgccatcatttgatttttcttctttagcttgttgatgtgatggattacattaactgattttcaaatgttgaaccagctttccatacccagaataaattccacttggttatgtcgtgtaattgtttttatacattgttgggtatgatttggtaatattttgttgaggatttttgtatctatattcaggaaagagggtggtctgtagttttcttgtaatgtctttggttttgatattagaatggtgctgttttcatggaatgag

SEQ ID NO: 50481 - DNA, 1034 bp, Homo sapiens
atccccagatttttaaaggattttggagctttattcctgcatttaaatttttatttatatgctgctttgaagaggcatctgctagtaaatttagttagccatgtatcttaataaggacacaaataatgaagaccctaatgaaaggattctttctgagattttgcttgacatactcttttttatgttagaaacacattcttattgattggacacagtcagaagctagtagtttttaaagagaaattttcacttacttaagcaattggagagcttgatgtaatcagaagaagtgaaacagtaacttggaatattaaaaattggtattaaaacttggagtaacttggaggattaaaaattggaagattgggaagaggtttgttaaaatgagtggacacattagaccagtgggcaagcatacctggatgacatggtgaggctgtattccagctctgatttcatacataatcaaatagccttatgatcttcatttgatttctaaaattgtctttcctttgggatagaaaattcattgactggccaacttgaatatcagtctggcgggtagttctttttattgtaaattattaaatggactgtaaaatacaaatccatcttatatgtagcataatccatttaaggaaagggtctaatcaccaccgaataagttcttcattgaactttcagaccaacaaagctcggaaaacaaaccctgaagtataatgtaacaaaaattgtaaagcctttcctgacaactcatacatattttcttctcttatcccaaattcactatatgtatctctccaacaacacaataaaaattttccagttatactctggattttttagacatcgactgaactcgctagtttttgaccttctttttataaatccattgttatctttaatagtactgaagtggtttcttccttttattgcagttgttgggttgaggagacagttcttttctctggatagtttgcttatccctgaaattatggacacttccaaattttcttctagattggttctttagg

SEQ ID NO: 50482 - DNA, 1035 bp, Homo sapiens
ttatgcaacttgccactgtttgccttataagtgtagcatttaactcatttacatttaaggtgaatattaattaaggtgcatatttgatcctgtcatcgtgttgttagctgatttttatgtaggcttgattatgtatttgctttatagtgttgatggtctatgtatttgagtgtgttttgtggtttttggtaatggtcttttgtttccgtgtttagcactcctttaagggcctcttgttaaggcaggcctggtggtaatgaattcccttaacatttgcttgtctgaaaaggattttgtttctcctttgcttacgaagcttagtttggctggatattaaattattggctagaatttcttttctttaaagatgctgaatatagttccacagtctcttctggcttttagggtttctgctgaaatgtccactgttagcctaatggagttccctttgtagatgacctgccccatctctctagctgctttaatatgttttatttcatttcgaccttgggggatctgatgactatgtgtcttgaggatggttgttttgtactgtatctcacactgacaggaattctcgcagaatttcctgaacttgtatgtcagcctctcgtgaggttggggagatttttgcatacagtatcctcaaatatattttctaagttgctttctctccctgtctttcagggatgtcaattagtcatagatttggtctgtttacttaataccatatttctcccagattttgttcatgaaaaaattatttcttatttttgtgtaactgagttaatttgaagaacctgtttttgagctttgagattctttcctcagcttgattcattctgctgttaatactcccccttgtgtttcgaaatcttgtagagaatttttcagctatttagctcattttggttctttcttaacatggctattttgtctttcatctcttaaatcattttattgtatacctgggattcctcagaatgggtttcaacgttttcctgaatctaggtgatcttcatcgtggtcccaatt

SEQ ID NO: 50483 - DNA, 1034 bp, Homo sapiens
atttgtactgttaattatcttggacacataacttgttcttttggacatcagatcctgtaaactagtaatatttgactaccagatctctaaggtttcttgcaactctcttgtttctttactgtaatcctttaggaccagccctttttatatagtacctctactttgtgatcctagtttactactggtgtagtattcaggagcaacatagggtaagtttatgttcacatgaatttttaatgggacaaatttgtattgttcttgtcatatttgtatatctaagagtaggaatagaaaaatgtaatttaattatgagcttagtatttggtagtgttgggaggatggaagtagtgtggaggaaaaagtaagctaggttccgaaatcatctgggatggtagaaatagattctaaggggtggtgaagaataacagtaatgctataaaagttgtaaataaagatataccttacatgggctgtatatggtaaggaatggaaagtggcactgggacttgagaagaggaattcaggggattcttttttcagatatagttgaataaataacattctctaagtcattgacacattggttttaactagttattaagattattaggaagaggaagaaaatttcatgtttctaaactttcttttagaacacgaggccctttgagaatctgatcaaagccatagaccttctccctagaaaaatatacatacgtatgtgcttcattttgcatgcaatttcaggggaatcagaaacctatcccctcttccagtcagtaatccctgattaatacaatattgctggctggtgggtttctaatggtgttcctgagtagccagtggcaagataaagagcacttgtcactgggcagcggggtagaaatagagtggaaacttacatcaaaattttgattaaatgataaatgcataattgatcatttaattattgttatacaattgttataaaattaatatcatttattgctgtattgttgtcagtgttatcttaaagattttgctttttcaaagaaaag

SEQ ID NO: 50484 - DNA, 1027 bp, Homo sapiens
aacatcttgagttgatggaagatattgtggatttggcaaagaaagctgctaatgattcactccttattggaggcttattgagaattggttataaaatagaaaataaaatcttggcaatggaagaagctctgaattggataaaatatgcaggcgatgtaacaattctaactaaattaggatcaattgacaattgttggcctatgttaagtattttctttactgaatacaagtaccacataactaaaattgtaatggaagactgcaatttgcttgaagaacttaaaacccaaagttgtatggattgtatagagcaaggagaactaatgaaaatgaaaggaaatgaagagttttccaaagaaagatttgatatagctattatctattacaccagagccattgaatatagacctgaaaaccaccttctttatggtaaccgagctctttgttttcttcgtactggacagtttagaaatgcacttggtgatggaaagagagccactattctgaagaacacttggccaaagggtcattatcgttattgtgatgctctttctatgctgggggaatataactgggccctgcaagcaaacataacagctcaaaaactctgtaaaaatgaccctgagggaatcaaggatctaattcagcagcatgtaaagttacaaaaacaaatagaagacctacaaggtcgaacagcaaataagaatccaattaaagccttttatgaaaacagggcctacacacctaggagtttatcagcacctgtatttagtacttcacttaactttgtggagaaggaaagagatttcagaaaaattaatcacgaaatggctaacggtggtaatcagaatctaaaggtgatggatgaggcattgatggtagatgattgtgactgtcatcctgaattttcaccaccatcaagtcagcctccgaaacataaaggaaaacaaaaatctcgaaacaatgaatcagaaaagttcagttctagttcacaattgactttaccagcagatttgaagaacatctt

SEQ ID NO: 50485 - DNA, 1006 bp, Homo sapiens
cccacgtcttgcacacactatccctgaatatgctgagttcaaacgaagtgcctgcctgcgattttttccccctttacttctccaaaggatctttccccaactgtagccccctgtcacctccccaccccaccacacacaccccttatattctgatgcctaagtgtgtgaggtcgggaggacttgtagaaccttagaatgccagggatggtaggggtcttagagaccatgtagcccaggcccctacctttacaatcaggaagacaaagtcccagagaggggaaaaggtgccctagggcactcatgtcttctagcttttattccagttctcattccactccattcagatgcctcttactgcatttaaattctaattcattttcttcaatccgccagaccgcattaagcaaattttcagaataatgggtactgaatgaactaagctttaaaatgagaaatgttagtgagaagtagaatatgtaaaccaaaatgaaagggaaacattcttgtgataactgtaaaacaggaagccccctgacacatcccctaaacctttaatttggcatccagtatatgggcttcaggattttgtttcagagggatatttaatttctttaaatggttctttcaccacgctcagcatggtttaggccaataggatctagaagctctgttctattttctggatctcagtatccagtgacaaggatagaatcattcagccttccttagaccaggcaagtttatgcaccgagtactttaaaatcctctatttcaaatgagaaatgatgatatattcacaagaaaacaaaatagaaagctctgtgttagtatagtgatctctgtcagaataagggtgactgttattgagttacagagatgtaccacatggaccatgaacagttttcatatttctgaagaaatgaaagacagcaaaatgattttttttttttttgagacaaggtctcgctgtgtcacccaggctggaatgcaatggagtgatcttgac

SEQ ID NO: 50486 - DNA, 1049 bp, Homo sapiens
caccagactcagtctcaagtgacttggctatctccaaatcagatctacccttagagaataaacatttttctaccgttattttttttcaagtctataatctgagccagtcccaaaggagtgatcaagtttcagaaatgctttcatcttcacaacattttatatatactattatatggggtgaataaagttttaaatccgaaatatatactgtgtcaaagctcaatatgtgccaggtaactaaactgttaacatcactagcgttggatgtaataacaggatagtggctcacccccaagagctgccataaaattccattatgataggtactaccaccgtctctttggaacaaccttcctgacaccattgtgccactaaactaagggaatcatccttcctcgctttctagggatctttttgatagcgactgttgcacacaccttcaccaagaaagagagcatataaattgaggccattagtaaagataaggatacaactataattgaaagaatgaaggagtgaggcaaatcctaaaatactgcaggcaggccgtctttaatacagcatatcacaagcaatctctacccagcaacactcccccacattaagttcctgaacattctacccttctctgatagaaacatgtaagggatgagggagcttggctgtaatcttcagctttgcaaatacaatgactattaagagactttcctattaagtatacccaggtccatccctatgctccttgtgtcgtatatgtgttgtttttcaagaaaggtgaagaaagatggcttatatgcaaggatgggatttgttttagttatatggggagaaagtatagtactgaaagagagcaaagaaggatcgggaaagagactaaattggagtggattgatgaagagccttgaaatcctgaatgagtaattcagtacagaggataacaagggtttgtgaggcagatgataatgtttagcaagtaaagatggctatttgggtgagggtaatttggtttagaatgcaaggtggaagattggagacaggaagataattgg

SEQ ID NO: 50487 - DNA, 1068 bp, Homo sapiens
cataaaattgtcataaaattaataaatttaggaaagaataaagatttatatattcattctttacatataaaaacacacagctgagttcttagagttgattcctcaagttatgaaatacttttgtacttaatccatttcttgattaaagtgattgaaatggttttaatgttcttttgactgaagtctgaaactgggctcctgctttattgtctctgtgactgaaagttagaaactgagggttatctttgacacagaattgtgtgcaatattcttaaatactactgctctaaaagttggagaagtcttgcagttatcttagcattgtataaacagccttaagtatagcctaagaagagaattcctttttcttctttagtccttctgccattttttattttcagttatatgtgctgaaataattactggtaaaatttcagggttgtggattatcttccacacatgaattttctctctcctggcacgaatataaagcacatctcttaactgcatggtgccagtgctaatgcttcatcctgttgctggcagtgggatgtggacttagaaaatcaagttctagcattttagtaggttaacactgaagttgtggttgttaggttcacaccctgttttataaacaacatcaaaatggcagaaccattgctgactttaggttcacatgaggaatgtacttttaacaattcccagtactatcagtattgtgaaataattcctctgaaagataagaatcactggcttctatgcgcttcttttctctcatcatcatgttcttttaccccagtttccttacatttttttaaattgtttcagagtttgttttttttttagtttagattgtgaggcaattattaaatcaaaattaattcatccaatacccctttactagaagttttactagaaaatgtattacattttattttttcttaatccagttctgcaaaaatgacctataaatttattcatgtacaattttggttacttgaattgttaaagaaaacattgtttttgactatgggagtcaactcaacatggcagaaccatttttgagat

SEQ ID NO: 50488 - DNA, 1049 bp, Homo sapiens
ttgaatgtataaattgctttgggcagtatgaccatttcaacaatattgattcttcctatccatgagcatggaatgtttttccatttgttttgacatctctaatttcttttagcagtcttttggagttctcattgtagagaccttttacctccctggttagctgtattcctaggtattttattctttattgtggcagttgtgaatgggattgcatgcctgatttgcctctttgcttgacttttgttggtgtataggaatgctactgatttttgtacattgattttgtaccctgagatattgctgaacttgtttatcagcttaagaagcattttgggccaagactagagttttctagatacagaatcatggcatctgcatactgtgatagtttgactttctctcttcctatttggataacctttatttatttctgtttcctgattgctctgcccaggacttctaatactatgttgaataggagtggtgatagagggcatccttgtcttgtgccagttttcaagatgaatacttccagcttttgcccattcagtataatgttggctgtgggtctcctcctggcggaattccagaggcccgaggcaagagccagttgcttcttgccacttcaactcactcattcccctggagttcttgtgggccaggaatgagtcctggtgtgcggtagccccattcagggttcccagcttcctcctccaaccaagcttctgtttcttccctccgcccactctcattgccttctctctgaagatctgttaggagtgtgccagtcatccttgtctttcggtggcagcttttccaccttgctgcatctagtcatccatcttgcccaaccccattattcttttttttttttttttttttttttttgagacggagtctcgctctgtcgcccaggctggagtgcagtggcgcaatctcagctcactgcaagctccgcctcccgggttcaggccattctcctatcttagcctcctgagtagctgggactacaggtgcccgccaccacgcccagctaattttttgtattt

SEQ ID NO: 50489 - DNA, 1106 bp, Homo sapiens
ctgactcgcttgggaaatagcaccttcttcagttataaaatagttataataaattgctatcttactgtttgaaagtaagataaatatactcattaacttctattctagtgcattatagatgcacaattaaatatataatgcccaatattatgaaataaatgatttaaagctagaatcaattgtaaattaaataggaaagactgggtttttattataccaataatgacttaattgaatctgaaacacattataaaatgtgcttatggattcttctgcattattaaattattggtgtgataaaactcaaacttttttaatcttcctaacaagactctttgagcattgatatggtttactccactttattgatactgaattttgctgttctcttcaattatttaaagagttttaaaaccgactgctctaagttggcaaatggaaggattccctatactttaacactatgctgtctttctgccttatataacttatttcttgcattcttctaggacctcattaatcaaggaagagaaaaagttgtagaagcaacaaacagtgtgacagcagtgaggattcaacctcttgaggatataatttcagctgtagtaagctaattggcaattgtcttattccaacctccaatttgtaccctccaccccctactgccatttttttaaatttttaattgttccttcttataaattgatttgcaatagtaaaatactggtaaaatggatggataatgccaaaccgtaacccagcaattttacatagatgttggcacaagagagaaatgggtaaaatgtaagaattgagaaatcaaacatggaaatgtatgcattgtttatataaacattttaattaccagttgtacaaattaaatctaaattattgtttcattccagagatagccagcccaggtacagcagtgaacaacttagtaccctgttttgcatcatgtttttcttcagaaaagaataaaggaaaaggggggtttgaaaccttgggaaatcccgaatatcttaaaataccttaattatttttcctcaattgtacagtaataaggagtaaatagaaaatttttcttttagtggaaggagaacatg

SEQ ID NO: 50490 - DNA, 1042 bp, Homo sapiens
aatctgctttagcatcatcgtgatgctagctggttattttgcagacttgtttgtgtggttgcttcatagtgtcactggactgtgtacttcagtgttttttttagtggctgataatggttttttctttccatatttagtgcttccttcaggacctcttgcaaggcaggcctgctagtgatgaatgccctcagcatttgcttgtctaaatgggatcttatttctcctttgcttatgaagcttggtttggctgtatatgaaattctgggctggaatttcttttatttaagaatgttgaatattggcccctaatctcttccggcttacaggttttccactaagaggtctgctgttagtctgatgggctttcttttgtgtaagtgacctggcctttctctctggctgccctcaacattttttctttcatttcgaccttggataatctgatgattatgtgtcttggggttgatcttctcgtggaatatcttactggggttctctgcatttcttgaatttgaaatttggcctgtcttgctaggttgtggaagttctcctcgatgatatcctaaagtatgttttccagcttggttccactctccctgtcagttttagggaccccagtcagtcgtaggtttggtctccttacataatcacataattctcagaggttcattccttttcattcttttttctctattcttgtctgcctgtcttatttcagaaagatagtcttccagctctaagattctttcctcaccttggtctcttctgctattgatagtttgcattgtgaagttctcatgttgtgtttttcagctccatcaggttggttatgttcctctctaaactggctattcttgctatcagctcctgtattgttttatcgtgattcttagcttctttgccttgggttaaaacatgcttttttttagcccagcgatatttgttattactcaccttctgaagcgtatttctgttatttcatccttctcagcctcagcccagttctgtgctcttgctggagaggtgttgcagtcatttggag

SEQ ID NO: 50491 - DNA, 1469 bp, Homo sapiens
gttcgaggctatgtagtacataatcacacctatgactagccactgcattccagcctgggtaacatagcgagcccctgtctcttaaaaaacaaaagatgtggccaggcatggtggctcacacctgtaatcccagcactttgggaggctgaggtgggcggatcacttgaggtcaggggttcaagaccagcctggacaacatggtaaaaccctgtatctacaaaaatacaaaaaaaaaaaaacacaaaaaaattagccaggcatgtggtggtggcaggcgcctgtaatcccagctacttgggaggctgagccaagataattgcttgtacccaggaggcagaggttgcaatgagctgagattgcgccactgcactccagcctgggtgacagagtgagactctgtctcaaaaaaaaaagacataatttaaactgctaaatagctgctttcattcctatttcatatcttctgtttcctttttacattgtacctataattgagttagagaatgtaacaatgtttgtgaaatgttaactcaagattgtgtagaatgaaaattgagtttcgattcaggctatacttggaaagctgcaacctctagaatgtcactgcagtcatataaaatctagaatgatgactttctacctcacagtggcatgtggcatatgtaatagttgtaatggatatccaatttttaaaggtaaattgctaaatatagtatctagttctttaagtgttaaggagaaaacattcttatcaaaggaggcttttaccttccacctaagtcattttggcaggcctgccttttctttcatttaaagtgataagttctgtagttgtcactatcttattcataccaacaatttgggaatctggatatatttataaatgctctttggcaaaggttatgtgctcgtgaccaaaaaatctgatacaaggtgttatgtgaatttcattcaataagctctctagttacttatcaaattcactgcattttttccagcgtagtttgggaagaaagaaccttcaaatttgaaagtagaggctttttgaccaggaatattaaatttctttactaagaagctagatttatttaagcaataaaaggaatttttcatagctttttgagtgggtcatgtggcagttaagtattctggtgattttatttccagatattacaaaactcaaattgaaagtaatggcaagcaaaatatttttgaaacgtggcaaaccccctcccttacccccaggcaaagccttgattatttttttagatattttattttcaaggttgaatttcagaattaattagatgggaatttttgtcagcttgccaaatactttaaacttctaagtaaattaacttaaacttataatttatcattaattttgttttattaattgaactagtcgttttaaaagcttaaactaatttagattgtgagctagaatatagaccttgcttttccctgtg

SEQ ID NO: 50492 - DNA, 1049 bp, Homo sapiens
aaaccaggcactgtactcagcacttcatgtgtagtatttaatctccacaataatcccatgaagtagatgcttagtagcccattttatataccagaagactgagggttcagcaagttaacttgctcaaggacaaagggctaataagtggtggaactaggattaaaatctgcttgagactcactgttcaatacaagagccactagctccatatggctacttacatttacattaaaattaagttaaaaaatcagtttctccatcacattagtcacacttcagatactcagtagtcacatgtggcttgtagctactgtcttggatagtgcaaacacagaacatttccatcgttgcagagagtactattagagagcagtattccagagcctgtgatcttaatcactacacctaaagcctcccagttgacaaagttaccacctttttttggtgtgtgtgcacgtgcgtgtgtgtgtgtgtaagtatatataatttaaatcattccattaaatttacctctgaaattcaaaagactgaaacagatcttctttttatcaaataagttgattgcagagattatattggtgtttacatttcaggcaacctgctcatgaaattatccattgtagagagaaacctgggaaacaaagctatacgtcctttaatttttttccccattttcatttaaagttcagaagaacataatatgttggaatgatcaatgattctgaattaatatagatatttgaatgtcacagtatctgtatattaatatcctaaagtggtgttactatattggttaggttgactgattcatacatgtaagtcttttaacactcctggagtaagagtagcaagaaactgaagctatgatccttttaagggtttaagtaggtgaatacctcacttttgtctcttccattactagtgttttcatgaccaagttttttacatcagatttattattttggacccttaaaggaatataaattgcaagagagattttgatcagtgtaagaattactagatggccttatttatttccttctttatta

SEQ ID NO: 50493 - DNA, 1035 bp, Homo sapiens
gtgtgagtgggcatcatcctacccattgagggcctgaatagaccaaaaatgcagaggaagggcaaatttgctctctctttctttgagctgggacatccatcttatcgagcccttggagattggtaatcatggttcttcagccttcagactcagacagactaggacttataccaactgcccccacccacaaccctacccccggattttcaggcctttgaactgggaccaggatttatacgattagctccctggttttgcagcttgtgaacagtacattgtagcacttcacagcttccataatcacagtgaggctaatgccgtaatatgtctacacacacacacacacacacacacacacacacacgcatgtacacacaagttcttaactccttttggttctgtttctctggaaaaccctgactaatacaaacgtcatttcacattaagagtgtaaaggcaagccacaaagttggagaagctatttccaatatatagatataaaaaggtctcatccaggatatataaataactcttaaaaatcaattggataaactagacaacccaatagaaaaatgggcaaaaacttgaacaggactttacaaaagacgatatctgaatggccaataaatgtatgaaagcatggtgatccttattaattatcagagaaattcaagttaaaaatggttttgacaaaagatgcaaaagcaattaaatggagagagcatagccttttcaaaaactggtattgaaacaattagactttcataggccaaaaacaaacctttacttaagccttacccatattttaaaaaatcaagtcaaaaggaatcataaatctaaatgtaaaactattatacttgtataagaaaacagaagaaaatcttctgcatctagggttagtcagagttcttagtcatgatgccaaaggcatataacccattaaataaaaaatcaataattggacttaatcaaaaataaaaacttttgtctgtgaaagactcttagggaaaggaaaagacaacttatagacttgga

SEQ ID NO: 50494 - DNA, 1439 bp, Homo sapiens
gacttatatttattatttgctgttacttctccctaatgtttcagtattcctttttatatcatttgctttgtatttagagaacttattgtagccattcctttttttttaagcagggtcttgctctgtcacccaggctggcatacagtggtgcaatttcagctcactgcagccttgacctcctaggcttaagccatcctcccacctcagcgtcccaagtagctgggactacaggtgggcaccaccacacctggctaatttctgtattttttgtagagatggggttgtaccatattgcccaggctggtcttgaactcctgagctcaagtgatccacctgctttggcctcccaatgtgctgggattacaggcgtgagccaccatgcctggcctagccattctttaacagcaagtccgctggcaacaaatgatttccccttcattcttgaatggtatttcagctggatatagaattctgggttggcaattctttcctttcagtacttgaaaaatatgtgtcactaccttctcgtctccctggtttcttatgagaaacctgctgtttgaattgtttttccccccttagataaggtgtcgtttctctcttctttcaagattatttttctacgtttttggaagatgactgatatattttgtcacgtatttgtttgggtttatcctgtttgtggttcattcagctacttaagctgcaggtttatgtttcttaatacattttggtaattttcagtcattatttctttgaatttcagcccctccttccttctcctcttcttttaggactctaatgacaaaaatattaaatcttttgttatagtcccatgggtacatgagtctcttttccattccatttttctctgttgttcagattaggccatttctgttgtttagtcttcaaaatcaccaaatcttctgttctctgctttctactgaacacattctgagtttttaatttctgttatatttttcagttctaattttttttttttttgagacagggtctcactctcgcccaagctggagtgcagtagcaagatttcagctcactgcacactccaccttccaggttcaagcaattctcatgcctcagccacccaagtagctgggattgcaggcatgcaccaccacacccagctaacttttgtaattttagtacagacggggtttcaccatgttggccagactggtttggaactcctgacctcaagtaatctgcgtgcctttgcctcccaacttgctgggattacaggcctgagctgctgtgcccagcctaaaattttcagttgattctttttttatgtcttcttgtttctttgctgagactgtttgtttcatttgtctcaagtatgttaataattgcttatgaggcatttttataatgactactttaaaaatccttgtcagacaattctaacatctatgtca

SEQ ID NO: 50495 - DNA, 1630 bp, Homo sapiens
gattggtttttgaatactgaaccaacttttcatgcctggaataaaactccacttgatcgtaaggataattcttttgatatagtacttggttctgtttgctaatactttgttgagagatatttatgagagttactcttatatattcagttgttttcgtgttgtcattgtctggttttggtatcaggttaatatcgacctcataaaataagtcaataattgttttctattttctgacaaaaattatggggatttgtgttaatcttaaatgtttggtaaaatttgccagtgaaaccagttctggccttgaagatttctttttttgggagtttaaaaatcactaattaaatttcctcagtagttttaggattattcaaatgatctattttatattgaatgtgttgttgtagtttgtgcttttgtaagaattggttcatttcatcgtaatttcaaatatatgtgtagaattgttcatagcattttcttaatatccttttcatgtctttagggtctatagtgatagcttctgtttcacttctgatactggtaatttgtgtgttttctttttactagtcttgctagaggtttgtcagtttcattaattgttacaaataactagtgttttattcccttgattttctttttctttttttttttttcctattttaatttcatcttgcttttggtttgttttgctcttgttctactttctggaggtagaagcttagattactaatttgatttgagactttttttcttttctcatgtaagcatttagtgttataaatttcgctttcagcactgctttagttatacaaactttgatgtgttatattttcatttagttcagtatatttttatttcagaattcatctttggctcagctagaagcatgttgtttaatttccatgcgtttggaggttcccattatttttctgttgtggatttctagttcaattatgttcaggaaatataatctgtatgatttcaattcttttaagtttgttatgctttgttttatgtctcaagtagactggcccttgaagagaatatgtactctgctgttgttgggtggagtgttctataaatactgattagattttgtttttcgatgaggttcttgtatttttctttacttttgctgattttttttttttggctatgtggttatcagtttttgagaggaaggttgaaatctccaactataattgtggatttttctgtttctccttcagttctgtcaggttttgcttctgatattttcagctctgttgtttattatgcacatttagtattgctgtgcccctgtctatccctcataatcttctttgctctgaaatctgttttatctgatactaatataaccactcttgttttattttgattggtgtttgcacggtatatagtttttcatccttttacttcaactcacctatgttgttgtatttgaagtgagtttcttgtagacagcatgtgattgggtcatgttttttgttttattttttatccacttaatttttcttttaaatggtgtatatagaccgtttatatttaatgtaaggcttcagtctaccattttatttttttgttcagttggttctctttcattttattttcttttgtttatgatttc

SEQ ID NO: 50496 - DNA, 1035 bp, Homo sapiens
actgcacagtcaaggaagaagtgggctgaagaatttaatgatgaaactaatgtgaggtaggaaaaattttctgtatatgtagaaacattaaaataattaattttaaaatttacataaagttcactatttttattgtgtatttgaatgtttttagcaaatgcaaggtacagtcaggttgcaaaacagtgtcatcactccctaaccactgaattcacttatggaatcatataatttgtagccttttgagtctcacttctttcacttagtgagatttatttgagaatcatttacattgttgcatataccaataatttttaaaaattgttgtatagtcttccattatagggctatatcacagtttgttcagctacttccacttgagggacatttgagttgtttccaggttttggaattaaaatcaaagctgctctaagctttcatgttcaagtttttgtgtgaacataagtatttacttaaatgaaacaaaagcctaggattgtgattgctgggtcatatagtaagtgtacatttatctttgtaagaaactatcaagcagttttccaaagtgactgtacaatttttcattcccacccgcagttgtatgagagttccagtttccttacattcttgtctgtacatggtattgtcattttttaaaaaaattattttactcattctaatgtatgtgtagtggcatctcttgtgattttaatttgctattccctaatgataaattatgttgagcatcttttcatgtgcttattgaccattttaatatcattaactgtagatacaaggcaatttgtgtgtgtattgatattgttttaagctgttagtaattgacaaaatcaagctacatttggaaagaaaaagttttatatatagtcatatgttgcttaacaaccagtatacattctgagaaatgcatcattaggcaattttgtcactatgcaaatatcatagagtgtactgtacatcagtaggctttctgtgatatagcttattgctcctaggctgcaaaactgtacagcatgt

SEQ ID NO: 50497 - DNA, 1052 bp, Homo sapiens
gacctcaggttatctgcctgccttggcctcccaaagtgctgggattatataagtgagccactgcgtctggctgggattgccggattctatggtagctctatttttaattttttgaggaacctctgaactgttctccatagtggttttactaatttgtgttcccaccagcagtgtacaagagttcccttttctccaaatcctctctagtatttgttactccctgactttggataaaagccaagttaactggggtgggaagatatctcatagtttgatttgcatttttctgataatgaatgatgttgagcaccttttcctatacctgtttgccattggtatgtcttcttttgagaaatgattattattttgtccattttaaaatcagattattaaattttttttcctgtagagttgtttgagttctttatatattccggttattaatcgcttgtcagatgggtagttttcatatattttctcccatcctgtgggttgtctcttcactttgttgactgtgtcctttgttgcgcagaagctttttaacttgatgaaatcacatttgtctgtttttgcttttgttgcctctgcttgttgggtattactcaaaaaatctttgcctagtccaatgtcctggagagtttccccaatgttttcttgtagtagatttgcagtttgaggtctaagatttaaatctttaatccattttgacttgatttttatatatggcgagagataggggtctagtttttttctcctgaatatgtatatccagttttccccagcaccatttgctgaagagactgtcttttccccagggtatattcatggcaactttgtcaaaaatgagttcactgcagatttatacatttatctcagggttctctattgtgttgatctatgtgtttttatgccagtaccatagtgttttggttactatagttctgtagtataaagtcaggtaatgtgattcttacacttttgttcttttggcttagtatagctttggctattttgggtcttttgtggttccatataaatttttagggttgttt

SEQ ID NO: 50498 - DNA, 1014 bp, Homo sapiens
accgtgttagccaggatggtctcgatctcctgacctcgtgatccacccgtctcggtctcccaaaatgctgggattacaggcgtgagccactgcgcccggctaccaagaccattggttaaaagactatccttttaccattgaaatgcctgggccctacaattaattatcctatgtggctctctatctggactctattctgttctattgatctgtgcctgtccctttactacactgtcttggttactgtaactttgtaagtaatgaaatcatgaagagtcagccctccaactttgtttttctttttcagaattgtcttccctcctctgaggtggcattctcatatacattttacaatcaccttgtaatttctacaaaaaaatcctgctgggatttttgttacaattgtgttaaatttgtagatcgatttaggaagaagtgatatctttactaggaatcttctaatccataaacactaatctgtttttttagccttgttttcagccagtccctcatatctctggacttgattgaagattttcttgaattagctagtagggagaagacagaagataaagataaaccccttatttataaaggtgagctacaaatatttctgtgtcgtaattttaaaaatactgatttaaacataccatacaaacattttagcaacaaaagaaacaaaactacccagtctcacaactctatcatatcaaaatttttttgcaatgtctatttgtccttatccatatatatgtatagtctttttcaaaataaaattgtattgtttatatttgaggtttacaacatggtgttatgggatacatatagatagtaaaatggctactgtagtgaagcagatgaacatatctatcatctcacatagttttttttggtgacaagagcagctaatatcaacttaagaaaaattcctaatacagcagtctttgttgttgaaattgttggataaattaaaactttttggtttctaaagcagttttattgagagataattca

SEQ ID NO: 50499 - DNA, 1050 bp, Homo sapiens
gtggtaactgagcctttccatctctgttgattcctgtctcatggagtatgtttgggggcattttactctcttagggcctggtgggaaggggatggtttctcttctctttgggtctctgtctttctgagctccactcctaccccgagggtttgtctcttacacttgcactctctcagagtcaatctcttgcttgttctcttatttggcatctccttcctttctctttttctatctagagctcactcttctgggatagtctctgtccttctgtgctgtatgtgcgtgtgcctgcctttctcttttttccctcccctctcccaagtccccatcagtttctttcttactctccccatgggtaggtctttttctgtctctcttgctctctttccatttcttttctaatttacctacttatgttccatttgtcttatttaggtaaagctacttcttcttctaatccaagcagcccagctccagactggtacaaagattttgttacagatgctgatgctgaggttttagagcattctgggaaaatggtacttctctttgaaattcttcgaatggcagaggaaattggggataaagtgtaagtgctttaccatatttattatataaattaaccttttgattatgtttttattgcttaaacaatgtatttgaacaaatctgttgcttttccttccttcctaaagatgtgatttatttggtcattgtagtgctaggccaatacaagcaactatcttttttgtaagccactagttctgattgcatattcaggttatttcttcagtgtaaatttctgcttctacctgttgcaacttgaacttatttccttgggtagagctcttagttgaaatttgtgtttctccatcttcaaaatcatttttcggtttatgtagtgtgacttctaccgtgttgctttactgagatttccccctgtaaagtcactagtgaccttctaatcctcaaatctagtggacatctctcaggctttattttattttacctgcttgattattctttcttcttcttcttcttttttttttt

SEQ ID NO: 50500 - DNA, 1028 bp, Homo sapiens
tagctggtattgtataactttaaaaaaaatgactttcttacagtaaatataagaaaatctgaataggaagtattaaggggctagtctgcctccttagcgcagtaggcagcacatcggtctcataatctgaaggaagtattaaagggttaacaatgttgtacctggaatttgaaatggatattaaataattaattacctataattgagctacaatatgatttttgccacatattttattttcacgtcaaagagttactgtttgctttaatccttttgtagtagctgtctcgtttttctgagaagcagcatcttgaatgagtcatttaagtttagcttacatcatccccatttctgtgttttaaatgttttttattagaaggagagttcatgatcacgaaatgactatgtaaattacttcaaagtgttagatttattattacttaagtatttttagagtaagcttcattggtaagcatttgcattttaaaacgtatgtaattgtatggatataaagttttgtgacagaatccttgtatatgatgtagagccgtaatattagtactaatataccatatttattcactcaacagatatttataaagtgcttactatatgcccagacataaggagggaactgataagcctaaatggtaaattgaagaaggtatgctatggaaatcctagggagatgctagtcttgagactagcagctttgattttcatttatccagggacaggatttgagacttcgagccctctataagttggagagttctgtgaccccttctcaaagctgaatccctttaaagtttacaatcccatcgacaatccagggagttgacaaggaagcttatctatttcagccagggctcttggttgggaaaaatagttacattgaatttacggtcatggccttcacctcacatactttatggtttgaatttatattactcatatagtctaaaagatccgaaactgaaatattaacttcacaagtaattctgagttggtgattccctggagacctg

SEQ ID NO: 50501 - DNA, 1060 bp, Homo sapiens
tctggaattcaagatctcggggaggtggtgaaggaaatgtggatgaaacaggaaacaatccttctgtttctttaaaactggaagaaagtgagtctaatgaatgttgcctttatcatggaacagtaatttggaaaatgtcatgtcgttagtccttttttcagtcacttacctgactaattgactcaaaggaatctttcctcaattgatgagtctaatcaagtactcataattacagtaaatatctgatgaatctttaattataagcaagctactctgtgctctctggtatttgggggaaaggtaaaaagaaaaactaatgtttatttacttgtatatacctaaactctattattttcactacatgtgttagctaactgaattcttgagcaggcttgcaatgtagttgatagttttaaaaatgagtaggagaactggtattcagacctaaaaatgtctaatctcaaagccaccatgatattttcacttaactgtatgggaataaatggaaacatttcagataatcaagtgtgattgtagttaatttttagtcagtaatatacagtaaaactaattttaatcatttagtgtttttcctttgtgattcttcataatctgcaattatctactttaggtttcctgtgtattatgtacagtttctatcacctcttttgttttctttctgtctctcttgtgcatgaaagtgaagtcttagattgaactctgcagtggtttaagttgtctttacctatatgtaagttgaaggattagtgttgagacactgtatcctactagtgcagcctgtatgcctaggagcttaaaaactgggaccaaatgtctgcctatttgaaatagcagattatgaagagagaacaaggtagtggctctaaatatttggcatttgggagttgtggagcaaagcagttaactgtctataaggagaagagagttgtgggggccacctaggttagtgatcctgtgatcagataaacttggctggtctcaggcctacagctgaaataacttggtgattaattattttaattttatttttataatttca

SEQ ID NO: 50502 - DNA, 1066 bp, Homo sapiens
atggcttgagcccgcaggagttcgaggttgcagtaagctatgattgcatcactgcactccagcctgggtgacagtgtaagaccctgtatcaaaaaaacaaaaacaagaacagaaagaaaaatgacctaaagtaaggaatgaaagagtatcactactaaccttacagaaataaaaagaattataagtgaatattgtgaacagctgtatgccgagaaattatatacctcattttcatagcagtgatttctgttacacaatggaaataacctctatcaggcaaaataatactcagcagatttttatgcattattaatgtttcatatcactactaaattttctctcactcgtggaggcaaaatttgctaattatttaaacaacttacatagtttaaaaccgtggataggaaaatatgttattgcttaaatgctgttttttccttttaatcagttttgttcttttgcatattaccttcttgataattttattatattaatgaaacgtgcattcattttctttatgttttataggaaaatgataattctgttgaaattattctggatagagcagagctaatatttacattttatacatcaaaaacataatttttggaaggtcttttttttttttttttaagagacaaggttttgctctttcatccaggcgggagtgctgtggtgcaatcatagttcattgtaacctcaaactcctgggctcaagtgattctcccacttcagcctcccaagtatctagggtatctagggctataggtgtgtgccatcatacctggctaatgtttttgtttttcttggtggagacagagtctcgctgtgttgtccaggcctgtcttgaactcctggcctcaagcggtcctcctgcctcggcctcccaaagtgctgtgattacaggtgtgagctactgtcacttgcctagaagtaatttttttgagtgagcatagttggcgagagtcagtaaaggactatctgcatggagcaaagtttatttataacaggagtttgtaatctagggtccatggatagaatttaggggattatatgtacctggata

SEQ ID NO: 50503 - DNA, 1052 bp, Homo sapiens
tttgagaaatgtctactcagatcttttgccaattttttaattaggttgttagaatttttttccatttgacttgtttcagctccttatatattgtggtcattaatcccttgtcagatgcgtagtttgcaggtattttctcccatcctgtgggttgtctcttcactttgttggattgtattctttcctatgcagaagctttttaacttgatatgatcccatctgtccatttttttgtgttggttgcttctgcttttgaggtattactcaaatctttgcccagtccaatgtcctgtagagtttctccagtggtttctcttagtaattccatagtttaaggtattagatttaagtttttaatccatttgaatatgatttttatatatggcaatagataggtgtccagattcattcttctgcgtatggatatccagttttcccagcaccacttactgaagagactatcctttccccagtgcatgttcatggcacctgtgtagagtatgcgttcactgtaggtgtgtgaacttgtttctgggttaattattctgtttcattggcctatgtgtcttttttttttttttttttgagacggggtctcgctctgttgtccaggctggagtgcagtggtgcaatctcggctcactgcaagctctgcctcctgggttcacgccattcttctgcctcagcctcccaagtagctgggactacaggcacccaccactgtgctggactaatttttcgtatttttagtagaggcggggtttcactgtggtctcgatctcctgacctcatgatccgcctgcctcggcctcccaaagtgctgggattacaggtgtgagccactgtgcccggccggcctatgtgtcttttttatgctagtacgatgctgttttgattacagtagttctatagtatactttgaagttatgtaatgtgattcctccagttttgttcatttagctcaggatagctttcactattctgggtctttcgtggttccttataaatttcaggatagttttttcaatttctgtgaagaatatcattggtat

SEQ ID NO: 50504 - DNA, 1032 bp, Homo sapiens
tgtgggggattggttctaggacctgcctgtgtataccaaaatttgctcatacacaaatcccgcagaacctgcatatatgaaaagtcaaacataggtttcacattctgtgaatactgtattttcaatcaacatttggttgaaacaaagtctgtataagtggacccgtgtggtttatacctttggtgcgcaagggtcaactgtatgtaaagaactcctacaactcaacaacaaagaaacagtctgtttcaaaaagaagcaaaggatttgaatagacatttctctaaagaagatatacaaatggccaataagcacataaaaaaatgctcaacatatctactcattagaggaatgcaaatcaaacgtacagtgagataccatttcacacccattgtggtggccattataaaaaaaaaaaaggaaaataagtgcttatgaggatgtggagaaagtggaaccctgtacattgctagtaggaatgtcagatgatgtggctactatggaaaaacattgtagtaactcagaaagttagacatagaattaccatttgatctaatagttccacttataggtatacccagaagaattgaaagcaggaactcaagcagatactgggacacttatgtttatagttgcatcattcataatggcaaaaaaaggtggaagcaacccaaatgtccattgatggatgaatgcataaacaaaatgtggtatggacatacttcagtggaatattagccttataaaggggggaaattccgacatttactaccacatagatgaagcttgaagacattaatgctaagtgaaatatatcagacacaaaaaggcaaatactgtatacttctgcttaaaggtacctagagtagccaaactctacgagtagaaagtagaatggtgattaccaggttctgggggacgaagggaatgggaagttactgttaatgggtactaagttctgtttggaatgatgaaaaagttctagaaatagagagtgatgatgtttgtacaacattgtgattatacttaatgcca

SEQ ID NO: 50505 - DNA, 1115 bp, Homo sapiens
acttattctttttagggcttaatttacatagctataaattaggttttcctttggacaaaaggtgttagagggcaaaaataaaacctttagccaggtagtctccatcactctgtatataatttgtgatttggagaaaaatgacctgaagtttgtaattttttggcttctgaatgtactatgattgttctatatgttatgatcttactgaaagttgtcgctaagttgtacttctacagtatgtggatctgatttcactttatatgatttattaataggtatacaattgtattttatctcatgtacatcatatttcttagtctaatgacaatccagaacttgagaatgcattaagtaggtttatgtattgtgactttccgttttttagtagacatattctttggagactgggatttgaaagaagaaaaattgtgtgatttcctacaattaacaaccaaatctttatagttaataggaattttttaaagactttttttgaacttgtaaacacaaactgaaatcaggttgttgaactaggctttcaagtaactagattaggaattgtatttttgttggctgtttagtgttcaacccaaatgatggtatgagatcttgtacttgcaagtaaactgtgtttttccatttctaatccagtattcaatgcttcacatattttatacacacacacacacacacacacacacacacacacacacacatatttattcgtcccaaaattcattattcagattagtttgaggaagtttttctggtccatgagaaatgacagtgtagtattactaaagatggttttaatatataccaacagaaaaaaaaagtgctgtgccagacatagaaatttgctgctaacattttattttagtatcttctagtcttttttagggacatacaaattttagaagttttttttttttaaatagaactatattgtggtttataaattactttttcactgaatattaataaatattttctatcttaatcttatttagaatatcattttaatttctatctcttatggataatcatgtgaaaatactatttaatcagtttctgatattgaatgtttaaacgttttctcaccctttgctattgca

SEQ ID NO: 50506 - DNA, 1030 bp, Homo sapiens
ttgtctggaaaaaaaaaaaaaaggcatcatctgtatttgcccaggcactcattagcatacaagtattaacaagtagagggtatagtgctggcacagtaaaattaatagcagattgggatttaggatcttaggttctactcctgactttgccactagttagctttgtttctttggctgagtcatttcctatatctaagcctgtttcctcatctgtagaatgacaaagctgtactctgaggtttgtccttctggctctaacattttgtattgcttttgttaatggctcgaaagctccctggtgcaggaggtccttctcttgattgcattttaagaaactcaacatttcgaattattgatttacctatcagcaagaggtggtttactttcctttcctgtttgagcgtttaaacaagcgacattactcatttcctttctagataggattggagttaataaaggctttcttggctttctcctatgtttttttttttttttccccgattgcttgtttgtcattgtgttgttgggctcacttcttattattttatttgtgctttcttttagtaatggtgttatcttggtgttcattatgtactttggaagacttagtatatgtgggttttggggtcctatttattttctcatgcgccagttccgatcattgtttgtttgtgggtttttacccttcctcccatattgttttgctttctccccctctcccttccctccctttcaggaaaatggaggagtggctccattacttctggctctgcccaggttttctgccacaagagtggcacggcctgtgcctctaatgcttctgatagagtcgtgactgctttggatgctacacctgccccaagatgtaatattgagcattgagattccaggggcagtacatcgtcctggaaagcctcaagaaaggaaacttcagagcaaacagaatcaactagggatcatgactatacatccagcatgatccagcatgggtccagccgaggcctccaaaatgatgctttgccagcctcag

SEQ ID NO: 50507 - DNA, 1040 bp, Homo sapiens
atttattaacttgtttaatattcactataccaaagaggtatctaatacccatgggttatgtagtcatgatggggatacaaatactttcttgcactattttagtatagattatatatttgagcatatttgaatatgcactaagcaacttaaaaaattcatttgcagatcacgattaagtcttagaattatttttctaacttcctaatttttgagtaggttgtattttggtagacagcatattgtaattgtatgtaaatttgtacacaattgtgtgtaaattgtgtataaatcttatatgctttgtctttttagcagtattgtaatacattttcagtgttggtgtttatgaagcgatagtgtattattgcaaatggttaactatttggatgcaataaatttttgtaaaccttttttcttgttcaagcatttaattttaataataatgttacttttttatatcatgagagttgacataatttgttattaaaatatagaggctagtttgtagccaaagaagttttgaaattttgaaatttaggacgtaaatacttttaattcccctaacatatatacttatatatatttgtgtgaaagttttacaacagatttaactactatttactttttctgttttaaagctatgatggcttttgggggcatttaaaaaacttagtcatatcctgaatattttagtaaatgtgaatacatttctgttttagcatgctattatgtagcgtcactcatatttgaaagtaaatgtataatattatgagacagtggtctaacctataaattaatttctatttaattggatttacttaatgaacaaggacagaatattatagattgatcaacacttgtatgtttctggtttagctttttataaaaaaaagtagactaatcatatattttgaattttatataactgaaaatttagagcttaggctttatgtagtttctcaatggcagaataataataccaaataggttgtcaggttttcacatttatacacgtaattttaaagtaatatacttgaaag

SEQ ID NO: 50508 - DNA, 1051 bp, Homo sapiens
ttcaactgcattttaaaattacttgctactaccaaaatattaatactgtttttgctattcctcgaagatacagcaccagttaacgtcaaaattaaaatggaccagtacgaaggttattgtggcaagaaacttatgctaatatgatggctgttgatacagaattgttactgagaagggtggactttaaaagccttgtgccctgggaaggaactctgaaatatataaggtccagctatttatcattttactgctggcacttcacaaataacctgttatgttttctataagaatgctttttactcatattttggagtccagagtttagaccccacttagtttgctttaaagtttttggctttcagttttattttacatggttttaattatatagcttatttaaagctaattttaagtacacttttttccctcaaggagatgaagccttatctaaatcagtgcctgtcacagtggatgatgatgatgacgacaatgatcctgagaataggtatgattccatctgtaaggactttaaaaagattataacacaccctaggcatgggcacaaacagcagcaacggaacagcaagcaggttgtaaaaaccaggagtgcctgccttagaaagactcgctcacagtcttcctgcaagtttgaaagaaaggccagaaaatgggctaaaactcagaaaccttaagagaaagtaatatcattatttacacacctagcatagggtgtgttataaatacagaactgtcaattttatgttgctatgtaaactgcagtaatttttttggaataatttattttgacagattattgatgaaagtaaatcatatctcagtaaattggtaacaacagacatctcctctatatttgactattgttaattgccatccaatatggtggtcctatttattaaggcctgttgagaagaaacaaaaagagagattactcagatatttaagattaagaaattgctttcaaaataagtgtcagtttacaaggtatctagactgagttagagtttaaccagttttcaaataaaatagaaat

SEQ ID NO: 50509 - DNA, 5324 bp, Homo sapiens
gacatccttcattagttcatccatgagttcaattgttttgatttttagatcccacttataagtgacaacatgcagtgtttgtctttctgtgcctggcttatttcacttaacataatgatctccagttccttccatgttgttgcaaatgacaggatctcattcttttttatggctgaatagtactccattgtgtatatgtaccgcattttatttatttacttatctgttgatgggcacttaggttgcttccaaatctttgctattgtaaacagtggcccaacaatcataggagtgccagtatctctttgatatactcatttcctttcttttgtgtatatactcagcaggtggattgctggatcatacggtatctcaatttttagtttttttgaggaatctcccaactgttttctatagtgattgtactcatttacattcctaccaacagtatacaagggttcccttttctccacatccttgccagcatttgttattgcctgtcttttggatataagccattttaactggggtgagatgatatcttattatagttttgattaacatttctctgataatcaatgatggtgagcagcttttcatatgcctgtttgtcatttgtatgtcttctttggagaaatgtccagtctaatcttttgcccattttttgattggattatttgattttttcctatagaattgttggagctctttatatattgtggttattaatccattgtcagatgggcactttgcaaaatgttctcccattctgtgggttgtcttttcattttgttgattgtatcctttgctgtgcagaagctttttaacttgatgtgatctcatttgccaatttttgctttggttgcctgagcttgtgtaatatgctcaataaatctttgcccacaccagtgtcctggagattttccccagtgtttttaattacttaaaaaaataaagtttttgtcctttatgaatgttatcaattttgaattaaatttccccttcctcttttcttttaatagaattgctttaagtattacatgagtgatgatattagccgtgactcagatggaatggatgaacaatgtaggtaggtaatatagatgagctaacattcagtgtttcctacttttgggaggaattgttacataatcatttatgaggtttgtctttcatagtatcgtcattgatgtctttaatgaaaggttgttcttttccataaaaccctggatttatgtctagtttaagtttctaataaagagtaagcagatgacctaaattaccactaaaattactggcagtaaaatttaaattgcattataacaaagagattaaaatgagttttgttgggaataatgtttatttttatttttttacatatcttttcagtttcctgaaagaagggaataatgttttaatctttaaaacatttcaggtggtgtgcggaaggtggaaacttgatttgttgtgacttttgccataatgctttctgcaagaaatgcattctacgcaaccttggtcgaaaggagttgtccacaataatggatgaaaacaaccaatggtattgctacatttgtcacccagagcctttgttggacttggtcactgcatgtaacagcgtatttgagaatttagaacagttgttgcagcaaaataagaagaagataaaagttgacagtgaaaagagtaataaagtatatgaacatacatccagattttctccaaagaagactagttcaaattgtaatggagaagaaaagaaattagatgattcctgttctggctctgtaacctactcttattccgcactaattgtgcccaaagagatgattaagaaggcaaaaaaactgattgagaccacagccaacatgaactccagttatgttaaatttttaaagcaggcaacagataattcagaaatcagttctgctacaaaattacgtcagcttaaggcttttaagtctgtgttggctgatattaagaaggctcatcttgcattggaagaagacttaaattccgagtttcgagcgatggatgctgtaaacaaagagaaaaataccaaagagcataaagtcatagatgctaagtttgaaacaaaagcacgaaaaggagaaaaaccttgtgctttggaaaagaaggatatttcaaagtcagaagctaaactttcaagaaaacaggtagatagtgagcacatgcatcagaatgttccaacagaggaacaaagaacaaataaaagtaccggtggtgaacataagaaatctgatagaaaagaagaacctcaatatgaacctgccaacacttctgaagatttagacatggatattgtgtctgttccttcctcagttccagaagacatttttgagaatcttgagactgctatggaagttcagagttcagttgatcatcaaggggatggcagcagtggaactgaacaagaagtggagagttcatctgtaaaattaaatatttcttcaaaagacaacagaggaggtattaaatcaaaaactacagctaaagtaacaaaagaattatatgttaaactcactcctgtttccctttctaattccccaattaaaggtgctgattgtcaggaagttccacaagataaagatggctataaaagttgtggtctgaaccccaagttagagaaatgtggacttggacaggaaaacagtgataatgagcatttggttgaaaatgaagtttcattacttttagaggaatctgatcttcgaagatccccacgtgtaaagactacacccttgaggcgaccgacagaaactaaccctgtaacatctaattcagatgaagaatgtaatgaaacagttaaggagaaacaaaaactatcagttccagtgagaaaaaaggataagcgtaattcttctgacagtgctatagataatcctaagcctaataaattgccaaaatctaagcaatcagagactgtggatcaaaattcagattctgatgaaatgctagcaatcctcaaagaggtgagcaggatgagtcacagttcttcttcagatactgatattaatgaaattcatacaaaccataagactttgtatgatttaaagactcaggcggggaaagatgataaaggaaaaaggaaacgaaaaagttctacatctggctcagattttgatactaaaaagggcaaatcagctaagagctctataatttctaaaaagaaacgacaaacccagtctgagtcttctaattatgactcagaattagaaaaagagataaagagcatgagtaaaattggtgctgccagaaccaccaaaaaaagaattccaaatacaaaagattttgactcttctgaagatgagaaacacagcaaaaaaggaatggataatcaagggcacaaaaatttgaagacctcacaagaaggatcatctgatgatgctgaaagaaaacaagagagagagactttctcttcagcagaaggcacagttgataaagacacgaccatcatggaattaagagatcgacttcctaagaagcagcaagcaagtgcttccactgatggtgtcgataagctttctgggaaagagcagagttttacttctttggaagttagaaaagttgctgaaactaaagaaaagagcaagcatctcaaaaccaaaacatgtaaaaaagtacaggatggcttatctgatattgcagagaaattcctaaagaaagaccagagcgatgaaacttctgaagatgataaaaagcagagcaaaaagggaactgaagaaaaaaagaaaccttcagactttaagaaaaaagtaattaaaatggaacaacagtatgaatcttcatctgatggcactgaaaagttacctgagcgagaagaaatttgtcattttcctaagggcataaaacaaattaagaatggaacaactgatggagaaaagaaaagtaaaaaaataagagataaaacttctaaaaagaaggatgaattatctgattatgctgagaagtcaacagggaaaggagatagttgtgactcttcagaggataaaaagagtaagaatggagcatatggtagagagaagaaaaggtgcaagttgcttggaaagagttcaaggaagagacaagattgttcatcatctgatactgagaaatattccatgaaagaagatggttgtaactcttctgataagagactgaaaagaatagaattgagggaaagaagaaatttaagttcaaagagaaatactaaggaaatacaaagtggctcatcatcatctgatgctgaggaaagttctgaagataataaaaagaagaagcaaagaacttcatctaaaaagaaggcagtcattgtcaaggagaaaaagagaaactccctaagaacaagcactaaaaggaagcaagctgacattacatcctcatcttcttctgatatagaagatgatgatcagaattctataggtgagggaagcagcgatgaacagaaaattaagcctgtgactgaaaatttagtgctgtcttcacatactggattttgccaatcttcaggtatgcaaaaataaataaaaaattcataatttgtacttccccctcttgagttactacattgtttaatttcctctgaagctaatcaaatttagggttactacttaggagaataccacttaaaaattatttaggagtttattaaaaaaagtttccctatttatttttatgctgccattggaagatattttgaacattgctagtattcagtatcagggatctcaaatttgttgagtaaatgacaaaatttctttatcaatgtttagtgcttttctctggagtaatgagcagaaggaaaagcggactggtgccagtggttcagtagctatttagttatataatggaagtgagtgcttggtactggtatgacatggtgtgtcaaaattttaactgccatgcatatggctttttaagtttgaacatataactttgtgtctcatgaaatcccctttaattatttttaatttacctcattaaaaccctttgttgatgcttattaactagtttctaatgacatgaacagatgtttttcttttaaaaacactgtcaaaatgaaggaagaaaatccaaacattagctggattagcctaccctgatgaggtagagtactaggaacattaaagtttgggtcagctggtgaatgaaaatatttttatgaattaattaaaatctttaaaatttatgaaaaataattttaaaaataagtttttattattgaagttattttaaaaatcagttgtataataaatgtgtattggtcatttgtctttttttttagtcagtaagacctgtcagttctatggatactcagaatttat

SEQ ID NO: 50510 - DNA, 2260 bp, Homo sapiens
tgtatatatcatttgggaacgtttttcatttaacattgtttttgaattgtattcatgtcagtaaatgtacatctagtttgtttatttttcactgctctatagaattatgttatatcaataagccactattcatttcccacataggaagttattcccaatttttcattttctaattttctaattagtgctgtggtgaatatccttatatttgattccttgtgcacatgtgggagaaaatctccaaagaattacctagttttgtttaattcttgagcgatgtatgcaccaaagcacatagaagatacttagtaagtattacttaacactggatgaacattcagattctacattttatttatcttgttagtttatctgaatgaaatcattgtttgaaatgaaaaagtatggtgtggtgtatttgtttctgttaaaacaaatacagaatatatgaatacccaagatcaaactggtgtttgtaaataatgtgattataatacattaggcttgtaatgcctgctattaggtaggttgagataggaggattgcttgaactcaggcgtttgaggctacagtgatttataattgtgccattgtactccagtctgggtgatggattgagaccccatctttaaaattaaaaaaataaataaataaaaatattagcaacataaatagtaaaccttcaagtttacttttctaaaaaagtatgatggtgttcttatacattaacgtttttagcttctggctaggtgtggtggctcacacctgtaatcccagcattttgggaggctgatgccagaagattgcttgagcccaggagttggagaccagcctgggcaacacagtgagacccagtctttaaaaagaattagctgggtgtagtggtgtatgcctatagtcccagctactcaggaggctgaggtaggaggattgcttgagcctgggaggtagaggctgcagtgagctgaatttgcaccattgcattccagcctaggtgacagagtgagactctagctcttaaaaatttttttaaagtttctacaaataaaaatattcatgataatatttgggtccatggcgctttggaccttaaacctaacagaaacccaaaagagaaaattaaaagggtgaaaaatatatgtgatgttttgttttttatttaaggatggagccaatttgttttttagttgtctcctttttatttgtgaatgtaagcattttgagtgacttctgaattataatctaccatcttattttgatcaaggtcttggttgcacatcaggatcatctttgaaactttaagaaaatgcctgagagattttaattcagtggtttaggggtgggaatggctgtttttaaaaagattcttcagatgactctaatgtttagctcagggtgtgaaacactgccttagcagaactagggacaagagggaggctggagaggtttctgtaggttttcttcagtctgtttatcaggagacagtacagaatgggactctgcctttttcccccagtcgttctgatgttttgctgccaaaatagatatacctgcaatgtcttgtttgtctttatttggaaatagtagacagtattgatatggagtggatagtggagtacacatagaaaaaaggcagtttaatgacaatttatgtatagtgttgaagtaaatattagcaaggaaattggtaatatcataaaattaccaagtttttacataccatattgataggatctgtgcagacaattccaatgagaataaaaacctttatggcatacttaagtgtaggattgcaaaagaatctgttccgtatatgttacttacttccccattctttaaggactgatactgaatttatttgcaaagcaataacaaaataagagctcttggcccctagttttagaactttttatgggttctcttaatgttatttcaagttgtaaaaaatggcatttgcatctgtaaaaggaaacaattaggatttgtaacttggaatttgccaaggttgtcatgtgcttagtaagtcgataaaatattaaccttttttacttgtgtccaatatgccatttttctaaggattatgaggtatttcatgtctaatacaaaagttacaaaatgctgactaaagtaagtatctttttctgtgtataaatgtgtgaataatagccactcctttctcctagaagatgggcttcatgggattgtgagctgcactgcttgtggacaacaggtcaatcattttcaaaaagattccatttat

SEQ ID NO: 50511 - DNA, 1070 bp, Homo sapiens
aacatattttatatattcattttccgattaaataatttgtaaggttgttggcaaaaataaaggaaatattatatagtcttttgtccacaaaggggtagtcaactccttttgagcataaggaatctttctgagaatctagttcatggtagggaaactgccattgcagcaacagagctcattaaagctaaggtagtagtcttaaaatttaagagaatcctcaattataaagtgatggtaaagatcagtagtaagagtttctttcctctgatcataggttctctagagaagacaaataactaagtgttctgcattgtgtacacttagtgtacagagtgtctaaatggtgttatttttgggaagggaccctgtagcagtcagtgtctgaaatgtggataagggctgaaagaataaaagaaccactgttgttgacgagggtattcctagtgccactttggtatgctgctgacatttggtctcagctgataagtttcaggaacattttattgaatgatctgtgtaggaatgttttggtatcacgcttaagggaatacatgcatttatagccatcagtagcacttaaatctttcacatctattttcatcttaatgatttgttacatttttaagctgtcagaaatcacacaggaaatttaacactaggtttactttatatacacatatatagataaattggtgatctgaaatactgaattggtgtagttaatatttaaactttttaagaaagctggttccaaattgaagcctaacttaggaaactgtcaagaatgtaaactttcttgtattacaagaaatgtaagacattacaagaatgtaagacaatatataaagtcttatattgatttggaataatattataacacaaagatacggttaaagttaacatttcaggagctgattttttaaaaaattttcagtatcataccctattttgacattctcttcccagtttaattgttagaaagtatattttacacctaacttttttacatgacacaataattttgttctatttaaaaccattaaaatctattgagctcagaaatgaaaatg

SEQ ID NO: 50512 - DNA, 1071 bp, Homo sapiens
gcaaggaagaggtaaggataattatttagagatatttgttagttacgattaaccaagtagagcatatgtctttagattgcttctggacacatgtatgtgtcgaaggctactgatacccagttgtcattatacttcagtttcgttgttttccagtttgagaacaggtgttcattgtttctgttattgttgtggttcacttcagtggtttacctaaagtcagacaactgaagacttccaacagatagatattaaactgtctttatattgccccaaaggtgtttgaggtggatgttaagggcatgaactccatggttgtgaaatctctcaaaacttggtatctagagtctgctaagcattattatagcaactcataacaaggtcctttgcctgatacacaggtccacaactgtggttttgggaattttttgacctactgtaaaaaaaaactgaatccagtaaaatatattgattatactggcaaaatgagggtaagtttagtatctcaaagcaagttgtagaagttacttcatgccatatgttagcttagagaagaatgaaacatatttagatccttgaaactccctacttctcttgagatctgattacttctgcatctttgttttgtctttgttgactggggccatgatcattttgcagcagtgtattccccgcagcatgccacagcaaccatgtaaaaaacgagaaatttaatcttcagccaaggaaacctggcagtaaatgagaattagttttaatttttatttttttgcatctgtgttccttatgtggtagagaattagtttttgaagttccttttagaaaaatattctaggcacataaatagcatctcattatatcactgtattgaagttgctatagggaaatagctaattgtagggatgccgtttcgagaattttattcacttttatatttatgtctcacatctagggaactagctcttcagaaaaatccaagtcttcaggatcgtcacgatcaaagaggttggttgatgttgaagggacaaaaagttattttctttttcaggttattttctgtttctaaaaccatgt

SEQ ID NO: 50513 - DNA, 1029 bp, Homo sapiens
ggtgcatgccaccacgcccagctaatttttgtatttttagtagcaacagggtttcatcatattggtcaagctggtctcgaactcctgacctcaggtgatctgcccacctcagcctcccaaagtgctaggattacaggtgtgagccaccacacctggccagaaaaaaaagatatttttaaagagctgttttaggttcatagcaaaattgagcaaaaagtacagtgagttcccatatgtccctgcttccacacatgcacagcatctcccactatcagcattccgtaagagagttgtacatttgttatataacgttgatgaacctacattgacatgtcattattaccccaaatgcatagtttatgttaaggttcactcttggtgttatacattttaaagatttttgacaaatatataatgacctgcattcaccattgtggtatcatacagaatagtttcactgccctaaaaagattcctgtgctgtgcctgtttcttcatccctttctcccctgtgagcactggcagccactgatctttttactttctccatagttttgcctttttcagattgtcatagttgtaatcatatgtatgtaacctttccagactggcttctttcacatagtaatctgcatttgtttcctccatgtctctttgtagcttgatagctaatttatttctagtgctgaataatattccattgtctggatgtactacagtttgtttatccattcatcttctaaaggacatcttggttgcttctaagttttggcagttatgaataaagctgcttataaagatatttatataagtaaatgaagatgtttacataaaataaagacatttataaatatctccatgcaggttattttgtggatgtatgttttcagcttctttggataaataccaaggagtgtgattgctgctttatatatggtatgcttagttttgtaagaaattgctgaactgttttcctgagtggctgtatcattttgcattcccaccagcaataaatgatagtttcttttgc

SEQ ID NO: 50514 - DNA, 1038 bp, Homo sapiens
tggtgcagaagcttcatgacttccttgcacactcatcagaagaatctgaagaaacaagttctcctccacgacttgcaatgaatcaaaacacaggtaaattgaaaaagaatgtgctataccttctagtcttttttctattttttttttacacttatggaggtaaccatttattttattcagagagcagcttttaaaagagatttcagtttgtggaaaatgacagattagcaagctttatagaagcccctattatgtatcttagctatatctgatacaggagattttaattttggtaagtatgactatagaaagcttagaaaaggaagcatttatggttttatatgtaatggaaatgtgttatagaatggctagtgaatgttgactgtgaaaaaatagtattagaagaggcaggagtagtataggaatgttttgtcctagcaatcattcatgtattaggagttaaatttttatttttatttttgtgatggagtctcgctctgtcacccagtctggagttcaatggcatgatcttggctcactgcaacttccgcctcttgggctcaagctattctgctgcctcagcctcctgagtagctgggatcacaggcgtctgccaccatgtttggctaattttggtatttttagtagagactgggtttcaccctgttggccaagctggtctggaactcaagtgatctgccctcgttggcctcccgaagtgctaggataacaggcatgagccatcacacccaacataagagttaaatttttatgttgtttgataatatccctgagtagatttggtgtatttattttttaaaataaaaccacttaacacctcctctctacctccctgtctctctcttttaaaaagatatatatatatatatatatatatatatatattttttttttttttttttttttaaagagacgaggtcttgctttgtcacccagactggagtgtagtggtgtaatcatagctcactgcagcctcagacttcttgggcttaagcaatcttctcacctcaccctccc

SEQ ID NO: 50515 - DNA, 1013 bp, Homo sapiens
aaaaaaaaaaaaaaagacacaaaagagaaacaaaaaaaacatattgttagttttgatgattatctactagggtaagtacttttctactcattaaattccattagtgactgtgccttgatttccctgaaaggatgcagtatagagtaggcttttgattggagatagacttcctgattttccacttagtatttaggagtgaaaattattattattattatttattgttttttttttttttggagacagggtgtcactgtatcgcctaggctggagtgcagtggcttgatcctgactcactgtagccttgacttcctagggtcaagcaatcttcccacctcagcctcctgagtagctgggactacaggcacgtgccaccacagccggctaatttaaaaaaattctgtagagatgggatctcactatgttgttcaggcttgtctcaaactcttgggctcaaatcatcttcccacctcagcctccctaagtgctgggattataggtgtgagccactgcacccagccggaagtgcaaattatttaactcctttattttattcagcaaataaatgtctttctgagcctcagtttcctgtaataaggttcttataagttttaaatgaggtcagtgtgcattaaatgtacatgttagaatttggtaaggttagtaagaaaaccaaagacatgtggaccctttacaaaaaattccagcatttaccctaagagatgctttttaagtggttgaaatttggtggcatggaggaaatgtatatgggctcgtatcacatttgggagtaaaattaaggcatgaaatttaaacaaaaaataaaattgtgggtacatagtaggtgtatatatttatgggatttatgagattctgagacaggcatgaaatgtgtactaatcacatcatgtaaaatgggctgtccatcccctcaagcatgtatcctttgagttgaaaaacaatccaattttattctttcaggtattaaaaaatgtacaattaatttaatacag

SEQ ID NO: 50516 - DNA, 1034 bp, Homo sapiens
tataggcgtgattcactgtgcctggcctagtttctttgttttaatttttttcctccccatttgtcttttgagtttccctgagaatctgtcttgctgctgtctcagttgtcattcactgttattacactggaaccctattgatgtagtggtaaggaattagggaggggaagtgttttgtaatctcatgattaaatgtcatttcttttttttttaattggtcctgagtccctgaattgtgactctcagaagtgtttcttagcccttgccctcccacttagatgagacaggaaggctataagcctcgggggttttctaattgtctttcctcttggtagataatggtgtgagcatatttgaatatagtttctttcctctcctcctgctcaaggcacaaggaaattttcctcaaatatttgcagtgaaaacatactaaaacccttgtaggattcctggaggtaaaacctaggaaagtgtaggggcccctctaagactgggatgtcaggatttttaaactctcaaactaatccatatttggcctccagaagttgtcagtttctacttgagtgtttctgttctaggaaagctgtgatattctgtatctgtctttctagttttttttggtggtggtttgccttgtgacctcagtttttggattgatctaagataaattactgattttcagttttctcagcgttttttcttgtcaggatagaagtgaggacctccaaaatccttacatattatagctgcctggtgagttttgtttgtttctttttttaaaaaatttttttttttttttttttttttttgggatggagttttgcgcttcttccccaggctggagtgcagtggcgcaatctcggctcactaaaacctctgcctcccaggttcaagcaattctcctgcctcagcctcccaagtagctgaaattacaggtgcccgccactatatctggctaattttttttatatttttgatagagatggggtttcgtcatgttggccaggctggtcttgaaatcctgacctcaggtg

SEQ ID NO: 50517 - DNA, 1116 bp, Homo sapiens
taatattgatacagacatacaatgttcaataactacatcagggttgtatccatcaccaagcatttatcctttcttggtgttagaaacaatctagtttctaatctctaatagtttctaatctctagtagttatattaaaatgcataatgaattattattgactgtagtcaccccattgtgctatcaaatgctaggtcttattcattctatctaactatatttttatacatattagccatccccactgtgccaccatccccattagtgccctggcccccactacccgtcctagcctctggtaaccatcattctactctctatctctatgagttcaattgttttgatttttagataccacaaataagtgagaacatgtgaagtttgtttttctatgtctagattatttcacttaatataatgacctacagttccatccatgttgttgcaatgacaggatctcatacttttttaagggctgaataggactccattgtgtatgtgtaacacattttctttattcgtccgtctgttgatggacactcaggttacttccaaatcttggttattgtgaatagtgctgcagtaatcatgggagtgcagataactctttgatatactgatttcctttctttggggtacatatttagcagtggaattgctggattatatggtagctctctagtttttttttttttttttttttttcatttttgagacagggtctcactctgttgcccaggctggaatgcagtggcggaggttcacttcagcctcaacctcgcaggcttaggggatccacccacttcagtcttccaagtagctgggactataggcgcataccaccatgcccagctaggtttttgttgttgttgttgttgttgttgaggcagagtctcactctgtcacccaggctggagtgcagtggtgcgatctcggctcactgcaacctctgcctcctcggttcaagccattctcctgccttagcctcccaagcagctgggattacaggcgcccaccaccatgcctggctaacccagctagtttttaattgttcgtagagatggggtttcaccatgttgtctagactggtctcgaactcctcgactcaagtgatcct

SEQ ID NO: 50518 - DNA, 1082 bp, Homo sapiens
gaccaagcagacctaatagtaacctacagaactctctaccacagatcaacagaatatacgttcttctcagcacatcacacttattcactcaaaaccccacaactacatggaaactgaacaacctgctcctgaatgactgctggtaaataacgaaattaaggcagaaataaagaagttctttgaaaccaatgagaacaaagagacaacgtaccagaaatctctgggacacagataaagcagtgtttagaggggaatttatatcactaaatgcccccatcagaaagcaggaaagatctaaaatgaacaccctgatatcacaattaaaagaactagagaaaaagagcaaacaaattcaaaagccagcagaagacaagaaataactaagttcagagcagaactgaaggagatagagacatgaaaacctctccaaaaatcaatgaatcaaggagctggttttttgaaaagattaacaaaatagaccatgagccagactaataaagaagaaaagagagaagaattaaatagacacaataaagaatgataaaggggatatcaccactgatcccacagaaatacagactaccatcagataatattataaacacctctacgcaaataaactagaaaatctagaagaaatggataaattcctggaaacatataccctcccaaggctaaaccaggaagaagttgactccctgaatagaccaataacaagttctgaaattgaggcagtaattaatagcctaccaaccaaaaaaagcccaggagcagatggattcacagccgaatgataccagaggtacaaagaggagctggtaccattccctctgaaactattccaagcaatagaaaaagaaggattccttcctaactcattttatgaggcaagcatcatcctgataccaaaacctgtcagagacacaaccaaaaaaggaaatttcaggccaatatccctgatgaccatcgatgtgaaaatcctcaataaaatactggcaaacagaatccagcagcacatcaaaaagcttatccaccattatcaagtctgcttcatctctgtgatgcaaggctggttcaacata

SEQ ID NO: 50519 - DNA, 1696 bp, Homo sapiens
gcataagaggggcctgttagatgaaaaactaacaaatagaaagcaataatatcaacatcaacaaaaaggacccccacacaaaaaccccatcaaaaggtcatcagcctcaaagatcaaaggtagataaatccacgaagatgaggaaaacccagtgcaaaaatgctggaaattccaaaaacccgaatgcctcttctccttcaaatgaacacagctcctctctagcaaggccgcaaaactggacggagaatgagtttgacgaattgacagaactaggcttcagaaggtgggtaataacaaactcctctgagctaaaggagcatgttctaatccaatggaaggaagccaaggaacttgataaaaggttacaagaactgctaactagaataaccagtttagaggacataaatgacctgatggagctgaaaaacacagcacaagaacttcgtgaagcatacacatgtatcaatagtcaaatcgctgaagcggaaaaaaggatatcagatattgaagatgaacttactgaaataaggcatgaagacaagattagagaaaaaaggttgaaaaggaacaaacaaagcctctgaaaaaatatgggactatgtgaaaagaccaaacctatgattgattggggtccctgaaagtgatggggagaatggaaccaagttggaaaacacacttcagggtattatccaggagaacttccacagcctaccaagacaggccaacgttcaaatcaggaaatacagagaacaccacaaagatactccttgagaagaccaaccccaagacacataatcgtcagattctccaaggttgaaatgaaggaaaaaatgttaagggcagccagagagaaaggtcgggttacccacaaagggaagctcccagaggaaggatatctgggcagaaaccctacaagccagaagagagtgggggccaatagtcaacattcttaaagaaaaaacttttcaacccagaatttcacatccagccaaactaagcttcgtaagcgaaggaggaataaaatcctttacggacaatcaaatgctaagagattttgtcaccactagacctgccttataagagctcccgaaggaagcactaaatacagaaaggaaaaactggtactagccactgcaaaaacattccaaattgtaaagaccatcgacactataaagaaactgcatcaactaacggtcagaataaccagctagcatcataatgacaggatcaaattcacacataataatatgaaccttaaatgtaaaagggctaaatgccccaattaaaaggcacagactggcaaattggataaagagtcaagacccattggtgtgctgtattcagaagacccatctgatgtgcaaagacacacataggctcaaaataaagggttggaggaatattaaccaagcaaatggaaaaaacaaaaaaaaaaggggtgttgtaatcctagtctctgataaaacagactttaaaccaacaaagttcaaaaaaggacaaagaagggcattacataatggttaagggatcgatgcaacaagaagagctattttaaatgtatatgcttccaatacaggagcacccagattcataaagcaagttcttagagacctacaaagagacttagattcccacacaataatagtgggagactttaacaccacactgtcaatattagacagatcactgagacaga

SEQ ID NO: 50520 - DNA, 1091 bp, Homo sapiens
ttaagttacaaatggaaccagccaaactatgttattgcttacccattgtttttccagcgttagaggagtttttcaaagaatattttttgatttagagattattttatttattatctatttagagattattcatcatttagagattgccatttaatttcagtaagagttccatttgcatctgatattttttagtttcggagaaaggaaatggtggagaaatggattcatctccaatcctttggaataaaattcagacagtttaagctctagtctcaacttgatttaatttggaattgcatgatgtggtgtcagatttgggttcacatccagttctcttgctgtgtaaccttgggaaatttacccagcatctgagttgtttcttcatgtgtgcagtggagacaataccaagatgaagatttcatgagatgtctagtgtagacatctatttttcagagtggatgcatttaacagttggatgctgaatttataagagtatggatttcataaaaagagcataaatttcatgatatgatgtatatatcaaaagatataggtcgggtgcagtggttcatgcctgtagtcccagcactttgggaagttgaagcggatggatcacttgatgccaggagttcgagaccagcctggccaacatggtgaaacttcgtctctactaaaaatacaaaaattagccaggcgtggtggtgtgtgcctgtaatcccagctacttgggaggctgaggcaggagaattgcttgaacccaggaggcagtggttgcagtgagccgattttgtgccactgcactccagcctgagtgacagattgagactccatcttaaaaaaaaaaaaatgatggctgaataggaacagctctggtctgcagctcccagtgagaccaaaatgtagaaggcgggggatttcttcatttccaactgaggtacccagttcatctcattgggactggttaggcagtgggtgcagcccatggagggtagcagaagcagggtggggcgtcgcctctcccggaagtgcaaggagcgagagatctcccttccccaagccaaaggaacccgtgagtctatgctatccggcac

SEQ ID NO: 50521 - DNA, 1121 bp, Homo sapiens
ggctactagaaaatttaaatatatatttgaaatgccttacattatatgtctgttgggcagcactgatctatattgcccacttttcattcctgtttatttattattattttatttttatttttattttttgagacagagtctcgctgggtcgcccaggctggagtgcagtggtgctatctttgctcactgcagctgctgcctcccaggtccaagcaattctcttgccttggcctcccaagcagctgcgattacagctgtgcaccaccacacttggctaatttttgtatttttagtagagacggggtttctctgtgttggccaggctggtctcgaactcctgacctcaagtgatccacctgccttggcctcccaaagtgctgggattacaggtgtgagtcactgctcccagccttcactcctgtttagtattaagttatatagataatagtttgctactggtggatagttgttgttttttttttttacgaatttggtgctactaaagactgttctcatgagcattcttaaacatgtctcctttgcacatatgctagagtttctttctccctaatggttcttctgatttatacttccactggcagtttgagaatgttcttgttctgcagttcttcatcctggtcgatgtttttgtgtagataactgtaatttaatacttaaagtcaaaagcataaggaagcattggtaattatttaagtgaatataaaatgtcagcttatttttctcagtgaatcttttgtaatagtcaactcacattgcctattttttattgtagtgcttctgatctgaataaataaatttaaaatttaacagccatgttatgtatcttattagtaggcagctgcagttatgcaaccaaagaatgtcccatctttaagttccattagcttgaaaaagaaatggcagctttacgtcatggaatactgtgctgccactaaaaatgatgttttagaagaatatttaatgatgcagaaaaatattcacagtatcttaatggaaagaaaagattataaagcagtaaccatttcgttttgttaaaatcaggtctatgttagctttttttttttgagatggaatctcgctctgtcacccaggctaaagtg

SEQ ID NO: 50522 - DNA, 1068 bp, Homo sapiens
ttactttaaagcaggatttctcaaagggacactgttgacattgatttcagaagtgagattttcatggtttttaatgttattattataatggtatggatagtgttttgccctctaagaagtagctaggagtgtttccatagatgcatttagtttatatcacttatgtattctgtctctattttgtaagaaaattgcctatgaacagaattttttctgtatgtggatttaatgtcttcttctaaaggaaacatgggtgtggttcacatttccttagttttgagtagcatggcttaagttgtgatccaattttaaaaaatcagttgaataaataaatagaaaataaaaggataatttctgtactaaaaaagtcagctggacagttaaaacatctccttttattcgtaagtttttcaataaaaattgttaaaagcagtattcatttgtgtaatgatataatctttgttattgttttatgtgcttttctaaaatgcaggaaacataaggtaaggagaagtctttccttaccctgggaccagatgtctatgaggactgttgacttttctgctataaacaggatgataaattaacagtggtgtgataggtaaagtagatttgttatgacatatcttccattaagcgataataacttgatttttacttagttgatgaaataaaataactttgaaaccttgggtaacatgaaattgaatcaaaatattttcaagttatggaacatagtgttattaatagaatggagtgttgaaaaagcactggattatgctttctgtaacttttagttctgggtcttatgataactgtgaccctgagcctcagtgttttccttttaatctgtagtgatattttttagttcagtctctcattttaaactgcttttagctctaaaattttatctcagtgacctgttgagttatataacaatcgtatcaggtaacctagataagaagaggaaggcagtaacatttcagaaatacagtttggggttgggaatccttaagtgatccagacttctcctttggtccgaagatagtgtgaataaaacagctgagg

SEQ ID NO: 50523 - DNA, 1027 bp, Homo sapiens
cctggctgataaacacttttaaggcttaacatgagctaagtattattttagaacagattgtctcaaccttggcactatagacattttgtccagaaaattttttgttagaggctgtcctgtgaatgcattttatccctgacctctacccactagataccagtaacacccctaccctgagttgtgacaagcaaaaatatttccagaaattgccagatgttccctgtgggcggtatgggtttgagaaccacttttctagataataggcatttgtagataatgaatactgagctaagtggaggagtaaatggttgaaatagactatgtggttaagtacagttacagagatataaaccaagagatgtggaagaatagcaaaaaatttccttagagagttgatagcaagtattttcccaagagagacagcaattctgagttgggtcattggggatggtggggggaaatgtgctgaggagggggaaatattctaggtggtggaacgggttatgtctagagatacggtagaggagcccttgggtgccttgagaaaaatgagataataagtatgattggagagaatatgggaggtagaattggaaagaaggatgctagttggggtcaggtttgagaaaggcttttttttttttttgagacggagtcttgccctgtcacccaggctggagtgcagtgcctcactcggctcactgcaacctccgccttctgggtttaagtgattcttctgcctcagcctcttgagtagctggcattacaggtgcgtgccaccacttccggctaattttgtatttttagtagagaccgggtttcaccatgttggccagactagtctcagaactcctgaccttgtgatccgccagcctcggcctcccaaagtgctgggattacaggcatgaaccaccacgcccggccgagaaaggctttttatgctatgctaaaatgtttcattttccccctttcattatagaaaatcaacaaatacttttaaagtctgtagagttatatgatcagcttt

SEQ ID NO: 50524 - DNA, 1049 bp, Homo sapiens
aataaagttctattggaatacacctatgtccatttatttacattgtctgtggctgcttttgcactgtagttgcagagttgaatagctgcagcagagacctagtagcccacaaagcctaaaatgtttactgtctggccctgtattgaaagagtttgctgattattgtgctagatgaatgcaggatactacacccctctaaaaagagctgcatagaaatacatgcatatagatgcacacacgtctgacatctaccagctacctcatttcaccacttgggttataaaccacacatatttacatctgttgtacaattttcaatccgatttcagataaccttccttctaccacttcacaataattcatgagctgcaacccttttgatgcccacttcacaagcaaacttcaggtctttttcaaagtaaagtgccacatttattgttatatttgagcatttattatttaacatgtcaaactgtgctaccatttttctttggtttctttgttttaaaaaaagtcactgatgaaatttttgaatgttgtgcttctaacctcatttttcctatgagttctatggtgttaattgcacaattttacatagtttggtggtttttaggaacccatatgttacattattgaggaactgactaattatcatcctgtaaaaagtactaattcattcaccaaacatttctggggtgatgtaaatattaagtgagttaaatgggcataaagcacttatgtctttattgttactcaaatattagttattactgattactattaccatgtgtcaggaactgtaataagtagtgcattgatgaacaagacagataagggacctgtctccatgaagcttacattgtatttttaaaaatctattaatatacattttggctagtaaccgagcccttgccccacagaaaagttgtgctgttacacaaaataatattttaagatccatccacaagtcaaagacatttcacttaaaacagctttctcagcagtgtctccttgatagggtataatattttattgaattattgtttttg

SEQ ID NO: 50525 - DNA, 1030 bp, Homo sapiens
ttagttcagaattgtcaaaagtattatctacttttttttttttttttgagacagagtctcactctgtcacccgggctcagtggcaccatctcagcttactgcaacctccacctcctgggttcaagcgattcttctgcctcagcctccgagtagctgggactacaggtgtgagccaccatgcctggctagtttttgtatttttagtagagacggggtgtcaccatattggccaggctggtctcgaactcctagacctcgtgatctgcccacctcggcctcccaaagtgctgggattacaggcatgagccaccgcgcctggccagtattacctacttttaaataagattgtgtaggatttaatgcacagattttgaatcactgtgataaaaatgcatccttagttgtcttcattttgctcatttgaagtgctcagttgacttttgggtgggtaacatttgacttatagaatctaagataaaaaattatttctgagtaatactggatttgttattttgcttatttggattatattagttattttttggtttatttgatagcattccagatttagttttgctataatgcttgttttgaaaatgtggattttttccaaaagggttgatatttcagggaacaatttgaagcatacgacaaaatttgcatttgcttatgggggattttgtctgcagggtcagggatcagcatactgtggcctaccaaccagtggcctgttttttgtaaataaagttctttttttttgtttttgatctttgttttgttttgttttgttttgttgagacggagtcttgctctgtcgcccaggctggagtgcggtggtgtgatgtccgctcactgcaacctccgcctcttgggttcaagcgattctcatgcctcagcctcacgagtaggtgggatttcaggcatttgccaccacgcctggctgatttttgtattttttttttttttttttttttttttttttttagtagagacagggttttaccacattggcctggctggtcttgaactc

SEQ ID NO: 50526 - DNA, 1595 bp, Homo sapiens
tatcatgtatacctggttgtataaacatttattggaaaggaaaaaacatttttgttggaaagtttggtaattattgtggcttaggatatgttctattttgaaagattgctatatccagtatatttctgcccttttatgattgaagatgtacgtctgaaaatacctatgttagttctagccggttgttctttttgcgctgggaagtctttgaattttgcactgtagctgctattttcagatcctgtctctgaaactttgtctctcagttttagcttgaagtagccatttcctgtatctgtagtccagcactcttgttaactgtcccatacaatatttgttaagaaattattgttctggcagtagtattcacatgtatatatcctgcactccatattttgggggaatgctttattagttgatcaaatacttaagtatcaatttggggccaggcatggcactgtgttagggttatgccaaaggtaataaaattcctgccatcttaaggcattcttagtcaagtgagggagattggtaagtaaatgagcaattagaaagcagtgctaaaatatggaaatatattgattgcgctagggatcagaaatgaaagaaagcctaatttgggggatgtctaggaaagttttgcaaaggagatgttaactgtattgagtcttgaatgagttagcagttaagggttgactgtgagagggcagtccagacagctattagtatggttaaagattagtcttattttccatatatcagaggaaataagacatgtacacgattagttttggtgcaagatataaagtgataaatgctgcatgaagtaaaagtaagttgttgtgtgagttcaaagtagaaagacatttctggtggggaccaaggaaagctttatagagagatagcatttgagccgggcgccgtggctcacacctgtaatcctagcactttgggaggctgaggcgggtggatcacgaggtcaggagatcgagaccatcctggctaacatggtgaaaacccgtctctactaaaaatacaaaaaaaaaaaaaaaaaaaaaaaaatccgggcatggtggcgggcgcctgtagtgccagctgctcgggaagttgaggcaggagaacttcgtgaacctgggaggcggagcttgcagtgggccgagatcgcgccactgcactctagtctgggcaacagagcgagactccgtttcaaaaaaaagaaaaaagagagatagcatttgaatctagtccttggaatataggtacagttttgacaaaggagactgtgggagaattccagatgtgaggagtagcagcttgagcaaaggaatgttgtgtatattagcattttctatttggaagaaggtcaacatcgaattttaaacttaatttctggacaaatactgtataactattgtgcctttttttttttttttgagacgtagtctcgctctgtcacccaggctggagtgcagtggcatgatcttggctcactgcaacctccgcttcccgggttcaagcgattctcctgcctcagcttcccgagtagcttggactacaggcgtgtgccaccatgcctagctaatttttgtattttt

SEQ ID NO: 50527 - DNA, 2214 bp, Homo sapiens
ggccaatttttgtatttttagtagagacggggtttcaccatgttggccagccaggctggtctcaaactcctgacctcaggtgatctgcccgcctctgcctcccaaagtgctgggattacaggtgtgagccactgcgcttggccttaatttatttgcatataaagatttcagtattgggagatttggtgaaatttgtcattctaatccttatggcaattgattacttgaaaagctgacagctatattaccttgttattgatcttaaatataaaaaggcagaagttgtctaaattgagagattttgaatgtcttagaaagtatctgttaaggtggtagtttacaagcagttacattgtaacctaattgttgaaaaatgttatctgtgaaatacttgcatttccactatgaaaagcatgaaaccaggcccttggagggggaggagatgcaaattttataaaggtttttaaaaagcatttaaatatcaatggcttggttatgtaatgggttggggtgaaaagaaagacatttgtgaccttaatttttatcaggcccagttttattattggccacccttggcatagttggccttgagctttcagttatgtattgtatttctagagataagataaatgtagtacttaaaataatatttaagtattgatgtaggtgtgtgaaataattgtttcataagtaattgtatgtgtctttttcacttttggggtctgaataaacttatgggttgggtaataggatacgggcaattcttgaatttacatgaagtgctttcccccagaccgtgaatgttcttttggatatcagaaactatttaaatagttgaagccagtgaaaactgatgcatagatcttcctttagaaatgttgaatataacagggcagtgaaaggagggtctaagcagtctgtctctaattttatcctaatgcttgtcttatgatcagcttggaagctgacatgcaagatgtttaacttctatttttccatctgtaaaatgggaataagctcaaatgggagtaaatatcaatatttatcaataatagatattgataaagtctaaaggtattctgaaggaggtaacatgtttgtaacaatggttcttaaaagagaaactaaagctctggggtcctagttttttttttttttttttttttttgagacagagtctcactatgttgcccaggctggagtacagtggcacgatctcaggtcactgcaaactccgccctccgggttcacgccattctcctgcctcagcctcccgagtagccgggactacaggcacctgccaccatgtgcggctaattgtttgtatttttagtacagacagggtttcaccgtgttggccaggatggtctcgatctcctgacctcgtgatttccacccgcttcggcctccaaagtgctaggattacaggtgtgagccaccgcgcccggctgttaatttttaagagtgaaaagaggtgctgcgactaaatggtttgagaactgcttgtatagaggaatgaacactgaactgtgagccaagccttggtttttcagttatagctctgttgcttgattgtatgactgtggacaaatcatttatctgttccaggcttctgctttgtcatttgcagaacgaacaagactagatggtctgtagcattaatttttttttgggacaaggtctcactgtcacccaagctgtagtgcagtgacactgaacatggctcactgtagccttgacctcctggctcaagcaatcctcctgcttcagcctcccatgtagctgggaccacaggtgtgtcatcatgccccgctaattttttgatttttttgtagaaacagtggtctcactttgttgcccagtctggtcttgaactcctggacttaagcgatcctcctgccttggcctcccaaagtgctgggattacaggtgtaaaccaccataccctgcctaaagttagtttttaaaaaattctgcttacaggccacgtgcagtggctcacgcctgtaatcccagcactttgggaggccgaggcaggtggatcatgaggtcaggagttcaagaccagcctggccaagatggtgaaaccccatctctactaaaaatacaaaaaaaaatcatctcggtgtggtggtgggcacctgtaatctcagctactagggaggctgagacagagaattgcttgaacccaggaggcggaggttgcagtgagct

SEQ ID NO: 50528 - DNA, 2058 bp, Homo sapiens
tttgacatttgaattttcatcccacaatgtgaattaagtaatttttttactcggagatgcatccttggcgtccagtggcaaaataaaattacaaggagcatgggtcagaattgcatttcaagttggcgaaatgtgcctttgagtaactcttagattggcatatgtttttagagcaatttagctagaatgtagaattgggcaatgagcctatgatacgtatgtctgtatttctgcatgaacaagcagtagattatattttctttaccttggggaaagatatgcttcagttcttagattgtagatctctagttgtgtacacgattgtggccttggtttctgaatttgtcagtaggctcaaatacaacaaatctttatctgtggggtattaggcacgtaagtggtacccagtataacttgttggcctgtaattaccaggcactcatgttcatatgcatggatggtgtaccttacagttaaattatgacctctagattttactaagtttcacaaagtctacatttgaaactatagtttgaagtcggatcttctcagtttctttagaatgaacaaattacgtatatagaatttctgaatagaataattaattttacacaagggtcagtttttcttactagtcttggatttttgtagatcttgatgataagagtaataatcataactaagttgagtgcttattgtcgttctttataatcttgatgaattctcaaacctgtgaggtaagtacttggttttgcccattttaccgatgaggaggaaagtgagacatagatcaagaacttgaccgaagttatacagcttgtaattggtggagctggaattgaaccccatcttgacttcacagcttatgttcttaaccacaaggcattaatgcccccttcagctgccaggtctaacctgattatgaccatttaaatttagcccaagtgttacaatgaaagaagttcatattacctactctgatttgttgcaggtctatgattttgtagctgtttataatgttacattttttgtgtccaggtgtactatgtagtgagataactgaaatatttaatgctaggagagtcttaagctacatgaaaaacctctagtaaagaactgcatatatgcatgtagggaattaattaaaaagtgtgacactccctgatgatttactatgaaagagctccaagtaggtgttcagaactgtctcaggctgaagtgtcatcgatctcctaaaccataatcatggttaaaggagaatctgacaggtaatgcttgagttgaacccacagtaccaaatccctcttgagtcttttctaatgtgaggcagaaataatataagcattattgttaatattattttacacagtagttccagattttctctttatcaaatattttgtcaagcacttaaaaagcaggaacaaagactagttctaatttttacttgtgtttataaaaaaaagtaatattctaggattctgtggtggaaaaatggccagaagacaagaggaaggaaaataaaccgatgacctggctaaaacatacactgactaatcagtggctcagtctttaaaggttttgttgtttttaaaggatttttttggttgtttgtgttgtttgaaataagattgacttgcttctggcattataaaagataaggtcttttataatcaccaagctctcaatgtagtacttgggtacctgggtgtcactgctgattattttttaatttttaaatttatttttttgagacagagtctcactttgttgcccaggctggagtgaaggggcgtgatcttggcttactgccgcctccgcctcccaggttcaagtgattctcatgcctcagcctcccaagtaactgggattaacaggtgtgtgccaccacgcctggctaatttttgtatttttagtagagagggagtttcaccatattggctaggctggtcctgaactcctggactcaagtgatctacctgccttggcctcccaaagtgctgggattacaggtgtgatccaccgcgcctggctctctgctggttattcagggcccaa

SEQ ID NO: 50529 - DNA, 1531 bp, Homo sapiens
gctcagttagaaaaggactccctggccaggcgcagtgacttacgcctgtaatctcagcactttgggaggccaaggcaggcagatcacgaggtcaggagttcgagaccatcctggccaacatggtgaaaccccgtctctactaaaaatataaaaattagctgggtgtggtggcaggagcctgtaatcccagctacacaggaggctgaggcacgagaatcacttgaactcaggagatggaggtttcagtgagccaagatcacaccactgcactccagcctggcaacagagcgagactccatctcaaaaaaaaaaaaaaaagtaagaaagaaaaggactcccttagaatgggaaagaaaaatcataaaatattgagctgatgcctgtatatagaaattaagcgtttctcgaaagctgttctatgttttgctgttattttagtctttattctcttcctttaggtggagaaacaaagtaccaatttgaagggattttttttattttgtcttttggtttctgtcagtagaaataaccatatgtgctaaccaaatttctgtgaagaatgttttcatggttatcattatatctaactataacctcccccatagttatgaagagtaacctgaaatgccactattgtggaaataggataattgtaattgtgaaaaaataattttaaggaaatcttacaagtattacattaaaaagatactatgactgccacctgccatttaccttctaataaccctgccatgtggtttgcagaaagagatggatatagtagcctcagaagaaatattttatgtgggttttttgtttttcgttactagatttcatggatgaggggatatggttgaccttttactttttaatggagcagccagtttttgttaattactcacttgtaaattgtgagattctgaattccttacctgctattcttgtacttgtctcaggccaaatctatgctgtggttcttatgagacttgtatgaagatgccctgatttgtacagattgaccacgggaatactactgccatgtaatctgtatagttccagataatttgtcatgaacattgacagaatgacaattttttgtatttgctttttctccctttaagagcacattcttctgtaaggagaaaggcagcattctggctaaaatgtgtagaaggtaatttactacacttataaaatagtgtgacttttgtgaaaattttgaattagctttcatatgaagtgccttaagtagactcttcatttacttttctggtaatggtttaaatatcatttgttatgcatttttaagatacagttcagaatgacacattgtagtggcaaagataaccaaatgtctggctgtttgctttttgaccatatcaataaacttttacaatctaaattctgagtttttgattaccatctaaagaggagtgagttttaaacactaaactagaattgtaaaattaggattttacattttgaagttataattaaattaatttaaatttcatattgtcctaaggacagtttg

SEQ ID NO: 50530 - DNA, 1020 bp, Homo sapiens
gtttcagctttctgatgagttaaaaaggtcccagagatatatagacactggagtactggaaattgaaaaacgaaaatcgtgtgtgtttgaaaagaagaatgcaacttgtatattttgtattacctctttttttcaagtgatttaaatagttaatcatttaaccaaagaagatgtgtagtgccttaacaagcaatcctctgtcaaaatctgaggtatttgaaaataattatcctcttaaccttctcttcccagtgaactttatggaacatttaatttagtacaattaagtatattataaaaattgtaaaactactactttgttttagttagaacaaagctcaaaactactttagttaacttggtcatctgattttatattgccttatccaaagatggggaaagtaagtcctgaccaggtgttcccacatatgcctgttacagataactacattaggaattcattcttagcttcttcatctttgtgtggatgtgtatactttacgcatctttccttttgagtagagaaattatgtgtgtcatgtggtcttctgaaaatggaacaccattcttcagagcacacgtctagccctcagcaagacagttgtttctcctcctccttgcatatttcctactgaaatacagtgctgtctatgattgtttttgttttgttgtttttttgagacggtctcgctgtgtcacacaggctggagtgcagtggcgtgagctcggctgactgcaaactctgcctcccaggtttaagcgattctcctgtcacagcttcccaagtagctgggatttacaggtgtgcaccgccatgccaggctaatttttgtgtttttagtagagacagggtttcgccaagttgtccaggctggtcttgaactcctgggctcaagtgatccgcccgcctcagtctcccaaagtgcgaggatgacatgtgtgagctaccacaccagcaatgtctatgcttctcgatagctgtgaacatgaaaagacatctattgggagtccgaggcaggt

SEQ ID NO: 50531 - DNA, 1055 bp, Homo sapiens
gatgaaaattgttgaaaagttgagatttatcaataatgtataccccttccttttcactctctgaaagtatagactgccaggccgggcatggtggctcaagcctgtaatcccagcactttgggaggctgaggcaggcggatcatgaggtcaggagatcgagaccatcctggccaacaaggtgaaaccccgtctctactaaaaatacaaaaaattagctgggcgcagtggcgggcgcctgtagtcccagctaccctggaggctgaggtaggagaatggcatgaacccaggaggcggagcttgcagtgagccgagatcgcgccgctgcactccggcctgggcgaaagagcgagactccgtctcaaaaataaaataaaataaaataaaataaaataaaataaaataaaataaaataaaataaaataaaaaaagaaagtatagactgccatggttatttattatactcaacctgctcattttactctccttttatttttctgcagtaatgtgtgtggctggtattggacttgttgtattattcttcagttggatgctctctatttttagatctaaatatcatggctacccatacaggtatgattcttattttttgtttatacagtgattaccaatacctggaatgattagagttgatattgctttataatatccttctttttgctttgcttccaaactattttagcttataaaggaaagatataggctttatttttatttattcatctatttatttattatttatttatttatttatttatttttgagatggagttttgctcttgttgcccagactggagtgcaatggcgcaatctcggctcactgcaacctctgcctcccgggttcaagcgattctcctgcctcagcctcccaagtagttgcgattacaggcgtgtgccagcatgcccggctaattttgtatttttagtagaaacggggtttcaccatgttgatcaggtcttggactcctgacctcaagtgatccacccgcctcatcctcccaaagtgctgggattataggcatgagccactgagcccg

SEQ ID NO: 50532 - DNA, 1126 bp, Homo sapiens
tcccgagtagctgggattacaggtgcctgccgccacgcctggctaattttttttgtagtttttagtagagatggggcttcatcatcttggccaggctggtcttgaactcctgacctcgtgatccacccgccttggcctcccagagtgctggggttacaggcatgagccacagcgcccggccgaaaattgattttcttatcagtcactaagtatgttaccctagaacaaacttgtccagtctgtgggccacatgcggcccaacacaaacttgtcaacttccttaaaacatcatgagggtttttttctgcaatttttttttttttcagcttatcagctatcattagtgttagtgtattttatttgtggcccaggacagctcttcttccagtacggccctgggaagccaaaagattggacacccctgccctagagcttcctttgctgttggacacatgcttccctacatccctatctctatagttcttagccatttttagtccggggattgaaagagcttcacatcatgacaatccatacttgcgcatttggggattagtatttgtagttcactttaataactgctgtgctaatgtaggacatgacatgtgggattagtggagagagctatgaatctagggctagggatcagattttttttctcattcaaataagaaatccatgtttattgagttacatatataaggctgtgtagttatctgtgcatgaataaagtactttcaagtgaggctatcacaatgaagtcatcagatgtctaagttaatgtttatcaatactacaaggccacttttaggggttttaaagttcaataaataagtaagccgggcaccgtggctcatgcctgtaatcccagctctttgggaggctgaagcggaagatcacttgagcccaggagatcaacaccagcctgggcaatgtagtgagacaccgtcttctcaaaaaaattaaaaaattagccaggcatggtggcacacatctgtagtcccagctactcaagaggctgtagtgggaggattgcttgagcccaggaggttgagactgcagtgagctgtgattgtgccactgcacttcagcctgggcaacagagcaagaccctgactcaaaaaaa

SEQ ID NO: 50533 - DNA, 1083 bp, Homo sapiens
acagtgtacaacagtgtacaagggttcccttttttccacatcctcgccagcatttattattgcttgtcttttggatataagccattttagctggggtgagatgatagatatctcattgcaatttttatttgcatttctctgatgatcattgatgttgagtagtttttttatgcctacttgccatttgtatgtcttcttttgagaaacgtctattgaaatattttctttttttgcggtggctcacgcctgtaatcccagcactttgggaggccgaggcaggtggatcatgaggtcaggagatcgagaccatcctggctaacacagtgaaaccccatctctactgaaaaaaaatacaaaaaaattagctgggcatggtggcaggcacctgtagtcccagctacttgggaggctgaggcaggagaatggcgtgaacccgggaggtggagcttgcagtgagctgagatcacaccactgcactccagcctgggcgacagagcaagactccgtctcaaaaaaaaaaaaaaaagattttatgttttttcgatcagatcattagtttttttcctgtagagttgtttgagctccttttatattctggttattaaccccttgtcacatgggtactgtgcaaatattttctcccattctgtggattgactcctcactttgttgattgtatcctttgctctgcagaagcttttaaacttgatgtgatctcatttgtctatttttgctttggttgcctgtgcttctggggtattactcaagaaatttttgcccagactaatgtcctggagagtttccccattgttttcttatagttgtttcatattaatagtttgcagtcttaggccaggcacagtgactcacacctgtaatcccaatgctttgggaggccaagaagggcagatcacttgaggccaggagttcgagaccagcctggccaacatggtgaaaccctgtctctactaaaaatacaaaaattagccaggtgtggtggtgtgtgcctgtagtcccagctacttgggaggctgaggcaggaggattgcttggcccaggaagtggaggttgcagtgagccaag

SEQ ID NO: 50534 - DNA, 1026 bp, Homo sapiens
cctgggaggtggaggttgtagtgagctgagattgcgtcactgcactccagcctgggtgacagagccagaccctgtctcaaaaaaaaaaaaaagccatttaatatttttaaatgtgtttgaggtcagggcaataactgaatgtccagacaggttatttcaaagtacaatttcgggaaaactcatatttcatctgtaagttatggtgggacatttgtttaaaatatcaatttttctttgcacaaatgaagtaatcttccaattttaattttttgtatcttcatagtaaataattgtcatgccgtatagatacaagattccttattttggttttttataatgaagagttgaaggtttatatattcattttaattttcttcatgagaaactggaaatagtaaaatggtatgtcttttttgtctgtgcgaatttctccttaaacaatttttcttagatggtggagttaccttaggaatggtgcttttatgtgaagctgctacctctgacatggatattggaaagcgaaagagtaagtcaccttactcaaaatgtaacagtgctgcctgtactatggaaaaagagtgatctcttaatcacttttcctcttacttataggataagtaggttattttacccctttactatttttttctttaaatgtcatatctgttattaaactcctttactattttaaaattaatatatgctcattatagaaaatgtaaaaaaacaggagcatgaaacattccaccactgaaaaactaattatttttaaattgtaatatatttctttccacttataaaaaccttaaaaactgtatatataaaattttgacacttcacaccccctttttaaactggagttaaataactaataactttttctatatacataattttaaacttatactctgttattgtttgttttctttaagatagggtctcactctgtcactcaggctggagtgcagtagcataatcatagctcactgcaacctccgcccctaggctcaagctgtcctcacacct

SEQ ID NO: 50535 - DNA, 1046 bp, Homo sapiens
tggccaacatgacaaaaccctttctctactaaaaaaagtacataaattaactgggtgtggtgctgcgtgcctgtggtcccagctacttgggaggctgaggcaggagggtggcttgagcccaggaggtagaggttgcagtgagctgagatcacaccactgtgctccagcctggctgatagagccagactttgtctcaaaataaaaaaaaaaaaaaagaaaacacaataaatggaatcccagaataaatatatatggattttttttatgtttatttttttagagatgaaatcttgtgttgcccaggcttgagtacagtggggtcaccatagctcactgtaacctcgacctcccagaatcaagcagtcctcccacgtcagcctcctgagtagctgggactataggtgagcactaccacacccagctaatttttgtatttttttctagagatggagtctcgccctgtcgtccaggctggtctcaatctcctgggctcaaacaatcctcgtaccttggcctcctgaatttttaaaataaagtagcagtctggaaaatgttcacctataacctgaaaccctaatagtataaactacatttacttttgcatattatcttgcattcatttctatatgaatgtttcatggtaagggtgttcattttttatacttgtagacatgttgtgtatggagtttgctatcttaatatattataagcattttctatgttgtatggcctttatatttataaaaatacataaaaattacaaagaaatctgaaaatacgaagaaaaagaaaagtagtcaatatttttaatgtttatataatggatatatcatatccatgttgcccaggctggtctcgaactcctgaccttaggtgatccacccgtcttggccacaagcgtgagccaccacgcctggccttctactagcttttaatagcctagttgttgtatgttatggaataatgtctcctctatttctgctcagttctcctggagtaacatttaatcaggactgtgtaatttatgtatttcattgtttgtattc

SEQ ID NO: 50536 - DNA, 1044 bp, Homo sapiens
agccagaaacggtagtgtgcacctataattccaactactcaggaggctgaggcatgagaattgcttgaacccaggaggtggaggttgcagtaagccgagactgccactgcactccagcctgggcaacagagcgagactctgtctcaaagaaaaaaaaaaaaaaagaacagaaaagaaaagtatggtttgatggattaacaaattattataccttagaaaattttcagtatcttgaatcagttcttctcactagtactttgaaattgaataatggagcaaaagagcaattaaaattgtaaagtattaattagttgatttggggtttgttggtcttttagctttgtcttaaacttttaaatatataagaagtttaagaaattagaaaattgtcattttacctctgctttaagactgagcatcagcctaaggtttagtatacatttggaacggattacaatcctgttgggatatagaatgtcttgtgtttggttattaggatgcaaaaagtgaacttttttcagagtcagacatgtatacagattataagacagtgacttaagtgctgtgtaccagaaatagtgagaaaatgaataattttgtcagaggtaaggaatattagaaaaggcctaaccactccccacccccccccccttttttttttgagtggagtctcgctctgtcacccagactggagtgcagtggcaccatcttggttcactgcaacctccacctcctgggttcaagcgatcctcctgcctcagcctcctgagtagctggaattacaagtgtgcaccacctcacctggctaatttctttatttttagtagagacagggtttcaccaggttggccaggctggtcttgaactcctgacctcaggtgatccacccatctcagcctcccaaagtgctaggatttcaggcgtgagccacctcacccggcccccactttcttttaaagtaaatatgaaacctcaagaccggtaacattgtttacagcttccaggttgataataattaatagactgaggccacctctaagtagt

SEQ ID NO: 50537 - DNA, 1049 bp, Homo sapiens
caccggagccaggactttgggattgcaatgagctatgatcatgccgctgcactccagcctgggcaacagagcaagaccctgtctcaaaaataaacatagtattagtacaatgaaaagacaaatcgagaatagataatacaaaaatagccttatagtaaccagacttactgatgaatgccacagacccggagtatgtcacatggtttatcaggtgaattaataatttcatagtttaaaataccccgttttagggttagcataccaacatttaatgtatacttaaagattccattttgtcttttttccctcctagaattatatccatggaagcagtcaagcccagtttgtagctgaaacacacattgttcttctgtttagtatccttttacaataagtctttcttgctgtattttgtctgttttctcacagtctagtattctctctacagcatttggctggggctgttctcttaatgcaagtcacaatatcctttgaaaatcattactgtatcatcctctccagcccaataaaccaaagactactagggacaaatctgtagtctgatagggccaggtttattggctcattaatatgaggaatactgtacattagaagaaccatggaacatcttaacaaagaaaagatagagttgtaataggatttgggagaatagtggagtttatgtgaaatttaaacaaagcattgttttgataggctaaaagcagtgtaaggctgtgtaaaggggtcaacatcaggtctgaactgtcaatcagacccagggttctgtttgcttggaaactacaaagttaacataaatgtgggatttttgtcttcaaaaacttcttctttgaagctctataccttggttgtaaattgaggctacttagaaattatacgtgtaaattgagtgacttagatctgccaagcaagaatatttcatttttactcatataattgcaagaagtctatttaaagaccaatattcctcagtaagaaaacagtaattactcaaagatggggatattttgacattttacagctgaagtgtg

SEQ ID NO: 50538 - DNA, 1003 bp, Homo sapiens
tgaatcttactgggaggccctaattagtcttgtccccatatcactgaggtggtactagtttggcagtcacttcataagtagcattaaacagaatcatcttgatgaatgagtgaaattacagaacactctctattaccctattgaattcagcatggaaaccactctttcgaccttaagtccatggattatctagttgtacttggcaaatccttcttaatctaaaagatgttatgttgtggttaaatagaatattgtacctattctatcctattttaggttatattatagactagtttgattgggataacataaaaaggatcatttttccgaaagtaaccacaataattttgattgctttcatttcagattttattttgacccatataattagtaaaaaaattttatactttaacatgtttttctctcctttccattagattagagtgattagacccccaaattatgctggtccccttatgttgggattgcttttggctgttattggtggacttgtgtatcttcgaagaagtaatatggaatttctctttaataaaactggatgggcttttgcagctttggtgagtgaatttcagaagacaaaaaattatttgaataaaattcctaatagtgtatttttaggtaagcttttatttatgtgagaagtagcattttatttcttacctgaggaaaatagttttatatattttaattttctgtcttaaaatcagtttgtttcattcattatctcataaggatggccagaacttcaaggaactgattgtacctgccttttattcaacctaaatgacagactgtcatctctatgaaaatctctagttgttctgaaaatattattcttttttttttttctttgaggcggagtcttggtctgtcacccagactggagtgcagtggcaccatcttggctcactgcaacctctgcttcctgggctcaaatgattctcctgcctcagcctctcgagtagctgggattacaggcgtg

SEQ ID NO: 50539 - DNA, 1101 bp, Homo sapiens
ctgtcggtagctgaggcgggcagattgcttaagcccaggagttcaagacctgcctgggcaacatggagaagccccatctctacaaaaaatacaaaaatcagctgagcatggtggaacacgtgtgtattccaagcacttgggaggctgaggtgggaggatcccttgaggccaggaggtcaaggctacagtgagccctcattgtgccactgcactgcagtctggatgacagagcgagacagtgtcattcattcgtttattcattcattcattcattcataattaattacatcaaaagtgtaatgtctgacaaaatattatgaaataatgtattttaagaataattatcatccagcccaactaccaaattttggctttaggtctcacattttctgtatacctctgcttgttagtattggttttaagtaagctgcctcattaaaagaactttaaatgccaagttgagtatattaatagcatgctcactttgtcttttttagatggtgttatctgaaaaggttagtcagctgatggaatggactaacaaaagacctgtaataagaatgaatggagacaagttccgtcgccttgtgaaagccccaccgagaaattactccgttatcgtcatgttcactgctctccaactgcatagacagtgtgtcgtttgcaagtatgaactccaactacgctttaaaattaaataactcatataacgttaaccatttctcaatcccagaagggccaagttagtgcagtaggtacttaaataatgtgtataccttactcaggatgtctatggtagcaatactactgctcttttatagtcaattcttgattatccgtatcagtgggggaagcatggataaataattgtggtagccatcataaaagtaacttaaagatcaaacagtcatcttataaattagtatcaacttggcggggcatgggggctcatgcctgtaatcccagcactttgggaggtcgaggcaggtggatcatctgaggtcaggagttcaagaccagcccagccaacatggtgaaaccccatctctactaaaaaaaaaaaaatacaaaaattagctaggcattgtggtgcatgcctgc

SEQ ID NO: 50540 - DNA, 1072 bp, Homo sapiens
ctcatgagctactttttattttctactacatattacccagtgtttcaccagcactagtggtgcttgggtcttgactcttcatattaaaaaattatcccttagagagatacttaactgaaatagatctcttttctataggaaaatataaatgcatattatatgagacctatttcttgaaatgtcaatggagtaatcatgaataattaataattttatattaaataagcatgtcatatagaataaggtttttaaaaaatactaacacttagatacaattttagcaaataccaaccactacactgttcccctcctttccgattcttgtttaaagagaaaccttgtttaattcttcttccagtatattttccagcttgtacactgcatattgggaaagtttggtgtgagtctccctctatcttttgttctacttgctgctccagtggggaaagttaactgtgattttatttcccgtttatttgtaaatgtccatctaatttatatgactttgaatgtaacttaacgtcttttcccactcttcctttttaattaaggatacagaaattgttgatttagattcagacggtcctggtacttcatctggaagaaaggtgagtaaataagtgaactgctgaggagatatgttttcaggtttcctgtgtcagtgatccctaagaccaaccccatatttggagaattgctagaaggattcttgcaactaagtatattaggtatgctcattgataatatttattagagtgatgcagtaagggtacccagttgagtcatgggtgaaaagacacaggcagagtctggagaaaattatgtacaggcttccttatgctattattatctttcccctgtgaggggtcacatattacactctttttccagcatgtgtgtgattagagactcagtccccaaagattttactaggggctggttatgtaggtaccctctgactagcacgtactaagattccagattcccagaaggaaatcaggtattcagcacaaatcacattgtttatactgtctaggtgcagtaaactgtcttaataatttaggaagccatt

SEQ ID NO: 50541 - DNA, 1067 bp, Homo sapiens
ggtccctctgtcatccaagtctcctactgacgacagtattccatgactggttaatctgcctttgcaattgagaactggttgtatttttataatatattattttgatttaatatttatatcataaaagtaattagataaaaatctgtcattttttataatctgtttttttttcttgctcttcttggctcttcccctgaaaactaaactaaacattcttttgaccttgtcaaatgactctttacctataatgtcctaggtcagttctatttgaagttttgtatatacattccagtggttcagaatccctgcttgtgctttaaatactgtaactatatcatctctttttagtgctcatcagtcaaatatattgagttatatgcatattggaacacctttgacacactgtgtttaagtacatatttgttccatattgtatattcctaaaatatactttaaatatattagccaaggctaacagagtattttttctttcacaggagaatatcagcattaatgtgggaggtacgctatattgaacataatgccaggactttcaatgagccagacagtcctatagttaaagcagctaaaattgtaactgatgtcttacttcgatttattgggtaagaagcagttttagcttccagagagtctaacttaaggtttttaaaaaattaattttaaaaaaattaattgaaaaattgtaaaaattactgaagcttttgaaatgacttgtttcttagggatcagagctgtactgatatactggatacttataataaaattaaagcagaagaacgaaacagtactgatgcagaggaggtaagaatcacagcatgattagtaggaatgagttacttttctcttatttgaagtacagtattatgtgtaaatgttgtaattggccatgaacagcaaaacagatttttgaaatctggctgaataccagcgtcttttaaagtgtacttagatggcatataccaaaaataaaatagagctacagggtttattcagagacaggtggccagtcatcatatttgacacagtggatgtaagtgacgagaaat

SEQ ID NO: 50542 - DNA, 1050 bp, Homo sapiens
taatctcttcctaaagattgttgtgaggaatcaaagacaaacctttataattccctaattgaatgtttgaaacatggtggttgcttttatttctgttaataataataggaataataagtcagaggctctttatgtgaagttgagtttaaaacgtaaggagattaaagaacattaattcatactccttaatataaaatacctcatattaaggtttataaacctgtattggcatctttatatttttaaagtaatatggcagtaggcagggcactcccaaacaggtcagagaaggtgatgtttaagtaaaggcatttctagggactgtgaggtttgcaaacttttctcaatgggtctacaataaacatatatccttggacatttagtaacatatattgttatatctctatattgattcatatgtgctttattttctgtataggtatcatgacatgccggatgtcattgacttccttgtgctacatcagttttataatgaagccaaagaaaggaactggcagattggtaaatatagaattgttgtttaataactattaagcttatgtacagtaagtaactttttaactgtgatttaacagaaagaaagtagcttatcatttagctgaaaaaagctaccagagaaactagaaaacttaagttaaaatttccttttagttatttcttatgcacattgtgtgtggcttataatctctaaaccttctgcaaatacctactctattagtatacaaacaggaatataaagaaaattctcaaatgtctgttgccctaaaatagagcactttacacttaggttctaaaacacatgattactgattgtgatttgtttccttttttccttcctccatccttgtttccctccctgtcaccttcccaccctcttttgctcttttacccttctttctttacttttttgattataaaaagcagtatagcaataatgtaaaggaaaatattttataatttaaataaatttgcttatagctctattgtataacaatacaatacagaacataaggatttttaaactatcaa

SEQ ID NO: 50543 - DNA, 1050 bp, Homo sapiens
tccaggatagatcgtattttaggacacaaagcaagtcttaacaaatttaagaagattgaaataatattaagcatcttttctaattacaatggcatgagactaaaaataacaggagtaatcttggaaggctcacagatgtatgcaaattaagcaacatacttttgaaaaaccatgagtcaaagaataaattaaaagggaaactgaggcaaatgaaaatggaaacacaacctaccaaaacttatgggatgcagcaaaaacagcccggagaggtaagtttatagcaataaacattaaaaaagagaaaatattaacattgaacctcaaggaactagaaaaagatgaacaaagtatgcccaaccttagcagaaggaaggaataaggaagattggagcagaaatagacaagatagagacttgaaaaacagcagaaaagattaacaaatcttaaagttggtttgttaaaaaggtaaacaatattgacaaatttttaggtagacttaggaaaaaaaacaaaagaaaagactcagaatcagagatgaaagtggaaactgaacagacaaataacaagtaatgagattgagtcggtaataaaaagtcttccatcaaataaaagcttaggaccaaatggcttttctgttgaattctaccaaacatttaaagcagaacttacactaatgtttttcaaactcttccaaaaaattgaagaggagagaatactttcaaattcattttatgaggtgagcattaccctgataccaaattcaggcagtgttaatacagggaaactaaaggccaatatcccttttgagaatagatgcaaaaggctgggtgcagtggctcatgcctgtaatcccagcactttgggaggccgaggtgggcagatcaccaaacctgtgtgatcatttcaatagatgcagaaatagtatttgacaaaattcaacatgtattcatgataaaatctcaacataagaggtatagaaggaatgtatctcggctgggcatggtggctcatgcctgtaacaccagcactttgggaggctgaggtgggcga

SEQ ID NO: 50544 - DNA, 1052 bp, Homo sapiens
caaagtgctgggattacaggcatgagccgacgttatttcttaatgtatagagactaagacttgtttatattaacaatcactgagaaaaaatatatagatatcatttccagtgccagatgaataaataaataaaccgctgaactgggagaaggaacatttaatgatatatgtcataccttatgttagatttttcttgaataggtattagtgactattgggaagaacctaatagaaaatgtatgtttaagataaaaatgtattttgaaaagtattaagtgaaattttaaaaatttcctcattcttttaacacaaagcagttggcttcatttctcttgtttctttatggtccttatccatacatttgtgcataaatttacatagttgatagtgtacacataattttgtattttacatttttgctgtgtaacccctaatttttttcacattgctttttatattattgattgctatgtaatagtctatcaaatattccataatttaatacgtaaccattcccttgatactggacttgtaggttgtttttaattcactggctttataaatagtactactttaaatattttatatatgtaactgttttttgctaatcagttatgtccccaggatagatgcccagaggtggagtaatagatgtgcatgttttcatggctcttcaagtatattgccaagttattttcctaagggatcatctcactgtatggtgcttttagaaatagaggtgtatatcagtttcaagtagtaatagctaacattaggtttttgaatttttagaaatgctaatttattaggtgtaaatttatgcctcattttcatttaaatttctttgataactggcaaaatagttgtatcttttctgtgagtcagcatattatttatatttcctatattgcaccttatctgttaacttttttttaccaaatcatcttttgggtgttgatggtgttcttatagctcattagttttatatgtattttaaaatattaagatttttccatcttgtaaatattttcacttttttcaatttttacttt

SEQ ID NO: 50545 - DNA, 1021 bp, Homo sapiens
agctgctatgaacatttatgtaagggttatttgtgaacgcaaactttcatttttctgggataaatgcccaagtttgtaattggggatcatatggtaattgaatgttttgtggctttttttgtttcttagagttttattattaatttctgttcttaattactttcttcaggatcatttatttttttttaaattatactttaagttctagggtacatgtgcacaatgtgcaggtttgttacatacgtatacatgggccatgttggtttgctgcacccataaactcgtcatttacattaggtatttctcctaatgctatccctcccctggcctccacccgacgacaggccccagggtgtgatgttccccgccctgtgtccaggtgttctcattgttcaattcccacctatgagtgagaacatgcggtgttcggttttctgtccttatgatagtttgctcagaatgatggtttccaactgtatccatgtccctgcaaaagacatgaactcatacttttttatggctgcatagtattctatggtatatatgtgccacattttcttaatctggtctatcattgatggacatttgggttggttccaagtctttgctattgtgaatagtgccgcaataaacatacgtgtgcgtgtgtctttatagtagcatgatttataatcctttgcgtatatacccagtaatgggattgctgggttaaatggtatttctagttccagatcgtttaggaatcgccacactgtcttccagaatggttgaactagtttacactcccaccaacagtgtaaaagcgttcctatttttccacatcctctccagcatctgttgtttcctgacttattaatgatcgccattctaactggtgtgagatggtatctcactgtggttttgatttgcatttctctgatggccagcgatgatgagcattttttcatgtgtctcttggctgcataaatgtcttcttttgagaagtgtctgttcatatcctttgcccgctttttgatagggt

SEQ ID NO: 50546 - DNA, 1050 bp, Homo sapiens
caatgccatttattgaaaaattggaaacaatctatttttatataatttatattaaaatttaaaacttaggctgtgtgtgatggctgaagcctgtcatctagcactttgggaggcctaggatggaggacccatttagcccaggaatttaagaccagcctgggcaacaaagtgggatcccacctctaaccaaaaaattaaaaactaaaaaaattagaaaattacataaggatttcatatatactatggataactttaatgattgcaggtaacagataaaattgcccaagagttatgttattcatttgtattaaaaaaatcagaggccggccatggtggctcgtgcctgtaatcccaacagtttgggagccagtgctggaggatcacttgagcccaggagttcgagactagcctgggcagcgtggtgagaccctgtctctacaaaaattaaacaataaaaaattagccaggtgtggtgctgtgtgcctatagtcccagctacttaggagtctgaggcagtaggatcacttgagccaaggaggttgaggctgcagtgagctgtgttcaggccattgcactacagtcagggtgacagagtgagaccctgtctcaaaaagaaaaaataataataataccactaatttgtatacttctagttttatctgaacttggtgccaatttgatgataaactctttcccagcagatatgatagttacctggctttggttaagtcctatgtctcttagcattattgatcagaatatttcctgtgataataaacagaattcagtgagttactcatctttcttgggagtaaaattctgtcgtggttagtgattttctggtttaggctcaggaggtttttcgtgggggggggtcttaagagtgcttttcttgataggaaactgctgaatctgtaggataattcaaaatgcattttttttttttgtttaagcataatcaactaaggaccactaagaattagcctgtagtctgagaaaatcagatgtatttatgtatagtgagcgagtaaactcccaagtaacaatgaa

SEQ ID NO: 50547 - DNA, 1094 bp, Homo sapiens
ttccaaattatataagtgaactttgcagaaagcctgaaaggaattgtaaataatatttctttgccatatttcacttaatattaccctagcaaaaagatgttcaatggccatgaatatgaatatcaatagcctgtagaacttattagtgttatttaagttttactgtggattggtgttatgagatgtgattggcatcaactttggagactgtatacttttactattgctggttaaggttttagagacataatttgatccatagaatcaaatccatgaaagaagtaattctatacctttgtaattttactagaattatcacattttattcatattcatttttgtcgctttcgtggcttctttcaagattttagtctatattaatctgtttagttgttggagttattttaggaaacccccaacgaagcttcaccaaaaactagctgggactacaggcatgtactgccatgcctggctaatttttttattttttttgtagagacagggttgcccaggctggtcttgaacttctgacctcaagcgatctgctttgcttcccaaagtgttgggattacaggcatgaaccgctccacctggccactttccagtgtttttggcagtattttcttagtctattattgtcctctctacttaatagaaactaatatgcttactacactttaaccaatcagaggattgcatacattctattttcttacttttttttttgagacagaatttctcccttgttgcccaggctggagtgcagtggcacaatctcgactcactgcaaccttcacctcctgggttcaagcgattctcctgccttagcctcctgagtagctgggattgcaggcatgcgccaccacgcccagctaattttttgtatttttagtagagatggggtttcaccatgttgaccaagctggtcttgaactcctgacctaagttgattcacctgcctcggcctcccaaagtgctgggattacaggcatgagccaccatgcccgaccacgttctgttttctaattaaattgtttgtttttgagatggagtcttgctctattgccctggctggagtgcaatggcaccatctt

SEQ ID NO: 50548 - DNA, 1035 bp, Homo sapiens
gtttctgaattttcatctgggcactttattttctgcttcctagttggctgttactgaccacataatagaataagatttgcttcttgcaattcatcttaaggtagataatttaaataatacagatgtcctttcatttgtggtgaccctattgagttgttggctaatttattgcttcctccttggagctttactggggacaacagagtaatcaaggttgtgtgtgtttaaatgaacagttcttgttaatctataagttttatatattgaaatggtgatttggaaactttttaaaaaccacattttaagatttttaaatcatttttaggagtctcgtatcataagactgaaccagggcctggtgtggtggctcatgcctgtaatcccagcactttgagagactgaggcaggcggatcacttgaggtcaggagttcaagaccagcctggccaacatggcaaaagcccttttctactaaaaatacaaacattagccgggtgtggtagctcatgcctgtaattccagctactcaggaggctgaggcatgagaattgcttgagccctggaagcagaggttgcagtgagctggaatcgcaccactgcacttcagcctgggtgactgagactctgtctcaaaaaaaaaaaaaaagactgaaccaaagttataaatgtgtttaggtgtggtatatagttttacatttatttcgcattttcatctctaaaactgaaagcaccagttagcgcttacatttggaatgacatagattgtattaccctcattttatatgcaaaatactagaagtaattttatgttttttatgaaaaacttttataaagattgtttgttattgtccttaaaaaatatacatacatctatgattatatgttgttataagaagttgcatctgcatataacacattcaagtttaaaagtgttttcacattatctcatttgatcctcaccaagtactttaaaacactgtatttaaattccagacatacctgtattcttttcttaaccagctgttgttctccaatt

SEQ ID NO: 50549 - DNA, 1050 bp, Homo sapiens
tgctttttactttctcccctatcccttctgcccccagttattttcctggactttattccctaaagtggagttaccaggtcaaagggtctcatgagttttatagctcttgtcatatattgtttgctctccagaagattgtactaatttataatgtcatcatctaggtatttagagtgagttttttaatagctttaaatcattcagtttctttaatatttaatagatggcaatagctcctggttgacttaagtagctctttttttttcattactagtgaggcttaacctttaaggaattaaataaaattgttaattcttacatatactcaattttaacgtatcttttaaatattcttttctgtttttatattttctattttttttacgtacacagagtttgttctgttgtttgaacattatagtttagataccatggttttcttttacatgtctgttctctacctatggacttctttgtaagagaagatgggcagggttgagtgataatttgaacagaagtgtagtggctgagaagtgaatgtgcagtgttggtttgattgctaagtttgtcagtaatatttttgattaaaattatttcacatatgacctgattttgagtggctgcattgtagaagagatgggatactttttcttggggtaggtgtttttgtttttttcttttttttgagagggagtctcgctctattgccaggctggagtgcagtggcgggatctcggctcactgcaacctccgcctcccaggttcaagcgattctcctgcttcagcctcccaagtagctgggactacaggcacgcgccaccacgcccagctaatttttgtattttttagtagagacggggtttcgccatgttggccaggatggtctcgatttcttgacctcgtgattcgtaaacctcagcctcccaaagtgctgggattacaggcatgagccaccgcgcccggcctggggtaggtattttttaaattgttattggaatgatagatttataaagtgtggtctttgatttagctgcatgttttggattgaaa

SEQ ID NO: 50550 - DNA, 1051 bp, Homo sapiens
gggaggaaaaaggggaaaggagtcgagtcaaaacaccgtctcttaagttcctcaagatcaacccagggggaagggtcctccaccggaaagggccggattgccttcacaggaagggaaagtcactccggagctcgcagacgcgaatgccaccacagagttccaaggcggctgccagagcgtcggccgtcagttagcacctccccctccttcccagagctgtagctaagcaaccatcgggctccgggagagtctaggctcagctgctgtattagtgcctctagcggggaactatgagcgctgcaaaaccctatcaccatttttaccctcccctctctccaccccctttgcccccgcccacctcttcgccacttcggctcctccctcttctcgctccgtctatctctctctctctctctctctccgcccccccaccccccgcgtctctctctctctctctctctctctctctctctctctctctctctttttcctctctctctctctctcttctctctctctctctcactcactcactctctctctccctctccctctcctctccttcctcctccgcctcctcagctcttgggctagaatatctatgggtcgaaacgtgatgcgatgaattcgagagagagcgaaactaggacgaggagtgcggcggaagcggcgggactcccgggcatgggggcttcaccacaatagaggcagcgcccccacccgcccccgccagcccctccggagcgaagcccccaaaccccctcgggaaaaggatggcggcagcacctacccagatcgaagccggtgggtagctgtgtcggggggtgggggggtgctaagggaatgggggcttagcgcgaaggctgtcagtttcttttgaaaaagcttctatttctcttctctacctccctctgaacctcttttcccccctcttccccagagctgtattacctgatcgctaggttcttgcagtctggaccctgcaacaaatccgctcaggtaaggggaagaaagagatctgggagtcgtggtgaatggtcccagtggggaa

SEQ ID NO: 50551 - DNA, 1057 bp, Homo sapiens
ttgctgaggataatagcttccagctccatccatgtccctgcaacagacatgatcttttttatggctgcatagtattccatggtgtatatttacctcattttctttagtctatcattgatgggcatatgggttgattccatgtctttgctattgtgaatactgctgcagtgaacatacacgtgcatgtatcttcataatagaatgatttatattcctttgggtatataccctgtaatgggattgctgggtcaaatggtatttatggttctagatcctttaggaatcaccacactgtcttctacaatggtcgaactaatttatgttcccatcaacagtgtaaaagcattcctgtttctccacagcctcaccagcatctgttgtttcttctacttttcctctactgttttcccattactatttggcatgtactttattagagcatgtactacattctgcctggtcatatattcacttgggtatatttttgttcttcacacttaggaagccttaaataacatacttattttgcattttctatcacatctagcataatgagtactcaattggatactttttcataagctaatcatttcttctggtatatcttgcattgttaatttacacagcaagtgtttttgatacattttatacacatgttgtcctattgtgagtgactataatttgcagtaagcagtgagattttacataaatatttatttttcattttggcttgaagtcgcttttaatagaagatgcttttttcatgtgtttacaggttatagatttatagagctagaaggcaagtagtccgtcacctcatcattttgcagataaataaaccaaggcatatagaatttaacttacacattaatgagtggcagagttggaactgattttcagtttagtactcttttcaatccactcacattagggaaaacttcctagaggaaaaaaggatttattaccttgtttcatgtagattaaatggaggaatgagaggtctgtaaccctttaacaattgaaggctcgaaggaaagctattattgttgacccactt

SEQ ID NO: 50552 - DNA, 1048 bp, Homo sapiens
tcagttttgggataattatttctctgttattgctgatgtatttttaatcgttttttttaaagtgatttttaacttctttgtttatctattggtataaatcatgaattaaatatgtccctgtgtgttttggaaaagagcagacagtggtaacttttaattatatttatgtggcctcttttgaataaaatagaagggtgatgtataagctagttgctttattatgttgcctgtgggtatcaagaaaggattggttcacgccatttataaatgtcgataaaacttctgtagaatgaattattctagtttaaggcttaagatgaatgtatatttaggacaaaagacagaaaatgtgaaaatatttcattctccttagtattttactttttaaaaataaacagataaatggaaatgctgcacaatttggtgaagtatatgaattgaaggaggatattggtgttggctcctactctgtttgcaagcgatgcatacatgcaactaccaacatggaatttgcagtgaaggtattgtctctgagcctagctttcttgtttgttttatgcatgtaatttaaattatgagtcaactgacaaacattttcagtggagtaaatgaagataggaaagataagatgatgagaaagaactctgagacttaatattttcatttttgaatttcttttcaagcctttgttatgtaggaacagtgtatttcatgaatttttgcatttgaataattttgttatacatgtattatgttaagattgagcagttgtgataattacaatcacgtcatcattggtacaatttcagtgaaataggatataatgttaaaattttatttttttctgttaagttttttacttatgtttttaaatgttaaaataatatgaggtaagtattgttcttgagtttttaagcatttcttcaaaaatataaccaaatggaaaatactcattttagacaaaataatttgtttgcctcagatatttttcttttttcgtatttcttagatcattgacaaaagtaagcgagacccttcagaagagatt

SEQ ID NO: 50553 - DNA, 1037 bp, Homo sapiens
agccgtatttccagacacaaaatgattaatacagtgccattacactcgtatacattactaacagaagaggcttggatccaccccttaggtcagagatgagttcacaattgtgtgtaagataagggtactaatttaacaacttgtggcagtgtagtaaaagctttgggtttgtagagcccctaaaagtgaaatttctgagaaatgatactagacagtaaaagagagaatggtataaatagtggaattctcagagctaaaacaaaataacttctatatttcaaataccctaagggttactatattatagcagattactataattaatattggtattatgaggcaaagtcactttataaaaggtgaatcttgttctttgcatttcgtgtgagaagatatacaaacaacataatatttcagaaagatttacattaaaatggttaatatcgaagagacacattcttaaagagtttagtttcatttatatagaaatcttatttctctggtattgccaataattatgccagtcaaataagaattgactgtgcttattatcttattattttcctagatttgtctgtctactcattttgaaagaagtatttttaaatatactgaatattgaaagaaagatcaaatgataaatcattattttgttctaggttctgtttacagaggaagatgtgaaattctacctcgcagaactggcccttgctttggatcatctgcaccaattaggaattgtttatagagacctgaagccagaaaagtaaagctgtattcttttgttttcatgttgtctgtatttctggaactgctttttgtcaaactctgttagatcttttaaatattatagggaattctatatgaattatatgaaacttatttgtaaaaagtaatctttgtgagacgtacattgactttaagttaatcatttaaattttttacatatattaaatagatactgacctatcttagttttatgatttttatgtaaatgttttatgtaaaatattttattccatcttgttgaatgtgaa

SEQ ID NO: 50554 - DNA, 1035 bp, Homo sapiens
taggttgttactactgtcaagcttttggaatggtgcagaacctgaagaaagtgaggtggaaggaggagggagagtttcagatgacaaagaaggacattataatagtaaaaatcaataaacatagccttgggaaggttgagaaatgttaggcaatagacaagaatgggatggaaaaagaactacttttgtagttgattttgggaagggggcagtgagatacgatattttctcatgctaggaaagtcactcataagacctgaaaaaaaagaaaaaacagatcaggtgttaaacaggttacttctctagactgcgaatgatggatcctattaaatgccatattgggatactactgaatattagaagaactaggggaaaaaagtggctcctttatgcaacagtgtcttcagaaagcctagactctttctttcttccttgcttgcctcttctcactcttcatattccgttctttacaatcccactaagggctatgttttgtaagagtggttctgaaattgtggtctccgtacccctggacaatcccaagacttttcagggagtcctcaagtcaaaactacttcacagtcatcctaagatattgtttgtacaactgctggcatgttggccaatcaaggcagtgacttcaaatggtaccagtagtcattgtagtcttcattttattacatatgcagtttaagaatgtccttgatgagacattaacaattattacatttattaaatctcaatccttgaatacccttcttttgaataatatgcgatgaaataggaagtacatgtgaagccccttagccacgtaacaaaatagaatggttgtctcaaggcagaggacttgtgcaaattttttgagttgtgagctgaaccaaccactgtttttatggatcaccacttttccttgaaaggacaataaactatggttacctaaatatgcttatttcgtaggtgttttctcaaaaatgaatggagtgagcctgttcatagaaaaacaactgatactctttttgtcaatggtagaatctg

SEQ ID NO: 50555 - DNA, 1071 bp, Homo sapiens
tctttgtctttctgctctcatgagatcaaaaaagtattgtgctaagcattaggaataaagagatcaatgtggtgtaatacctgcatttaagaagcccacagtccagtgggaaagaaagacatggtaattagttgttcggacacagtgtaacattttacattggctgtctcctgggaaaagtgatttttctcatctagttgcattttcatattgggagctttttagagtactgctgctgaaaattgaaagacattgcattttagaggatgggcatgtgagcattattaataaaagttaaaagggcattggacaaacattttcatttggaaaacctgcttaggtttggtgaaactaactatagtacaatttgtttcctaactctgaacacttctaaaaaaactgatgccaatacttatagtgataatctaaacataagcagggacctgaagtaccttcttgaacataaaaatattatattgtgttcagtatagaatcacagacattgaggggaccttagagacccatctaacaaaacccctttgtcatgtgagaaaactgaaggagagagtgatttgtgatttagccaaggtttcttagcttataggtgcatacagatatattatactttaatatagtccccaaatgtcagctacaaagcatctatatttgcattaaaaaaggttgtttacttttttaaaaaaggacctctttcaaatagggaaattcacttccatagccgattgattttaatttaatttttattttcagtaaacatttataaattaccatcactatttaaaagggtctggtgaaatactattttgatgtataagaaacatctgatatactttcaaaatcagttattcttcatttcttgttgatttgctggtagttcctaacacctacaattaaaatttctttgcctaggtaccccccttgagatagtgaatgcctgactacctatattccatggaagttattttagctgctatgaagtctagctcatttgggaccatactcttgttcactttggcttcaatcaccattgactaatcagttaattgaagagtg

SEQ ID NO: 50556 - DNA, 1699 bp, Homo sapiens
agggtctctgtcacaactggtcaactctgctgttgtagtgcaaaagcagccatagataagatggaaacaaatgggtctggctgtgttctagtaaaatttttacagaaacggacaagaggtcagatttagctcatgggttatagtttgtagaaccttgatctaagtcttctactttactgtttcttgaattagttgttaaagaatgagtagtattacctactgagctctgcatgttgacttgttttgtttccatgattacttacatctttctcctatagtttattttttcttctgtatagtatgtcatgatgtttaattaactgaatgaaagaggaattcacaacagtgcaattatataaaactgttcttattataatttgctttgaatatacccccatggtagatttctgtggcattttttttcctgtcataaatacttggttggggacaatttaatgaaagtacataggttatatacttagtgtatagttatctgttattgcaaaactctaaacaatatgaaattaagcataaagctctgaaaatcaaagtttctcaaggataatctgggaaccatgttaatagtgttccttttctaagtacttctatgtgtcctttgtccttttgtttttcagtaagtgtggatcttgttagattgtggaaggaaatgcctagggttatatttttcttagttatcactcttgttttaatacttttgaacctcaatttttgaacaatgtttttcaggtaaatggtcttaaaatggttgatgagccaatggaagagggagaagcagattcttgtcatgtaagtatttatgttaatttattaagccacatttttagcatataaggaaaaagaatacagggaaaggagaaaagctcctatcaaacaaatatattcaggtaagttggtaataagcaaatggaattattaataactcaactgcagtttaaaatataggacaggttttcctgacagaaatacttatgcatgcatttttaaaaataaacagctttattgagacataatttacatgctattgaattcacccattttaagtgtaatggataaaattttcagttgccagtgtatgagtaactgaattattatacttaaatatagaatcctttgagaagattatcttcaacctcagggtagaaaggatatctgacttggaaatattgaactgtataagcataacttgaaatcatttaaaatcaatttcctggcttttagaaaggattatgtgtaaattatttcagaagtttctaactagttttaaagactgcttagccattagaccattctatgtaatgcctagatactagagtcttattttacaagatctagttttacagagagcattcttaagatttgtagggagaatctgactaaatcagcatctacatttatgttgttattttatggttgttatttctatagatattttcatagagttatagattttttttttttttttttttttgagacggagtctcgctctgtcgcccaggccggactgcggactgcagtggcgcaatctcggctcactgcaagctccgcctcccgggttcacgccattctcctgcctcagcctcccgagtagctgggactacaggcgcccgccaccgcgcccggctaattttttgtatttttagtagagacggggtttcaccttgttagccaggatggtctc

SEQ ID NO: 50557 - DNA, 1050 bp, Homo sapiens
tcaagagagctaatcattacctctgtgttccatgataaggcctactgatagtgtagttgcttttctgggccatattgttttagtacctaccctctcatagtctctctcatctagaattttgatgaggaaatgcaagatttttttcccttcctgtaatttctttcttggtgctatcattgtatgtagcagcggttcttaagatttgataagcacttggaatcttgaggtataagcctttcagtactttgtcagaatttgctatgtaatgtttattcatttatgttatttccaaggattatttactgttgctgccaatatttttttttgttgtgtattttctttatttttgtttgtttttaggtaggaaaggagttagatgggagagagatttagagagctgagctaaatctggcttttgcagataagagacgttttctaaattgccctggagacattctgtaactgatttcactgctagattttaatctgtatctctacattagaaacaggtcctgctgtagttttgtgtgcacgtgtgtgtgtgtgtgtgtgtgtgtgtgtgagagagagagagagagagagagagagacagagaaagagggaaggtggagtagagtgcatgtgtgttacttgtgatttgcttcattttaccaagcatttgagatggtatatgggaaatataatctgataactattttgatattgaggataagggaaaacaaagtaggagatatatgaaaagggtggagggtaggggatgaagggtaaaatagagcacaaataagcaggctgtaagggtctatgacatgtttaaaatatagttgaattataaatttggccttgagttttcttagctggtttttctcaactctggctgtgtgttatatttacctgggagtgtaaaaaaattatccatgccagtgttccactcagagattcacatttaactaatctagagggggcctgggcatctattccccagatgcttatgatgcacagccagggttaaaaaccacagctctaggccaaagtaaaaaaagaaatagtcac

SEQ ID NO: 50558 - DNA, 1120 bp, Homo sapiens
ctagaattaattttgctttaagatgtatgaatacatccaattttatttttccaaatggttaactaattgtccctacaccatttgttgaataactcatcttttaccagtgagttggaatgtagctttttattaaatacacacacacactctctctctctctcacacacacacacacacacatgcacacacatatacacacatgcagacgtacacatatacacatgtgggtcaaatctgagactgcttattgttacactgatttgacagtttacaactttggctttataaaatgtcttaatagctggtagggccctcattcttctttgctttgtagtatattgattcttgaattgtttagtcatacaatttgaactgtttaagcataccttttccaaatctccttccccaacatccattcaagatttttcttggcattgtattaaatttatagaatactgtaggaagatgaattcagctttgcacgtattgaattttagatagtggttggacatccatgtagagctgtccaagcaggcctttggatgatatgagtctgaaactcagatgagtgcttaagacataaaaagaaatatggaagtcacccacattgaggcaaaaaatatctagccatgaagattgaagatttagttaagtgagaaaatgaaaaacaagaaaggacaatggacaaagactgtgtattgataaatatccagatttgggcattggaggagaaaagggagcccttgaaagaacattcagaaacagaagaagcaggacagtatgcttttcctaaaatcaaggaaagagtcgggtgcagtggcatgcctgtagtctcagctacttggaaagctgaggcgaaaaggatcccttgaagttgggagtttgaagcttcagtgtgttctgattgcacctgtgaatagccactgtactccagcctcagcaacgtagtgacttctgtctctaaaattaagaaaaaaaaaaaaacaaataaggagatttcagaaggaagaggcgtcattatttcagtagtctcgtggtctcatagaagttaagtagaaaaagggatgagaaagccattgaatttggtgttttagaaattctttaaaaaagcaattaactg

SEQ ID NO: 50559 - DNA, 1021 bp, Homo sapiens
tttagagctgggggggcaccttggggttgagttcaatgcctatatatgtgtgtgtgtgtgcgtgtgtgtatgtatgtgtatatatatatatatatatatatatatatatatatatatatatgtgtgtgtgtgtatatatatatatgtctctttattcccaatctaacattattcccagttccaccttactagtgtatgccttaccataagaaataacttggatacttcttaaaaatatagatcaccctattctagacctaccgaaacagaatttgcaagaaaggcccagagaatctttatgtttcccttccccaaattattcttaagatcaggtaaatttggaaaaaactttacaacactatgtgatgattgcagctaaatattctagcgtgttctttttatccataacacttggtcaaattttataatttatatttgtttttctatttgcttatcacctgtacatatgcatttctgttgtttatcatctatatttatacatttaagttccctgaggaaaagactatacctattatattcacctattatattcaccatcccaagcaccagaaacagtgtttggtacatagtaaattttcagtaatatatgtggaatgaatgaatgaatatctaacagaaaagtgtaccctctatatatagcatacatgaactaacaaatactacatttaaataactacatttaaaataaaagtttggaatatagcttcatattgtttaatagaaagatacttagaaatgtacagggctttagagtactcatttttaatagccattatgtttgtggtgttaatacataggtgttctggttgaaaagattcactactatttttagatttgtgaccattctggtgggaaatttattattcaggaaagtaaagaatttggaaattattttcctaattttgcacataaataatctgaggcttagagtgataaaataacttgtccattgatcatataaaatggttgaaaaacctaaatattttaaagtaggggtttc

SEQ ID NO: 50560 - DNA, 1031 bp, Homo sapiens
aaagttcacaggaaaatactagtaaatctaatccagcagcacatccaaaagttaatttaccacaatacaagtaggcttcattcctgagatgcaagtttgactcaacatacataaatcaatgaatgtgataaaacatgtgaagagaattaaaataaaaaacatataatcatctcaatatacacataaaaagttttccataaaatctaacattcttcatgataaaaaccttcaacaaaccaggtattgaaggaatatccctcaaaataataagagccatctgtgacaaacccacagccaacaaaatattgaaagggcaaaagctagaaccattccccttgagaactggaacaagacaaggatgcccacaaccaccactcctatttaacataatactggaagtgctagcaagagccaccaggcgaaaaaaaaaaaaaaaaaaccattcaagtaggaaaagaacaagtcaaattatctctctgttgacgatatgattttatacttagaaaaccttaaagactgtaaaaaaaaggcaactagaattgataaacaattttagtaaggtttcaggatacaaaatccatgtacaaaatttagtagcatttctatacaccaataacatgcagactgagaatcgaatcaagaacacaatcccatttacaaatcccagaaagaaagtaaaatacctaggaatgcagctcaccaagaaggtgaaagatgtctgtaaggagaactacaaaaaaactgctgcaagaaatcagagatgaggccgggcgcggtggctcacgcctgtagtcccagcactttgggaggccgaggcgggcggatcacgaggtcaggagattgagaccatcctggctaaaacggtgaaaccccgtctctactaaaaatacaaaaaattagccgggcgtagtggcgggcgcctgtagtcccagctacttgggaggctgaggcaggagaatggcgtgaacccgggaggcggagcttgcagtgagccgagatcccgccactgcactccagcctgggcgacagag

SEQ ID NO: 50561 - DNA, 1034 bp, Homo sapiens
aacatagatacaaaaatcctcaataaaaaactagcaaaattaatccaataatatatcaaaaaatatgccatgatcaaatgagatttatcccaggaaagcaagaatggtttaacatacacaatcagtaaatatgttacatcacatgaatagaatgaagaaaaaaacattatctcaatagatgcagaaaaagcatttgataaaattcagcatccattatttatttgaattcttgataaattaaatatagaagaaaatacttcaacacaacaaaggtcatatatgaaaaattcacagcctaaataatactgaatggaaaaagggtgaaagcctttcttctaagaattggaaaaaaacaaagattcccacttttatcaattctattcagcatagtactaaaagtcttggccacggtgattaggtaagattaaaaaaaaaggcatccaaattggaaaggacaaattaaaattatccttttttaacagacaatgtaatctcatacatagaaaaacttaaagactcaaacacaaaactcttaaaactggtaagcaaattcagtaaagttgcaggatacaacatcaacatacatattcagtagcatttttatgcgtaaacaacaaacaggatgagaattaaatcaagaagacaatgctatttacaaaaactgaaagaaataaaatgccttgaaataaatttaaccaaggagttgaaagaactgcaattaaaaaaaacaaaacattgatgaaaggaattgaaggatacacaaataaatagaaacacattccaagctcatggactggaagaattaatatcattaaaatgactatacggcccacaggaatctacagattcaataaaatatttatcaaagtaccaatgaaatgttttatggaaatagaaaaaataatcctaaaatttatatggaaccaaggaagagccagaatagccaaagcaatactgagtaaaaagaacaatgcaggaggcatcacactaccaaacgtcaaaatatgctacaaagctgtagtcaccacaaaagt

SEQ ID NO: 50562 - DNA, 1090 bp, Homo sapiens
ctaacaaacagaaaggaatagcatcaacatcaacaaaaacgacatccacaccaaaaccccatctctagatcaccagcatcaaagaccaaaggtagataaaaccacaaagatggggagaaaccagagtagaaaatctgaaaattctaaaaaccagagcacctcttctcctccaaaggatcacagctcctcgccatcaatggaacaaagctggatggagaatgactttgacgaactgacagaagtaggcttcagaaggtcggtaataacaaacttctccaagctaaaggagaatgttcgaacccaccgcaaggaagttaaaaaccttgaaaacagattagatgaatggctaactagaacagtgtagagaagaccttaaatgacctgatggagctgaaaatcatggcacgagagctacatgactcatgcacaagcttcaacagttgatttgatcaagtgaagaaagggtatcagtgactgaattaatgaaaaattaatgaaataaagtgagaagagaagtttagagacaaaagagtaaaaagaaatgaagaaagcctccaagaaatatgggactatgagaaaagaccaaatctacgtttgatgggtgtacctgaaagtgacggggagaatggaaccaagttggaaaacactctgcaggatattatctaggagaacttccccaacctagcaaggcaggccaacattcaaattcaggaaatacagagaacaccacaaagatactaatcgagaatagcaaccccaagacacataactgtcagattcacctaagttgaaatgaaggaaaaaatgttaagggcagccagagagaaaggtcaggttacccacaaagggaagcctatcagactaacagcggatttctcagcagaaactctacaagccagaagagagtgggggccgatattcaacattcttaaagaaaagaatttccaacccagaatttcatatccagccaaactaagctttataagtgaaggagaaataaaatcctttacaaacaagcaaatgctgagagattttgtcaacatcaggcctgtcttaaaagagctcctgaaggaagcactaaacatggaaa

SEQ ID NO: 50563 - DNA, 1087 bp, Homo sapiens
cagtgtatgcgtatgctcaaactcatcaaattgtacagattaaatatgtgcagtgtttggatttcaattatacccccccccaaaaaaaaatcaatatacactcaagatgcagttacttcattctaatatattttctagctagaaaattggcaaaggctactggtgttatgtcaaaagaacataagaaccaatgtgaaggaactcccattggtcacagataaggccatttgaacatcaagagtgaataatgatactccaaaaagcaaacgaacctcattgaccagccatgaagattgctaaggcactctttgttctagaaactaataaataaagagaaggaagcaattatcatatatgtcctgtaaagactgtatttcaggatatccaaatagttgttaaaggaaagttcttgtagaagaatcacaattaataaatgcatgaggaatgatagaattagaaaaatcactgttttgtaaactcaatatagtataataatatacctaggcaatgattatcaatgactgctaaaacctgtagttgaaaggcatcactcgaacctactgatcaatcttaaaattattataagtagaaaggcagacattataagtttccttgtgtgttgaaatagaaagtatacagcattgcctaggaagaattcttgccaaaataaaaaaataaaatgaacctaaatctaatcaagcctttagctttaactaccagcttacaggcatgagggggacaggaaagcatgctaagtgacatcatgaagatacaacgtgtaaaattctacaggacaaatgacccaattttatcaacaattaactggcacaggaaaaaaaatggaggaagcattattacagactaaaggagattttagagatatcaactgcaacatgctgaccttgttttgaacaaatgacatcttttttttttttttttttttttaagatggagtcctgctctgttgcccaggctggagtgcagtaatgtgatctgggctcattgcaacctccgcttcccgggttcaagtgattctcctgcctcagcctcccaagtagctgggattacagacgcaggccaccatgcc

SEQ ID NO: 50564 - DNA, 1030 bp, Homo sapiens
agctttgccattcaaaatcaaacatacaagagagataaccagtaataggagatattttgttaggacttgaacataaagtgagggatagttttttgagggaaaaaccttgacattgtattaggcaaatccaacatacatttctttttaaggattcaaggctggcttaaacaattgttatgttctaagtataattagggtactcactaaggaatctgcaaagatttgcatttgtctccttatggtttcagtttgcctttcttttcctagttttctatatggaacacttgacatcctctctcctctttaggacagttaagaactacttatactttgagtcaaagttctgagtttattctgtgatcccacagactacatcagaaccctctgtcagtctccactccccactgtcacatcccctcgtatgatcattttataagttctctataagaaaaggcaggatctcactgttgtatctccagaaccaaggcaggttcctagtagccattatactgaataactttgagttaaataaatgattaaagattaaagactggctataaccctttttgtgcttttctttgcactctccatttaggaaaactgagagaggcataagggatcatagcattgagtttaatgtggtgattatacatcaaaacactgtacaaactttgaccgaagaaatagggcattgaggaggcacactaaatcatggtatatggaatatgtaaccaaatgcatacctattttcagccaggttttatttttcatttttgtttgattggttctgctttcttatttgagaggatgtaggtatgcatcagtggttcttttctaaaccttttcactaaattctaatactgcatgcttccgttgactgtttttagaaaaactgaatgttctagttgaacagttttcttttcctttgcagctatgctgaccaggtaaaactccggtaaattagatctggccatttagtagtatagtatttgatatattggtagggtagagatgaccttggactaggacc

SEQ ID NO: 50565 - DNA, 1050 bp, Homo sapiens
ttttctcttatatttttcctccttatttttttgtttggttttagttttattgttttgttggcttgctttgactttgaaatggcaactatccctacaaccattgggtgggggtggtagttgaagaatgtcagtcagtttcacagctgaaagtgtgctctgcagcaataaagctttaagcttttttctgacattctaattttgctatttttcctattaatgaaaatagagtttaattttcccttccaagacaaaggaagggttaaatttaaggaaccatgaatattctgaagtagaggatagggagaaaggaagagggaatcagcagtccttaaccctttgatctgtcatttctgtcctctcatctgtgtccccattcttgtttctgtttgtcttcttccttcccagggttgtcagtgaatgtagcaatgcctgactggcactggactgtgttaattgcttgcagaagtgtgctggctgtgggtacgttcttctgtgttcacattttgcaaggagcggaggatggtgatgatgctgttgataacttactatgtgctaggcattgcttcaaatactttcatttctatgttacaggtaaagaaaatgagttttagagtaacttctgtaaaattactgactgaggtcatgctgctagtaaaaggcacaactacaatttgaatccagatttgtctggtgccaaaggcttgattaatatcattgcattaatcgtaataattcccttagttaactataattattatgcattaaggattcagagatgactaagctactgtccttgcccttaagttgctctcagtctagtcacaggaagcattcatgtaatctgattataagacagcatgacaaaactctaatggaagtatgtgcaaagctgtggaagcacagggatcggttctttttgaagagttgaaggcttcacagaagagatgatactgaatttgagtagttctgtctttttttactagttccatcattagttttatggtggaatagcatttggggcataggcaatagcactaataaaagcagaga

SEQ ID NO: 50566 - DNA, 1015 bp, Homo sapiens
ggctggagtgcaatggcgtgatctcggctcactacaacctctgcctgccaggttcaagcgatcctcctgcctcagcctcccgagtacctgggattacaggcgcctgccaccatgcctggctatttttgtatttttagtagagacagggtttcactatgttggccaggctagtctcgaacttctgacctcaggtgatctgcccacctcagcctcccaaagtgctgggattacaggtgtgagccaccacacccagcctgcacactttctaataccatgtgggtgttacagctattggtggcttgtaactacccatttctattttggggttcatgatgatattgtatcaccttgctttgttatggatgttgtccctgggagtttggtttgggtatcctgattgtactgtctgtttttatgggagttatgggggagattcaacaactgctgccatctttacagaagcctctttttatctttcactttatcatttgctcaagaatagaggtcaagttgttgacctagcataaacattcacttttcagaacttgaaacaaacctttgggtcacttattccaagccctttattttatctaataaggatatctataaggaatctgaattccagaggttaagtgactttcgtgaggtcacagctatttagtatccacctaaaaacaggaagccagtccttctgattcttaattcagtactcttgaatactgaaactctttttattagccatccctaaaggctcacaccatagtgaatttttaaaaattaaaataaattttccaagttaatgttttaatgggtagtatatttttcaaaaaattctaaaaattacatggctataaatacacattttgttccacgaggaagaagttcagagattttaaattacatttactaatatttagtattttgtggggaggttagagtgaataaaaataattgtcaatttaaaaatgatatttttatctttatgttgtggtagttccctaggctacttcatttg

SEQ ID NO: 50567 - DNA, 1040 bp, Homo sapiens
ggaaacatagagggaagagtgattaattctgattcagaaaagcaggaaaaatggcacaaaggacatggcatttcaatagactgttcattgattagcatgtatttattcagtgtcccctatgtggcaggcattgttataggagctagatatatattcagtagtagacaagcaaacacagttcctcctttatagagctcagagtcttgttgggtagacagacattaaactaaaaggaaaaaaatcctgtaaataaaagtacataaatgatgatatatgctaagaaggaaaagtgcaggtgctttaaagcacctaatttggattgggtgggatgggtgagggaaatccatgctgaggagttgtcacttaagctaagacctgaataatgagtagaagttagctggtaatgagtggggaaaagattattccaggccaaaggaacagcacatggaaatatcctgaagcaaaaaaggggttgaattatttagagaataaaaggaaagtcagtgtagctgtgatgtagtgaatgaggaggagagttacttgagataaggctgaagaggtaggcaggagacatattcagagttgcatctgctaggactgttttttgctgtatgtaatagaaaccaagttatggcagtttaaccaaatgaagggtttatttttctcacataatgggagtcacaaagtcagcagtccagggctagttcaagtacaaggacccaagcttccatctttctgttctgtgatcttttgagcatggcctccatcatcatgcttccaagatggctgctccacctctaggcaggataaaggggggatagcaaagggcaaaagaacatgtggcagctaaatttgtccctttccattaagaaagtaatagtgttcctggaagccctgtcctgtagatttttgcttatcttattggccagaactgggttggatgaccactcctacttatagtggggtctggggaggttttattttcaactgagcctgttaccactcttaataatatctttttatgtatatatagaaggggg

SEQ ID NO: 50568 - DNA, 1715 bp, Homo sapiens
ggcttttgttaaaaccgtaaactcatctggtctaataaggaaccagattttgggaagacatgtgtttcaatggcgttagtatttgactggtaaaatactgtgagaactgttgttggctgaattgatccctagggcacactttgcattttacttgagccactgactaggaacacataggaaggtcttcattagcaggaatagattagaatgtatgtaagcaaatacagatgttgaaatttgggtaacaagtacattaactttttttctttaattttaggacatttagggtcccccctgtgaattagaaagttgcttggctggagaactgacaacactacttactgatagaccaaaaaactacaccagtaggttgattcaatcaagatgtatgtagacctaaaactacaccaataggctgattcaatcaagatccgtgctcgcagtgggctgattcaatcaagatgtatgtttgctatgttctaagtccaccttctatcccattcatgttagatcgttgaaaccctgtatccctctgaaacactggaagagctagtaaattgtaaatgaagtaatactgtgttcctcttgactgttatttttcttagtagggggcctttggaaggcactgtgaatttgctattttgatgtagtgttacaagatggaaaattgattcctctgactttgctattgatgtagtgtgatagaaaattcacccctctgaactggctccttcccagtcaaggttatctggtttgattgtataatttgcaccaagaagttaaaatgttttatgactctctgttctgctgacaggcagagagtcacattgtgtaatttaatttcagtcagtcaatagatggcatccctcatcagggttgccagatggtgataacagtgtaaggccttgggtctaaggcatccacgactggaagggactactgatgttctgtgatacatcaggtttcagcacacaacttacatttctttgcctccaaattgaggcatttattatgatgttcatactttccctcttgtttgaaagtttctaattattaaatggtgtcggaattgttgtattttccttaggaattcagtggaacttatcttcattaaatttagctggtaccaggttgatatgacttgtcaatattatggtcaactttaagtcttagttttcgtttgtgcctttgattaataagtataactcttatacaataaatactgctttcctctaaaaagatcgtgtttaaattaacttgtagaaaatctgctggaatggttgttgttttccactgagaaagctaagccctacatttctattcagagtactgtttttagatgtgaaatataagcctgcggccttaactctgtattaaaaaaaatgtttttgtttaaaaaaaactgttcccataggtgcagcaaaccaccatggcacatgtatacctatgtaacaaacctgcacattctgcacatgtatcccagaacttaatgtaaacaaaaaaatcttaaagtgcaaatattaaaaaaaactgttctctgtgaaaaaaattatattccatgttataaagtagcatatgactagtgttctcctagagatcagacttttttgattgtatagtttgcattaaaaagttgtacagggagggatgtaacctgtatcttcaggataatagggaaattaataaggaaaataataattactaaaatttgagtt

SEQ ID NO: 50569 - DNA, 1045 bp, Homo sapiens
gctgtatttaatctttgtttttttcctcccattagggttgttttataaaggtgatgaccattatagagtcagaaatgggagtcgttgcaggaatttcctttggagttgcttgcttccaagtaagtttttgtagttacttaggaaatatttcatccctcttgtaggtgtaagctagaagattttcacttttttttttttgagatggagtcttgctcggttgccaggctggaatgcagtggcgtcatctcagctccctgcaacctccacttcctgggttcaagcgattctcccacctcagcctcctgagtagctagaattacaggtgtgcgccaccatgcctggctaatttttttgtatttttagtagagttggggtttcaccatgttggccaggctgatcttgaacacctgacctcaagtgatccgccctcctcggcctcccaaagtgctgggattacaggcgtgagccactgcatgcagcgagattttcacttttaaggcttataagtttttgcttcaggggactggatagtgaggacatttttagggaagtcgcattttcacaaaactctcagttactggtcacagtataaaaatactttatttaggagaaatacctaatgtagatgatgggttgatgggtgcagcaaaccaccatggcacgtgtatacctatgtaacctgcacgttctgcacatgtatcccagaacttaaagtataattaaaaaaaagaagaaaaaaagtaagatttagaattaacttgtagcagtgcatatcttttgaaagcagttaactgtggaaagactcagtgccctcttagttatggcaactttccagtatcatagctcatgaaacaaaacattagataggaaccttggttctctctgcggtcagtcaagattctaaaatgttattaggatcttttctgggctgcaactgcctgatgagttgtatacaagttccaacctattaaaatttagatgatgccacccccacattccttatgcaccagttgtttggggttgattccacgttgtagatcaaatt

SEQ ID NO: 50570 - DNA, 1035 bp, Homo sapiens
ctgtatgtattgctttgcaatccgctttctttttgcaaatatatttcttgtgggtattttcccatgtattttcttaggtcgcttttaacctcttcattcttttccttctctctagggcaccaggggccagggaggcccaatctcagagcgctgcgggctctgctggtgatagaaacaatatggtgaagttataaggagaggggaggggtggggggcgggaaagattccttaggatagaaaaaaaacaatgaagaaagctccacttgaagacctatgaaatttccgacactagaacctttgtatatagttttcggtaaccttcggcagggggcgctctgaaattgttgccactttccggacagcctcccatactttaccctctacaaaattgtacagtgtttccggcccttctcagttgtggacgctcgtaagttttcggcagtttccggggagactcggggactccgcgtctcgctctctgtgttccaatcgcccggtgcggtggtgcagggtctcgggctagtcatggcgtccccgtctcggagactgcagactaaaccagtcattacttgtttcaagagcgttctgctaatctacacttttattttctgggtgagagacgaaggcgcctggggccggcaggggatcccgggcttttagttgtggggggtgtgaccctgagcggcgggagctcaggtcgggaacggtgtggggtttgggcggccatcgcgcctgggaccccgacgccggcgaccagtgactgggccccgaacaaagagctcaggcatctcgccggcgctggggtcggagtgcgggacgaaggcagccgagaggctgagctgggacccagacgtaccagcgttcgagttcgatacgggaggcgaggtggggccttaagcccccagagcacgcagacggtgaccctggacctttgcaaaggcaagcaaggcttgcccggcccctttgagggctcacttgcataatagtgtctttcttttcactgcttcgtaagagaggagtgtttcgcaggtaagt

SEQ ID NO: 50571 - DNA, 1033 bp, Homo sapiens
aggttgtagatttgtgagtgggcgagaaacagactgtagagagtttaggagttagtgggtgctgaggagagaggcagtgggtatgcaccatttggcagggagaagaacgtgcgtagaaggtagctacaaagatgctcagaggagctcaaagctctgagaatttctcagttgaaactatttttcttaaaggtcaccatttacctccttcttgccagataacatctttcctttaccctcaatttgatttctttgcaatatttgacacaatttatctcttaccccttcctttccttaaaactctcttctcctgtggcttctgtaatatgacaggtactgcccagatatcttcctacatgactgaccactaattctctttttttccccttgctggttcctcttctcctactcatgtctacagatgtcttctaaagctctgaccctggccttctgctccctcagacaacccatctatctaagctgatgactcacacaacttcatccttccgccgcctgtagggcatctttaccaaaccagttttcttttttgacattgtctttctgagaggggtcttatttcttccaggtgtacagactgagtgctttcagacatcagtttgtttcttagcctcttggtacatcaagtctgtactaagtcttgtcatctctttctttgaaacatttatggggttcatctgtaccctccatttctttgccaccaccatcagtcatctctagccaacattactgtagctggttcctggagagtctccctgactcagacttaaccactgaacccctatttctgcatagaataatcaggttaatgttctaaaatgacaatttactgtgtcatgcctctgtgcaaaaacatgtgatgggctccctatagatcctagtacaacagctaaactcttccacatggcttgcaaagcaaagaaacaaagaatcagaaatagaagggatattagataccacctggcctaacttcccttttaatgcaggaattactcactatgcagcattcatcacagat

SEQ ID NO: 50572 - DNA, 1048 bp, Homo sapiens
ttagggctaagcaaagtggtctgaggtatgacaccaacagcagaattaataaaagaaaaattaaaatttgtttttttgagacggagtctcactctcgcccaggctggagtgcagtggcgtaatctcagctcactgcaagctccgcctcccacgttcacgccattctcctgcctcagcctcctgagtagctgggactacaggcgcctgccatcatgcctggctaagtttttgtattttagtagagacgagatttcactgtgttagccaggatggtctcgatctcctgaccttgtgatcctcctgcctcggccttccaaagtgctgcgattacaggcgtgagccactgcgcccggccagaagaattaaattttaataaataaattaatgaattaacaaattggaccttgtcaaaattaaaaattgctctgtgaaaagacaaagccataaaagggactagtatttaaaatatagaaagaactctcaaaacattgaaaaagcaaacaatccagttagaacatggacaaaagatataagcacacatggcactgaataggctacaccgatggcaaataagcacatgaaaagatgttcagcatcattaatcatttgggaaatgcaagttaaaatcataatgagatactacttatatatccatcagggagggtatccttaaaaaaaactggtaataccaagtgtttgtgaagatggagagaaactggaattctcatatatggctggtggaaatgcaaaaatacagccactttggaaaatattttggctatttcttataaaggtaacacctaccttcttataaagaaaggtacacttaccatacgactctgcaatcccacttaaaggtatttatgccagtgaaataaaaacctgtgtccacacaaaatcctgtacacgagagttaaaagtagctttattcataattgccaaaagctggaaacaactcaaatctcaaatgtctttctttcttctcttttctttttttttttttgagacggagtctccctctgtcaccaggctggagtgcagtggtgca

SEQ ID NO: 50573 - DNA, 1057 bp, Homo sapiens
agtggagaaagagatatttaaattgggaggtgaggattgaaattgatgatgtctgaagagtcctgtgaagtaggggtggaatcgagaactcagatggaggagttccctcttttttaaatcattgaacaaatatcaggcaactttatgtctctaagcctcaattttctcatgtacaaaatgaggacaaaaatagtgtgactctcctagggttgttttgagaattaaatgcttaacatggtatctggcacatagccagttttcaataggcatttattaatattgtggttgttattaatacagcacctattgcttactggcaggcactgtgctaggcactgaggagacaggacaggcacggttctgttatggagctcgctgcctttaggagcaagcaaagaaagtgctgcataaacaaagctcaagataaatctagaggtggaaggggctcacttgctatggctgacatcccttacaggtaaaggtggggaagggggagagctccaggtgtggatcaaagaagccaagaacttgacggctgccaaagcaggagggacttcagacagctttgtcaaggggtgagtccctagaccagccccaaattaaccagtttcagaacaagagagctaagagaagaatttaactttctctgtggatattatccagtgtgtcttaccactcccggcaaccaaatttgttcctgaaattaggtaatgacaaaaccttcaccacctttgcactggtctgggctgtagacttgataatccaaagaggagggctgcagacaggttctgacttttgtctgactcatgttcttaattaattctgggtgaaaatctgtgtcttctgactgtctagatttgggaactcagggctttgtttcccacagtttttaagctttccgaaaattacagattacctactgacttaatttatctagaaatcatgtttggctaagtttatagatattactattggttttatttaaagagataaattgtctagtagaaacaaagccaaatatttaaaacccattttcagtggagcacagaatagcctc

SEQ ID NO: 50574 - DNA, 1069 bp, Homo sapiens
tcccagcactttgggaggccgaggcaggcggatcacgaggtcaggagatcgagaccatcctggctaacacattgaaaccccatctctactaaaaatacaaagaaattagccgggcatggtggcacgcacctgtagtcccagctactcgggaggctgaggcaggagaatggcgtgaacccaggaggcggagcttgcagtgagccaagatcgcgccactgcactccaacctgggagacagagtgagactccgtctcaaaaaaaaaaagtatactcagctgggcaccatggtacatgcctgtactcagctggtacaccatggtacagttactcagaaggctgaggcagcagggttgcttgagcctaggagttagagactgttgtgcactatgatggcacctgtgaatagccacagtactccagcctgggcaacattgcgagaccttatttcttaattaattaatttattatatgtttaaagtatactcatatttattttagaaagatcactcaggctacgattgtgaatggattggaaagaggcctgactagaggcaggagaacctgcttcctttcaatattggctcttggtttttattctagtgtgctatttgaagtgccaaagctgaaaagtggaaagagtgcattggaagctgagagtgagagtctggatagcttcacagctgactcggatagcacctccaggtggggttccccccatttccctcatctcctctcaacccaagttgtgattttgttctgcagcatcagtgttcctgacttctgtcctcaggaagttgaacgaagtattttctctgtcctcaacagaagtcttttcagtagcacgtctactgatttggctctgagcacagcttcctggaacacattgacatctctagtcaattcccccagtatcttggagtattcttcttagcccagtagcaactgatgctgctgtcccttaagaatgagggtgtgagtgtttgtgtttgtgcaaagttgcctatctgatcttctgcattccttccaggtaaatcacatgcgaagtgtaccttctgaatttggttattac

SEQ ID NO: 50575 - DNA, 1050 bp, Homo sapiens
tgaaatatgctagtgctctagtgtgactgaggaaatgaaattttaattttttttttttaagacagagtctggctctatcacccaggctggagtgcaatagcgcaatctcggctcactgcaacctctgcctcctgggttcaaacgattctcctgcctcagcctcccaggtagctgggattataggcgtgcaccaccacgcctagctaatttttgtatttttaatagagacggggtttcactatatgttggccaggctggtcttgaactcttaacctcaggtgatccacccaccttggcctcccaaagtggtaggattacaggcatgagccaccacaccaggcctgaaattttaattttatttaatcttaattagcttaagtttaaatagccctatgtagcttgtggctaccctaatggacagctctagctgccctgaaaaagccatcattgttattagggaagcaaggcatatactcttgagaccagttaaataccaaaagaattggggtcagacagtagagacttaattattcagaaaacaaatatccactgggccggagaatttaaagagagtcttataaagtaagtgaaacttgggcttgagctagagggatgtacagtggataggagaaaagaaggcaagaggttattctgatgggttggagggggtgggcaaatgtttgcagttaaaaaatatctcctacatgagaagtttgaggacaatgactattctaaaatagagcactcatattgggagttaggcgtgtttgggccaggtcatggacagtcttgaatgctatcacacagagtttgggctgtccacataggctgatgttttgccaggcttgcttaaaacatagattctcaggccccaccttgacctactacatcaaattttctgggttggagcctaagaaatcagtattttgagcaagctccccagatgttgatgatgcacattcaagtttgagatctattagatagacagaaaggagcccatgggagcttttgctgaagggagtgatgtgataatagcagtatctttggaag

SEQ ID NO: 50576 - DNA, 1114 bp, Homo sapiens
cctaatgtgaaaatccaaaatccaaaatcttctaaaattagaaacttttggagtcctgacatgacactcaaggacatgctcattggaatgtttcagatttttggattagggatgctcaaccagtaagtacatataatgcaaatattcataaatgaaaataaatctgaaatctgaaatgcttttggtcccaagcatttcagataagggatactcaacctatagtagtagtaatggtaaataactactaccactaccactgccacccttgggatagagggatcaatgcattcaagtgcctacatttttttgcatagctaaccaaattgttggtagaggcagcagttgctgttcctgaagggacagcaaagcaattgttctgggcttcacagacagtgtctggggctttaaaacaaagttgtttatggaggtatgactgaaaatgattcagtagagcataattctcagcaaagaagttctatttatttttgccaatccttttctgcctaagaaccttaaagaaaaaaatacttatttctaaatgaaccctgtatttctaaggctcagttttggttgatcacccatgacttattgtccacaagctttgtcagcagcatctcggtacaaagatgtaaagtctctgttcttttttaccaaggtggtcttcattctcaatggatgccatctcactcttcttgagcctctcagtgagtataggattgatttgatggctagaatatagatatacaggaacaacaggggttctcagggatgtgatattagagtaggtggagttgtatggggagtgtagaaatattatcaaatggaaatttaaaaaccgggtagtcctgatagttctggagatgaacctgtttgctaagggagggatatcaactgtttcttttggtttccctctgtttttctctttactttctctgttactttcttttactttctctgttgaaagtaaaaagagaaaaaggtcagttattgtaagtgaagccaagtgccaggcttcctgtccttcccagaccatttcatggtaggagggtattggccagtttccaacagggtatagactgcaccccatgaggtgcccatcctctgccctggcctc

SEQ ID NO: 50577 - DNA, 1117 bp, Homo sapiens
tgagcttttccctttctagagggtatgaactagagttcctccaaaaaagccaggtaaagacctaagtctttcccttttaataccaatttttagagcaagaagttagtataataattgcttcctaataattactatggtgactgtatggtaaatgcacctgatagcaataactgaagatagcaatagcctgagaatggccccgtatggcagatgcacctgaatgcgatagggagtttccagctcaggaacccagagatccatttctgatctatggggaacatctgagctcctggcctgtcccgtgaaatgcaggccatacggggaattgaggccctttgttttggtttaaatgaaggttgccagctgcaggttgttagggggagggtgttaggtgaaaatgctatataaaccccatgcatttgcaagtggttgcagttccgtccagcccatcaccactggagtctcccttgaatgtaagaccccagttaaaaacaaaaaagcaaacaaacaaaaaaacaccatgtcttgtttgctgtctctggatctgttctttggcctcttgaatctggttctgtccaaattggagttgacagtggtctggcacaatagtggcaaagttgtttccccctgcttttttttttttttttttttgaatatcacttgattcggtgatttgcttatttgaattccgtgttttaagctcagttcaattattttccttttgatgctcaaattttctacagtttgaccagtgggagtcccttcagctggctctcatgtcacttaacatgcctccattagtatttgagtacttccttagattctggcacaagattcccagggtcactttacattttccttgccctagtcctggaaccagccatttccaatgaaccctggttcctttcagtgtagaatggtgtttagaaaccaagatccgggctgggtgcagtgactcacgcctgtaatcccagcacattgggaggctgaggtgggaggactgtttgcatccaggagtttgagaccagcctggtcaacatagcgagacctccatctccacacacacaaaaaaattttccaggcatggtggtgtgtgcctgtagtcccagctactgag

SEQ ID NO: 50578 - DNA, 1050 bp, Homo sapiens
tcctgagactgggtaatttatgaagaaaagaggtttaattgactcacagttccacatgcctgggaagcctcaggacacactatcatggtggagggtgaagcaagcacattttactatggtgaagcaggagagagagagaagaaggggaatgtgccacacagttaacaaacaaccatatcctgtgagaactccatcaccagaacagcaaggggaggtccacccccataactcaatcacctcccaccaggccactcccccaacatgtggggattacaatttgagataagatttgggtggggacatagagccaaaccacatcattctgaatgaaatggggaaccatcagaggttttgatggggtgagggaggaatgtcatgatatgatttaatgatcaatctggctgttgtgttgagaatggattattggtgggggcgtggttggatagaagcagggagacaaattgagagaagctgtgcagcagtaatccaggtgagagatgatgtagatcgatcagtggtaacagtggagatggatatacattgagggtagaacaacaggatttcctgatggattgagtgagaggtataagagacagagagaagtggctgggcgcagtggctcacgcctgtaattccagcactttgggaggctgaggtgggcagatcacctgaggtcaggagttggagactagcctggccaacatagtgaaaccccatctctactaaaaataaaaaaattagccggatgtggtggtgggcacctgtaatcccagctactggggaggctgaggcaggggaatcgcttgaatccaggaggtggaggttgctgtgagcctaaaccgcgccactgcactccagcctgggtggcaagagcgacactccgtctcaaaaaaaaaaaaaaaaaaaaaaagagcaagaagtaaaaaatggctctaacaaggacattttttggaggtaatgaatgtgtttagtacccttggctggtgggggttggtatcccaagtatatgtatatgtccaggctcatcaaaatgtatacataaaaacaggt

SEQ ID NO: 50579 - DNA, 1027 bp, Homo sapiens
tgcggtgaagctacaaaagtatttcatttctttttttttttttttttttttttgagacggagtttcgctcttgttggccaggctggagtagtgcaatggtgtgatctcggctcaccacaacctccacctcctgggttcaagcgaatctcctgcctcagcctcccgagtagctgggattacaggcatgcacaaccacgcccctctaatttttgtattttcaatagagacaggatttcttcatgttggtcaggctggtctcgaactcctaacctcaggtgatccacgcacctcggcctcccaaagtgctgggattacaggcgtgagccaccgtgcccagccagtatttcgtttcatagcttatattcttttgcaggtgaaatttgcagctcagaagaaaattttacaaagactagagtcttacatccaaatgctcaatggagtcagtgtgacaacggctgtacccaaatctgagaggctctcttgtcttctccatcctattataccctctgtaagcccccacctccctattccttatctattaaggccccttaatgctaataacatcagctgatatttactgggtacttgctagggaccaggccctatgctaaattattatcatgcatcattgtcacattttactgtttataataacctggaggggtagatactatcattttatagatgaagaccttgaggcccagagagatttagtaatttgcccaggacacacatctagaaagggccagagctgagattcacgctcaggtctatctgatagagactccattgtatcaaccactccactattacctccttagaaaggttccaaactttggaaacctttctccctgccatccccacacaatttgcccatgtaacattggaaacctttctaatgtggcctcagaagagtggaatttaatttatggcaggggttagcagactacagcttttaggccaattctgtcttgctgcctgattttgtaaataaagttttattggaacacagccaagctcacttgtt

SEQ ID NO: 50580 - DNA, 1068 bp, Homo sapiens
tagctggagtaaagtgagtgaaagagaatggtaagaaataaggttggagagaccgggtgcggtgggctcatgcctgtaatcccagcactttgggaggccgagatggatggatcacctgaggtcaggagttcaagaccagcctggccaacatggtgaaaccctgtctctgcaaaaaatacaaaaattagccaggtgtggtggcaggtgcctgtaatcccagctacttgggaagctgaggcaggagaaccacttgaacccaggaggcagagattgcagtgagccgctccagcctgggtgagagagtgagactccatctcaaaaaaaaaaaaaaaagaaataaggttggagaaaaacgcatgcaatggatcagggtgacgggtgtgtgtgcactgattatgtggggccttgtaggccatggcaaggactttgggcttttactaagcaaggtggggagccatttgagggattttaacagatgaatgatgtaacataacttaattttaggagggtctggctgctctttgggcaacatcacatggtgaagaagttgtaacagtagcagtagtagtaagaataatggcattttgaaatccaggaaaatgagactttaaaatgcatataccttgtaactatatgtccccgttgacttttttttccctacaaaatttaatgtgaggccaggcacggtggctcacatctataatctcagtactttgggaggctgaagtgggaggattgcttgagcccaggagtttgagaccagcctaggcaacatgccaagaccccatctctacaaaaaatacaaaaattagctgagcatggtggcacatacctgtagtcccagatacatgggaggctgaggcgagaggatcacctgagcctgtggaggtcgaggctgcagtgacccatgatcacgctactgcactccagcctgggtgacagtgagaccttgcctcaaaaataaaaagaaaatgtgttcttaaaacctcaagtcataggaacggttctttagtcttttccttattattatatttattatgttatttattactatattatttagttttt

SEQ ID NO: 50581 - DNA, 1050 bp, Homo sapiens
gacctccttatggagacgttcaatctgtaaactcaagagaaggctacaagtgcctcctttaaactgttttcatctcacaaggatgttagtagaaagtaaacagaagagtcatatctgttttcacagcccaattatacagaaatccgacagtactgcaatcactggcgaaattttgctgacattgatgattcctggaaaagtataaagagtatcttggactggacatcttttaaccaggagagaattgttgatgttgctggaccagggggttggaatgacccagatatggtaaaaacttgagccctccttgttcaagaccctgcggtaggcttgtttcctattttgacattcaaggtaaatacaggtaaagttcctgggaggaggctttatgtgagagtacttagagcaggatgctgtggaaagtggtttctccatatgggtcatctaggtaactttaagaatgtttcctcctctcttgtttgaattatttcattctttttctcagttagtgattggcaactttggcctcagctggaatcagcaagtaactcagatggccctctgggctatcatggctgctcctttattcatgtctaatgacctccgacacatcagccctcaagccaaagctctccttcaggataaggacgtaattgccatcaatcaggaccccttgggcaagcaagggtaccagcttagacaggtaaataagagtatatattttaagatggctttatatacccaataccaactttgtcttgggcctaaatctatttttttcccttgctcttgatgttactatcagtaataaagcttcttgctagaaacattactttatttccaaaataatgctacaggatcattttaatttttcctacaagtgcttgatagttctgacattaagaatgaatgccaaactaacagggccacttatcactagttgctaagcaaccacactttcttggtttttcagggagacaactttgaagtgtgggaacgacctctctcaggcttagcctgggctgtagctatgataaaccggcaggagat

SEQ ID NO: 50582 - DNA, 1021 bp, Homo sapiens
atgcaccctggccttccaagctactatcggctctcaaccagactgctgggaccacctgatctctctgcttccactctgtctcaacccccatctattttccaagcagcactagagttatcatattaaaatgtaaatatcagttttttttttaaagaaaaaaaccctgagacttaacagagttataaaaaatataaatgtcatcatcagttccctgcttaaaacccttaactcgcttccaattgcacttggaatgaaaccaaactgcactgatccagcccttgcctgcctccccaaagtccaaggggtcatggctctttccctggctacactggttttctttctgtccctcaacactgcaagcctattgctgccccagggcctttacacttgctttttttctgcctagaacagttcttccccaaagatttttaaagggccgggctccttaacattgaagtcgcagaccaaacgccacatatgcagacagttcttctctaactactttaaaatagccctctgtccattcattcttcatcacattaacctgtttaattttcttctcagagctccacactatttggaagtatttgttgacttgttaccatgtctccccactagagtgtaagtttcatgagggcagggaccttgtctgactttgactgtatctctcgcatatggttaagtgttgaatagttatttatggaatgaatccctattattccctcattatctctgcaaaatagtcttttttctcaacatcttaaacctgatatcccacctgcctatctacaaactttttttttgcgacagagtctcactgtcacccaggctagagtgcagtggcgccatctcggctcactgcaacctccgcctcccgggtttaagcgattctcttgcctcagcctcccagtagctgggattataggcgtgcgctaccacatctggctaatttttgtatttttagtagagatggtttcaccatgttggccaggcttgtctcgaactcctgacctcagatgat

SEQ ID NO: 50583 - DNA, 1031 bp, Homo sapiens
ctaaagtttggtcaagaagagtctttgtcaaggtaaatctatcatttccctcaaaaggtaattttcaggatcccatcaggaagattagcatggctgctagctttctcctcagttctgggctatagctcacatgcctagtttgaactagctcagcagaactgggggatttattctttgtcttccaacaaactcatctggatgattttgggggtttgtggggaaaagcccccaatacctggtgaagtaaccttgtctcttcccccagcctggaatggttctctctttctgctacctcacgattgtgcttctacaatggtgactcttttcctccctctcatttcaggttcacagcaaaggactgaagctagggatttatgcagatgttggaaataaaacctgcgcaggcttccctgggagttttggatactacgacattgatgcccagacctttgctgactggggagtagatctgctaaaatttgatggttgttactgtgacagtttggaaaatttggcagatggtaatgtttcattccagagatttagccacaaaggaaagaactttgaggccatggtagctgagccaaagaaccaatcttcagaattttaaataccctgtcacaatactggaaataattattctccatgtgccagagctcccatctcttctctttcagttcattaattaattaattaattcatgtaaaatccatgcatacctaaccatagctaatattgtgcacttataattcaagagggctctaagagttaattagtaattgtaactctctataacatcatttaggggagtccaggttgtcaatcggtcacagagaaagaagcatcttcattcctgcctttcctcaatatacacaccatctctgcactacttcctcagaacaatcccagcagtctgggaggtactttacacaatttaagcacagagcaactgcctgtccctgctgctagtttaaacatgaaccttccaggtagcctcttcttaaaatatacagccccagctgggcatgatg

SEQ ID NO: 50584 - DNA, 1050 bp, Homo sapiens
tttctccatttattcaaatcatttaggagcatcatagttttaacatatgggccttgcacgtatcttaaatttatctctaggcattttaggttgttcagttgttcttgtgaatgggatctttttctccaaataggattattgttgatatctgttgattatgttaactttgtagtttctgactttactgaactgtcttcttagatctaatactcttttcaatttcatcatatatttctcattcctattttgtttggggtttttagggcgggaatattaacgggataagagagacaaaagaaaatctggaaaaacaattcattttaccttacattgcttgtgattactaccacactattactgggttggaaaaaattgtgaaatcccaaggtgcctaataaatgggaggtacctaagtgttcatttaatgaattgtaatgattattggaatttctctttcagtgagaagctcttcatggagatggcagagctcatggtctcagaaggctggaaggatgcaggttatgagtacctctgcattgatgactgttggatggctccccaaagagattcagaaggcagacttcaggcagaccctcagcgctttcctcatgggattcgccagctagctaattatgtgagtttatagataatgttcttgttcattcagaggactgtaagcacttctgtacagaagcttgtttagaaacagccctcatggccgggcgtggtggctcacgcctgtaatcccaacactttgggaggccgaggcgggtggatcacctgaggtcaagagttcaagaccagcctggccaacatggtgaaaccccaactctattaaaagtacaaaaaattagctgggcatggtggtgaacgcctgtaaccccagctacttgggaggctgaggcaggagaatcgcttgaacccaggaggtggaagtttcagtgagctgagatcacgccattgcactctagcctgggcaacaaaagagaaactccatctcaaaaaaaaaaacaaggaaaaaaagaaacagccctcatgacacttagaaag

SEQ ID NO: 50585 - DNA, 1850 bp, Homo sapiens
taccgggtaattttcctccttcttccctcaaacggctatagcgagacggtagacgacgaccagaactacttctgctcacgtaagcgagtaatcacgtgagcgcctacgtcatgtgagatctcggtcacgtgagcaactctcggcttaaactcgggatcactaaggtgccgcacttccttctggtatggaaatagggcgggtcaatatcaagaaaggaagagggtgattggttagcggaacgtcttacgtgactgattattggtctacctctggggataaccgtcccagttgccagagaaacaataacgtcattatttaataagtcatcggtgattggtccgcccctgaggttaatcttaaaagcccaggttacccgcggaaatttatgctgtccggtcaccgtgacaatgcagctgaggaacccagaactacatctgggctgcgcgcttgcgcttcgcttcctggccctcgtttcctgggacatccctggggctagagcactggacaatggattggcaaggacgcctaccatgggctggctgcactgggagcgcttcatgtgcaaccttgactgccaggaagagccagattcctgcatcaggtatcagatattgggtactcccttccctttgcttttccatgtgtttgggtgtgtttggggaactggagagtctcaacgggaacagttgagcccgagggagagctcccccacccgactctgctgctgcttttttatccccagcaaactgtcccgaatcaggactagccctaaactttctctgtgtgacctttcctgggatgggagtccggccagcggcccctgtttctttctctctctctctctctctcgttctccttctctttctctttctcttctttcctctctctttctctctctccctgcccggttctcttttttcactgctccttgcagagcagggccaccccataggcagtgtgcccaaagtagccctgcccggttctattcagacccttcttgtgaacttctgctcttcctctgccgggtgctaaccgttagaacatctagggtgggtaggaggaatggggaactaagattcgtgccattttttctccttttggggtcgtggatttctcggcagtatctcgagggagttagagagaccataaggtcgctgagatctctcccacctcgcccatgagcgtggcatcaggctggaaggttgacatggaggaactttatacatttacacctttgcgtgagggttgaggctggattagataggtattgaacatatctgaccctcacaatccttatctgtaaattgggattacaaccttttaatttcagggagctgacaaaaaaaatctgaaaaatagttcttatctcacacaggtgagttttcaaggagataacctatttaaagtacatagcacagcgcttgaccattcaactgcgcttacagagcaaatgttcaatgggaaaatgaatgtaaatctacaaatctgaatgaatatgtgtatttttctggagagaggatatttacctttcttcaaattctcaaagggctctgtgatttaaaaaaggttaggaatcactgatagatgttggtaaaaggtggcagtcacagtacatttctgtgtccataagttattcctatgaatatctttatagataaagtcaggatgttggtcagacatcacagaagaaattggccttgtaagtttcatgtgaccctgtggtacagtatgtgtggcaattttgcccatcacggatttttttttattggtatttgcatctgattataaaactaatgcatgatcattgcaaaaaatgtagataaagaagagcaaaatgaaaataaagattt

SEQ ID NO: 50586 - DNA, 1040 bp, Homo sapiens
agatcatcccatcacctaggtattaagcccagcgttcattagcaattcttcctgacagctgcagttttgattatgtgcagctctcaattggcttttccccgtttaagatgttagaccagtggttctcagccttgactaattagaatcatgtgaggagcttttagaactcccattgctcaggccaaccctccaatcaattaaattaccatctctgggacttacacatttgtgttttgttttctcttttttgactccctaagtgatttttatatggagccaagattgaaaacagtgttagacacacactttcccaatttatgctttgaaaacaaagaccttagttcagagacttatgagatagggttatgattaggggaagagtaggccccacaagtttcagggtagtgaagattctgaagggtacaagcgataaaggagcctgagtttctgggtgaactcagaaacaaggaatcctagaagggctgagagcagaacagaacctcggaatagtctctgaaataaaagagtggagagtataagaaacagaatggaggcaggccccaggaggattcaatcaggaattctgaccttggggccataaataggtttcatatcttcacagaaagggtttacacaacttttgtatatcattttctgagatgtctgaatcctagaaaaagataaagaacatcagtatgtgaaaaagccaagggctaaggtaatggtaatcagactacagttctagaaatgcctctggatctttaatacatgactggcagctcttctaaacctctatgttacctctattagaatattatttctgatgtagtttgtggagaaacaaagcaggaatggaggagaacactgtatacagtatactttataagcactaaataaatatgtaaaaactctgaaatataatctgagtttatagtcataatgaagattattagctcaataatctagggtagaggtgtccaatctttcggcttccatgggccacgttggaagaagaattaccttgggccacacataaaata

SEQ ID NO: 50587 - DNA, 1071 bp, Homo sapiens
aatttaatccagtcattggaatcactttacattagcctctgaagctagagctcaatagatttttcaaccctaccttggctctttcattttgagagcagtaaacatttgaacattaaaaaatacctggagaattttaactagctaatgacaatttcaaagaacagtaacagcagatgccctcattacaagtgagtaagtggtaataatttaacatatgccaccttaactgtttcactcatcacccattttcttctgtctgccttcctctccatctgctattgtttatatatgtttctcccatatctaatctttctctttttcttcatcattctcactgctttcttcatgtccctcatccagctcagatcttattagcacaggaatggctaccataacgatatggaactaaagtatgtatgtattttttatttattatatttgttttgtttatcttactaatttttggccccattattgcactcagatgcctcaccttcacctataactcaacatacctaaaacggaattaataatctctacagtcaacttgaatttcccaagttttctgtctttgctagtagttccaatgtttattagtcacctacacttgaatctttgaggctgtctttgactacttaattatctatatcctatccattagcaaatcttatcaaatcttagaactatttctcctttctgtagccattcattacatttctactaccatcacctcacaccttaatgctgtaacaaccttctggaaagcttacttgtacctcattgttattctctcactccctagtagcaggatttcaaccctggatcagttccaccctatacattttctacttctgcataaagcctactgagtgatgctgtggaaaattataaactatagagattgggtatgttttcagagtcttggtacctaacctctttggacctttagtcctacttaatctgtttccttttccttcactttccccttagcgacaattttaaacctatatcattcttcaagactctcttcccccgctacactccttctcttcacacttctcagacaagctc

SEQ ID NO: 50588 - DNA, 1185 bp, Homo sapiens
tttaatttatattggaaaaacagctttttatggaatcataaagcactattcagtctagaaaataggcaaaaatacaagaaaatagatataaattataattctatcacttgtagttaaccattattgaatttctcttttgcttctgtgattccaatatgatttctgaacacacacacacacatatacacatgcatttttacaaaaaagatatacagactctcagtatagtattgtaaaatataacagtattgcagaagttttgaattttaatgaggttgtatttattaatatttcttttgtgtctgtgcttatgtgtttaataaaccattctatacacttttgtcatatactttcctctattttcttctaaaactttgaagatttacttcttatgttataattcatctggtattgattttcgtgtatggagggtgacaacaggtttttcatatggatagccagttgttccagcactatttattgtatagtccacccttacctcattgatttgtagtggcacctctattgtatgctaatttccacatatatattggtttgttttgaggcttttatcctgttttattgtattagcctggtttcctatatctacaacaatttcacctttaaaataagtcacagctttcaaatgagtcacaatatctgtagaagaaatttatatgacattaaaaatttttaaatcataaactaaattaaaaatatatgccacacattagttgatatctataacctatataactaacgaaggattcgtgtctagaatacagaaaggactacaaatcaattagaacaagaagcaaatagaaaaatgggaaagtgatgtgaacagtccatagaatagatactcagcttcactagtgatcacacaggacatgcaagttaaaataataaactatcatataagaaccataatactggcaaaaattaaaatctaataacacttaacacttcaagataatatagggaaacactctcattgctgcatttggagatgtaaactgcttcaaaattttatacctggtaaagttgaaaatccacactccttataggccaagaattccacttctaggtatctattctaaaggaacttttgaacatgtatattgggagatctatttatatatgttaattgcagcaatgcttgtgttagcaaaataaactgaaaca

SEQ ID NO: 50589 - DNA, 1049 bp, Homo sapiens
ctcaagtgattctcctgcctcagcctcccgagtagctgggattacaggcacgcatgaccacgcacaactattttttgtatttttagtagagatggggttttaccatgttgaccaggctggtctcaaactcctgacctcaggtgatccttcggcattgtcctcccaaagtgctggtattacaggcgtgagccaccgtgcctggcctctacataccttttctccttgccttattgcactaactaggatttccagtacatagttgaataacagtggtgagaactgacatccttgcatgatcccctatcataagaggaaatcattctttcactattaagtgttatgtcagctgtgattttttttttaatagataccctatttcaggttaaggaagttcctttctaattgtttcctgagagattttattgacttttatcaaatgctgtttctgtatctattgaggtggtcatatttttctccttattttgttaatatgtttaattaaattgacttccaagtacttgaccaactttgcatttttgtgataaacctcacttggtcatgataaatatatatatactttttatttattgctggattcaaattcccaaaattttgttaagaatttttgcatctataaacataatgtctatagttttcttgtaatgtttttgtattggcatcagggtaattcaggcctcattatgtagagaggaggccttttcctttactttctgagagtttgtttaacatttgtgttatttcagctttaaatgtttgatagaattcactagtgaagacatctgggtctggagttttcttggaaagtttttaataacaaattaattttattctacagatatagacagtggtagggccgggcgccgtggctcacgcctgtaatcccagcactctgggaggcggaggcgggcggatcacgaggtcaggagatccagaccatcctgcctaacatggtgaaaccccgtctctactaaaaatacaaaaaaattagcggggcgtggtggcgggcgcctgtaatcccagctactcag

SEQ ID NO: 50590 - DNA, 1074 bp, Homo sapiens
atctggcaaagaattctgcatctctctttactgccagtgattacaaagtggcttctgctgagtaccaccgcaaagccctgtgagcgtctacagacagctcaccatttttgtcctgtatctgtaaacactttttgttcttagtctttttcttgtaaaattgatgttctttaaaatcgttaatgtataacagggcttatgtttcagtttgttttccgttctgttttaaacagaaaataaaaggagtgtaagctccttttctcatttcaaagttgctaccagtgtatgcagtaattagaacaaagaagaaacattcagtagaacattttattgcctagttgacaacattgcttgaatgctggtggttcctatccctttgacactacacaattttctaatatgtgttaatgctatgtgacaaaacgccctgattcctagtgccaaaggttcaacttaatgtatatacctgaaaacccatgcatttgtgctctttttttttttttatggtgcttgaagtaaaacagcccatcctctgcaagtccatctatgttgttcttaggcattctatctttgctcaaattgttgaaggatggtgatttgtttcatggtttttgtatttgagtctaatgcacgttctaacatgatagaggcaatgcattattgtgtagccacggttttctggaaaagttgatattttaggaattgtatttcagatcttaaataaaatttgtttctaaatttcaaagcaagtaatttgtagtgtgcctttcatgttactggttggtattctggttattgtagaaataaggttggtattctgtggttattgtagaaattttagaaaacatagtaagaacaaatgcaaataagaatcatgtaattctactggatccttcaaggtcccagcaaataaatgggactcaaaaatgggtgatttgaggagagttaaagaattttttccctgagttgccaccagaggggtagggttgtagtgtatattagctggctcaggctgccgtaagtacctcagactgagtggcttaaacaataagtttattttctcacagttctggatgt

SEQ ID NO: 50591 - DNA, 2294 bp, Homo sapiens
attcatatatgtgtttaaatgtaaacatataaaccacatgtttataaattactcattttttttctttttcttagatgatttcacaaaagttcatcttcattgcagatacctgcctttctttctaggttgtatctcccacttcacccttctagaccatcccagaagatctataagatttcatctgggaaatcactaggagttcttggaagggaaagaaggaagattgtgtaagtcaaaggaattgtttcctctgtcacaccataagaataatggaagactattttttgcatccttatcttactagcactccctgctgcactttacactgtagattatacctttttcttcttggaacgctcatcatctttggcatccaaaataacattcttctaattctgttatggctactcttaacatttttgtttcatttgtggtctctgtgcatcccttaaatgcctttcgtccttaggttttccagaattccatacttgaagttcttcctctcttctccctgatttcattggccctcgtagtgtccactaccagctatgtgatgttactctcagatctccatttctggcttttacttctcacccgagctttatttttttttttttgttttgggttgtggggtgggtacccagttagctggacaaaactgagctttacaattttatgtttaactgtacatctcacacacaataggcccaacacaacttttcctccaatccattttctccacctgtaaatggaggagtattatcatttggtgataatactaataacctaatcacccatacctgggagtcatcactgactcctccctcaccaatcttttttttaccttcttaaacaatcactgacagtggtgtcatgtaccatttcttgtgtctgctcccaaactattttgtgcctataactgtcattatactaaccttatcgttttataattgtcactttagatatttggatctctagcaactaccatagtacttgtcccaaagcagatatgcagtaatgtataatgacaaactgaatagattaatgaatggatgaattacctatgttctgtcattttatttctgattccaaactaaaccctaaattcagtgctttcattaagttcattaattacccaggcttgaaattgcagattcctccctcctttggttactatattcttcatgatttctgtattcttcagtttctcttgactctgtcatcatcctaattcaggcctttctggactaatacaagaacctttactgttactcattttgcccttagtcaattaaatataaccttccctattccatattgtcatttctcctgttcaaaagtcttaaatttcaactccactgtcttttatagtttttcatttaattccttctttcttgaaaattgctttcctatcttgtgagtggcatcaacagagtaatttatgggtagttgtgatgagtatttgggtgagatgagagtagtggctggtagtgaggatcagagagagggaaaggaggtaaaaaaataaaaaatcacttataaagggtcctgaaataggatttgaaatccagattttaagggagttagaatgtgttattctctgatgggcctttatgaaacatagttaaaggttgccatagaaaacaaccaagtaaaatattttatatattacagtggttggaataaaaacagggttgaatgagttccagaaagcagggttctcaacctcgtggacagcaatctgcagaagaagagaacttcaaaaaaccaactagaagcaacatgcagagaagtaaaatgagaggggcctcctcaggaaagaagacagctggtccacagcagaaaaatcttgaaccagctctcccaggaagatggggtggtcgctctgcagagaaccccccttcaggatccgtgaggaagaccagaaagaacaagcagaagactcctggaaacggagatggtggcagtaccagcgaagcacctcagccccctcggaagaaaagggcccgggcagaccccactgttgaaagtgaggaggcgtttaagaatagaatggaggttaaagtgaagattcctgaagaattaaaaccatggcttgttgaggactgggacttagttaccaggcagaagcagctgtttcaactccctgccaagaaaaatgtagatgcaattctggaggagtatgcaaattgcaagaaatcgcagggaaatgttgataataaggaatatgcggttaatgaagttgtggcaggaataaaagaatatttcaatgtgatgttgggcactcagctgct

SEQ ID NO: 50592 - DNA, 1044 bp, Homo sapiens
tgtgtttttagtagggacagggtttcaccatgttggccaggctggtcttgaactcctgacctcaagagatttggccacctcggccacccaaaatgctgggattacaggcgtgagccaccgtgcccggccttgttttcttttcttttctttttttttttttttttttttttttgcccacaggtgctactaacaaacatttcttatctctgattttcttctcagagcctccctgacacctgcctacagtgttaatggctacagaatggctgctgggctttttctgtgggtgaaagttgtagttactagagaaacctggtttaaggctagtctacaatcatccctttctcagaggttaccctgattttaacaggctgatatttatctgtctagatatttccatgcatatttatagacatctgtttaaaacacacacacaaatgacagcacactcttcctaaaaactatttcacactaatgcttatttctctacctgtactatctttttttttttggagatggagtctctgtcgcccaggctagagtgcagtggtacgatctcaatctcagctcactgcaacctctgcctctcgggttcaagcgattctcctgcctcagtctcctgagtagctgagactacaggcgtgcaccaccatgccctgctacttttttttttttttttttttgtatttttagtagagacagggtttcactacgttggccaggctggtctcaaactcctgatctcgtgatctgcctgccttggcctcccgaagtgctgggatcacaggtgtgacccactgcgcccggccttatctgtctctttaagatcctattgcatttgggatcctgtagtattatgccactgcctatttacctaataatatatattgaacatctttccatgtcagtacacagatctctgcttaattcatttgaatgttcttctgtagtattcatacataatttatgttatcattttcctgttgaagaataggtaggtgttttccagttcttcagtattgcaaacaccactacattgaacat

SEQ ID NO: 50593 - DNA, 1074 bp, Homo sapiens
tgaatgtacatgaaaagatttgaaggcatacatgctcactcaggatactcctaggattggggtgggagagggggaggtgataagggaagaatgttcacatctttatataatttgttatctatagttataaaaaggaaatataaatggtaccacaagatctaattacttgaggtgaacgaagattgtcagttcatgacttgcaaactactagatggattaaggagttataaaagaaatctatcaaagtatttgttcttaatttttaaacttaaaaatgaaaggaaaaaaaattttttaaatgatccccagtactggtcagagcatgaggcatagtaaatatttttacacactgcttgtgggattagaaattggcacaacttgtgcagagggagtaatttggcagtgtattgagagtgttctatctcttgactcactaagcccgcttctgagagtcttaaaggaacaaaaggaagcgagagcaaaaaaatgtttacacaaaatgttttcattgattattaaagaatatattggtgggaggtgtgcactggatatttccagggaaggagtggctaagtaaattaaggtatgctcatttgacagaatatctattatatgactcaaaatggatgcatataataaccttaacatgggaagattattggttatcatagtaaattttttaaaaggaaaaatctaagatttgatagcccttatgagctcacctctgtttaaatgtattatttatacagagattaaactggtgtaaaattaaagatagaaaactaagacaaacataagtacaaatgtgttttctgaatttctggcttaccctagagctgacctgtagggaacaggtggcaaaatagttggtgactgttgtccctaatttgtgccctcattttctccatgtgttgagtcacagccccctccaccccaattcacaattatatacccaccagggaccaatgtgacttccagaatggtttttgtccagcttggctctacttaatgtgttttacacagtctggttggcactaggtcatgttgctttctttaggtggtattttcactatc

SEQ ID NO: 50594 - DNA, 1034 bp, Homo sapiens
atcccagcactttgggaggccgcggtgtgtggatcacggggtcaggagttcaagaccagcctggccaagatggtgaaaccccatctctactaaaaatacaggtgggcgcctataatcccagctactcaggaggctgaggcagagaattgcttgaacccaggaggcggaggttgcagtgagccaagatcgcgccactgcactccagcctaggtgacagcgagactccgtctcaaaaaaagaaaaaaaaaaaaagttaaataatcaaaaatcattcagaagagagtaccttaaaagacccatatacctctgagaatttagaatgttacaaaaccgtatttcataccaatggggaaaggataaactcttcagtgacgaatattagaaaaagttagttatacatttgaggaaaactataaaagtaccaataatgagtaggaaatcacttctgcagtatttttggagcattttccttaagcatgacataaaagccaaaggtcacaagggaaaaaactgatagatttgtctgtgatattgagagatgtatgcacatatacatacaacagtcatagtaagacaccgttagacaaaagaaagtgatggtttggaaaaaaatttccaacataaaataaaactaatatttaattattagaaaataatagcaaacaacctggtagaagagagaacaaaaatattcatatacgataacgtgaccattgaatgtgtgaaggatgatatcacacaaattcaaatgaaattatcttactacatgttagattggcccaagaaaagtcgctctcctttttttttcaaaaagatgtttttccagtgttcttgaagtcatgaaaaaatgaacttttatatttttgttaggagtacaaattaaaacagttctttgtgaggtgaatttggctctatctcatcaaagttataaataagcaaatcctttcgctaaatagttcctcttggaatatatccttcagaggtacttaactaatgctctaatatttgtatacactgatgtgcattgcagtatt

SEQ ID NO: 50595 - DNA, 1127 bp, Homo sapiens
ggcggttggaggaacggcagtgatcacacgtcggctgctgggaagatctggattctcgtttcaggtttcggggtgggggtggggagaaagggtcgatgatttccttttttcgtcgggtatagacgggattacctagtgccttcacaatcggtcagagctggattcagattcctgctcgccaacgcccagcttgggcaaggctcctgttctttctgtgtctcggtttccatgtttgtaaaatggtgataataatagtatctacctcagagacgtgtactgtataatagtgcgtataaggcacgtaatgtgaagcctggcccctgaagatattagctattgttatggagataaataatacgcgtaatagaatgagaaaaattataaattatataaattcgctaattgtagtgccctttctgccatcaacttctttcctagaataaattaaagataaaatagatataccaatttttaccaatgaaataatttgttatttgggaattgcctcaaaatagcagagattgtaattttcctatattgaaaagttaaataaaaggtggggggggggggagtgcaagaaagaaagagatggagaacgagagcgagctggagatgaaccacatgcgatgagtaggccttgtttggatcctgaatcgaacacaccaactgtaaaaatatgtttaagacgcatcgggaaaattgggacacggattcgatatttgatgttttttagggaattgatgtcagtttttttaggcgtcacagtagtattgtgattatgttttcaaattgtccttttttgtagagacatacgaaaatatttacggattaaataatgtctgggattggcttctaaatacattaatgactaggatttgcttcaaaataatctcagcggtagggggaaatggggaggggtatagatgaaacaaaattggccctaaattaataatatttttttgctgagtgataggcagtgggttgcgtatattaatctgctttccttggtatacgtttaaatttttctataataaaatacagaagtcagatattccggtgagcttgaaaaagtcgggggtgggggggagcagtgggtggggttatagatgaaacaagatggccttcag

SEQ ID NO: 50596 - DNA, 1034 bp, Homo sapiens
ctgctctgtcctttaagtactaaaccttccatccagtactatccaaataaaactaaatattagtcacgtatgaattactaagggatcattactggaatatccaaacaatttaaagagaaggtaacaataacttaaatctaaatgcaccggggactggggcaccactaaggtattgaaaaagtaaccatagttgactctgaacattctgaaacccaacttcgaagagaaaagaaacctttaagtaggcaataaattggtttcaatatctgcgttttaacacaagctcagacatgtacttactggatttctttgggcaaattactttgcttctatttcttagtgtcttcaactataaaagtagaagtaatctattcatatactatttatttcagagaaatgttatgagaatgacttggatgagctgaaaaatgaatgatctccttgaacaaggtacgattattaagtttctattgtgaagtcaaatagaacaattcactcaaaggacacgatgtttgattgagaacattcttaattttattttctttaattttataaaatacactttgtaagataagtttctaaaagtttatcctttatgtgtgttaaaattgcaattctatatcagaaatgaaggaaacactttcagttgattaactctctttgtgtgtgtatatatgtgtatgtatgcatgtgaggttttcagggaagggttggttatttgttatgttattaaatcaaaacaaaacacaaggtacggattacttcactgtcctttatcttgattggtttcttacaaaacattttccctctcctccttctatgcagcctggaagcttatcttgtatactggtttgaaaacaagtatcaagtgtctttttgtaaagctcttacatctccttaaatattgctgaaaccactttgggggaaaagaacaacacaactctttacaacaaaagaactgtagtacaaatctttccttcaattaaaaccaatcagactttttttttttttaacccaaagttaacaaaaacagg

SEQ ID NO: 50597 - DNA, 1050 bp, Homo sapiens
tcttgaaggggtccttcacatcctgtgtaagttgtattcctaggcactttattctctttgtagcaatggtgaatgggagttcactcatagtttggctctctgtttgtctgttattggtgtataggaatgcttgtgatttttgcacattgattttgtatccttagactttgctgaagttgctcatcagcttgagaagattttgggctgagacaatggtgttttctaaatatacaatcatggcatctgcaaacagagacaatttgacttcctctcttcctatttgaataccctgtattgctttttcttgcctgattgccctggccagaacttctaatactatgttgaataggagtggtgagagagggcatccttgtcttgtgccagttttccaagggaatgcttcctgtttttgcccattcagtatgatattggctgtgggtttgtcataaatagctcttattattttgggatacgttccatcgatattgagagtttttagcatgaaatgctgttgaattttgtcaaaggacttttctgcatctatggatataatcatgtggtttttatcattggttctgtttatgtgatggattacctttattgatatgtgtatgttgaaccagccttgcatcccagggatgaagccaacttgattgcagaggataaggtttttgatgtgctgctggactcggtttgccagtattttgttgaggattttcacatcgatgttcatcagggatactggcctaaaattctctttttttgttgtgtctgtctctgccaggctttggtatcaggatgatgctggtctcataaaatgagttagggaggattccctctttttctattgtttgtaatagtttcagaaggaatggtgccatctcccctttgtacctctggtagaattcggctgtgaatccatctagtcctggacttttttttggttggtaggctattaattattgtctcaatttcagaacctgttattggtctattcagagattcaacttctttgtggtttgtcttgggagggtgtatgtgtccaggaat

SEQ ID NO: 50598 - DNA, 1478 bp, Homo sapiens
ggggtaatgcactcatccatgcaggtccaggctgtctactgagggtgttccacatacttaattgctagaatttcttctgccacccagttgttcagatcgtttctgtaggagggttcaaacttgatcagcagggttttttttttcttcatcaatttctagttttataggccacaaagataatgggggaaattaccaacttttgtactatgcattttcacccagtacaagtattttagaatgtgaattgaagaatggatccaaaagcttcagaaagtggaaagcacaaaagagaaagaaagaaagaaagaaggagaaaagatccactgcaaataaaaaaaatatgtatcatatggcttaagttgatttaaaacaaaggccttaaactaatttttagggttttttttcttgaaatgagctaatggcttgtttgtgtaaagcttttccattaaaacaaaaaaatttttaaaatcttgtacataacacagtattgttgtagaattcatatgaaacattttatatggtaaagtcaactagctccctaattgtggacaaattaacagttggttcctgttcttttgctataacatacttgtgccacccatgtagccctggcatctgtgcagacacatcagtttcagttccactgtcacttggaagatcaggttcagcatcagtttttgtcaggtagctctaatacctggagttttctttcttttcttttttacttagttgaagtttaagaggaaaagtaccagttttcagatttgaactatcatagtttgtatattcaacaaactatttgaagtatattgtgttttggtttgctcttgtttcaaagtgtatccaagtaggattcctgaaatatagaaaagaaacttgtaaataaatgaatggctggtaagtatccaaaattagggagataaatgattcactaaacttaggaagcacacctggacacatcatagtaaagctacagcataatgataaacaaatatcataatagcataaaatagatacattgcctataaacgagtacaaaatagacagcaggtatctatacatcaacaaatggaggccaaaaaggaaaaaatagctgtcatgctagagttgcattcctagccaaacatcatttaagaagtaagctgtgacagacatgcaggtagatcgccccaaacccccttcaaggacagattttctgcttcagctgctgggacagcagttggatgccagtcatcagccatcagttccttcaggtatgacccgagctgcgggagctgccttgcccaaggtcacgcacttgcagagactgaccacatccaaggactgatccaagaggaggcacaaacatctggcttgctctgcccaaggtggaatgattctgatgggccatttttaccttcagagctccccttgggatccgaagaggctttggttgggcctgcagtatggatgcacttctctctgtgcccactcctgct

SEQ ID NO: 50599 - DNA, 1089 bp, Homo sapiens
taataaatcagcaacacagtacatccagaaaaaggaataggaaaggcttgccagtctatatgtgaagacgctctgtatggtgctaaaataacatctttagtgtgtgatgaaggtatggaataaatggaaaagcagcaaaatttgtggattcataactactgattagaaaaagcatagtggacagcatggttgtgaggcttttgaaaaccaaagaaatttatggttatgttaacccaggatcaggaaaatgttaaacccttcttggctaatgttttactataaaatactgcatataatttattattttaagaaatatatattaaagaaggtgtctttagacagaagcatacataaaacaaggttgtgtattgatcattttaaggaatgcaaccagaggctcccaggaatctaaacctgtatttccactaggagcagtggcttggtatttggtaattcattgcttgaggtgactttatagaatataactaccacaaataatgaatcaactatacatacatgggtgtgtgtgtgtgtgtgtgtacgtgtgtgtgtctgtgtctgtttatgtgtgtgtgtgttttggagtactttagtgcaaattgctgacatcttaacattttatctgaaaatgtttcattatgtctctctaacatattggttcttaaagtgtagtgtgaggagtcctggagacacctgagacagaccctttcaggtgactgggaaatcctttttccaactacatatctccatgaggttggatttgtcttcatatactttatccaaaacagcatgttacaacattaaatgcagaagcaaatatgggaatctagctgtcttgtactgaggcagacatttaagagattttcagaaacgtaaaacattcctaaattctttgtttctgaaaatgcaattattttaataaaattttatttacgataatcagtggatttattttaaatacattaatacaaattttaaaatttttcagttttgatttctaatataataaatattgatagatctgtaacctacattagcaaaagctctttagggtctaaaagtactaatattttcaccatctgtatataa

SEQ ID NO: 50600 - DNA, 1033 bp, Homo sapiens
acttggttttccagcaaactcggttcacagcagggaattgtgcacccaccagaaatcctaagcaatatttctctgaacaagaaaagaagcctctttgtttaccagagaaacaacagtatagcagtctaagtcagtggctctcaaactttcctgtgaatcagaatcagatggagcgtttcttaaaaccaagattgctaggtcccatccacagagttgcccctacagttggtcaggagtggacccccgaatttacatttctaactagttcccaggagatgctgatactcctggacatggggccatacttggagaactataggtctaaacggagctgacaataaattggaaagaatatctcctggaatctcttagaacccgggaggcagaggttgcagtgagccaagattgcgccactgcactccagcctgggcaacagagtgagactctgtctcaaaaaaaaaaaaagaatatctcccctagggaaggctaggcacactcctaaacgtcaggcatgtctgaattcagacacagtagatatgaaataaaatggacttatttgacactgcttagaaaatctttttatttttatatttgtataattttattgtatatttacaaattgtatacatttatagagttcaaagtggtattttatatatatacaatgtagaatgattaaatcaaggtaaataacatattcatcacctaaaattttatctttttttacacaaaaatgactcaacatggaatttaatagtttttttgtggtgctaacatttgaaatgtactcttagctcttttggaatatgaaattttgaaatatcaccaccattctattctctgtgtttgtgggttccattgttttagattccacatacaagtgagaacatgaagtatttgtctttctgtgcctggcttatttcacttagcataatgttctccaggctcatcaatggacagattttcctgatttttgaagactgaataatatttcattgtgtatgtatagcacatttgctttatctgttcatcc

SEQ ID NO: 50601 - DNA, 1049 bp, Homo sapiens
aaacagcatggtactggtaccaaaacagagatatagatcaatggaacagaacagagccctcagaaataatgccgcatatctacaactatctgatctttgacaaacctgacaaaaacaagcaatggggaaaggattccctatctaataaatggtgctgggaaaactggctagccatatgtaaaaagctgaaactggatcccttccttacaccttatacaaaaattaattcaaggtggattaaagacttaaacattagacctaaaaccataaaaaccctagaagaaaaccttggcattaccattcaggacataggaatgggcaagcacttcatgtctaaaacaccaaaagcaatggcaacaaaagccaaaattgacaaatgggatctaattaaactaaagagcttctgcacagcaaaagaaactaccatcagagtgaacaggcaacctacagaatgggagaaaattttcacaacctactcatctgacaaagggctaatatccagaatttacaatgaactcaaacaaatttagaagaaaaaaacaaacaaccccatcaaaaagtgggcaaaggatatgaacagacacttctcaaaagaagacatttatgcagccaaaaaacacatgaaaaaatgctcatcatcactggccatcagagaaatgcaaatcaaaaccactatgagatgccatctcacaccagttagaatggcgatcattaaaaagtcaggaaacaacaggtgctggagaggatgtggagaaataggaacacttttacactgttggtgggactgtaaactagttcaaccattgtggaagtcagtgtggggattcctcagggatctagaactagaaataccatttgacccagccatcccattactgggtatatacccaaaggactataaatcatgctgctataaagacacatgcacacgtatgtttattgcggcactattcacaatagcaaagacttggaaccaagccaaatgtccaacaatgatagactggattaagaaaatgtggcacatatacaccatggaatactatgcagcc

SEQ ID NO: 50602 - DNA, 1055 bp, Homo sapiens
tgtgcagtggctcacgcctgtaatcccagcactttgggaggccgaggcgggtggatcacctgaggtcaggagttcgaaaacagcctggccaacgcggttaaaccttgtctctactaaaaatacaaaaattagctggatgtggtggtgcgcacctgtagtcccagctacacgggaagctgaggcaggagaatcacttggacccaggaggcggaggttgcaatgagccgagatcataccactgcactccagcctgggtgacagagtgagactccatctcaaaaaagcaaagcaaacaaacaaaaacccaaacaacaacagaaataaaaccaaaccaaaacaaacaaacaaaaaaacatgctgtggagtagtagagcgcagtgactggctttactctcccaacgcaaaaaagctttctagttttttctaagtagaaaaatactagatgctattgaaaagaattcagaaaatgaattataaagaagaaaatagaggtcctcataatgccaccagccagaaataatcattgctaacattttgatgtattgtagaagatatcgatgggatttgttttataaaattgaatcacactatacctacagtttatgtaaccttacatcatttgtaaataacatatcgtggacctatttccatgtcaattaaaacacagaactacatcattctgtcatggctgcactgcattctatcatataaaatatgatttatttaatcgtaaactactagacgttttgttattttcattttcactataacccagcatctttgcacataatactgacaaagtcttaagaatagaattgctaggtgaaagagtgtgcatgttttaaaggccaatacaacatgttacaaaaataagacagccattactatttccagatgaggaaacctcggcccaatgagatgaaaagagttgcccaacatcccaagttgagcagtaatagttagacttggaatctaggtctgtagatatctagcttggcaaactttgcagtgtacaacaccaactccctcccaaggattcccatgtacaaatgata

SEQ ID NO: 50603 - DNA, 1109 bp, Homo sapiens
ttttgcttttacctaaggctaacacgacaagatctattaagatggcagatcagttgtatttctgaagaacatatgggcactataagaaactacagtttggtttgtcttaccggtgttctcaaaaaatacagagaaatatgggcaaccttgaggtactatgaggtggcaaatcatatgtctgatgctttctcattgaaaatttgaaagttgattttatcttgaaatgtcttggttatccagaaggaggacagaatagttgtaaggataaaaatggggttcccaccctgctgcatgattaaaaattgcctatggatttctctggtgccagttgtttcattagttcttcaacccctagtgcatacagcagccaaacatggaagatgatttaaggtcatcatcatgggctttcctgcacaactcagggagtgtctgcttgtgcttgagcacgggaattctttgtcacaaggggaaaatgacttgaattggctgattcactttctttgtttctgactaggcccctgtgattcaattaacttttacaagtgaactatgggcaatagccacaatccagtgggctggtgaaagaattgtgtggttctgctgcaatataaaaaaatgtgcataagtctttgatacgggaaggcatttgtgatgctgtaaaattaatgagttggcactgttctctgcatactcttctaggctttttatggcctttttattccattcttgtgttaggggatttggggtatgtgttttttctttgtcttccctcttgacttgcatctttaggatacttctaagtcaggctggtcgcaatcttatttttagaattcttaccaaggtcaacctagtcctattatatccagatgctgcccagtcacacctttcaacttcacctctccgttaataccagtcgcactagtgaaatggttgaggcttgtgggtaaagttgtatccctaacctggacttgtctgtgggtaacatctagagtcagtctgaatatgggaagtttgagttggggctccataggatcagaaaatacttaacttgtactctgacagcttacaatttaatttcctcttcttgcagtaagtacaaatggatccta

SEQ ID NO: 50604 - DNA, 1028 bp, Homo sapiens
ctctattggaatttttgtatgagtctttatggattgctatatcgagagtgaggttttggctgtagaggacaggtaaagtacattgaccattcatatgtaattttaatttattgagaataaaattatttcaagagaaagagaaacataagaggtatgtgatagttgctgttgctaatgtcatatatgttacataagatcagtaaatgatgattgtgtcatttcaagttacacttttcgagggaatcacattgattgggctgagactaccttttaatgggggaaaatggagttactcaagagtctagtaaaatatataggatttctgataaaacattaaggtttaatcaagagttacaaaggtcttctgttattatcagcataggaagctgataagggtccttgggtcatgtagttcagcttactaactccagataaaataaagcctacagtatccaagaaaacttttaagttctagtgggtagtttagcaggggcgccacaggtgtcactggaaacagctttgtgagtcccacaaatctagcaaggggaggagaggacctgcaataaagaataggttccaccagtatgtaagcaggtataacctttttggggaagacagcttatttctgttaaaggaaataatccctttctatttgttcatcctacatgtataatcgtgccgcataatgacatcttggtcaataacagaacacatacacaacagttatcccataaacttacaatactgtatttttactgtaccttttgtatatttagatatatttgatatgcaaatacttaccattttgttacagttgcctatagtattcactacagtcacatgctgtacaggtttatagcctaggagcaataggctattgcctaggtgtatagtaggctataccatctgggtttgtgtaaggatactctatgatgtttgcacgatgaggaaattgtctaacaatggatttctcagagcgtatgcccatcattaagtaatgcacgactgtatttgagtgcctactttat

SEQ ID NO: 50605 - DNA, 1101 bp, Homo sapiens
taataagtcagtgtgcttcaattcagctgtgactttcttaaaattcttctggcaggataaatactgatagaaaggtgctaaaatgggtatgcattttaggggaaaaatgtctaaaattgaagaagttaaatgaacaaagattaggtctataaatataagcatttcctcatagtctctagatatgcccaagtatctttccatggagagtaaatgagattgtgtaattagaatatggaactgagtacttagaagtctcgtttttgaatactttatcttttagtacaggagacataaccttgcagcccactttgcccctttataaactgagtataatatagctgccaattattgttaaattttgtttgtttctaggattacttttgaccactgaatgtattttctagtactcctttcagtttttactcctaaaattctctttctcatgctttacatataacaaggttttataatttgaatgggatctgaactctgtaatgttagagagttgttaacctgcatagttataaggaaattaaaaggtaaaagtgaaggacccagtttttttccaaaggatgatttattctctgtactgcaggagatgctctgttccagaggaacaagaactcactgatgaagacctgtgcttgagcaaagctaagaaacagttgagtatacatgagatggggttctctaccatagggtagagtagcctgacacttccttacaggacgggagttttgagaagagagaatttttttggttcttaaataatttccctcctcacctctctgctctcccagttctttattccttctaatcatctcctgaatgtctcaactagtgattgtctttagtctttctctctcctctctctctctctctctggtggggcacttgaaatctcacttcagtagcctagttcagaaaggcaccctcagttactcaatgaggctcacagtatttgtaatttggaaggaacattataacctaaatctacaattggcagtccatttcaaactgagaagtttcatgagtgaactaaatagcacttttatcttctcctagagaacaaactgttgaggagaagaagaagatgcctat

SEQ ID NO: 50606 - DNA, 1033 bp, Homo sapiens
ctaagacagacaagtcaggtaaggagcataatacagaggatcgaatgtgtgccaacacatacacagtcagttacaccaccatcaagacaaacattagagtggtaaaagttctttttggagtaggtacctattattttaatggaaattattaggcaaatgtatgatataaaattttatttctaatgcaacctaatggctgtatgtatatcaccctcttcttattctgaagatctcagcttatggctgtcctccatagttttcaaagaagtacaaactaagatgagatgccattttttgcctttcaaattagcagtgattaatgcaatgaaacagatgttcacatactgctagagagtgtgtgtgctggaggcagaactgtaataatggtaattattgaacgcttacttatatgtcaggcactgttctaagttctttacatgcagtggtttatttaatcatcacaacaaccctacctgttagatattattattacttctttacagatgtagagactgatacaccaagaacttaagtaacttgcctaaggttagacaagcagcaagtggtagaactaaggttcaaatataggtaatcaggtcccctaaacctaagttcttaactgctgctctcttctggagggatgcaatgaagggaatgtagtaaagccatctcagctaccaatttcctgaaagcatgggctaaaagcctctcctgtctgcctggattgaaggatctaccatgatctgcatggaacccgaaacagagggttgctgcctctaagcatgcctatccctgagagagtaatactggcactctgcaagagactctcctatgcatatgcatgtagaaccgaagctaataggacctttcttctcccctcccactactgctgaagctgctttttattgactctggctctaaaacagtggctgtctagaaatatatagacaccagaggtcaggcctgagcttagagcttagaggttgcaaggctggaacagcctggagctagggaataggaagctgtagatcca

SEQ ID NO: 50607 - DNA, 1048 bp, Homo sapiens
accacataacttagtggctgaaaacaatactaatttactgtcgtagcgtgctgtaggttggatgtcctacacagatcttactgggctataatcgaggtgttggcagggctgcattcctttctggaggctctagggaataatccattttcctgtcttttccagcttatagaggctgccagcatttcttgcccatggccctcttccatcaccttcaaagctagtagtgacaggttgagtcctcatattgcatcactctgatgaccttgcttttgtcatcacatcttctctgattctgactcttctgctgcactcttctacttttaaggtcccttgtgattacattggataattcaggatattcttcctatcttaaggtcaacttgatgagtaacctaaattcccacttgctgtgtaaacattattatgtctatcacagtctgccctttgttctctcagattccacttacatctcatatgcaaaatatattcaccccgtcccaacgtttccaaaagtccctacccattacagcatcaatgcagagtcaaaaatttcatgtaaatgtcatcagctcaaaagtctcaaatctcattatctaaatcacataagggcaatactctgagtatggcacatcttagggcaaaactcctctacatctgtggatatgtattttcttttttgtattttgctgttaaagtacagtggtgggacaagcataggatactaattatatatattcttgtttgaatgggggagaaactaaaaggaaaaaaggggtcacaggtcacaggcattttcaaaatctagccaggcacattccattaaatgtcaaggccttcatcctctagtcttgaggctttgccctctggacttagggctccaccctcaaagctgtctttcctttttcctgaagggtagcatgtgttggcagctgagtagtttcatcagcctgtttcctgactgtagaattttgagggtcaaacaggattctctccatccctttcaattcaagctagctttttgttttgattttttgtttgtttgtttgtt

SEQ ID NO: 50608 - DNA, 1771 bp, Homo sapiens
tgaagttatggaatacattggataaaaaaaagcagtttgaaatttgttccaaaaatttttcttgaagccagtgaacagatttagagcaaagtgatggaacagcaggaaagacatgtgctttcattaaagcatctagatttaatagggcaggcaaacaggtaagaatctgaaaggaactcgacattatggctgaaccagtagggatatttttcgaaaggagtttttaaagccaggttagaatagtttgtttaaaaaatgtcgagagggagatgggtctttatttcattaagtattatgagacagcttctatgtgccaggtactaaggatgaaaaataagactctttgatacctatgaacaaatatgtatgcaaataagaaacttaaatacttataaaataattgctttaatagggggtatgtgcaaagtggggagaactttaaatatgcttaagggagtcagggaaggcttcacaaagcagattatatttgatattaaatatgaaggaaaagttttctaggtggacaatagaggaaggacattctaagcagagggaagtatctgtaagggcaaaaaagggtaagaggtattctgggagtatggagaaagaaggcatgaggacatttgcggtcattttccttgaagtctcagtagcaaatatttttcttagagtgggagaaaagaaatttcccaaatctcttttgttttgtgcccaaactgtaataaagtcaagtcttgtaccttaatttgtctgtaaccacaagaattttaggtttagtgtttgagagagataactatttgaatggcaactccaaattaatttcagggtaattggttcatggttacttgggctactcagtggttatgacaactacctgccctcagtctaagtaaaatggtcatttaaatgtaaatctggcccataatggaaatctttgaccaggacttaactctaagtgaaagcttaggaatgacattagtttgacagaagtctccgagtcaagttattatgtttcaattgagtgaaaggaatagtgaattgctgatgactacctaaataattaagatttgtgaaattcaaatgttagatattaaaaattatttaacatctttctatatcatctttgccaccaaccccccaagtctacctttaaaattttacaggcattagatctttggtttttgatgtctagttttggtatgatgaggtgattgcagtggatcagatagagatagtctgtagacagtagatttattcagttgaacacacaggatttctgacttacttagcataacatctgctacacactttattaaaaacagggaactagtatactattctgcgtacagtcttttgaggataacaaatttgcataactcatgccaattctggcaccattgcccttttttattcaatttattttatataaaatgaaaaggtatttaaattaaaaaaaggaatttaagagagggattagagaaggttgtctgctataacaaactcatcctatgagtattatagatatcaaaacctgcaaatgataaaagagataccagccatcatactgctggaatgtctacaaataaatcatctgtaataccacttttaacagttgtggagcttacagtcatttgtataaacagattgtaacatatatgaagtaatttggcgagcaataaaaaagctctttaatcaaccaaaacctaagtagtatgttatggggaaaatgccttgatataggagatggggaaggttttgggtagaaagtatg

SEQ ID NO: 50609 - DNA, 1027 bp, Homo sapiens
gagccaccacgcctggcccgaaggattctatgttttctgggttttttttttttttttggatggagtttcactcttgttgcccaggctggagtgcaatggtgtgatcttggctcactgcaacctccgcctcccggattcaagtgattctcctacctcagcctcccgagtagctgggattacaggcatgcgccaccatgcctggctaattttgtatttttagtagagacggggtttcaccatgttggtcagctggtcttgaactccctaactgaagtgatccgcctgcctcggcctcccaaagtgctgggattacaggcatgagccaccgtgcctggtgctgttttctacttgaaggcatattacttttgtatttggaaaaaataatagaagtaattatacaaatttattaagcctacagaagttctatttgacctctaacatttgttgttacactgtccacactttccaactctttatgcaactctattttcaggctgataaaatagttgtgtaactgtagcaacagtttcttccataaacatagactttcatgaaaatcaaattaaaaaggaaaaacctattattaaattcctttaaggtccacaactaattatctttagcttctggggctagtgtgtggatcagttagtctgtatattcagctgcctttttcagcaaggtggaaaacctctttcaaagttcaaagactaaaaacagccacagaaccacagaaggtatttgctacctgtgctcagaagtgcacttcctagcaggtgtattcttctaaaacaatagctggagaataacagtctgcttagcactctttcattcttttatattacatattaaatcacaagtatacctaggaaatagcagtgcctgcctttgtgcacccatggattttgccaaggtttgtttcattggtcagagtctttacttatttattatttttcttaacttttatttttggtttggaggtacacgtgaaggtttgttacataggtaaacacgtgtcatggcagagtcc

SEQ ID NO: 50610 - DNA, 1026 bp, Homo sapiens
gccacaatttttgttccagattcattcatttattcattcaacaaatttttattgagcacctgtgtgcaaggcactggagataaagtggtgaaccagatagacatgattcttggctgacagcttaatgagaaagaacaaaattgactagtaatataactaaataggctattccacccagtggtaagtgctatgaaggtagagcacagtttctttgagaacgtataacagggatctaatctagtctagggaattaaaaaaggctcccctgaagaaatgacattcaaattgaaatatgaaggatgagtatcacccattcaaattttttattccctccccaaggagcaaaataggtagaaactttcttagctatagaattttccctatcataccaaatatgtttaccactgatttgagctgggcaattgttcctcctatttaaaaaataattttagaaaattattttaatgagtccttaatgtaatatatgtactgaattttatttgtgattgtatcttgaaacaaacttgaatcagctagaagatacctttttttttaattaaaaaaaaatttttttgagatggagtttcactcttgtccctcaggctggagtgcaatggcatgatctcagctcattgcaacctgcccctcctgggttcacgcaactctcctgcctcagcctcccaagtagctgggattacaggcaggtacaatcacgcccagctaatttttgtatttttagtagagacggggtttcaccatgttggccaggctggtcttgaactcctgacccgaagtgatcagcccgccttggcctcccaaagtgctgagattacaggcatgagccaccgtgcccggtgaagataccatttatttaaaagagatcatttaaggccaagcatggtggctcatgcctataattctagcacttccaaaggccaaggcaggcagattgcctgagtccaggagtttgatgcctgcctgggcaacacagggggaccccatccttacaaaaaaatacaaaaatta

SEQ ID NO: 50611 - DNA, 1022 bp, Homo sapiens
ctttcccttagggccttctaaatgaaaaaaaagaaaaaaaaaagattgactataccaggcctcttaatccccttctgggactattggtgatgctgtactactgttaagacgttttctgcttacagtcagtgacagttttatcaatgactctggcaataccattgtgacccttgaaattaatctgtgttttgttttatttgatgaacattccacatatccaagtggctgtaactgatatcattaattgtgttataaaaaatgggtgttttgcatatttgtaatacttctctggattgtaaggggtgttcctgggaaaaaatgatataatttgatcagtagtaatagaacaagtatatggccaggacctgacctggctgtcttagcttagctttttggtatcactaaagcagtataggataccagggaaagggaagagggtggaagggaaggactctgtcttgctcaaagagcttagtagagacaggaacgattaaggaacctatccaacagattgtataaactgcccctcaattgtggccagtgagccacatttgtcagtgattgacaattatgtaaactggtgcctgtggcaaaaacatgcggcaactagacagtggcacccccctggggttgtggacgtgacacaattgttagactatggcaatatttgatgtctttggagtcttaaataattaactcattgtgaagacataaatcaggaggaatcgtgaacctatgtattttttctactttaattctatgttctccatttcctgaaaggatggacagccttacctttaaaactattacaaaatacctaagcaaaaatcactccctctaagtatgcttgctaccatcactgagatctaggcagaccattaagtcttttgattttaaactctaaccctttcagtgcctcttaggctataaacaggaatggcagtactctctgtgttctttaacagaggaggtgatgtaagaaagaagaaaataaaatgatcacaaataaactgtaatgtgtg

SEQ ID NO: 50612 - DNA, 1033 bp, Homo sapiens
gcttctgttcctaagtcgctgttaaatgtttctttctaagaaactggatctaagaaactggatttgtcagcctctttcttcagcctctcagcttcctcggactttgggaaaggtttgcatagacttgtctcctgcaaaacaagcatatcaaaagattatgagacatatgaagaaacaggaaaatgtgacctataatcaaaatgaaaacagtcagtataagtagacccactagtgatccagatgttgaatgtactgatacgtgatgcagcacagctataccccaacaacatgctgaatgaaagaagccaggcacaaaaggtcacattttttattccacttatatgacatagccagtatagataaatccatagagacagaaagctgattggtggttgttggggtctatgggtagaagggaatagggagtgagtacttaatggatatagggtttactttaggggtgattaaaattttttggaactagaggtggtagttggacaacactgaaggtactaaatgccactgaattttacactttattaattttatgtttgtgtatttcactttaattccttgaatgggtttattagtagactgaacacagcagaagagtagtgaactcaaagacagtgcaatagaaactattcaattgaagtacatggagaaaaaataatggaaagaagagaaaacaacacgagagttatgtaggagattgtcagccagtataatattagtgtaattaaaatctcagaaggaaaagagcaagagaatgaggcagaaaaaaaaaactattcaaagtgataatggctgataatttctcaaaagtaatgacagacatcaacccacagatccagtaatctcagtaaaccccaagtaggataaaaacaggaaaaccatacttaggcacattatagttcaacttctgaatgaaggataaagagaaaaacttaaaagcagccagagctggatgaagtggttcatgcctgtaatcccaacacttcaggaggctgaggtaggaggatcacttgagccc

SEQ ID NO: 50613 - DNA, 1066 bp, Homo sapiens
atattttttgtctgtggtacctcagcctatcattgtttgaatggctcttcagaatctatgtgcttcctctcattcttagtgccccctatgaccatctacactgaacaagatttatacaatcatgtcgtacctaagccccacaacaaaagagtacccattcttccttttgttatcagagcaggagtgctaggcagactaggtactggcattggcagtatcacaacctctactcagttctactacaaactatctcaagaaataaatggtgacatggaacaggtcactgactccctggtcaccttgcaagatcaacttaactccctagcagcagtagtccttcaaaatcgaagagctttagacttgctaaccgccaaaagagggggaacctgtttatttttaggagaagaatgctgttattatgttaatcaatccagaattgtcactgagaaagttaaagaaattcgagatcgaatacaatgtagagcagaggagcttcaaaacaccgaacactggggcctcctcagccaatggatgccctgggttctccccttcttaggacctctagcagctctaatattgttactcctctttggaccctgtatctttaacctccttgttaagtttgtctcttccagaattgaagctgtaaagctacaaatggttcttcaaatggagccccagatgcagtccatgactaaaatctaccacggacccctggaccagcctgctagcccttgttccgatgttaatgacatcaaaggcacccctcctgaggaaatctcaactgcacaacccctaccatgccccatttcagcaggaagcaggtagagcggtcgtcagtcaacctccccagcagcacttgggttttcctgttgagagggggtactgagagacaggactagctggatttcctaggccgactaagaatccctaagcctagctgggaaggtgaccgcgtccacctttaaacacggggcttgcaacttagctcacacccgaccaatcagagagctcactaaaatgctaattaagcaaaaacaggaggtaaagaaatagccagtcatct

SEQ ID NO: 50614 - DNA, 1005 bp, Homo sapiens
tttcaccatgttggccaggtttgtcttgaactcctgacctcaagtgatccacccgcctcggcctccctaagtgctgggattacaggcatgagccaccacgcctggcctcagtgtggttttgatttgcattttcctgatgattagtgatgttgagtatttcttcatgtatttgttggcaatttgtatgttttcttttgagaaatgcctgctcagatcactggcccattttaaaatcacagttttttttgttgctgttgagatgttgagttccttgtatagtctgagtattaatcccctgttgggtgagtagtttgcaaatattttctccttctgtaggttctttttgctctgttgattgtttcctttgctatgcagaagttttttagtttaatataatcccatttgtttgcttttgttgcctgtgcttttgaagtaaatagagtacttaaacatttaaaatcacttaaacctaacagacaatctatagaacacccaagaacaacagaattcacattattctccagtgcgcatggaagactattctctaggacagattgtacgttaggccacaaatcaagtctcaataaattgtaaaagattgaaacaatatgaagtgtcttctccaaatccaatggaatgaaagtagaaatgaagaacagaagtaaaactggaaaatccacaaatgagttaaaattaaatgaaagatgcttaaacaactaatataacaaaaagagacaaatgaaaacaaaaacacaacataccaaaaattatgggatgcagcaaaagtggtgctcaaatgcatatttttaaagtgcaaacatctattttttttaaataaagaacgatctcagatcaataacccagctttacaccttaaggaactataaaaatgaaatcaaagtaaactgaaaactagtagaaggaaggaaatagtaaagattatagctaagggttgggcacagtggctcatgtctgtaatcccagtactctgagaggccaaggtgg

SEQ ID NO: 50615 - DNA, 1023 bp, Homo sapiens
aatataaaagattagatgagaataaatgaaatagagtgaagaaaagtagagaaaaatcaatgcaaccaaaagttgattctataaaaagatcagtaaaactgacacaccttctgctagactgaccaggaaaaaaggagaatcaaattactaaaatcagaaatgaaggagggaacatttcaactgaacttgtagaaataaaaaagattatgaaggcatattatgaataattttatgtcaataaattatcaatgaagtggacaaattcctaggaagacacaaactaccaaaaccaactcagaagtagaaaacttgaataaacctatatcaagtaaataggttaaatgagtttttgaaaagatacccacaaagaagagcccaggctgaaatagcttcttaaatgaattctacaaaacttttaatgaaaaattaatacaaattcttcacaaactttttcaaaaagtagaagagtggtgaacacttctgacacatactacaacatggaagaactcagaatatgctcagtgcaagaagccagtcacaaaagactacatattatatgatactatttatatgaagtgtccagaattggcaaatatatagagatagaaagtggattagtggttgcttagggctagcacagagttggggggaatgggaagggctgggggtaacagttgaagtgtatgaagtttctttagaggttgatgaaagtgttctaaaattggtcgtggtggtgatttcacaactctgaatatactaaaaaccaggaattgtacacgttaaatgggtgaattgtgtggtgtatgaattatatctcaataaaactcacaaaagtaggggtgtccatcaataggaaaatgggtaaataacttatggtacatctatttagtacaatactatgcagccattaaaatagtgaagtgtatctatgaatatattatgacctatactcatgtccaaggttgtgtattaagttaataaacaagatgcagaaatatgtatagtatgaatacatttttatgc

SEQ ID NO: 50616 - DNA, 1048 bp, Homo sapiens
ggccaaggcgggtggatcacctgagtttgggagttcaagaccagcctggacaacatggtgaaaccccacgtctactaaaaatacaaaaattagccaggtgtggtggcacatgactgtaatcccagctactcgggaggctgaggcatgagaatcacttgagcctgggaggccaaggttgcagtgagcagagattgcgccactgcactccagcctgggtgacagagtgagactttgtctcaaaaagaaaaaaacaaagagtgccttacctcctttatatgatattttggttgatcctcaatttgttttaggtattatacctgaagaaccttagccctcgggtgactgaaagagatcttgtgtcattgttcgctcggttccaggagaaaaaaggacctccaattcaattccgaatgatgactggacgaatgaggggccaggcttttatcacctttcccagtaagtagtttcatccagatgattactcagttgcccctcagttcgctagagattacctataacctctctaatttagatatagtcctttgatttctccacagcatgtgagaacaagacaatgaacgaaaaatatgttttcagtgtttctttctgtttcctctcctccattgacagtgcatggccacactaccccagtgtcctcagtttttcccagtcttggtacttccttcttaccctaccaaaatctgtactcccttcactgacaatagtatttctagtccaagttataattagattactcattaattaatgtattagtattctgatcagaacacatgtacttggcttatgcgctgttcctttaggactaagtgagagcaagctaatatactaatttattactaattcataattagtagatgatgatacagtcttctaaatattatttgcatattaattaatgcatagcttctaatccaactggaagaataatatgcaaatttcagtttctatgacagaccagataatatgttgttttgggggaaggctttgtaggatctgtacctttcattgtccctaaagtatcgtcatt

SEQ ID NO: 50617 - DNA, 1053 bp, Homo sapiens
ttttaatactgaatattatagctgtggactttacatatatggcctttattatgttgaggtaaattccttctattagtagttgagtgtcttcatcatgaaacagtgttgaattttgtcaaatgctttgtctgcaactgttgagataatcatgtaatttttatattttgttctgttaatgtgttgtattacattgatcaatttttgtatgttgaatcatccttgcatcccagggataaatctcccttagtcaaggtgtatgagctttttaatgtgctgttgaatttggtttggtaatattttgttgaggatttttacatctgtttattaaggatattggtctgtatttttcttataatgtttttgtctaggttggtctcagggtaatcctggcctcatagaatagctagcatatagttggattttgtttatccattcaggtactctgtctcttggggagtttattaatatttaatgtaattattgctagcaaaggacttactattgccatttgttaattgttttctgtctctgttgtagctcttttgtctctccctctctgccgtcttcctttgtggttcattgggtttttttttttttttgtagtgatatactttgatatctttcccatttttctctgtttatcttttataggtatagggcatggtaaaacaatctgttttaagctgataacatcttacgttcaatcacatataagagctcatttttgttctgttgaatttttttttttttttgagacagggtctcactctgttgcccaggctggagtgtggtggtgtagtgtgatcatagttcactacagcctcaaactcctgagctccagtaatcctcctgcctcagcctcccaaatagctgggacttgtaaaattggccagttgtggtggtgcatgctgtttgctcacaagtagcacatgccaccctgtctcttttgcagagacagggtctcactgtgttgcccagactgatctcaaactcctggactcaagcgatcctctcatctcagcctcccaaagcactgggattacaggagtgagc

SEQ ID NO: 50618 - DNA, 1145 bp, Homo sapiens
ctagttttgtatttttagtagagatggggtttcgccatattggccaggctggtctcaaactcctgacctcaagtgatttgcttgcctcggcctcccatagtgctgggattacaggcatgagctaccatgcccggctgcagttttttttttttttatggatatatttcacagtcatgaagtctgggacttttattcattgctggtggtaatacaacctctttggaagacaggttggccacctcttacaaagctgaacattattttaccacacagtccaactactgcattcctacttatttacccagttgatttgaaaagcctgtgttcaacaaaaagtgccatgtgaatgttcatagtagctttattcataattgccaaaaaccggaagcagtcaagatgtcctccaataggttaatggatacattcacctgtggcagatctatacaatggaatataattcagcaataaaaagaaatgcatgtccagccacaaaaagacatagaggaactttagatatatattaatagctgaaagaagctagtatggaaagactgcatattgtatgatttcattatatgacattctggaagagggaaaactatagacagatgataaatgactgccaagggtttgagggaaatggagaagggagaaatacatgaaacacagggaatctttagggcggtaaaattattctgtataatactgtagttgtagaggcaagacatgcatttgtcaaaaaccattaaactacatagcacaaagagtgacacttaatgtatgcaaatgttaaaaactcatttaggaggttgagagaccctaggaaagaatgcagacagtgagaagagagtctaactgtaaaacaacctcatcgaagggatgggggaaaagatgctgaactaagcatctttggaaatatgtggagtctgaaagactaaaagcaaatggaacttcacataagcacggtacccttattgataaggttatttcccatggcaggtactggttacttagggagtaacaattctgatactcttatacatgcataatggaatggaacaattaagtaaatgtatggcagatggcgggggccaggtttctcactgttgcaatctacagataagtaaagggaggaagctgaaatg

SEQ ID NO: 50619 - DNA, 1049 bp, Homo sapiens
ctctaaggcaattactaaaaaaaaattatataaagaagtacaactgatatggctaagagaagggtgaaaatggaagcatataaaataatactcattttttacagtcttttttcagaaaacggaagcagagggaacacttcttaactcatgagaccagccttagcttagtaccaaaaccagataaagacattacaatgacaaaaaactacagacagtatccctcgtgtatagaagcaaaaatcctctatgttaggaaaatcaaaacatttgattgaaatattgattgagaaatcaaaatgttaggtaatcaaattcaataatgtataaaaataattatatactatgatcaagtatgatttattccagatatccaccataggttcaacatttgaaattcaattaatataatctgccacatcaatagactaaagaagtaaaatcatatggtcacttcaattgatgtagaaaaacatttgaaatatcttaacatcgattcatgataaaaactctcagcaaactaggaatagactataacatccttaacttgataaagaatatctgcaacaccctacagctaacattatacttaacagaaactggatgctttcccctttgatgagaaataaggcaaaaatgtcccctttccccacttctttttgacactgtactagaagtaccagctacagcaataaaacaagtgaaggaaattaaaagtatacagattgggaaggaaaaaataaaactctctttgttcacaagtaacacgtatgtctgtgtagaaaatcccaaagaatcagccaaaaaacaaactaacaaacaactcttgggactagtagattagtatagcttggaggttacaaggtttatccacaaaagtcaattgctttcctctataccagaaatgaacaattggaatttgaaattaaaaacaacaccatttacaatagcaccaaaaaagaatgaaatacttaggtataaatttaacaaagtatgtacaggttctatatgcacaaaagtgtaaaactgatgaaaaattaaataagatctaa

SEQ ID NO: 50620 - DNA, 1131 bp, Homo sapiens
ggaggtttttttgttgctgttttgttttgatttgtttttttttttttttgtaaatccaaaggaaacaagggagacaaaaagacagtagaagaaacagaaacttctgacacctacagctacatcaaacattaagcacagcccaactcctggccagattaacataaaacctcatactaatggtctctttggattagttcctattacttgatagatcatgtccagttttcaacaaaagaaattataacgtatgctaaaaaaaaaaaaaacacacattctgaagaggcaaaacaagcgtgagaaccaaattcaggttttggaattatcagatatggaatttaaaataaccacgattaatatactaagtaggctatgaataaaagtagataacatgcaagaccagatggctaatctaaacagagagaaactctaagaaagaatcaaaaggagttgctagaaatcaaaaacactgtaacaaatgaagaatgcctttgataggctcatcagtaagttggaaacagccaaggaaggaatcagtaaggttgaagacatggcaataaaaacttcccatgctgaaatacaaaggaaaaaaagactgaaaaaaaggaacagaatatccaagaactatgggacgatttcagagtataacatacatgttattggaataccaaaaggagaagagaaaaagaaggagaagaaatatttgaagtagtaatggatgagaattttccaaaattaatagcagataacaaactacagatctgggaagctccaagaacaccaagcaggataaataccagaactacacctaagcgtatcatgttcaaactacagaaagacaaagaaaagattttaaaaacagccagagaaaataaacactttacctatatagaaacaaaggtaagaattacatttctcatcagcaactgtgcaagagagtagtgtgaaatatttgtgtcaaaagtaaaaagaaaacacccacttagaataatttatccagcaaaaaaaaaaaaatccttcaaaagtgaaggaaaaataataaagactttctcagacaaacaaaactgagggaattttttcaccagtaaatcccaccttgtagggaaaaaaaaaaatgctttcaaaaaaagttct

SEQ ID NO: 50621 - DNA, 1058 bp, Homo sapiens
ttatggtatcttttggtaaacaacagttgttgatctctatgtaataaaatttattaattttttctttatacttagtggttttgtgctttgattaataaatccttttttttttctgagacaaagagtcttcccctgtcacccaggccgcagtgcagtggcctggttcactgcaacctccgcctcctgggttcaagcagttctcatgcctcagcctcccaagtagctgagattacagatatgcgccaccacggccagctaatttttgtatttttagtagaggtggggttttaccacgttggccaggctggtctcgaactcctgacttctggtgatctgccctccttggcctcccaaagtgctgggattacaggcatgagccaccgcgcctgggcctgatactgttctttattctaaaagctttatgttttttgcctttcacatttaagtctttaatccacctggaattgatttatgtatgtggtataaagtagggttccagttccttttttccctcatgtagatagccttctaacaccaaatattgaaaatgtctagactgttattgtgttgcaatatcaggtgttcatatatggatggatattctgtcatatatcaggtgttcatatatgaatgaatttttttttgattctctcttttgttcctttgtctttttggctattttagaatcaatatcatacagtctagctttatgatgttttagtatctggagaataattctttccaacttgtttttcttcaaaagtgttttgtctacttttgacactttgcctttccatgtaaatttgaaaatctatgaagttacacatgcacacatacctttatatgattttgattgggattccatcgagcatttaagtcaattgaggtcaattgacatatctatgagtcttcaaatcttcaaatgtgaacatggtacctttccattaatttaattatcctttaatgactttcagtacattttctgttttctatttcttctcaccttttgtgattctgaataatttgtttatttttaaactgctttattgaggtatata

SEQ ID NO: 50622 - DNA, 1166 bp, Homo sapiens
ctgcatcttccacactttgcccattcatctccttagtgaaatatcagtttgtcacttttaagttaaactttttgcccaacagtagaactcaattcagccaagtttctgccactttataacaaagattgcctttcctccagtgtctaataacatgttcatcatttccttctaaggccttgccagaagtacctttaacatttatacctctagcaacattttgttcatgattacgtgtatgtaatcatgaacacatatattctctaaggtaatagcagctttctctactgtctctttacttctttctgagcccttaccagaattgcctttaacatccgtatttctaccaacaatctcctcaatgtaatataggcttttaccatcaagcagctcaaaattcttccagcctctactcattacccaattctaaatccaattctacatttttaggtatttgttaaagcagcatcttacttcccagtaccagtggtactttgttatggcagacctaggaatctaatacagactttggtactgggaagtaggatgctgcttaaagtgaatggcttaaaacaacagaaagttattccctcacagttgtggaggctacaaaatcaaaatgttggcaaggttgggtccttctagtggctctgagggagaatttgttccatgcctctttcttagcttctggtgtttgctggcagttcttagattatctctctaatctctgcctctgccatcacatggcattctggttgttgactgtatctgtctctgtatcttcacatgtccttcttataaggacatcagtcattggactcagagcctaccctgtgacttcaccttaactaattatatctgcaaagaccctatttccaaataaggtcatattcttaggttctgggtagacatgaattttgggaggattctatttaacccagtacatttacttgttgccgcttgttcacctctcattcactttttttgcaaacgatctctttatagtgagatagatcatgacaaacagcacttaaaacatttttaatcagatcaagaaacagaacatgccgatactccaaaaatccccatatgtccctcacaaatcacaaccctcttcccactagatataactactgccctaacttgtgataatttccttatttttcttt

SEQ ID NO: 50623 - DNA, 1259 bp, Homo sapiens
agtttcttgtttgttgttgagttgtagaagttctatatatattctgtatattaattccttataagatatatgacttgcaaatattttctcctattccaagaattgccttttcactctgtcctttgatgcacaaagtgtttaatttcgatgaagtccaatttgttgatttttttcttttgttgtctatgcttttggtgtcatatccaagaaatcattgccaaatccattgttatgaaatgaaggcttttccttatgttatcttctgagagtgttatagctttagctctcatgtttaggtctttgaaccttttgagttaattttcgtatatggtattaaggtaaaaattcagctttattattttcatgttgatattcagttttcccagtgccagttgttgaaaaaagactgttctttccacactgaatgatcctggcaccctattcaaaaatcatttgactatatatacctgtctttatgccagtaccacactgttttaattactgtaaccttgtagtaagttttgaaatcaggaagtgtgagaactccaactttgttctttttcaaaattgttttggatatttggggattggttgagattccatatgaattttagaatggatttttctattcctgtaaaaaaatgttattgacgttttggtaggacttacattgaatctgtatatcactttggttagtattgatgtcttaacagtattgtcttctaagtcatgaacatgggatgtctatttatttgtgtcttgtttaattcctttcagcaacattttgtagttttcagtgtataagtcttttacctcacagaaaatgttttcaagtattgtttcaaatcttgtttatcagttgatcctttcatgggttgccttttatgtatgtgcatttatatgtatctaacaactctacctgttcatgaaaaagatattttcctatgttttcttctgatagttatatagttatacattttacatttagatctatgatccattttgactacttgatgtttatataaggtatgaagtttaggttaaagttcacttattttttttttttggcttcaaatgtcctgttgttttagaaccaactgttaaaagagtatcctttctccatttacttgcctttgcatttttgtcagaaatcaattggccgaatttgtgtgttaatacttaacctcataattaatggtgaaaagttgaaattcttccccaaagatcaaaaataagataaggatgtccactcttgccac

SEQ ID NO: 50624 - DNA, 1061 bp, Homo sapiens
atgctggcgtttctattgtaaaagctactagactcaatgtggctaaaacaatactgactttccctttcccaaatcatttattccatctggagctttgtctttccttcattggtaccattgttctctcagttacacagactgaaattttgggattatctttgacttccttgcctctgcctccaaaaggcctctctcatctaaccctttctttccattttcactattaccatttcagtctagaccttcatcaccttttacttcagtagtttcataactagttcttcttgtttcttccctttgaatctctatggcatattataaccacattcatctgtctaaaccatcacttgcactgtgtcacttaactgtttgataaattactacttcttattatccttcagtatatattactatccctttgtactctctttccctgttctccttttctgcatcacacacctttgaatgtcagcttaaaagtacctttctgaagtcttcctttaccacctttatctcccaattttctcttctgtgaatttctactaatttggcatatgcttctatgtgttattattctctcctccccccgctgccaaggcacatgcacacaacacataaacacacacttcttctccctaaatagattgtgggcttcttgaggatagggactatgtcttaaacacctttgacttccctcagtacctagcatagtgccttctgtgtaaacaggtatttagtaagtgttcatggactaaatggtaaagggcaatgaattgttggagaagtgtctttgaataaatggggtcagtaatggtagataatatagataaggaatatattttgagactcacagtctcttccgttttctgtatatattcttatgtctactccagggtaaacagctgtgtgaagagtgatgagcatgtcctggaggagctggaaacagaaggggagaggcagctgaaaagcctccttcagcatcaacttgatacttctgtctccattgaggagtaggtattgattttgcaaacggagagtatcatagactcttacctccaggt

SEQ ID NO: 50625 - DNA, 1003 bp, Homo sapiens
tctagtcttttttgctatgctgctaaaaatacttcttttgtattaaagagtactggaaactatataactttttgtattctatcttcacttaatattctttcatggtctttcccaaaaattttaaccattctttgaaaacatgagttttaatggtactataatgtttcatcagggttgactttaccatgatctatttaatcattttttgattggtagagatattgtttccaatctttagccaatataaaatagtccagtaatcaccacttatatttagatttgattatctcctctggataacggaaatagaatatactgactgagtcaaaaggtatgaatattttaaagcttttgatatgtatcataaaaatttacattttgaaaggttgggtcaatttatattactattggctatatatgaatgtaactattttttcccacacactcgataactgagtaagaccatttttaaaaaattgctgatttggttgacaactggtgctatttttaatttttttatgtgaattcattgtcttgtgaaatgtgtcttaatgttctttatactgtggtagtcagtttcttattgaattgtaggtatccaattcatgatagttacaaataattaaattgaaccaatatataaagataatgaacattgcaaatatgaattagcaacaaaaaaattagtatttagtaattctcagtccatttcttaccagaagaaattaaaagtcacttcctaatgtcaatttcttatgtttattttttatttaccacctcagaataatcataatctaaaagtcttatatgtatttttagctccaccagatctgcagaattctgaatgcccatatggactccctgcagtggattgatcggaattcaggtgggagtttgcttgtatgccactctgtgtatttattgcaagtagaaaacgtgatacatgtcagttgtatgctccatgaccaaactcatataaaagctgttgtatgggtgttgctta

SEQ ID NO: 50626 - DNA, 1063 bp, Homo sapiens
cacccaccaggaccttaagcacttacccttctccccattaggtatgtctcaacctgacagccccaatttggggtgttttcttccccctacttacctttctttctcttcaagtgtatttacttattcagattcttcatctcactaaccagtcttgcagagcagctttcaagcatctgtatctgtagatttacagccatttgggattactgtctgccctagatataatcagcaaattttaagagaaatttgatttttatagtttgggaaggtgatgatgtccatttccagcatggattgagatgtatagttgttgatcagggacaggataggaaaatttgatagtagaatattttaaaggctattttcattattttttaaatgtgagttcaaatttagtgtgtagttttttgtattatttttagaaccatacttcccttttactacacagatattgtaggattgactgtattaactggttaagaccaaagttgtaatttgcaaaatcagactgtgatagaactttcaaacccattcctttatttggtattaattgaaatattatttgaatatgccagagttaatttatgcctttaaaaatagcatgaaagataacaaaaataaaactgtacaaaaagttaaaataggccgggtgtggcggctcatgcctgtaatcctagcactttgggaggccgaggcaggtggatcacgaggtcaggagatcaagaccatcctggctaacacagtgaaaccccgtctgtactaaaaatacaaaaaattagccaggcgtggtggcacatgcctgtagtcccagctactcgggaggctgaggcaggagaatcacttgaacccaggtggtggaggttgcagtgagccaagattgtgccactgcactctagcctgggtgacagagcgagactccatctcaaaaaaaaaaaaaaaaagttaaaataatcataccattttaaaatgactcaggattcctttatgtttgggctgcttataggtaaaaacaattcgtacatgcatatatacatatcactccctctagagagaacagtttatc

SEQ ID NO: 50627 - DNA, 1029 bp, Homo sapiens
gaaatccagtttatgttcactgtctgggccagctgatagtgtgtccagaattggttccttctggtgggttcttggtctcgctgacttcaagaatgaagctgcggaccctcgcggtgagtattacagttcttaaagatggtgtgtccggagtttcctccttctggtgggttcgtggtcttgctgacttcagaagtgaagctgcagacctttgcagtgagtgttacagctcttaaaggcagtgtgtctggagttgttcattcctcctggtgggttcgtggtcttgctggcttcaggagtgaacctccgcggtgagtgttacagctcataaaggtggtgcgtccagagttgttcttactcccgatgggttcgtggtctcactggcttcaggagtgaagctgcagaccttcacggtgagtgttacagctcataaaggctgtgtggacccaaagagtgatcagcagcaagatttattgtgaagcgtgaaagaacaaagcttccacagcctggaaggggactcgagtgggttgctgctcctggctcgggtggccagcttttattcccttatttggccccacccacatcctgctgattgttccattttatagagtgctgatgggtccattttacagagtgctgattcgtccgtttttacagagtgctgattggtgcatttacaaacctttagctagacacagagcgctgattggtgtgtttttacagagtgctgattggtgtgtttacaaacctttagctagacacagagcactggttggtgtgtttacaaacctttagctagacagagtgctgattggtgcatttacaatcctttagctagacagaaaagttctccaggtccccacctgattagttagacacagacctgattagaagacactgattagttcttcaccagcagtgaggataaccccagcattatactttggaaagctttcacatagcactttacataaaattaaattagacaaggtaatatatgtgaagagtcctatacaaacttatttttaaaat

SEQ ID NO: 50628 - DNA, 1033 bp, Homo sapiens
ggaatttccaggatacagaggagagctccgggcacagggctccgtggcttcccacagctgggctcagcagtggagtagctgactagcagatttggccatcggtccactgagcacacttttgctttcttcctggcacttcccaccttgaaaaaaggatggaaattccctgcatctggatgggagtagcctaagctggtaaaccaagctgatggaattattaaaagcggatgacaagtgaaagtgaagacatgcagggagagaaacacacaacattccctgcaaatgcacaggcagagcccaacctgagaagatgctctgaggaacacagcacacacaaagggacacacatggagtcagtcacatgtggggccacagacacactgagctagtgcaaaaaaaaaaaaaaaaggctagccagaaaagtgactcagactttatttctaatccttctgaaggaaagagatgaagagaaacagggaagaattggcctcccatctccagggactggagagggagccaggaaccagctgtccagtatgaataataatatttccagccagactgtccctggcagattttcttggggtggtgtctcaggaggtgggatcccctccagggtctcctgagcctcacctagttcagtctttattaatattaataacacaggtcccaacaaattggtttgtatcagttattacaataaagctcatgggttaagaactaaaataaatgcctctcacgaatctgattggccctcctctgctgctttctgggctcactcaaagcacatgctcaggctccattcaagctgctttgtggtaaacaaaataaagaaggggtggtgaagcaggaaagagtattgagaggaactgtgtcactggacaaatgcacatctgagggctcctgggtgaccagtgaggcactgtctggtttaggatagcgattaggtgcatggctttcagaatctgcttcttactagtgatgtgatctcaggtagctcacttaacttctttaagccttacctgtgaaatga

SEQ ID NO: 50629 - DNA, 1065 bp, Homo sapiens
gccacctgggtccactccagcgacagacccctgacaagagcaggtctctggaggctgagttgcatggggcctagtaacaccaagccagtgagcctctaatgctactgcgccctgggggctcccagggcctgggcaacttagctgcaactggcaaaggagaagggtagtttgaggtgtgacaccagtttgctccagaaagtttaaggggtctgtttctcatctccatggacatcttcaacagcttcacctgacaacgactgttcctatgaagaagccacttgtgttttaagcagaggcaacctctctcttctcctctgtttcgtgaaggcaggggacacagatgggagagattgagccaagtcagccttctgttggttaatatggtataatgcatggctttgtgcacagcccagtgtgggattacagctttgggatgaccgcttacaaagttctgtttggttagtattggcatagtttttctatatagccataaatgcgtatatatacccatagggctagatctgtatcttagtgtagcgatgtatacatatacacatccacctacatgttgaagggcctaaccagccttgggagtattgactggtcccttacctcttatggctaagtctttgactgtgttcatttaccaagttgacccagtttgtcttttaggttaagtaagactcgagagtaaaggcaaggaggggggccagcctctgaatgcggccacggatgccttgctgctgcaaccctttccccagctgtccactgaaacgtgaagtcctgttttgaatgccaaacccaccattcactggtgctgactacatagaatggggttgagagaagatcagtttgggcttcacagtgtcatttgaaaacgttttttgttttgttttgtaattattgtggaaaactttcaagtgaacagaaggatggtgtcctactgtggatgagggatgaacaaggggatggctttgatccaatggagcctgggaggtgtgcccagaaagcttgtctgtagcgggttttgtgagagtgaacactttccactttttgacaccttat

SEQ ID NO: 50630 - DNA, 1093 bp, Homo sapiens
ttacttaatcttccttgaatcttaatttcctcatctgtaatataagggtaataattccttcctcactagattattgtgaggtttaagtaaagcaacatgtaaagtgcctcctaataccctcctggcaaactcttaagtgcatggcaaaagttgttaccctcttccactcagtctactgccaagacatgtcagcataggtaggaactttaacctctgtcaccatttcaactgtaaaatgatgataataatactttgctaacttataagatagatatatggactaaatgagataaaatcttttaaactgctttttcaaactttaagctgcacgaattactattaacagtttatgaactgaggcttttctaaattctaaccctgaattattacatgtagtgtttgaggtaaacaactacttatctctgtaaaatgagaaagttgttccttaggctagcatttagatcccttcttctattgtaagtagaaccagaattatgatttacgatctggtattacaaggctttttttgtagaattttaacttacagtctccctatgcaaactgatgtttctttcctgattaaataactttccaatgttaccatttcttaatcatatgcacttcagactacctagcaagaaatcctaaccattacatagaattggtagtgattaattggtctctggtggtccctgatttcagacacttagcctgtgatgaggagagagtggaagaagcaaaactgctggtgtcccaaggagcaagtatttacattgagaataaagaagaaaagacacccctgcaagtggccaaaggtggcctgggtttaatactcaagagaatggtggaaggttaaacagcttggatttattcttactttgtatgttgtgttgttgtccccagtgtcctacaaactaatgtatttgtgcacaagacatcatctatgaatgatgaagttttctcaccttcaaagtcttataaacatgttgactcttgttcctgctgagttacttgttcgaagcttacagcttgttttccaggcatcgaataactgttgagattgttctactgttgtcgtatattcttctatatt

SEQ ID NO: 50631 - DNA, 2000 bp, Homo sapiens
gttacccacacacctacccagtaggggtaactactaggtaggtggggttcttcagttgagcctcctgagaaccaaagagcatcaggagtccagagcccaggagagcaggcctggaaacagttaacctagccccattgaggctttccaggccatgggtaagtaggagtgtgggagcagcatttgcaagattactcatgaggaggactgactgtcacggggccagtcccagggcatcttgctagaacagcttgttcagcagggtccctgtacagtgcctccctattctgggagacaagttgaacctacagcacagccagtgtcttgccaagctatttatcttttcttggctctaacccccacacaaatttgtctttttttttcctttttacatttttttttacatatttatttttgttcacactatagcataagctctcaggccctctgagaaagcaagactcttctgctttctggagaaggagtacaaggcccccttatatttacaactgagggcaagatagatgggggcacaagatggttcctgaacatcatttccttcaccctttgcaacagttttgttctcttggccattattccattcagttcaacaagtatttactggaccaccttgtatgtgttcagactgtagtaatgggccttggagaaagataaaagagagtgtaatataggtctcatgcttacaaaactttcatatgcaaccattctttgcactttaagagtttcgggcagcatgggctgccacagatttcatggacaggtcagagaaggcttcctgaagcgtttgacctcagaagccaatagacattccaccaagtcgcagcatgccttggtttgatgcagaaaaactcatattttaaataagtttgcattcagtttaacccacgagcctttcacattagaaatttaatgtagcatgaaggctgagctatttgatgcacagttatactaaatgcagaaaagagaacaggtaagtacgggaccaaagcctgctttgaattggatcctacacacacacacacacacacacacacacacacacacactcctcccaataaaaagacaatgaaaacaacccacattaaagaaacaaaaacatgactagccaaaaggaaacagaaatgaaaaaccctgggcccagaaagccaaggggtccttaaccagctttcagtactcatgggagtgcactgagtatgtatgtaaaaggaagaaaaaggtacaaatgggatttgagcaggtgagccaggtcacattaaagggacaacagatgttccacaacatttagtgccttttcttcattgcctcctttactttcataataagccaagatgttgtttgctaaatctatgctccaaaaagtacaattttaaacaacaacaaagtggcctcatttaagttttctgtgaaaaacattattcactttagtactgaactattctgtatcttgggggcccagacattttccctggacccagagggaagttctctcttactcactctgcttcttggagttcctgcttttccctagagaatccccaagtcatattcatggctacaaaccctcacctctgatgagcagggcaagagggcttggagaccatctcacagtcccctttggactatctctagggccaggcaagagccctacagtcccagtacaggagctgcagggtttcagtccgtgcctagatagaaatacttcttaccactgaaaaggatgttgtgctcattatgtctccaaaggggaaaagctcttgctcttccccctagtatcaacccccaagaatttgcataatcctccatttgtgggtcaaatcatcaagttcctagatgatagaaggcagcttgttttaatggaaaagtccccggaatgaaaaacacaagatatggctttctcattcatttttaacccatctagatgttggtttcctcatctgtaaaatcaacaaggttagatatttaatcatttctatactgttagc

SEQ ID NO: 50632 - DNA, 1034 bp, Homo sapiens
cctatctttaattagacttcaatatttgtttgcagttctttctttttatataaaatttacatacaatgaaacacctaactcttaagtgtatgtttgctgagttttgacaaatgcatacttgtatgtaatccaaacctctattcaggtatagaacattactatcacctcagaaagttccctcctgctcattccctgtcaatctctgccccaattcaccccaaaggcaaccacaatcctgatttttctcctttatgccagtcctagaacttcatgtaaagggaatgatataaactctagccttttgggtctggcttttcacttaacacagtgattttgagattaatccacattgtttcatatatcagtagtttgctacttcttattgtaggcatttattccactgtttgaatctatcagagtttatccttgtatcattggacaactggaacatttccaatttttgactattatgaataaagttgctatgaacattcttgtacagttctcgtggacatacatattttcatttttcttggaaaactgccttgctttttgaacttggtaaaaacttgcctctctagggcccacaaggagcacccggatttcctggagctgtaggacctgcaggaccaccaggattacaagtaagatcaatttaagcctagtttgtgatcacagtgttcacatggttgttttccctacatactatggattcaatgtaaacctgtgtaatttaggtcctcctgggtgagcaagggcaacctccattcttggagggttaaagtaaagcatgctcttgcgaggagctattggagttatttatcagagtctatctgaccatccaatctgtgcctctaaagcctcccaccctagctcaacctaaagtatagcccagggatggcagatccctgacacatttcttgccaccttccatttcctcacccatgacaggtattgctaattaatcataccaccatcactatcacccaccctgaatactgaagaagcttcaaattccttcctaacactgcatc

SEQ ID NO: 50633 - DNA, 1030 bp, Homo sapiens
ggaccaaggccatacatattccctagggcaaaacaattggcttagatagtgtattcattaaatttacagaacaacatccactgtacttgctgcatagcttctcttaggtacttgttttcctgcccacaaaggctcaatgtttgtccacatacacaggcatgatatacaaactgcttcaatttggggagagggcatttggtggctaagatatttgtgatcagcaaggtgatcacaggtggctagttattttcaaaacaatgttcagactatcatttatttctggaggccctttgaacccctcctttctcttcctcctgtctgagttccaacctttcttaccctctccgccccttatccaggcccatgtcaagttattcctgctccacaattggaaatggacccttgcatttcaccagaccatttttctcttgtgatttcactgtcttatgtttaacattgttgttatttgattcaaaaattttctaagttcccttatgattttttctttgacccatggaatatttagaagtgtgttgcttcgtgtccaaatatttagtaactttccagctatctttctattatggatttctagtttgattttattgtaattacagtgaacactgtgttatttcagttcttttaaatttgtcaaggtttattttatggtccagcatacagtctatcttggtgaatattccatatgcacttgaacagaatatgtattcagctgttgctgggtataatgatattaaaaatatccattaggtcaaggtaatggatattattgtttggatcttctatgtccttcctgactgatatttttgtctagtgtttctgttcattatggaaggagggatgttaagatgtccaactgtaattgcagatttgactgtttctacttgaagttctgttagtttttgcttcatgtaatttgaagctctgctattatgtgcataggcatctaagattgttatgtcttcttgataaattgacctattttatcattttgaaatgtccttctttatctctg

SEQ ID NO: 50634 - DNA, 1027 bp, Homo sapiens
gacaagtgttgctactgttggccgtggcaggcttcataggggactttatctctacagaattctgtattaactttttctgaaagattgccagcacccgattcaaaagcttttaaaatcctcataaaactagagaatgaaaaaaagcaataatggaggtggaaggtaagcagaacatgggacttcctgcccagttcaccatccggccaggcccctggtctggccaactccttttcacctctttttctcccccagatcgtaggatttagcctgttttgcttgcttttctgactgccacttcccccctcctcgatttcccatctagatacctttagggatggtttcctgatttatccctagctctgctttctctaagaaccagataatggactgttaatttgtttaaagtgttttcattgctacaaactctaaggaaacagttgggcagagtgagatataaccaaaagtagatgacggtgtgaaagttgggaaggtacagaggatgaagaaccctgacaaaacatgagtctttagtgagctgtgaacacatgagctgcctactctcctccctatacaggccatagactctggcctgggagttagcaccattatctccccagcagctgaaaccatctctctttgagttaaatgctagacaaggtcttcagcctgaggtagatgtggggtgaggttgctaacagtctagtggatttttcccacatgtgaatcctcaggttgctctctctgactccagatttgtcttgacagaacaggctcaagtactaaatgttgtacataatttatacctctaggtggttcaagcatctcactttgagcaagggcaaattttcttataaatcattgtttaccaggaattgctggctcccctctggctctctctccagtctggagcccaagatcagctatttccacattgttcttaccttcctcctattggacttatccctctccctcacctgcatcctcagccccagtacttctgatatatttgccagtgcccagacctgga

SEQ ID NO: 50635 - DNA, 1247 bp, Homo sapiens
atgaaagctcatattttatatcacctccttgggtggccaggcctttctccagctgcctgcacttaagttttgtgccttatttcatgacaaatatttgccctctcactcctcagacatttgtgggctggccctattgctgacactaatcactactaacttacttgttgccaaatccaatggatatttttcattccttatcttccttgatggccctgctatataagacaccttcttctctcctgaaactttctgttcccttgaatgttatgctatcctttcctagttcttttcctactgtgattgggatcccccagcattctgtcctcatcccacttttcttctcagtgtaggcctctcccagggtggttttatatactgcagggatttcagccaccatccataaaatgataaatattaaatctctagctctagttcagatctttcttcttagtttctgattggcattgtcaatttcttgctggatatctctgcttagatttcactggcaccataaacatgtctatacagaactccattaccaacccccaccagatgtactccttcctaaattctatctatgtcttccccatcacaacaaatggcatcaacaagcactgagctgctcaagccagaaaactgggagtcatgcttgtcttctctttcctttccctactacctccaatccatcattaagtcctgtccatttgtcttctgaaattgaacttgaatacatacacttctctccatacccatttctccaatctaggctcatataatttcttgccagaattacctcaataacctcaagactgatctctcagcctctaatctcactctcccccatcaatttgccactgtcctgccataatctttccaaaacacaaatatgtatcatgaaactcttgcttaaagtccttcaatggctcccccatggacttcacaataaaatccgaactctagaaaacctataaagtcctttattacctggccctggactacctctccaatattatctctcattattaggaaccctcctcacttcagaaaacaaaacaagacaaatattttcaaaaaacatatgagttcactgaactatttatagtcctcagagctactgtgttgtttaatgtgttgcaggttttatacttgccaccccttctacatatactagtcttccactagctctgccctttctctgttgacttgcttctatttttccatcctttaaaactgagcacagatttcac

SEQ ID NO: 50636 - DNA, 1001 bp, Homo sapiens
actgtttccttaggaagatttgggaaagtaatggataatcataaatactaacatgtattaagtgcttattaacctagcattaatgcttgcattatctcattgaatattcacaacaaaccaacaaggttacttactattattcatatccccatgtttacagttgaggaaactgaggttcagaagggtgagaaaacttgcccaagattacacagctaataaatactgaattggaatttactctcatgtctgttttgattcaaagcatatgcacttgctgcttcttggaaggtgtctgtctgctcctcgcttcacgagcaagaactcatctgattttaatttgttagaaactgaaaatacagtagaataaacagatgtttcctttctgatggagtgatgggttataatgtcctgttttacatgtcagcaatagttttgaggccaattgtggacatttgtagatctctcatcctaagtatttattgggcatctattatgtaccaacacatggtgggtgattcaaataagtgtaaggaataggaattaccaggagtgagtgtcttaccagagaaatgaggttacctgacaggaaccccctcagaatatatatacacatgtaaaataatatgccaattcatgtgacaactctaaatattgggtgagacactgaggtgttaatagaaaggacactggtctgagaaccagtgttgttttagaaacagttgtgtaatgttaacttttaatgctaattttaaaataaagtgggcctacctcagtcattctgggtttcttgactagaggcagagaagaaataatcaggaaagtcttcatggacgagctggactatgaagaatgggcaaaatttgaattggtgggaaagggagaggagactccaggtccaaggaggaacaaggaaggaaaagtaggagttagggtaaagagaagggaaatgagcccagagtgttaaatggttacaaaggtataaccaattctagggccagacc

SEQ ID NO: 50637 - DNA, 1062 bp, Homo sapiens
tcaaggttttggatctatttcacgagggcccactcatccttaggttctgcttagctcagagtggatttacaactccagaaactgtctccccttcccaatagcctagtgtactatcaatttgaatcagtgttgtatgcatttgggcatgtgtgcaagggcactttcgggcccatctgtcttatgtgggaatagtatgcctatgtctctttatgtgtaacctaacagtaaagttgaaagtatatgatgcacagttgcttaggtcttagcgtataggtctctaaggggctgtgtgtgaagctgtggagatacttagggctgttgtgtggaaaggtgcctgaaagtgagaaagactaccggctgcccaaggtaggggggatgattgacagcagacagccccgcccctttcccctccattctttcctctcctgctgcatggaactatctcctgagtgctgcaagttgtaacgggcaccgctgagcctgtttccctttggagcacttcttatctagaagcagtgtttagtttcttccaaactgggccacttcgtccacctactctgttctgagtaaggaaacagcctccaagcatcagcagagcccagatgagcacgggccgcggagccgcttagcagtctcccgggacccagctccggaggagccgcaagcatgcaccctgggtgagctgttgctgccccgagctcccctcctctttcttacttcgggttactttgccaggccgggactatactggtacttctgtcactgcagagaaattgggagcaggcatccaaaagggttcggggggcgacaggcagacgcacgaccccgaagcctagagagcccattactcaccctccctcccatttcaggttgtggctgctcctggttacgttgtgcctgaccgaggaactggcagcagcggtgagtctcttctcacgacccttttccgtccccctcctttgaccctctaaccatccccatctctagtatttatgttagggggttgcagagagtttcaccacgagacggagtccacaccactcccctttctaatgggagtta

SEQ ID NO: 50638 - DNA, 1033 bp, Homo sapiens
aaggaaaaataaaataaatgttttgaaaacaaagcagacaagaggcacaacctggaaaatgtgagcatgagaatttgtatgggtaagtcagatcatggtccttaatttataaaatgtgtaaaagagaaattatgtaaaattaatgcacagaatgagatggaactgtattctgctttagaaaacccaattcatcccccgccaaccccgcaagatatgcatgttaatggacgctggttttcaggcagctaccttaagtcccagtttgctgcttaaatgtacttcagagataagaaatgcaactgagctatacaaaatgagacaacttccctcctgtctcttgtgcatgataaatgctaaagcaattaggaaccactgttgcatgctacattggaatttctcagcaacatcagtgccattctatgtaaatggggaaagcttatttagaataaagtcctgagaatttaggaagagaccattgattttacttaatattaaatatttgggtccatagaactgaactagaagcaataccctccttcacttttcaatctcagaatatccattataggatcttctatttcactggcaaaaatctgaattagcatttcaataacaaaaggagcaaggaaatattgaattggaaaacagattcttaaatatctacagaaaaaaaaatgtgaagtttgcaattcattctgtatttccatacttgtaatccccaagaacgttttcaacatttttggattttctgcattattttcaaggaattaaaagtatgtaggccatttaaaatatatccatgctcagacttttgttatagttgttttaactttctcacaagaagctagggactatctttctaaccttgtttttcattctgttttccccctctttatattaaggttatgctcattccaggaacacaggagatattggtggtggtgcttagtgcttagaattatagctaaatatattactttaattacagtagataaaactcatgtgtgatatagatacttgaaaaaaacttttt

SEQ ID NO: 50639 - DNA, 1050 bp, Homo sapiens
aggcatgagccaccgtgcccggcctaaatgactcccttttcattttcttatttttaaccactaggaaggcaactgtgagtacatggaaaatatactcatcacagacaagaaagtatgcttgcactgatggaatataggatagatgggttgaatatcaataatttgttagcaaattataatgcctgccttattggaaaccaaaagtttaaaagaactctagaaaaataattggcccctactcctgattctttctttaccaaatcacccttgccacgcagaagggcggtaagagtaagacttagagaccagtgcctgtccaaagaaggcatctgtgggatcacatgggccacaggataggaaagcaagtcacgaatggtgtgcaaaaatctacaaggtacatggattgtctatatacagacaattaagttgattgtacagcttcacttcacttgatgcacctaggggggattttgtaaaacaatatctacatcacaataggaaggtgtaattagactgcctttatattagaaactgttagaaactgtctacagcagagaccattttaggatcagtatatatttacatacctatatatacatatgtatatatacataaactttaatcctcacttcaagggggcaatctatatttgccagggcatagtccaaatatactttattcatccaaacagcccctcaaagacaaataggtacacctgtgcttctcagtccatctgattttgtatacccctttgggggtttacatcttaatgggacttgaattcctgaaacagtaaccatagtctgttgctgcttagacaaatcatcagaactcactggcaggaaggatcacattcaagagtgcataagcagaacttcagcttccccactctcctagactcatacatgctaaccaaatgtttgctgtagaatgtgaagtagtactgtttctttataacataaaacctgttcataagacttgtcaggtaaaagatgcgtaagtgcacagtagttaaacacctcccatgactacttggaagaatattaccag

SEQ ID NO: 50640 - DNA, 15556 bp, Homo sapiens
agagcggtttcagtgccggccagcttttttcgccgcttagcacccagcccagcacgtccccggcaccctgcagaagccccgaacaatggagctcgcctgtcttctgaagtgtctggttctggctctggcaactttggggaggaaggcaatccccagggcaaagaagatcaggaaggaagcggaggtgactacatgcctatgaacaattggggctcaggaaatggccggggctcaggaggtggccagggctcaaatggccaaggctccagtagccatagctcgggaggaaaccagtgttcaggcgagggacagggatcccgaggtggtcagggctcaaatggccagggctcaggaggaaaccagtgctctagagatggccagggcaccgcaggtgggcacggttcaggtggtggccagagacctggaggtgggcatggctcaggtggtggccagggacctggagatggccatggctcaggtggtggcaagaactctggggggggcaaaggctcaggaagtgggaaaggatccgatggtgatggtgaacgtggaaaatctctgaagaaaagatcctattttggcaaattaactcaaagcaagcaacagcaaatgccaccacctccaccacctcctcctccacccccaccagctggaggaactggtggaaaagggaagtctgggggaagattcagactttatttttgtgttgacagaggagccacgaaagaatgcaaagaagccaaagaagtgaaagatgcagagatcccagaaggtgcagctcgaggtccccacagagccagagcttttgatgaagatgaggatgacccatacgtgccaatgaggccaggggtggccacccctcttgtaagctccagtgattatatgccaatggctcctcaaaatgtctctgcttcaaaaaagcgccactctcgatccccttttgaagattcaagagggtacatgatgatgtttcccagagtgagcccaccacctgctccgagtcctccaaaagcacctgatactaataaagaggatgactcaaaggacaatgacagtgagagtgactacatgtttatggctcctggagccggtgcaattccaaaaaaccccagaaatcctcagggtggctcttcctccaaaagttggagctcctacttctctctaccaaacccttttcggagctcacctttgggacagaatgacaacagtgagtatgtgccaatgttacctggaaagttcctggggaggggcctagacaaagaagtctcctataactgggaccccaaagatgcagcttcaaagccttcaggtgagggatcattctcaaagcctggagatgggggatcaccttcaaagccttcagatcatgagcccccaaagaataaagctaagagacctaaccgactttcttttattacaaaaggatataaaatcaagccaaaaccacaaaagcccacacatgagcagagagaagctgacagctctagtgactacgtcaacatggacttcactaaaagagagagcaatacaccagctccctctactcaaggactaccagattcgtggggcataattgctgaacccagacagtcagccttttctaattatgtgaatgttgagtttggagtgccatttccaaatccagcaaacgacctctcagatcttttaagagctataccacgtgccaaccccttatctctggacagtgctaggtggccacttcctccccttcccctcagtgctacaggtagcaatgctattgaggaagagggtgactacattgaagtaattttcaactcagcaatgacaccagccatggctcttgctgacagtgccattcgctatgatgctgaaacaggtcgaatctatgtggtcgacccattttctgagtgctgtatggatatttctctctcccccagccgatgttctgaaccaccacctgtagctaggctgctgcaggaagaagagcaggagagaagacgcccacaaagccgttctcaaagtttctttgcagcagccagagccgctgtctctgcttttccaacagacagcctcgagagagacctttccccatcctcagccccggctgtcgcttcggctgcagagccgactttagccctcagccaagttgtagctgcggcctccgcgctcgccgcagccccgggcatcggcgcagcagccgcagctgctggatttgactccgcctctgcccgctggtttcaacctgttgctaatgctgctgatgccgaagcagtaaggggagcccaagacgttgccggtggctcgaaccctggagcccacaacccatctgcaaaccttgccagaggtgataaccaggctggcggggctgccgctgcagctgccgctccggaaccaccacctcgcagtcgccgggtgccaagacccccggagagagaagattctgacaacgacgacgacactcacgtgagaatggattttgccagacgtgataatcagttcgactctcccaaaagaggtcggtaattttagaattaatttccctaaagtgaatggtcattgtctaatgattcgatgcgctacagtctacagtgttagggatactatttcattaactggtgctattcgacatggagtatagaattcagttttaattattcacaaatgcctttttgatctttgcaaaaatttgtttttatctaatcaatttctttatctggacagaactgattatcatttaaacactggttctacttttttaggagtagttaaaacgcagacataaaaagcataaggatacttttaaacatccttccccatcatttaatgataatgtaaagcaggatatcgtaaattgggttccaccaactaattttcaaatcaacaattaaaagctgcttttctgcaaatgcccatatttaagtgtaggaatttaataagagcacagactattaagcagtaataatcaactatttatgtttagggaggataattttctcctctgaaagttactttttaaagagcagtcgttgttgtgctagtttgctgtgatttaccaagaaagttaaatctcaattgttaacgtgaatgtctggggggaacaaaacataaataatccaaaacaggaggtgattaaaagaagacagtatttggctctggaatgtgtttgtgtgttgattttctttttgtttttacacaggataaattccagaaaccttgagtgttccttttctctgtcactagtaatgacaggcaagtcacatttgctgtgcctcattttcttcttttaaccccccacccttctaaaagagggtgtggtgacaacttgagaatggatatgaatattatttcaaaggtttaaaaagcagttaaaacatttaattcatatatcttatgggaaatcaaggaaagcaagataaggctggaggaagacctgactccaggggcagcttaccctggaatggtggaagtttttaaagggctacttttccaaaggaagaagtaaggaagagtaggagctgtcagacttggaaacaagacttagagtaattctactgtgtacaacattgtggaatgttgtcatcagtgtgtcttgaaacattttcaagagatgattgcagaggatgatgtctccatagtctcaactaccttgcctcttaagtagaatatgcttctttcccagtgaagggaagggatggaccccagcagttttcattccagtagtcagtttagtgaagatttttgctttgcttgctttgtggaatgcttttgtgattggatctctgcccactgtgcttgatcaggcagaacaagtcgggcactgatcacaacagtcacctaacaagctccctatttaatgcaggtgtagcccccccacatcccctttttctccctgctatagaaaacttgccatacacaaactcacatttgcagcgtggacacattaaagagtgatcattaaaacaacaaaaggatgctttggcttgccaaaggattcaattcagacctcttttaaactgtgagttccctccccaacacacacacatacacacacacacaaacacacatgatcaccactgctaccataatcatacgtttaaaatatataatttcatttccaagtctttaatccataataagattttcaagagtagatctactttattctgtagaatatacctgaaaattgatctcaatctattgtttgagtctaactattgaagacaccatttataattttgatgtagatgatacacagttgcctgtgtccctgtagtactttcaaaaggaccagttttcatagaggtttattttaagaagtttaagatttaaatagtgaaatcttactgttccttgaataaattctgacttcccaaggaatacctagacacaatgatcattattttagcataaattcctgatttatgactttgtagctattttggagatttaacattctgtaaatgcattgtttattgaggaaattcctagctttattgagtgactttagcaaggaagctctatctcacagggaggcaggcgcttaggttgaaataagagaatcaacgtggaagcactttggaatgttaaagcactttacaaatgtaagatatttttagtgtcattggattaatactgaagtgaaatttcggcagtttaaactgattcagtttcttgcaaaataattgatcttgagggtgattcctgcacataatttgctgaaatacatgaaaggaatggtggggattgccggcgggggggtgcgggggtgggggtggtggtggtggtggtggtggtgttgatggtggtgaaacaacccattgtaggaaatgactttggttagcattttaatgtaaattgtatggtagaatgttgtctgtgaagtgttaagaacaagctgaatgattctgatccttttttattgtaaagctgtagaataattttcactcatttctgatctctattttcctatctaacattaaaacaaaaacaatcacgttaggaaacaaaaacataatgctttgacagaggaacaaataccatctttattagaagttatgtatttcaaaaagtcattttaattgatggcaggtgcttagaacagtgcctggcatatagtaagtactatacatgaattattttacagttattgccattgttattgttgctactgttattattacatttagaaaaacaaacctaaattaagattctccatctgaaaatctcacttttcagttagtctttacttgcatttaaaatactttacattattgttcagttggcatgtttatagattaccatttaagtgaagtgagattataaatctgtgagacagctgttctcatgtaacacaaaattaatatgtaattccatttacctacagtcacattgcgtataagtaagtacagtaaaggaatttactcaagtcgattagaaagaaacacccagaagtataaccttagacatgactgtattaataaatgaaataatttttaatcatttattaaagatgaagtcttcacattttaaacacataggttataggcattagcatttaggagaagaatgttgtttcttatgcagtttagtttgactgttaacctatgtatgactatttgcttctttttctaccttacctgatgtacaattcatagttcaaaatgacttgaggtgaacattttcctggtttttttattcaagagatgggaggatataaaagggcagctctaggaggggtgagagaatcggtcagccaaattagtaatgttatgatggcacttggtattaaaaagcaaaaaaaaaaaactttagtaattaatttttcagtgttagacactgttatcaccatgaaggaatcatgcttcttttgagtgtactactgccaaacttgttgctatcagttataggcactaagagcacattgtttttattccattgaagttaattattataaaaatttccatatagcagaaatttcccagctaccattgacggatcatttattttaggtaatattcaacacctcaaaattggacagtgtttggactaatgaggtatttgtcctctaacaattaaagaggacttcacttaattaaagttaactaaagttgttcacaatcattattcatttgcattcattctattttaagagtgatgttttcagggtaaaaatttcaactactagcaaaatacttaccttaaacaaggaccagaactttaattaagcacaccagaatgtcacacatgtataaaaattcgaacgagatctcttactttctttttctctccctaatcccctgttttgggaacaaacttaggcttctcagagtgacaaaaaaataattcctgtgggaatagatgtggctgacgagtgtagggagaactaaggaatagtttatgtgatttaaaagggtctattgttaaattgtcaaattgttgattgaggaaatgctttccagttgcagattgccttatagtttgcaaagcacattcacattcattattttactgatggatggtaagtactggaaatgaagcccatgttgagaattttcccaagatcaaaaaggtaagtggcagagctgaaaatctaactcatacatctgatttcaagtccagcactccacccaacacatgacacctccctttaatcaggtgtttagtctgttattttcccactggtgacagattattacatggttaatgattaggaaaaaattacaagtttgctttcacttgatagtagcaaattttgttgtaagtaattcattcagagcattataactgtggactatcttccaggacctgggtaattttattacattgaactgtttgccctggctcttagaataaaagaatttgacttgtgctggaattgaatgttttaaatctgatatagggaggagttggttaatcttcactgcccaaacacaaatagtgtatgtatctatttagatcccacagaaacattgaaaggaaagaaagtgaattgagggtgcattcagtaaatttccattaatggtcatttctttaactgaagttagatttctttgattttcctaataattcattgacatttgggagttatagcaaaaagtcttttcatttaatttcttccttcattataaaatttggtattctgatctaaatcagcacagtaggcaaaacaggataaagtaagacaggtggaagaataagcagtgtagcaatagacgttcttcatttgtttaaaaagtgaacttgcttttggcagtcaggcaagtagattttagaagccttgaaaatcaaactctctccttgggacatagaaatccctgtttacaattaagttcattttgatttagcaccttttttaaggctttaagagtatataaaaatagcccagacgttttattggcagtattggaaaatagcttttgtaaaatgcttaattaaaactttcagtatattttctctaagaggtgctgccagactcttagatagtgaggatcatttactagaaaacgttgcttggtcttgaatgagaaatgagaaatttaagacactgctttttataataatgaaataaatacatcacaaagcactgagtttttgccacaatcattggattgctgattttaaagctattgataaaattgccaagaaaaatgtgcttgccatatgaacttaaaatatattctccagcaattctgcattgattattggtaatgtagctacaggtctcacatttccaccttattttggaaaaatagactcaacacttgagaaataggaatgtttaaagatgtttctagtgtaaattatatactgttttagatatgcatttttagagggtacctttcaacttctggctgaataattaatttcttttagaatggaaaacatgtacttaaatacttattaagtgaaatgagaaagttactgctattttctcttagcttcctgatacctctttcttattggttagggttgcattggttgtgttctgtgagtcttaccctcatgtgccctttgccaaacttgtgcccttgaattcaggcaaacatgccctttcctggtctctctctggctgaaaaggtgagggccactgtgggagtcctgcagggcccatagagggcttcgccagatgttgatcactcccagtacacagccttcttgcacttagcttgcagaggcaaccttccttgtagggatccttgttgtacagatccaaggctgtgctgcctgccctactgtcacttggcacagaagcagctgggccggtgtttaaagctattttcatggttggattgatcacaatatgtttgatgccagccacaccttctggatttaccgaatatctaattccctatatattgtagtcactttagctagttttgacaatttatataatttttctcctatgattaataatttcctacttatagacttgaaacttagaataacagtgaagtttccatctcacaattaatcttgaaaattgctcacatgtgtatccatggggcccttgaaagtctgaccagcaaatgtgattttttactcttgctttttaaagttttatgcctccagtcttgaaagcttaccaaccttgtcctcgcactcagagtcctgtgcccccacccacctccatgatgaagtccttattgttgctgcagcttttaccatagtttcccttcggctgtcaccctgcctccgactcttccaactggttgagtatgggggacacaattcctattgccatggctggaagacatatattcctggagtctcaaactgaaacttcacatacatcttccctcagaaatgatgactgggtatagtcaaaatagttctctgttagttcaggagttgcataggttaaatataggcatatctagacaaagctataaacctatccaccattaatttatgacattgtttctacaagataatttattctgagtttcaactaaacaatgaccttggaatatgtctgttttgtaaatttgaaactgcctatattagaattctagtaacttgcattctttaagttggcagtaactaggcagcagagtgaagtggcccatgtgtgtgttgggaagtagtggagaagctgacctaccatgaaaatcctgtagctgatctccatagagtttgtatccagatactcaagactggaatgcacatgcataagtggcccagggcctgctaacaaagggcaggtgtaaaacgattgagctgacctttgaggagatgggggtttacaagtgtcatacatttcccttacagattcttttgagcattctgtcccaaaactattgccattgtgggaacaaaggtattttatcatccgatctatgaaggagataatagtctggtataattggtgttgtaaagactagcagcgattattactagtttttagccttgagcaatagcacttaattttatcaagtcctagagagtcatcctcctctacaatcacagggcacagaaaagtatgatgatcctttcttattgagaaaaaacaaaaaaacctacatatactccagagacaatgctaagctaactaatataattgcattattatacattcatctttggcatgtatgcttcaacatatctttctttgcttccctttttttttttttttttggtgctttacttggttgcccctgcttatgtgagctccagttgatcacaggggtgcagggatagcatgttgtcaaatgaacagagtgaggaatttgcaaaaacccttgaaaaacatttttgagctccaggaaaattggagctgaaaagataactaagacaataagtttgcagaaagggaaaagagaatgagagaataacaatatattgttataggttcacctttctctgagcagaggaaatactgctgtttcggacttcaaaatgtaatagaggcatatttatgattcatataaagaggtctgaaataccctggaggaactgcctacttggctcaccctacaaatttccagggatattgaagtcatctgtgcattattagcgtattaaagattaatgttcaggtttatatcattatataactcgaaacagaaaagtttacttcatttgtttttgagaaaaaaaagttccctgccagattttggtaggaggagtagggaaatattttgactcatcagagtccactgaggttttctatattacagagaaaaattacctgaagagtataccacccattaaaaagggtgaaattaacttgttgtttaaaagacctttgattaattgggaaaataagaatatacaataaggtaagtatttataacctgtcagtatcaaatgggaataatacatccaaaacagaccacattattacaagcatcaccatttaccttgctgatggtgaaatcacataaaaatgaacgggagacaaatctaaggtatgacttttagccctttaatattcattttgcagactgttcacaaccaagttttaatctcgaattgctttcctttgccacccagcaagcttctgagttgcttccttacgctgttctttggaatgtgccccgggaatgtaaactcattttaatattggcctaagtaaaataggattataaaggcaaatctgtggctcaagttcccataatgcatttcaaaagcaagttaaattattttgggattatcctgtttgggataacattattcctttctactagcatagttaatcaagaattgacaaatgtattttgtgaagtaaacatgaaattacacaattatttgtcactttttattaagttaccaaacattcacttaatgctggtgtaggtgttataggaaagcaatggcaatatgaatcaaattttagtagaggctctgtcatttaaaaaaaggaaagagaaagaaaaacaactccaataaaagcaaatgttcctaatcttagtataatgccaatagggtagttatatggagcttaatttgcaggtttctgggaaaatatatatgaaatccagtgtatcatataagacagcaagaagtcccttttaaagcacatgcaatgtgctatatatggacatatgaaaatatttttggtattaaaacaaaatagtaaactaaactaggtgaaataccttcctaaccttaaatatctattttaaaatgtagctgatatctgataacactgtaatactggtactggtctagcctaattttgcagcgaattaacagttactaatatgcagtctcacagttaactgtggttatcacagactcctttcttcctgtgtagaactagatacataaaatgtaaaatttcctaaacccactgctgacaggaaagcttaatacctttactaatctatggcatttttttgagacagggtctcactctgtcacccaggctagagtgtagttgcgcgacagggtttcaccatgttgcccaggctgttcttgaaatcctggcctcaagggatccacctgccttggcctcccaaagtgctgggattataggcatgagccaccatggctagcatttttttaaacttctaatctacaagaacaaacctatacattgaatcttaatgaagagacacaactagtaagagggaaatgtactgttcccactcagtgcttcatccagctgcaaatttgttacattttaaaaatccttgagcccaggagtctgggtggggctgcagtgagccataatgatgccactgctcttcaccctgggcagcatagtgagacctcatctctttaaaaaaattgtaaaacctttgatgagaaaatgaatacttaaaatgtatatttccagtttaatagacaatcttgtacttgaagcccactctgggggatgttttccatggattcttttaagatgtctcaaataaaatagaatacttggtactttgtggtgacctgatcttaaggtaacactggcatcccataatcaatttgctgatcatttattcctatcccttctctggtccagcaccttcttctatgtatctgatcaccccctgccacactccccattatgcacccactcaaaagcagaaagccaagagaataatgctggaacttttttcttttattaaacagatgggaatttcaagtctcctttgcaggtatgactttgttctattagaagaaattcaatgattgagtctagagaccatcaccaatgctgtacttaaatcctatgacttgtgccacataacctggtgaaggcagagtcaaacatgtagaagaagaagaaaaaaatctgtttctctgcacaatgcctggctcactcttgggctccactggaagaaagtagaacagtgcacgcacgtgcaaagatgctgtccaccagaaatgtcagtgacagcctgggggcaagaagaataactgcccttgtgtctttgcccagctgatattcctcacaggcagccagcagagttgattaaccatgtccatgcccaggcagtctcctctgtatatctctcaaaaacttctagttagattttgttttgttttgtgttgttttgttttaaaacagggtgggggtgacagctctccacattaattctgcaagtaacttttgttttattatctttttcctagagtgattatattgccacaaaaacacattttagaagaaaagtgatgcttatggaattttatcttcgtctactccagatctgcctaaaggaaagaaaactcagaggcttctgagtagaaagcaacccaaatttctacaagcctacaagtggactctggcaattgaatgatcctattcatgcagatcattcatactgctgcttatggatccagtgatttctaattaacaatatttacactgtgctttgttttttgttttctggttttcctccccagtctgtccctttgaaaggaaacagatactatacaagtgagcatctcataactctttccctctttaaaaaaaagtaacttagaatacatataaatttggtcaatgccaattttaataatgtaaaatatttagattcaattttgaagttgaaaaactttaaaccagggcacataaagaaaaaacagctgtcataattggaaggaaggtatgatctggaatcttttttccgagtattacacacacaaaacatttcttgatcaatgaattaaatgtcaactgaactgatatcttgatggggcattaccagtattttaaaggcaggactaaagggcagattatttcaagttttgctcattagcaaaactgcaacattctgctcatgttatatgtcaatgaaactaatatcttgattgagcatttccaacattttaaaggcagaactgagaaacagctatttgttcacatacaacactgtgatgttctgcctgaaaatcgattgagtatttccaaacctattatttttcatttattgtgaaacctacatttacctcctaaaagaaacaaagctcttcaaaagtctcttcccaaggcccctccctgcttctctgggcctctccccactttcaacctctattctactttttcttattctttctccattttccccaatgcacactcttcctcttatgcccatggctactataaagagatcaatttcccatattcaagaaattagtgtttacttatcaatcaatattctgacaaaaacttaagccaaaaagaacctcttataaggccttgtttccttctggatattgagccaatataagatgtaccaaattaaaaaaaaaaatcagagcaagctcccccccgttctatttttgcttgcctctgatgtaaactgaattaagattttaggtacctggacctttgagaacgtgacactagcaaggtggtgaccacagagaataggtacaaaggtcttgaagcttgcttagagctttgttccgtggtggcacacaaatcttggcttgctgtaccatcattggcaaacctcatcatatcacagttgggtgtgtttgtatgtgtgtgagcactagtgtgtgtgtgtacatattcgtgtgtatgcacactttgtgtacctgtgtacatgtgattgtagatgtacctgttgtgtgtaaactctgttaaaatgaaatttgcttcgcatttaatgtgcaactttgaagtagtgtaatatttatctaaaggttttcactacttggttttaatgtctttgaacgtgtacttctatcttcaagcaagcttatagtacgtgttgctaaactaacttttccaaagaaccgagttgacttctatttttccttgcctaccaaccaaagggatggtgggctcttttttccctcttgtaaattgtgctgaggagaggacgtggctatgagatcagtcattgttccagttactggtcactgctagggcatcaactttatcagttccttcagactcttctctttttccaacctaatcaaataacgcagtgtggcttttgttcattataacaacgcgctctttaggcaactttttttcaagccttctgtcaccattttattttttcaagtaagttaagtaataattgttcagaattgtgggaaaaaagattacttgggggaaaatactgtatcactttatttgcatattaggttcagaagctgccagcagacagggtacagagggtacagcacagatgtaacagttgctgaataaatgaatgagaaacctcatacacagtagtacgtattatacaaatagtaacaggtacacatagtcacaggtactgcataacaaatgcaatcttgttctcattatttattagtttacagacaattaatttattcagtattgtgctggaagaatctttgtggaatatgtttaccaacttatcacttaccttccagctatcagttcatgctgctaagaaaaaacaatgatggaatatttttgtgtgtgtgacctctacatttaatttgatatcaggcatagtcacttggtcgttaaaaactgaaactttacagttccaccagctaattacatctgctatttctgcttcacagatatgctttgagttgctttggctttgtcttcctttgtaaatactcttgtactttcttttccttgtaaacatctcgtttgcagttttgggagacgactttgcaactctgtatagtgtttatatatatatgtatatctatatatatctgacttgcctttccatacagctactcacaataaatgtgttcatgtaaattattcctgtagagattcattttttaatactattgtctctactttattataaatatattttcctgctttgtagtaggattgactgcatttttcagaatgaaacaaatggggtattttagggtttgggctaaaggtactttgcctagaaacatgaggcttttcaatagagtcaataaagtcaactcttgatttttcaaatgtagaggtgatactagtgtagaacaatttataaaatgacttacctaaaatttcatgcagaccttggataatgagtgaatcctatattgaagcaactactcaaggaggttgaggtgatcatttactttttttttttctgtctccttcccttgacacttaatcttgctctttaaattactctttttttttttttttgttttttttgagacggagtttcactcttgttgccta

SEQ ID NO: 50641 - DNA, 1028 bp, Homo sapiens
ctccattgcgccggtagcaggatccgcagcggccgccgcgtgaggctgtggtcacgtgttgttttgcccgctgtcgtgcgctcagagtggagtgggcgggggcgcgggccaaggcaggagggggctggggcgggcagacgagggtagacagcctcttcccccaaccctccctttcctgaattccccctcctcctcgctcaccttaaaaccatcgtgcatcaccatggcgagttgctccttcactcgcgaccaagcgacaagaagactaagaggtgcagcagcggcggcagcggcagctctagcagcagtggtgaccaccccgcttctttcctcgggaaccccgaccgcactcattgggaccgggtcgtcttgtccgggagccatgtggctctccacggccactggctcccggtcagactccgagtccgaagaggaggacctgcccgtcggggaggaagtctgcaaacgcggctacctgcggaaacagaagcatgggcacaggcgctacttcgtgctcaaactcgagactgctgacgccccagctcggctggaatactacgaaaatgccaggaagttccggcacagtgtccgcgccgcggcggctgcagcagcggcggccgcctctggcgccgcgatccccccgctcattccaccgcggcgcgtgatcaccctataccagtgcttttccgtgagccagcgagcagatgcaaggtaccgacacctcattgctcttttcacccaagacgaatacttcgcgatggtggccgagaacgagtcggagcaggaaagctggtacttgctgctcagccgcctcatcctcgagagcaagcgccgccgctgcggcacgctcggcgcgcagccggacggagagccggccgcgctggcggcggcagcggcggcggagccacccttctataaagatgtgtggcaggtaatagtcaaacccagggggctggggcacagaaaagagctgagcggcgtgttccggctgtgtctaaccgacgaggaggtcgtgtttgtgaggctga

SEQ ID NO: 50642 - DNA, 1022 bp, Homo sapiens
tttcatatatggcttttattatgttgaagtaagtttcttctattcctagtttgttgagtgttttttttttattataaaagtgtattgacttttgtcaaatactttatctgaatcaattcagataatcatgtagtttttcctttagtctgttaatgtggtgtattacattgatttttgtatgttgaagcatccttgcattccagaaataaatcccacttgctcattaggtataatccttttactgtgctgttgggtttggtttgctagtatttttgttgaagatttttgcctaaatattcatcagggatgttgatctgtagtttttgtttccttttgtatctttgattttgatatcagggtaatgctggcctcatagaatgagtttggaagtgttccctcttcttcagtttttgggaagaatttgagaagaattgatgtgtattgttcgctaaaggtttggtagaatttaccagtgaattcttctctgagcaattttgttgtttttgttggaaagtttttggttatgattcaatgttcttattagctatagatctgttcaggttttttattttttaattattcagtcttgataggctgtatatttctagaaatttatcaatttcttccaggttacccaattttgtggtgtataatagttcatcataatctcttacgaccctttttcatttctgtgacatcggctgtaatgtccttctttcatttctggtttttgttatttgagtcttttcagttttttattagtctggagaatagcttattgattttattaatctctttaaaaaaactcttattttttattcttttctattgggtttctcttctctctttgttttatttctgctctaatttttataattttcttctgctaactttatgtttagtttgttctttgttttctagtgtcttaaggtataaagttaggttgttgatttgagatttttcttctgttttgtgtaggtgtttactgctataaactttcctcttggtactgcttttactgt

SEQ ID NO: 50643 - DNA, 1026 bp, Homo sapiens
tcttttgtttgttcatttgtttttttccccataattccccccaccctgtgtgtctgtttctgagactacttttatatggctgttggacttccagctttcatcctctaattttattatcctttttaaaattttctatttctctttttgttttatattctggcagagtctctcaactttatcatctcttctgtctactgaatttccaatttccactatcagaattttaattttcaagagcttgttcctgtcctctcagtgttccttttaatagcaccctgttgctctttcatggatgcagtcaatgcattgtctcttattcctctgaggatattaaaaggaatcctttttatgtagttttcttctcctgttattgtctcttttacctccaagttgcactttatgcttgccttggtcattgagtcccaagtgtctgctgatccttgtatgtccatattcaggaaccaggtactaaaaaactgtttggaaagcttactgggcttcactgaaaaggcattccaacgttagtgtctttttctcttaagtcattctgtttctccaaaggagatttctccagtcttttgcccgggcaatattagcctgactgccagaattctggtagccaaaagaggtaaaggagttattgagggggatgggagagcagtgggtctcaccctcactgaatccttctcttttcagccttactccctccttctgttgtacctaatgtccatgagtcccgagtctctgcttcagtttttccaaaaagtagacctgcctacaaatggctttgagaagagcagcatagggtgcgggagaacttttctctaaacaggctggagaccagtgctgctctttccagctttacccctcatctcttatcttcagaggcacaggcttagtgggcacttgcccgggctctactatgagggcagtttgctgcttgttggcaacctcttttgttggtagttgctttggcttcctcagccctaagttaattaccacaaattcctttgctttttgtcttct

SEQ ID NO: 50644 - DNA, 1038 bp, Homo sapiens
actgcagattgaaatcacagaagatattcgtgttcttcttaagagaaaaagaggacatttgtaagtatttgtcctttagaaattctaaatgtgtaattttattagctttttgagaaaattaagttcccacactaacaggcatcttgaccctttttatagaggaaaaactctaccaatatttatgattgtgtttaaaaaggcagtattttatagagcaaaataggaaaacattttaccctgtgcagcttctaaaatttaaaccatttgccactcatttgtaaaagaacaagtggtaattaaaattcaaacaacgtctttctatttgagtcatacccaaaactggagtcagggattggagttctggttctgactactgaggcttatagaatatgtgtctttggtaaactacttagtctctcattatctcagtttccttatctttaaaatgggtttaacagtaagtgcacaatcaggggttcattattattattattattgttgttgttgagacagagtctcgctctgtcttccaggcttgagtgtagtggcgccatctcagctcactgcaacctccacctccgcctcccgctcctgagtagttgggattacaggcacgtgccaccgcgcccagctatttttttgtatttttagtagagacggggtttcatcatgttgcccaggctggtcttgaactcctggcctcaagttattctcccgcctcggccttccaaagtgctggattacaggcgtgagccaccgcgcccgtcctcagtggttcattattattgatggagttaaatccatagcagtttatgcttgccccgatacgttgaagcttattcttttttttttttgccccaagatggagtcttgctctgtcacccagactggagtgcagtggtgtgatctcggctcactgcaacctctgcctcccgggtttaagcaattctcctgccttagcctcctgaatagctgggattataggtgcccgccatggcgcctggctaacttttgtatttttactagagaaggggtttc

SEQ ID NO: 50645 - DNA, 1896 bp, Homo sapiens
cgctctgttgcctaggctggagtgcagtggcgtgatctcggctcactgcaatctctgcctcctgggttcaagtgattctcctgcctcagcctcccgagtagctgggattacaggcctgtgccaccacgcccagctaatttttgtatttttagtagaattactaaaaattactaaaattacatgttggccaggctggtcacaaactcctgacctcaagtgatctacctgccttggccttccaaagtgctgggattacaagcctgtgccaccatgcctggccaggaaactagcttttttgtttttgtttgtttgtttgttttttgtgagatggagttttgctcttgttgcccaggctggagtgcaatggcacgatctcagctcatctcaacctccgcctcccgggttcaagcgattctcttgcctcagcctccttagtagctgggattacaggcatgagccgtcatgcctggctaattttctatttttagtagagacagggtttctccatgttggtcaggctggtctcgaactcccgaactcccgacctcaggtgatccacccacgtcagcctcccaaagtgctgggattacaggcgtgagccaccacgcccggcggaaagtagctttttaaaggaaacattcccccaaagaattgacttcattataggtggtatcccttaaaatacagactgtttcagaagaggcagcagcagaatgaaaactttcatggtgaattccccaccttctattttattcctgttttgaaatggagttccccaacatcaccattacagctcagccatatctttgcatttctttgtggacttagttagaactgaatgattgatgattttcagcgcgaggagtacaaaataggggagttgatacttgcatcagccctgctagctgccttgaatcctagctcagtaggggtcactcttaagctgccataggcataacaacttctacataggtggcacttctggcactttggagaacattctagtggtgggatagttccctaacccctgtcttatctctgtggtaccctgcatctatgccatttttgtttggttacataaaatgtttctgtggagtgattggcctatgattgcattgataacatttagtaaaacagaagatttgttcctaacacgttttacagagctgatctttttattgaaaaatccctaaccctaaagaccacagttttttgtttgtttattttgtttgttagcctcatagggataaagtgcttccttataatcttgtttccaattgtcttcaactgaggaagaggaagtctgttgactgtctccctgcaccccctctgattgaaggatcaccttgcttagggcactgccagcttaaaagtggaggtggatgccatactaggacattaccaaagatgaggaggagtggcagtgaacttagagtctatagccagagtgtacattgaattttaaaaaccaataatctgagatctagtctgtacttaagagacatatttaaacaacaaattgtagactatgggatttcttttctttctttttttttttttttttttcttgagacagggtttcacttctttcacccaagtgcaatggtgtgacctcggctcactgcaacctccaccttctgggctcaagcaatcctcccacataagcatcctaagtactgggaccacaagctcatgccaccatgcccagttaatttttgtattttttgtagagacagggttttgccatgttgctcaggcaggtctccaacttgtgagctcaagcagtttgcctgcctcagtctcccaaaatgttgggattacatgagtaagccactgcgcctggctgactatgggatttcttaagctaagtagtatattgaaaagtctgcagtgttt

SEQ ID NO: 50646 - DNA, 1724 bp, Homo sapiens
aaaaaaaaccccaggtcaggtacagtgcgtcatgcctgtaatcccagcactttggaaggccaaggcaggcagatctcttgaggccaggagtttgagaccagcctgggcaacatggtgaaaccccatctctacagaaaatttttattattattattattgagacggaatctcgctctgtcgcccaggctggagtgcagtggcatgatctcggctcactacaacctccgtctcacagattcaagcgattcttctgcctcagccacccgagtagctgggattacaggtgcccaccaccacacccggctaatttttgtatttttagtagagatgaggtttcgccatgttggccaggctggtctcaaactcctgacctcaagtgatctgcctgcctcagcttcccaaagtgctgagactacaggcgtgagccaccacgcctagcccaaaaaatacaaaaatttagttgggcatggtgccatgtgcctatggttccaactactggggaagctgaggtgggaggattgcttgagcccagtaggtggaggttgtagtgaactatgatcactcacgtcattgcattccaccctgggtgacagagtgagaccttgtctcaaaaaaacaaaaacaaaaattagccaggcatggtgatgcacaactgtagtcccagatacttgggaggctgtggcaggaggatagcttgtgcccgggaggcagaggttgcagcgatccaaggtcactccactgcattccagcctgggcatcagagcaaaaccctgtctcagaaacaaacaaaaaaacaaaaaagccccccaaaaataaataaaccaaaaccacacacacacaaagtttgttgaatgagtatatatataccactgatgaaaggaaggtgaaatgtttgccatacatatttttatgatcgtttacctgaaattaaccttttaaattacataaccaattgttctaaatcacattagataaaagggtttctactgcataatatccataatatataaagagctcctaaagatcaataagagaaaggtacccactacaaaaagcaaaaagtggcagaagattatacatgggcatttcccaggaaaagaagtactggtgaataaaaaagaaaagatgttcaaattgactctggttattagggaaatgtaaaccgtttttcaccagacagattggcaagaacttaatatccacttttaacaaataggcatttgcatacactgttaatgagagttcacatgtataactctttgctgaagaataccaaaatcatctcatttttaaatgtgcatacattttgacccaatagttttattagaaaacaattctagggaaatattacatgtgtataaaactatgtataaggtttcgctgcagtgaaactgtttgtaactgtgaaaatttggcagtatcctaaatatccatcagtagggaatgatttaaataatggtaagttatactgtggaataccattgagttattaaataaaaaaagaagaaaagcctcttggttagacatatatatacactgacataggagttccaaagtatgctgttaagcaggggaagagagggggagggagtcaaagaacagttgtataccataattccacttatctaaaaataaacccttatcatgtgtatgggtaatacaaaacaatctgattgatacacatcaagagtaattatccctagaggaaaagagagtggtgttag

SEQ ID NO: 50647 - DNA, 1028 bp, Homo sapiens
tcccttcagtgttactatatttactcaaatatgtgtgcagtgagggaagtagattgttatttgaaaaagataaaacattggtataaggcaggggctggcaaaatactgcctgtggccaaatcctgcccaccaccggtttttgtaaataaacttctcttggaatatagccacatccattaatttatgtgttttctggccgcattcacaatacaacatcagagctgaaacagagcccttatgtcccgtgaagccaattttctctctggacctttacagaaaaagtgctgaccccagagataaggtaaccttataaattgttgattacacacacacacacacacacacacacacacacacacacacacacacacacacaatttaacaaactaccctgactttttataccttctggttacatttccaggtgatattgtgattcaggagagtgcattcattttctttactaagtctccaaagcactgtggtctaggagcagcaataaggaatgcatagagagttgagacggttgattttgttgttaagtgtgggttatttaaatgtgaatgtgaatttacatgtgtggcaatcagtaagctgcagatagacttctatgcagtctatgatgtcttttggagaccctgttgtgagctgtagcggtaataagagagccaggcatggtagtgtttttgctcctgaaactgctatgtgatctttaagtacatagtagtaagagcctatcaaactgagcttagactgttggtttattattttgtttgtacaacttccttttttataacgaagcagttgacactttagttcttttaagtgttctaagtgtaatgttgaaaatggaaattgagtaaagacaggtggctgtgtatttagaaagtaataagtctccatctctcatcatacacaaaaataacttaagaatatattttaaaaatctaagtatatattttaaaaaatcttctggaaagtgtaagacatcataacccagttaaaaagacaagtgatggccgggcact

SEQ ID NO: 50648 - DNA, 1062 bp, Homo sapiens
attttaacctgaaatgtgaagtcctgtgtatgtttatgccacaggggaaaacaaggagattattacagaattttaatacagaatgttaaagttgaagatagataatgagcatgttttatacaaacagaagcttctaacgtagcacttttctggtggaagtacagtttgagaattgacccccactggttaagtgtgttactgcagtggaattcctaattaaagggatgaaaatgcccagattaaagcaggaagagggcaaagtctagaagtcccaaagcatagaggtagatatcttcgctaccaagacagatatccctgtggtcatgaggatgaggaacgtgaccacgatcagtggtaatagccacccagttttcagatgatcaggaaacaaatgaattgccacgcgtctggctaccatcttactgtctttttcatgcaaggtttttaactcggtctatttgggaactttcttctgataacatgtctctaattttataatggaagttagtaggaaagtaggatttactttagaccttgttttaggagctagagtgcttctgtttgataatgtgagggatgtttgacaaatggttttacaaatggctgtaactaatttcaagtcaatattgaattgacagactaatcaataatgcttccatatgttctatttcctcagaatagtaattataacatttaaaataagtgtttatgggtagcctctgaaggaatctgggcagtcattaaaaataacagccatccacaaaaggcagtaaggacaaattagagcagtggccccacccttccaagaataactgatcattgcccacatcatgatgtacttattgtcctagtaggtatgagaaggatgaagagtgaataatttgaggaaaaatttcattagctgataaattggaatgtctacctgcaaggctaaaatggttgttaaatgaggaaaattgctcccctagataaatctgacatgatatgctttgtgtttgaacacggaaactcatcaccattgttctgtgttcttcagttgacatcattttcttaattctgaat

SEQ ID NO: 50649 - DNA, 1111 bp, Homo sapiens
gtacctttgacatcttactgattctttttgaaactcttacctttttcaaacaattgtttgcatttgaaattgggaactttcatatccagtgattgctttaatatttgctttgtttttaacagtgcccttaaagatagccgttttcccccaatgacaagggatgagctgccacggcttttctgctcagtgtctctgctcactaactttgaagatgtctgtgattatttggactgggaggtaagattatagaaaaatttttaaagaaaaatgaaggtaactcttgaggagatgttaaaaattaggcccagaaaataactctttcagcccattctctattgtaatggaggtcgagagtaatatggatgaataaacctcacaactgaacgagatataagtaaatgagttttttaaaggacaaagtgccacgtgttgttataatccccaaactgaatttggttttcatttttctcctactacctcaccaaagcacctcataaaagctgttaataagtaataagaaggactgactggaatttatttctcctcttactttcattctggtgcactctggtataaccgccactaagtaactagttggtcagaggatacatctcagaaacaagaagaaatatttaggataatacaccatttgggggaatcagcttgtgataacaacaaggtattgattaactagagttaaataatgtgaattcattcttggctaccttagtttatacacttaaacactctaacaaataatactaaggttatttctagggtatctctgtgcattgctattgttagagtagcttatattgatcatatttttattcttctttagtacatggggttggctaacattgttagtgaagttcaaaggttctcaccatgatttgctttggtggctgggaggagatgttgagtgtaggtctattgggtctatgaaattttacacacaagcatgcccatattactgaatgcctgttttattccaggcaatgtgctccatgtataaaagtggtaagatttggttcccaccatgaagcatgtcataatttagtggcgagtaaatgtgtatagaaagtatgaagaaataagtgctatgagaatg

SEQ ID NO: 50650 - DNA, 1046 bp, Homo sapiens
ccaaaatgtggtgcaaatataaaaacgcagtggatgagcttcaaaatgcaaacaaagggatgggaaaatgaaaaaaagaaaattcagcagtgagaaagtcactgaaaaaggaattaaattctttccaagtctatggaactatgttatgacccaagcagtttgtagagtctgagtttgtaacctctgaggataaatccatgaaaatatttctaagcctggctactatctaggacatttgaagatggatgttatgaataccagtagtgccattaatatagtaggcaatcagaggtatgtttgtttttcttaatcaggaagtggtttcttttaaaagtataaggaacacacactgtgtgtgtgtgtgtgtgtgtgtgtgtgtgtgtgtgtgtattttctattccgttgcaggaagaattatggtttttccacattttacagtggggttttctagagtttggcactatgatatcctacacttgattacaggatccaatcagagttgatgtactcagaaattcattgacatgattaatggtctcctaatcatacttttatttcctagattagccctatttcctgtagtttcacaatttttgagtcatatgttaaattatcctttattgggggcctgaaattcttatgagtatttttagtctataatttgcatgattatttcttttctttgttttttttttaattgaagaaaatgaaattttgatcttcctttgaattctttgagtgctgttctatggtgactggccttcctagtataatcttttttaaaacaatattgtatatatgtgtatgtttgtatacatatatatgtatacatacacacacacatatacacacacatatatatataattttactgccaccagcactagatccagaaatcttcctacaagtttccactagtctagtttttattcttctcaaaagcaaaataaaacattcttagattctacaagtagcagggaaagacatcaggaaatggctgtacaggaaatgtaattgatgattctctctttacaattgaagtggtc

SEQ ID NO: 50651 - DNA, 1029 bp, Homo sapiens
attaaaacttatacatcaattccctagcagcactatttataatagccaaaaagtgggaacagcccaaatgtccatcaaccaatgaataggtaacaaaatttggtgtatccatacaatgaaatattattaggcaatgaaaagaatgaagtactgatacatgctacaacatggatgaaatctcaaaaatatgctaagtgaaagaagccagacgctaaaggcaatatattgtatgatttcatttatacagaatgtccagaataggcaaatccatagaaacaaagtagattaatggtttccaggagctgggagtggtgccaatatgcagtgactgctattgggtacgtagtttcttttaaggatgatgaaaatgttctaatattgcataatggtgatggttgcacaactgtgaatatactaaaagccattgaattatatactttaaaagggtgaattttgtggtatgtgaattatatctcaataaaagtgttatggattaaaaacattagtgactgtattactataactatttgaaattataaaagtatatttaaattacattttatgccaggactaggggcgggggggaatggggagttagtatttaatgggtgcagagtttcagtttggaaagatgaaaaagttctggagatggaagatagtgatagatacccaacaaatatatttaattttacagaactatatacttaacaatggctaaaatagtaattttatgttatgtatattttaccacagtaaaaaaatccataaccccctaagattatattttatattattctaatgaatgatgtgtcttttactctttttcttcttttaacagtaaaactgaaaatgtgattggccttttgttttttatgcatataattcttctggtctgtattttagaacttctttcctgtgtggcgttgggggatgcgggtggttacacacacacgtctttatcttggctttgaatgagaacttggaagtattttttaaaacttttatttgtcagtaggaaaataaaagaag

SEQ ID NO: 50652 - DNA, 1361 bp, Homo sapiens
tccatctcttaaaaaaaaaaaaaaaagaaaaagaaagtttccttaaaattttggctaataaatttcccagcaaaatgcagatctatttctttatgtaaattcaagttggcagtaatttttctagaacacattaagtaattaatagatgtattcttattcagcaaaacaggattgtggtctgtcaccacacttaaaagactatctttttttctcctttgttgtacttagacctctcggcagtgaaataattatgcaggtgctggcagttctagaacttgattgtgaactatgccacttttgttgaactacttaattctaagaaattagcaatgaaagtttagccctttctagggaacagtatgaccacataaaaggtgatgtgctgtgttttgttttggagttttattttgttctgtgtgggttagtggggttgtgtgtcaggggagtttgaggggggattgattgcttgcatggtacaaatattcactttccattagattttttgagatactgaaaatagctaacaaacctactttattactttcaaaggtcctagctagattgggtacttatgggattcattgtaaactgaatttgcttttatattttggtgttgtaatctggcatttttctaaagcagtatgagtttaaagccattataagcagcataatattttccctgtcatagtagaccatcgtgtgatcatttttattcttgattatttgggtaaccactctaggctcattgtgaacacttagattaaacaagttcctcctccctctcatttaatattagtctttatggtagcatcacccagattgatttttcttatgaaaagaaaagctgtatgaatcacctctgactgtacattattgttatggaagctcattctggagatgttaaggccaaacaatttttggcaagtggttgtggcaagacttctggctaaagtatgcattttggggaaataaattagatgtatcacaaacaatgcaaaattaattagtttaatttacaacctacattttttgcctttttataaaagagatgatggcctgagtcctaaaacttatacctaatttgatagtttcagtttattaattacaaaatgagaaacatttgtcagattttataggcacttaatttaaggtacagtttggaacctaggttgttgtacgctctttactcaaaattatccacatgaagcatggtgaactatctgctcaaactggaatcctcattttagccatgaggttaatgcactccttcgttatcccaaggttgtgctaatgtgcagagatgtagccacaaaattcccagcagaatgtggaaactaagcagcaggaaccatttgcagaat

SEQ ID NO: 50653 - DNA, 1057 bp, Homo sapiens
cattatgtatcaactgtgagactccctcatctgtaaataggaatgttagtatcagcctcctagaattgttgatgaagactaacataattagtttgtttaaaacatttattgagatagcaaacatataggatacactcaatataatgtagtagtagtataatataacttttgctaaatgtagtcctattgggctggcctgtgagccccttgaaggcctgtcttttggtctttatatctcaggcacctaacctagcagacagtcaatactcaataaatacttgcttgaattgaattgatttatttaccctatttttatcttccattacagcccactgtttgtaacatggaagattggtcgagacaaaagattacgtggatgcataggtactttttctgccatgaatttgcattcaggactcagggagtacacacttaccaggtgaagaccaatttttgttacctctgcttttacattaaaaaaaaaaacttatgaaacttgaatctgatactttaactccttttactgaattgtcaacgttcttgtcttccttcatgtcaggtttttcctttgtctttaaccatttaccttttctctggtaaaatgttattgatatatattaccataatataaaatactgtgattaatgtattctgccatcgatgttttgaagtgttttttttttcttccagtggccagcttattttgtataacttgaaaaccaatgaccaaatgtccacgggttaccaaaatatgtgatttctatagtaacagtcattatttcttccctcttgtgttttttaaaaatagttgttgtctctttcatcttacacattttgttacacttttaaggacttttgaaattgaaaggagagcctaggaagaaagtgatgccacagcctagcagtataatcattcacattcacacttcacccagaattaattgtagcttgcttattttcttttatctaataaaaggacaaagtaattcctcattacagttgtttaaaactttgttcttaatttctgaattcacaaaaagctatctagcacacaatg

SEQ ID NO: 50654 - DNA, 1027 bp, Homo sapiens
atgcagccattaaaaaaagaatggaattgtgtcctttgcaacaacatggatagagctggaggtcattgtcctaagtaaattaagaaacagccaaataccatatattctcacttgtaaatgggagctaaacagtgagtacacatggacataaagatggaaagaataatagacactggagactccaaaagtgggaagggtgagaggggagtgagagttgaaaaattacctatccagttcaatgttcactatttggttaatgggtacactagaaaccaagtccccaccagtacacagtatacccatgtaacaacaagcacatgtaaaccctaaacctaaaagaaaataaagacaaataaaaaacgcttaactgttttcattgttttgtttgaagtgttacgaattccctgaccatcctgcatacacagtcaaatggaaataccaaaacaaagttccatacaagtttttaatggcataaaaaataggagttgactgtatcaattaatattcattctaaaatttctggacctagttcttctgttattcttagttttgcttaacatttagcttaggaatcggaagacttcaatagaagctcttttttgcctgatttgttttatattaaaataattaattattattatttttttgagatggagtcttgctctgctgcccaggctggagtgcagtggcccgatcttggctcactgcaagctctgccttctgggttcacgccattctcctgcctcagcctcccgagtagctgggactacaggcgcccaccactacgccctgctaatttttttgtatttttagtagagacggggtttcaccatgttagccaggatggtctcgatctcctgacctcgtgatcagcccgctttggcctcccaaagtacaagcgtgagccactgcgcccagcctaaaataactaattttttttaatagtaaagactaagtctcaaaccttaaagccctttgaacaaatgggttcagaataggacttccaaatagaaattacttcattttt

SEQ ID NO: 50655 - DNA, 1258 bp, Homo sapiens
tcactgagagaaagggaacaaacgaagtgagctctaccatcaccctgactttttgtcagcaggcagtttctagaccacagcattgtgagggggaacccaagcagaactgcaatcttgctgaattggtgagacagagataggaactcagggaggcctaggtggcagaaatttatggagcagagtactggaggaggaaagctactcagagacatagctccagaaatctgcatagatgttccccttatctctggctgaatatgaatctgtgcatgtatcaagggcaacactgtgaggctgggcagaaaacaactgctcaggagctataagctgaaaacttaccagagctcatacagacctgagagatatatgagttcctacagcaagagttgtgagcccttgttgaacacccagggcattccagagagactccagaagggtcatactttagtagtaaaggctacattaaagtaaaggactttaaataattatccacaaataatttaactgcatgacaaaatgaacttcaacagtctttgaagagaggacagcaaattccaaacactcaacaatataatgattataatatctggcatacaaaaaattactagacatttcaagagggaatacaatgtgacccataaccagaaggaagccaatccgtagaaacagaaccagaaatgatggttatagaattagcagacaaggactttaaaacagctattaaaatgtgttgaaggattgaaaggaaaacatgaatatagtgagtaaagaagtgaaagacatataaagaaccaaatggaacttctggagctgaaaagtatactataaaaaatgaaaaattcattgaagaaataaatagcaaattagatgctgcagaggaaaatatcaatgaatttgtatccataacaatagaaattatccaatctgaaacagaatagaaaaaatggaaggaaaaaagcctcagtgaactgtgagacaatatcaagcagattaacctacttgcaactggagtcccataaggaaaggagagagagaaataggcagaaaaaaaattgaagaaataatggctagaaattttccaaatatgatgaaaatgtaaatccataaatctaagaagctcaatgtatccaaaacagaaaaaccacactaaagcaattataattttttaattatttatttatttatttatttttgagacggagtttcactcttgttgcccaggctggaatgcaatggcaccatgtcagctcaccacaac

SEQ ID NO: 50656 - DNA, 1070 bp, Homo sapiens
gtgtaccccatcagcaccataatcttacattttccagatatggaatccgtttaagaactacctgcttaattatatttattataaaaatgataatctcagagtatccctacttcttcaaggtatccaagaaaggaaattaacaattttgggcgtctacctagtagaggtctcattgacccaaaatgatgatagcattaataattatacctttattgacagaattataatacttagcagtttccaggaactttttaatggatagcgtccttggattcctgtagcagttcatcaagtaggcagtccccatcttgcatatctgtgtccaaggatgaagggaataggatgattccttcatggtcttttgactgatggatagtggagctgagctttgggcctaagtcttctgacacccctcctttccctgccctattccagcacttttatccaactatgccacatttttttttttaatctgaggttctggtacatgatttctcaaattactagaattctaagacaaaatgtttcttaggtttcacctcattttatctctgagatgtttatgttcctaagagatagttcttacgtgtgggagttttaaactctacctagaggtcagagaaagctgtttatgcctttgatgtaaattttgtgcaccatacttagactatactacacattccaaaacagtatttcttgggcctagacttgtaacaaaactctctagtgtgatgtattctcattcactcttttatattaacctattttattctttcagcaaacatatttagcccttactatgtgtcaggggataggaataggaccgtgcaaaaagacaacctctgttttcttggagcttacgctgtagtggataggaaataagcaaatgggtagtgatgtgtactgtgaagaaaaataaagcacttttaaattttcgcccaagccatgagattactaaattgtggtatctatcagtgaccccttgtagaccttatagaccttctaaaaagttagttattgagaagatggcccaggaaaggaacattgtctctgacatccctgtgcagttt

SEQ ID NO: 50657 - DNA, 1089 bp, Homo sapiens
gtctagagaaattcagataagttcttacagaagaggagtgctttagtctttaaggtttctttcactttcattaagttatattcaccatctcataataacccttcattaactcttaactaatttaaatagtttgtaccagtccagcacggcctcaggtccattcattttctcagaattgttatatttaaacactttttacttcaatctctcccaccccaaatttgaagtataaatttaggaaaatcagtcaatctctctctctcttttttttttgttttttgatttgtttatttatttttttggagaccaagtcttgctctgtcgcctagactggagtgcaatggcgtgatctcggctcactgcaacctctgccttctgggttcaagcaattctcctgcctcagcctcccaagtagctggggattacaggtgactgctaccacgcctggctaatttttgtatttttagtagagatggggtttcaccatgttggacaggctggtcttgaactcttgacctcaggtgatccacccacttcggcctcccaaagtgctgggattacagtcgtgagtcaccgcgcctggcctaggaaaattctcctcttaccccttcttcaatatagtttctctctggagctttgccattttcaagagcagtaatcttgaatatttgaaagcttggtagcaccttcattatagaatttttactgtgtaaattctagcaatgtttatcactagcaaagttctttactggtcctgctggttttccatttttgggagatggtagaatgatgggaatggggaggtgtaaatttatgacttccaagtttttttttcaatcattggatttgagtgtctacagcagtgtataaacactgtctaactgggtgaattttggaatcagggcagtacaaatctaaaaagtttctagaattttttccagggtgattttaaagcagagaataaatgagatgtcccattgtaccccttcctcctgtgctttacctgaaagaaggtatctttttctcttatgcatataactgaaaccataagatcattgtggatttatttgatattattgttagttagag

SEQ ID NO: 50658 - DNA, 1023 bp, Homo sapiens
gtttgtgctatactcaggtttcagttagcgggtggcagccaagtaggaatctctgctgaaatctctcagtccaatgggaagaaagaccactactgaaaaagtaaaaaatggtctgttaacccatgcatgagttgtttttctaagtatgtatttctcaggcacatgctaacatgtgtgttgttgtctttttaaaaactgtatgctttttgaaaccaaatttgtgttataaatactaaaaccttagctgtagtggattatatttttgaagtgaattgcatttcctatttatagacagttttactttttgagaatttatgtgtgaaacactaaaacttgtgtaatgagattagtcagttcccaagttttcctgatttcaataggcattattatgtactctcgatgtcacacatgcttggctcttataaagcagcacaatgaccagggcttttacatttaaattttgttaaatagtctctttttcaaacttgtgtaataatgtctctttttgatactgttctgaatcaattaagctaagtaagtgaggaccagcagtaaaacccagcatctgccaagaatggaccctcaatgtgtaagctgtctttccacaatcagtaattgggcagttgctcacaggacactggagacagtgtgggaaaccagtggttgtgtaggtggaaagagtagattcccaacagtaagcttatttagagtttagcttctgtagttagtgttgctaagagcaaaaatgacccacagtttatgtagtataaagaaaataacccaaaggaagaagtacagtgtaatagtatagttggttgggtggagcatgttttatgttcagtccaactataagtggcatcttttgtatcaagtgtgggtgtattttctacagctcttaatgtttcagacattgaaacttgctcaaagttaaaaatgttagtgttgaatagctgagtggaaattatatgtcattggaaaaaaaaaccctgtttttgtaaaaaatatacattatcctgagtttca

SEQ ID NO: 50659 - DNA, 1142 bp, Homo sapiens
aatatttattagcttgagtcacttatttgtgacttttatgccttctcttggatgtctgtgatgtattaaagctagtcctgggatgatacttaggttggctctgcaaagtcatgggactgcaaaaattcactcctgtttagttcttgagctgttaacatgagtttggcaaaggctgctttagtattcacgctccattgctccaaagcatatgagaacacactttcaggaggtgctattttcacacattttacagtgagtttgggttaactcaatgactataacaagaattttaaaaggaaagtgagcttgaccagttcatacagaaaatgcttttgaaaatatcattttaacagtagccactttgcacacgtatttagatattattctattcaaacaccccagcccctggatttctttttcatggaattaagcagatgataggacacactttgaccactgtggatatgttgaaacggtggtggaagaataataactattatcatctagcagaccttgaatgtgtcatgtattctataaaacaactaatgtagagtagacactaaacatgaccaagtggagaatgaaagttcacttaagtggaaaatggactgtcttatttccatttatcttcaactcatttttgaggtgtactgtggaaaattcaggaaaacttcctgattatgggagggacataactaagcatttcaacagtgccttagtaactaccacacatttgtctttctgttttacatatttaacagcattgtgtacttattagtgttgctttatcctaagtgccataagacataaacagacatattgggatttttttttctcatagttattatcatgtcatgagcagtgtgtttcaggtcatgtctctgcccaccagatgttgtgcttttgacagttttaacttctcatacgtaaacgcacactcttttcatcctttcccaggacttttctctcagaatgtctgtaactggtgaaatcctcgttttatgggtttagaagctgtagatccatcagttagttatccttccactcagtattgaggggatgtcaatatatgaacaagctgtatggatacaaattcttcactgttgcccccatgttttgattacctacccaattgcagaaag

SEQ ID NO: 50660 - DNA, 1069 bp, Homo sapiens
tattgaatagggattcctttctccattgcttgtttttgttgactttgtcgaagatcaaatggtctgtgacattatttctgggcttcttattctgttctgggcaattactttttagatacaacaccaaaggttctatccaagaaagaaagaattgataaatttgacttcatgaaaattaaaaatttctgctctgcaaatgacactgtcaagaaaataaaaagccacagactgggaaaaatatttgcaagagacatatctgataaaggactgttatccaaaatatacaaagaactcttcaaactcaacaataagaacacaaacagctctatttaaaaatggaccaaagaccttagcagacacctcacccaagaatgtatacagatggcaaataagcatatgaaaagatgctctacatcatatgtcatcagggaaatgcaaattaaaataagagtgagataccactacacacctattattatagaattgccaaaatccagaacactgacaacaccaaatgctggtgaggatgtggagcaacaggaattttcaatcattgctgatgagaatgcaaaatggtacagccactttggatgactgtttggaagtttcttacaaaactaaacatacttttaccgtatgatccagcagtttcactccttgatatttaacatcccaaattttaaaatgtatgtcccacaaaaacctgcacacagatgtttataacagttgtatttgtaattacgaaaacttggaagcagccaagatgtccttcagtaggtgaatggatgaataaacttcggtaaatgcaggcagtagaatattattcattgccaaaaagaaatgagctatcaagccatgaagaaacatggaggaaatgtaaatgcatattactaagtgaaagaagccaatctgaaaaggctacatactgtttgattccaactatatgacattctggaataggtaaaactatggagacaatgaagagatcggtggttgacaggggttagggaagagacaggaatgaataggcagaacacaaaatatttttagggcagtaaaattgctctct

SEQ ID NO: 50661 - DNA, 2010 bp, Homo sapiens
gtagaggccattatcttagcagaagtaaatgagggaggtggcaggcaagtctcactttgccattggcttcatgagggctctgatggtgtctggttctagaaatatgggttttttcttcatccctaagtgttttctaacccttatttccatttagatgggcctgtgttccactccaatactctggaaagaaaaactcccattcagatcctgggacaagagcctgatgcagagatggtggaatatctcatctaaacggccaaatcaagagctgcagattatcagcaaaaatgcttttaatcattttcccccttttattggttcttgttttgagggtgaggacaagggttgtggggaggggatgttttttaacaggactttttattggaacaatgtactacttgagtaataccatgtgaacaccagtctattttggtatgcttagggagtacctctaaagacagattaatcagaatgtgctctaaagcttattgtttgaatttatacgaatactgggactgttaacaggtggctatacatcgacgttttcaatgtgcttaaatttgtttaaattttccatattctagatcattttttattgaagagcacagtatgtgtggaagacagtgtataacacgtagtttggaagtgggaagctagagagaattgagtgtgtgctgttttgtatagttactatcctgtgcagcagctggagaaagcactcacctcaggcttacaaaagggaatagtttcaggagctatgtaagctggaaaaaaggtagggagttttggggtgcagaagggtactggagctaattttttcttccagtttcccagctaccctgccccagggaattgtgtttgtcttcatttcagtggtgctttggaaatggattcttttggttccctcctggaggttcatacattcatatatatgctctggagtaatttatgcatttggataattaatatattgctttcagatgctgggagagtacattaactgagtgatgcgcaacttcctctctcttagggaattagaccatcagaggccttgatggagagttgcatggggtgctatatgcagacttccatggtttgtgtgtagccatgaacacagcttgcttgcatttagtaagaccaatcagcttagtgtttatttcttctacagcacagattcactggctgggtctccagtctcaaattgccaatcatttgcaaagtgaggaaggatctttgttgacaggttgaatgctttgaatttctggtgactactttgaaataacttgttttgtttgtcaaattctaagcatatgtcttaaaaggcatttttgactatcacctccaagggaatagcttgagaaacccaaagtactatgctgcagtcgggggagaggtggattgcagcagtatcctcaactacctcttctcactgtcagtgacaccatcttggaatacctttgggaagcagcaggaaatgtgcatgtgggtagagatcaaaggaggcaatggctccaagccttgccatagggctgcctccaaggacacagaaggatgccagttgccacaggtccctgccctgtgtcacctgtctgcccttcattaaggtgagaaatctgcagatagcatcattaagatcagttttaaggggtatagggagggtgagggaagtggggggtgttaggtaagggttgggggtagaggttttgggatgtcttagttagaaaccagattaatagaagagtaggcctgatatattacatcatgagccatagtggtgggaaagaactttagcaatatagccctacctcctcattttagtgatgaggaatctgagaactggagaggttcagtgactttttgaaagtcatacaacacagctaaccattatgccaatcaccatgcttattttgggaaactctttatcttttttaaattccattttatgaaaaggcatcttcatggtccagggaatatgtatcttgtaaaatgtacctggttggagtagcttgt

SEQ ID NO: 50662 - DNA, 1032 bp, Homo sapiens
tgcctggagttctcttgcagatccccattctcttaggaagtataatgaagcagtgccagttcattgttttctcggtctattgtctgatttccttgaagaccaatataattgcatcagtattctccctaatcctaataacctccctcacccgcccaccacacacacacacacacacacacacacacatgtttttccttattaattggtctttgagttaatggcctgagacactttcaaatggaacatgatggtcctttatgcagttagaactctggcaagagaacagtcactttgttggggtagacccattgatttggtgctagaatgtttcagatgtagattagataggaatcgagtgggactgactcaaaggcactatttattagctcacatgccctacctaatcttagctgatgtgtctgttgtttgcttctagtactcaggtgtatttaccaatgttcatctgtagccataagttacttagtataccctctgactttcttgaaagtctgacctttccccctctatgacttctaggagaataaaatggaaatatatacatattccttttttttttttttttgagacagagtctccctctgttgcctaggctggagtgtagtggctcgatctcacctcacaacaaccttcacctcccgggttcaagtgattctcctgcctcaacctcccagatagcggggattacaggcgtgcaccaccatgcctggctaatttttgtatttttagtagagacagggtttctccatgttggccaggctggtctcaaactcctgacctcagatgatccacctgcctcagccttccaaagcgttaggattacaggcatgagccaccatgcctggcccaatatatacatattcctgttgcttggccatgatctaaaaacttgaaggggctatctgccagaaggttttgggatgatatctgttcagttctgaaggcaagtctgtgcatatctcatccctcactgacttttgcagccacttctatactaataacgttgccttctac

SEQ ID NO: 50663 - DNA, 1028 bp, Homo sapiens
tctctaaaaaagaacaaaccacctggagtactttctgtactatacactctactaagcacttaatgcatcatctcatttgatccatataaagatacatcatgatttgtcatgactaaggtaaaagtgaagcacataatgttcaagatagtagtggagttaataaagcgtataggtctttgttcctttttacacgtagataagatctagaaaatgtagagagtgtaacttagaagatggttggctttgttgattgcatctctaggatcttggactggtcacatgcaagagttgtctttttctaccctatctagagagtaggcatttactaggtgattatgatgtttatgggtgagttgcactttttctccttttaaatgaggtgggaaaactatgccagccacagtggtcttgctaccttgtggaaaatcatcccagtggcaaatcaaaatgagatattttttggcttgctttgtggaatttatctgacctgcatgcctatctttagccaactcggagaactccccaggcctttattgcatttcccttccagagagttggctcagtgacttctattgcgggatgcttttgctaggatatttaggtttcctttctgaagaaatccacgtggccctggattgcttatttttcagttttgtgagcttgcattgcagtagtttaccaccaaggcaagaactgcatgctatctaagtttaattgcctttaagtataactgctgcaagccttagtaattatagttcacattctctgcgttaacattgccttgctcccttaggactttcagagcgattcacaaataaatgcattcagctttaaattgctcataaggattataagacccaaaaggtgaaggatagaggttgtttccttctctccaattattcaaagcttagcaaataggaaggcagaggcaaaagttttggttgccctagtcagtgttgttataaacagccacaaatcccggggaagaaaggtttaaacttactgaggtaaagagtttgatggtgttt

SEQ ID NO: 50664 - DNA, 1024 bp, Homo sapiens
ctacatccagccagttgctttttttcttaaatgactatttcaggaagtctgttatagcagctgtctataggatggactcatgggtgggtgtgtgtgtgtctgtgtgtctgtgtgtgtatgtgcatgcatgtgtgtatagatcgggagagcaactgaaagtaagatctgttaggtgttattatagcttaaactgtgttggctatgaacatacaaagaaatgaaagaatatgagagatgttagaattaagacatagtagtagattggatatgatagacaaaggaaagagggaagaatgataattccaagattctgagactggaaaaattaggtaagtgatgatgatgatgactgaactatcaaaaggatgacattttgaggaaagatgaaagccatctggggcatgctaagtttcagagtgagaaatcttatagtcacctagaggtctgtgactgaggataacatgataacattaaaatattagtgtggcacaaaggagatctccagtagtgctgcaatgttgagcaaagtttctgaacctcagcgttcctgacatttggagctggataactctttagtggcggtggtaggatgctgtcctgtgtattgtgggctatttagcagcacccctggcttttagtcaccaaatgccagtagcaccccacctccagttgtgacaaccaaagatgtctccacacattgctaaaatgtcccctggatagttgggcatggtagggggtggggggattgcccccagttgagaaccattgatataaaggcaaaaaaggaaactaccatagattggaccttggagtactgtaggaggcgggagtcagggtagggttagggagaaagtggatctaaagatcaagccagggagtaaaagcagtttagggatctacattaagaaaacacagaattggagaaagcaaggaaaggatttgacaacttcttgaaagttggcatttggtaagaaaactttaatagatgaaggatttactccattcactgaatgttcaagaggga

SEQ ID NO: 50665 - DNA, 1070 bp, Homo sapiens
gtgtggaatgtgagagggctggcagagagagccagtgagccttgttctttggctttaggctagaatgaaagccatggagattcaacaagaaggggcccaaatgttaaccttttctgaactgcagtggctagtgatgatgtagatgtcacattgatagctcgtattggagtagccagtgcattttctggagtcccattgcaattctactcaattctctaaggctaaattcataccgttttactccatttccaccattgttcttaagggctaatattttcccttctttctggatctcttactaatttgatttgtctttttggttttaaagatacataattttctgctatgacacctatccacaaagcatcataaccaatttcctgcttccctgatattagaggaagatgtcataggcatagatatttatatgtctaatactccaaaataattttcaaacagcaataggatttcattggtgaaggtaaatcttacccagtgttttgatggattatagatttggatggaagatccaaggatgtgaattatgtgtgcatttagagtattgataggatacagataaaatacatatccacccaggaatcttccaaagtgttctgctggtgcattattgatttatttgaagggcatttcatctaaggatgacattctccatatttatctcagtctattttatctctttctttcttttcttttctttctttcttttgttctctttttattttttatttatttatttatttattcattgagatgcagtctcgctttgtcacccaggctggacagcagtggcctgatcttggctcactgcaacctctgcctcccgggttcaagctattctcctgcctcagcctcccaagtagctgggactacaggcatgtgccaccacgtccagctaattttttgtatttagtaagacggagtttcaccatgttggccaggctgttctcgaactcctgacttcaagtgatccacccgcctcggcctcccaaagtgctgggattacaggagtgagccaccgtgcctggccgtatttacttttaggtaggtgt

SEQ ID NO: 50666 - DNA, 1034 bp, Homo sapiens
ctggagaaggagtaggataaaagcataacatggcttccagttttagtgtattatcttttaaaagacattggattcccaagagaagcagatgctgagataaagtgggttgggttagggggtggtgttgggttaggttttccgtggagaggacatgttgtcgagtagacttgatctcagttacaaagtgatgttagtgtgtgaagggtgggcatgagcttttatccagtttatgaaatgtcatttttagcactatttaatgtactgtcatgaggaaacaattggaaaaatgttttgagctcaattgctttttgccaatgtaagacaatttggaagaaataaaattgaggagatgagcctaccttttcttctgagggctctgtgtgtgtgtgtgtgtgtgtgtgtgtgtgtgtgtgtgtgtgtgtgtattctttgtataatgcctaataatttttggaacacgttacaactattttctcattgcttctgctcaacaaccattaagttgttaagtgacttttctgaatttctacaacaagttagtgagagagccagtgatagagtccagatcttgggtatactggttcttcagctgtgcactagagcagtaggctatctagtaaagggtatgatgtgtcaattttgctcaggtaaggctttgagctagctccaggctggcagtgttgatgtttaatgtcctgacagataaagaaagccagcgtgagaaggagaagctggaagcggagctggccactgcccgttctaccaatgaggaccaaagacgacacatcgaaatccgagatcaggccctgagtaatgcccaggccaaggtggtaaagctggaagaagaggtatggtttcctcaggtagcatatgagcctgggggtgggagggctgggaaatcggggacactgggctccacattgtggtgaattggcagctgcataatccccagaagggaggtgccatctgctgctcctagtttccactgtgctgatgtgagtggactttgctttcttttctcttcttggtaaatt

SEQ ID NO: 50667 - DNA, 2471 bp, Homo sapiens
tcctgaccaccttgtaatgttgattttctgggacttgtcttgggaaacattaatgtgttttggctcaacctcacaggtgtattgggagaggccaatgactgcaaatggagtaagaatttagcttggccttgcttccctgttgttgttacagaagagttgattatatagattcaaattgcatttttaaagacagaaccgcaattattctttttttcctatcaaatattctcagagacagtctgtgtgcccaggacaaacaaggttattttattgattgaagatgatgtcagacccctggcagtggcatgattaaagctacagggagattaaaggttatagtgttcatactgttttagttcttgtgcatgaaacaaggagtcttttcctttcctttctcaaataaatggagtagtgttttcctcattatgtgactcttgacatgtagatgaacataagttctttaagaaaaaaatagtaaactggagaggactctgcaaagcttttttcttaggctgatttcttttttaaacaagagacaaagatggcaggaggagggtgagagggtaggggaacgatctgtgtccagttaacataaagtgatttgggttttgaaaaggatatggaggggcctagcgtggtggctcacgcctgtaatcccaacaccttgggagaccgaggcaggcagatccctgaggtcaggagttcaagaccagcctggccaacatggcaaaaccctgtctctactaaaaatatgaaaatcagccaggcatggtgacacgtgcctgtaatcctggctacatgggaggctgaggcaggagaatcacttgaacctgggaggcagaggttgcagtgagccgagatcccaccactgcactccagcctgggtgacagagcaagactccatctcaaaaatagataaataaataagaaaaggatacagaggacagaattgagagaagagagtaagaccttgcacgagaaaagttttctcaatgaagagctgagtatcaggagaaagtcagtaatatcagcatgaagaatctaagtagtactggaaaaaaatcatatggtagtttctctccagggactcgcgtttaaaagccttgggctgttttctggtgtttcagttggaaaaaaaaggatgagtgttttgttcagaattggacaatagaagcacggtggttatgtaccatagctctgttaacagtccagctttgattccaattagaagttgttcctctgcttcaaaattaggggagataccctaaaataattaccttgcagatttgagatgattttgcttttgatcatgattatatgttgtgccaaaacaagatggaaagacacatttccgtgtttgttcactctatatctgttcactttatttttggcaacattgcaaggaaataatgttaaattaatcactttgtggttttgtggagtttttaaaaacttgaatgttttgaacatgctctcaaaatacagagatgtttgtgtacttcttttgcattgctttcctcctctcatggagtcactggtgtggattaagcctttcctttaagtgatatgaatgaatcatacataggccaggatagaagataggaatgtggttcatgtgcatgtcacttaaactcctgagtcttagaatcattttgattaggctgacaaggctttgcagagagtccaggcagaaattagacataaggactatctcaaatccaggtctattattcatttgcatccagtctatataatgtaagtctatgagttttttttactgagacactggggcagtggaagtgccaagaaagcaagtggaggcatcttctgcttggagaagggttgcgctctgtgttgggaagggcagtctactttcctactccaagaatggatggaccattgatcagatgatcagagtgtaagctccatgagggcaggaattatattttatgtgtctttgtagcccttattgtgtctagtatgaggctgacaaatgtgtggaatagttgatacacaataaatacttaatgacttggttgaaaagaaggttcttcccctcccctccacctatctgagcttgaggcactcaaattgggagcctcactgagtgttctttttttgaccaaaaacctaccttatgatgactgccctcccttctgggatgtgggacagtgagcctcactaacctcccctgctactaatagcagtttaaagtttgcaccctaaaggtgacagtggttttggcttttgtcatcatccaccattccaacttggaatggaagtggtagctttctagggctgtgaggtcagaacagagcaagtctcagacctgaacatttccatcactggagactggcctggccttccggacacagctactggacactgaggtttcttttctgccctagtggagatggactctgctactcatttaaaagccaagcaccataggaggacaagtcattctcttg

SEQ ID NO: 50668 - DNA, 1035 bp, Homo sapiens
tattttgtttctcaaatgccaggagaggctaatggatataataagtaatccctaaacactctctgtgattcaggagttgttcatgtatctagcaaggctgttaatttaattcctttgacctcctgttatccctcccccattcttgttaacaacaacaacaacaaaactagggtccactgtttactttgtgtaaatcattggcaatgatttttaagtcactgtatggtgaaatcccatcaagtgagtataaatttgagtggaatatgaaatctccagaatgagaaaggagaagcaggaaagcacaaatatacttgttttgtagcatggaaaataatatgtttaaattagactaaaagatagcaaagaaactaaggattttagacagttaaataaaagacaagaagtgcagcagcagaatggcccacacataatgggttcttcatctgaggtcttcaccatgtagtcaaatttcatagttctttaattttcctttgataacaaaggtgtggtatacatgtgatctctaagatttgatggattagccaggcatggtagctcacacctgtaatcccagcgatttgggaggcagaggcgggcggatcacctaaggtcaggagttcaagaccagcctgaccaacatggtgaaacccctgtctctactaaaaatacagaattacctgggtatggtggcgcatgcctgtaatcccagctactcaggaaactgaggaataaattgcttgaacctgggaggcggaggttgcagtaagccaagatcacgccattgcactccagcctgggcaacaagagcaaaactccgtctcaaaaaaaaaaaaaaaagatttgatggattcattcctggaaaccagtggctcatcataaattagattaaatttctctaactggaatagaaagtgtggtatgggtttttagtatttagaaagtagcaaatgaggaacaggaacttttttttttttgtaatatatgatcctggagaaaatgcaaatgggtgtatttgccaatgtttcctaaggcaat

SEQ ID NO: 50669 - DNA, 1050 bp, Homo sapiens
ctaggattccgagcctttgccacatcaaagaatgtttgttctaccacatcgcctgtgggaaataaagttctgtgtcccttctaaggaattaattatgcctgcttagtttgtggattaagttatatttgtttttgaaaagtgttatatctgttttctgtttttatatctttcaggaattgccacactgtcttccacaatggttgaactaatttacattcccaccaacagtgtataagtgttccttgtttgctgaaaccacaccagcatctgtttttttttttttttactttttattaatagccattctgactggcataagatggcatctcattgtggttttgttttgcatttttctagtgatctgtgatgttgagctttttttcatgattgttgaccacatgtatgtcttatcttgaaaaatgtctgttcatgtcctttgcctacgttttaatgttttattttcttgtaaatttgttcaagttccttatagatgctggatattagacctttgtgacatgcatagtttgcaaatattttctccattctgtaggttgtctgtttactctgctgatagtttcctttgctgtgaagaagctccttagtttaattatatcccatttgtcaagttttgcttttattgcagttgcttttggcatcttcgtcataaaatctttgtccattcctatgtccacaatgatattgcttacattgtcttctagcgtttttatagttttgtgttttatatttaaatctttaatccatcttgagttaatttttatatacggtggaaggaaggagtccagtttcagttttctgcatgtggctagccagttatcccagcaatagcaaagacatggaataaacttaatgcccatcagtgatagactagataaagaaaatgtggtacatatacaccatggaatactatgtagccctaaaaaagaacgagatcatgtcctttgtagagatatggatagaggccattatccttagtaaactaatgagaaacagaaaatcaaatactgtgtattctcatttaaaagtgggaga

SEQ ID NO: 50670 - DNA, 1019 bp, Homo sapiens
atttcctgcttccatgacaatggaaggcaggtaatcctttatggagtctgagctcgctcccaacagggaagatgggattgagttttttcgtgcttttaggatggtagagaacattgttcagcctgagacccatccctaggtaagtaactgaattgaggttttgatttgactaaaattaacaaccagctggttttaatttctccttaccattagagcactcagtgatcatattgttgggttttttgttgttgtttgttctggtctttctcccatcagatttgaccatctctacctgatttcgtcaaatctgagtgaggattccaaattatgggtaagaaagcctctctaatttgtctaaaattccttgcagctgcaaaagaggaaaaaaaaaaaccgtgcacttggtttctgtgttgcttcctgtcttgaaaaacaaacattctttcatttacttttcttccaccctattttttgccatttgcagtaccaaaaaaaaaaaaaaaaaaaaaaaaaaaaaaaatctagaggaggcttctaatgacttgaaccactttaaaaaattcagaacaaaggcatcactcaccccttttggggtgttctgtgttgtcaaccttggcaaaataaactgtctaaattaactgagagctgtctcagatatttggggttcacaatatgtcattttcagtaggtagtattttctttaaataacaataatttttatgatatcctcaccaaataatattgcctttatgttagataaactatataacataaatataagagaacttttttttttttttttttttttttcgacagtcttgccctgtcgcggaggctggggtgtaatggtgcaatctcagctcactgcaacctccacctccccagctcaagcgattctcatgcctcagcctcttgagtagctgggactataggcacgcaccaccacacccagctaatttttgtatttttagttgagatgtggttttgccgtgttggccaggctggtcttgaacacctgg

SEQ ID NO: 50671 - DNA, 1573 bp, Homo sapiens
tctgcaaaaaagccacttgggattttgctgggattaccgaatctaaaatgatttggggaatattgtcatcttcacaatgtttattcctgtgatccattaacatgagacatctttccatttatttatatcttttaatttttattccaacagtgttttgtagttttcagtgtatgagtctttcattagatttgttaaattaaatgcttagtattttattctctttggtactattataaatataattatttctttaattccactgtcaattttttattgctacttcatagaaatagaagtgattttcttttattgatcttgtattctgcaaccttgcagaactcatttattagttctataatagtttttttgtgtgtgtttctgtgccttaggagtttctctttacagaatcatttaattattctttcaaagaattcatccatttcatctaacttgtcaaactattattatgaagttatttataatgtctccttattatcattttggtatttgtagaatatcttgtggtgtcacttcccttatttatgatattggtaatttgtgtattctctctttccttcctgattagcctagcttgaggtttatgaatttttaaaaatcttctaaatgaactaactttgggttgcattgattttttttatctattgttttttgtttttttactttattgttttcctctctcattctcattatttgcaccattcttttgccattggtttaatttgctcttctttttttagtttctagggtggaagctgaagtcattgatttgaagccttccttcttttctagcatacacttcagtggttatttgaataaataagcaaaatattaagagggcaacaaatatagcagtgaagatggagatgaggcaataattttgagaactctttatgggataccatcattagtatttggagaatgggttatgggagtaaggaagaaagaggaagactattatatttcacaggtttgtcaatggagattgaatagtgtattactaagacatggatcgcagaagggcaaattaatttggtaaagtagttctgttgtggacacattgattttgatatgtctgttagatgtccatttggctgtgtccagttgatattgtatttggagatcaatagagagatcttgggaggaaataaaaacttggaagccatcggtatggaaggggtagttaaaactagaaatagatgagaataccaaaagagagggtatagtgtaaaagagaagagagtgaagacagaacccttggaaacatttggaatgttggaagaggatcggtgagggctaattaatgaaagctactgcacaattgctgtcagaaaagttgaagtagaaaagaatggtgtcacacaagacaggggaggagtaaggttcccagaaaggcattaatcaaaggcataatatgactgagcagtcaactagacatgtgcaacatttgacatttaagatggcattggtgatttttactaaaatagttttagtgggcatatgctttagggttagatgtaagatagcagtggttgagtagtgagtgggaaatcca

SEQ ID NO: 50672 - DNA, 1031 bp, Homo sapiens
aagaaaagaagttttattatttatttatttttaactttttaatttttttttaggaatatgacagaactgatggtttttcacacagtccctttggcttgaagcctagatcaggtaaatagatattctgtaaataaaatttattagttatatatgaaactagtttcccagcttaaatgggattgattccatagtcttaagtacacatagattctttcccctctcctaaaagcaattttctcttaacgatatttgtctttccaattcccattcccatttctttcttcctctttaccttcaagctcctgaaacctcagctttttgccttagatatactgcagtcttatttctactctactgtgactgctgttagaatgaccactctgccagcagaccaaacactgtttgaaattatagcactccattatattgtggttttataaagggatcttttcgcatttggcaagcccaaaagaaaatggatccatgttacttgtcaaggtattgaactatagtttttattcctgaataactgtattgaccttcaagaataatttccttttttaaaagataaaaggctgacatatgttcagtaatcatttttaacctgggccataagtttctaataacgtatgtttgaataagaacatgtataggtggtagaaatcattacacttatcttccctgttgctttcaattatgcacataaatagagttcaaatatattctctaaaaatatttggaatgtattagtgagtaataatattttatgtaattttgtattgattcatcatgcctctttccccatcaatagttgctccttcccattaactttgtaacaagttaggaaatttctgtttttatagcttttagccgctcatctcgccaagaatatggggcagcagatccaggatttacaatgagaagaaagatggaacatttacgggaagagcgagagcaaatacgacaacttcgcaacgtaagtcagattgctctttcagatctgctttgtggaaatgggtttaacttggaaa

SEQ ID NO: 50673 - DNA, 1078 bp, Homo sapiens
ttctgttccctaaatctgtgtttctaattgtttggatgccctcattcccatcacctaattggttatcagccctaatatatgcatcgtttctgcaattcatgtctatctctattgcccttgccctttttggaaccctcatactttcttgcccaggcaattgtgataactgattaatggtcctcctttctcagccgttggataattctctggctttaaatttctttattctagtgttcagtagcaccataggttgactatagttaataataatttattatatattttaaaatagctagaagaaaagattgataatgttcccagcacaaagaaatgataaatgtctttgaggtgattaccctgatttgatgattacacattgtatgcatgtatcacaatatcacaagtacctgataaatatgtacaattatgtatcaataaaaaataattatcagacaatgtgagaaaatgcccttaaataaaactgtaaatctgtaaattttctcttaaatctgtaaaactgtaaatcatccaaaaaacttcttactggcttcccattaccaataagataaagtttggatttgttaaaatcttcgtggaccattccttctttccttttctatatttcattacctgccaaaattcactttcctcactagcctcattaaactgctctttgttttctacacaggctgtgctttcttagttctttttgcttttcttcttctgagaatgcccattagcccttttatctctggcaaattcctattaattagtgtttagaaatgggagtatagttgtccctctgtatctgcaggttccacatgcattcagccaaccttgattgaaaatatgtggggaaaaaaggcaaaaaaaaaaggtaaaaataatacaaataaaaaatatagtgtaacaactgtttagatatcatttacattgtattcagtattataagtaatctggagatgatttaaactatacaggaagatgtgagtagcttatatgcaaatactgtgccattttatgtaagggaagggacttgaatatctgtgaattttggcatgggtgaggcgggggtagg

SEQ ID NO: 50674 - DNA, 1042 bp, Homo sapiens
ttcacttgactagcctcaaaaaatatgtatatgtatatgtatatgtacataaaagcttctgagatggactgacctttctgtttttctggtttttaaactaggcctttattgtaacatttgaatttagatgtaataaaacttcagtaattcagaattcagattaatactagttggggatagccgagttgaattagtaaaaacttggaattagagagtattttcaaatctatgtatatattaggtttggagtttcaagacatttaaatatgtgcagtaatgcaaacttagcatctttctaagttttcatgtataatgagtattttaaattagaattatagttgagtaacagtaatacatttcccattttctaagttcttaagtatatcatcttgtatttctttgcatttcagttatcctcttattcttctatgtctttcctgcctctttacctttcaccttataaatatgctcaaacctctgttatagggaagaaaaagtagtatcttttccctactcgttgcaagaatgatagctgacaccccataacaaaagatggattaacaagagaaaagcataaaaatttactcaagtttttatgtgacacaggatccttcagaaatgaagacccaaagacccagggaaaaccgtatgttcatgctaagtctgatgaaagaaatgaatagttgtggagacacgtgattgaacaaaaaagggtatgatctaatggtaacaaactgggcctgtttgttgagaatcttttctgtgtctctctatgacattccttctccttcggtatgctgcaggaaacctgtcacatgcatcttaaagggagaagggaggaggtcagagagtgacctttctagattgtatggcttgctttgtgagacggggaattctagtttctattacctgccttagggagaggaaggggggcgaagaaaggggggcctggagaaggtcagagagtgaccttgaaggtgccatatcttggggtagtattttctgagccctgacactaccattatccctgactgccctttta

SEQ ID NO: 50675 - DNA, 1050 bp, Homo sapiens
cactgctagttgtagcaatatgtagtatgttttaaaagaattgtccaggaaaagtctttcattggatttgtttcaataaatatttgacacatatttacaattagcatttaactgttcctatgtaaataagtgttgtttatatagttctgaaaatgcttgagggcagatttttccatttttttcttcttgttaccttagtagattgcttgagtgtcttttatcttagctaaaagaaaagctcagatcatccaaattatcccacatttctagttagcagggttttaatgaaattttactgtgtacacatttgtaaatattgtattattgtctatttgtgattggggtctgctgtatttgtagaagccaatcattagaattcagaataatattcaatactagccagaattcattactggatttgactcaaatgaatagtacaaacaagcttctgctccatgaatagcaaattttgttgtctttgtacacgttttatgtttcccaaagcctaattattattagatgataatagtaatttcatctgaaacatagtactagtctacattgtaggttcaagtttatatcactaataaataggattatattctctgtttttctctggtagaaataggtctgtatgcacatttgtttgtttctatatatgggtgtgtaacatacatttggaaatagtatcatgactaaaacaaaactgttatatgtcttagtggatctgtggtaaatttaagccttcaacaaataaatactgagtccttttaatgagtcttacatttcctggtcaatataagagataacaaagaaacagaagacatgaggaaaaagggaaggacattctaagtagaaccctggtcaataatagtgaaagtttatttatcctaaccctttatacatctgtaattgtgtttacattccagcattattttaaagtttccctttttagttcattggaccttgaacaaagcactgaataaaatttgcttgtagataaaacttagtgaatgactgatggtatgggggaaattttagtagtatttc

SEQ ID NO: 50676 - DNA, 1546 bp, Homo sapiens
aatctatttaatctttgccattctaaaaagaacaaattatatcaaaatgttttatttttcatttcagtgattaaattagtgatgatgagtattatttcaagtttttattgcctatctatattgcttcttttgtaatttgtttgtttgcatctgttgtggtcagaagcactttctattgttgaaatatattgagtatttttatggcccagaatatggcctatcatggtaaaagttctttaggaacttggaaaaaaatgtattctgtggttattggttagagtcttatataatgtcaactatgttaagttggttgatagtattgtttaaatcttcaataccttacctattttctgttttcttgttctatcagttagtaagagaaggttattgaaatctccaacactaattgtagatttatctttctccttgcagttctataatttttccttcatacattctgaagctctattattagatatataaatgtttaggattgtattgtcctcttggtgaatttgtactgtcattctgaaatgacttttctttatattcttgataatattctctgctctgaagtccacttttctgatattaatattgtcagtccagctctcttttgtttagtattagcatgatgcgtgtttctccatccttttatttttaactgatttgtgtctttgtagagaaagcgcatttcttatagttagcatatggtagtatcttcctgctttttattgaatctgacaatctacgttctaattgcaatgttaaaaatcatttatgtttttgtaattaatgatattttgaggtttgctgtatgttttctttctgttctatcctttttattcatttttcctccttctctgttgtcttttgaattatatttaaaaatttttgtttatttcctttgtgggcttatttgctgtaactttttgttatgttaatggtttttttaggggttagagtatgatatttagcttatcacagtctatcttcaagggctattatgccatttcgtgtgtcatgtgagaaccttagaacagtatacttattttttttcctttttagccttggtgtgttgtcatacattttactttttatgtatctgttatgtgtaccataacaagttgttatttatgctttaaacagttatttgttcttaagaacatttagataatcagaataatgtcttttatgtgttcaatcccttagttactatctccagtgccctttattttttgtgtagattcatatttacatgtgcatcactttctttctgcctaaaagagagattttaacataattttactactggtctgctgattgaatgcttttagcttttctatgtctgaaaaagtctttttttaaattttttttttttaaacaggatcttgctctgtcaccgaggctggagtgcagtggcgccatcacagctcactgcagctttgacctcctgcactccagtgatcctcccacctctcagcctcccaagtaactgggaccacaggcatgtgtcatcccacccagccaacttaaacattttttt

SEQ ID NO: 50677 - DNA, 1035 bp, Homo sapiens
caagccaccacctgttctgtggagcttaaaaagtttctgtctcctctacctagcaggtgaaagaattgtatttatcattatgggacgataatattgtttttttaagaacccacagctagctgggtgccatggtttatgcctgtaatcccagtactttgggaggccgaggtgggtggatcgcttgagctcaggagtgcaagaccagcctgggcaacatggcgaaaccccgtctctaccaaaaatacaaaaaattagccgggcatggtggtgtgcacctgtggtcctagccacttgggaggctgaggtgggaagatcgcttgagcctgagaggcagaggttgcagtgagccaagatcatgccactgcactccagcctgggtgacagatctcaaaaaaaaaaaaaaaaaaccgacaggcctatccatttttctcgtggtattaggaatagcatttgagtgcataattatagatttttacattgtcatatacgatatttctgtatttccattttcttattagcatattagtttttcatctatccatgtgacttaaattattctttctagcctaggtacaacattgactgaatagttaatctttcattggttttatttttgtgatagttttgtaatcagtacaaaatagcatctagcactgtgccttatacatagtaaatacataatatttttgattgactgcttgaaaattaaatcaatacatttaaaactagtaggagaaattagttaaaaaattatatgttctccctaaaaaaaacttctgctgttcttcaagatgtatgcaaaagtaatttctttttctaattctcttctttatcatcctttttagatgttagtacatactaatataagaactttttagattaaatattaatatacagtgacattgttgtgataagtatgtctaattttttcagacattaaaatatttataatatgatcataaagtaaagagcacttttttttttgagacagagtcttgctctgttgcccagtctagagtgcagtggtacagtctt

SEQ ID NO: 50678 - DNA, 1037 bp, Homo sapiens
cttgcctaaaatatttaaagatttgtcattgcatatatataaattttatattgctttgaatggcaatatagtaagtactattgttaacagcacaagtttgtgaattcccaaataggactttttcttgaatatttttattttgtaagtagaattaagtatctaaacattagattcagtttttaaagattattttgtttaatattatgaacagtattagaccaaacaaggctccaaaaattggaattaaggcattctaatctctattaatctgctttatatttattttaacatgaatttacttttagtaatggcatttactgttttagtcatttattttacaaatatcagttgaatgcctactggtagattcagttatgttttgttgaatgtcatatatgttggtcttggcctcttggtgctcacaatgtagtggagcaggagtcagtgaataaacaaagcaaggaaatacacacacatataaaatttcaaattgtattctgtgctatgaaggaatgtatttcaagagtgtcgtcagggaatgaataaaagccagctctgtgaagagcaaagtaagagcatcttaggcagaaagaatgacattgccatggccttaagttaggaaggaactttgtgtgttcaaacaactgaaaggagaccagcgtggttggagcagagtagctgaagggaaacgtggtacatgttgattttagagaggtagtcagagttcaagtcatgtgggtgctttgtaggatgtggtaagaagtttgaattttacttaaagtacagtgggaagtcattggacagttttaagtgggggaataacatgatttgactcatttttttaaaaaaaactattttggcttataggagaatagattggaagtaagcaaaaatagaagcacagggaccagttggattgttgtagtattgccaagagatcagggggtctagaataaagtaattgcaatacagatgaaaagaaatgggcagaattaagatatattttggagatattctctagcaggaccatccagtaa

SEQ ID NO: 50679 - DNA, 1035 bp, Homo sapiens
agtgatccacttgcttcggcctcccaaagtgctggcattacaggtgtcagccactgtgcatggactaaagtcctaaaatattcttatgtatgactttattatgtccggggaggtcaaaagttttcttgaggaacttacctacaatttcataatgagaaattaatattaacagaatgtaatgagcagaaatttcaggaataccttttattcattaaggaatacctgcatgtccaattataatacaaggaaacttccttgaatttcaccttatgttttagaaccatataattttgaagttataaaagatcttagaagtgatcagatacaaccactttctaatgtaggaatccctgatacatctactgtatattttcaatggtggacaactctgtgtgtgtgtgtgtgtgcgtgtgcgtgcgtgtgcatgcgtgactgtcctaattcttctttgcaaaactctatttgttattaatctttcttattttgaaccaaaatacatgcttctatcatttttttccattgggcctgggactaccatgtgaagaaatatagataatgacaacttctctccccttcagatatttgtaatctgttgtgtgtttacactccattttaccaaactctttttttttttttttttttttttgagacgaagttcactctgtcgcccagggtggagtgcagtggtgcgatcttggctcactgcaacctccaccctctgagttcaagcaattctcctgcctcagcctcccgagtagctgggattacaggcacctgccaccgcgcccggctaattttttgtatttttagtagagatggggcttcaccatcttggccaggctgatcttgaactcctgacctcgtgatccacctgcctcggtctcccaaagtgctgggattacaggcgtcagccaccgcgcccagcgtaccaaactcttaagatgtgtttttctatagcttaaacatccttattacctttattcctttttatgactttttacttttagctaattcgatttagaaaatgttcctttt

SEQ ID NO: 50680 - DNA, 1033 bp, Homo sapiens
ctggagactttccctagcatggaagtattgaatataccagaattatatcaaggagcaaagttctgacattattgagctcggaggaatcattctgggtttttgagaactgatggtgtgtggagtagtatcataggtctgcctgcatagggtttgctatgctatggatctctgctgtagttgggcaaatcacttaaccagttttaactttcattttctgatttgtataatggagataataactacttaatcttgtatcattaacatgaggattaaatgagacagtgcatataagaaatttaacactgtgcctgatacaaagtgagcactcagcaagtacttattaagttattacttagtgatagaatattatttacttacaaagtgatttcttcgtttttaatatgtcacattacatacatattctcgtaatgaaactttctcattcttttcagccgaaatcttttatcaacattgccaaaatacctatttgatcttccccttaaagttttggtcgtcagtaataataaactggtatccattccagaagaaattgggaagttaaaagatttaatggaattggtgagtaacttagttgtattaattaatgcaatatgcgtaatatatctacattttggaagattacctatttttaatggaatttaattgtaatttttaaaaaaagtactaacttggtatatgtctaaattcagtaagatttagtaaaatcttgagatactatatgtctgagtttttccagtcacaaaatagcatggttcttccttagtccttgtgacgtcagaaggcttgcttacaaactttaagaaatacttttcaaatgaataagcatttgtttactcattttgtggacagtaaaggtcttagaggaaagctaagggaatttttaaaataaaacttttataggactatgatatatccttaaacaaaggagataaaagaagagagtgtctgcaaacagaattagcaacataactcttcctcactgtttgcttatgtgacgttatgacacttttta

SEQ ID NO: 50681 - DNA, 1022 bp, Homo sapiens
tggtaatctatattattaaacagcacttaaacttaagtttaacaatttgtgcaaaaaactctctctacccgtttatacactgaataagataagactaagactataattagtatagtataatagtataatttctgaaagtcattttgtatatttggcagaaatggtagccagtgggccaggaatttcaatgggccgcagatagaccaatctgtggctctgtgggtgcagcttgggagacagcagatttccattccatctgactcctctccttcttctctagcttccttgacctctgaagctcaagagtgatacagaacataatttagattgggttacttaagattattgaccaagatctctaatagactgccagcagttttacaaggaatgtcttgaaggaaggcaggaaacaggacacagcaatctgtctactgttgatttactgccaatactggattttatgattaaaaatgagacaagaaaaacagcttagtggttataaaggtgcttatccctttggatgctaattaactgagatatcgatactgcacaagaaaaaaatacacagctatgtaattaaaaaatatttacaatcattctcttattaattccaataaactatcattatggtatatattagtttcttgtgcctgccataacaaattatcacaaacttaatagtttaaaaaaaagaaaattagtctctcacaggtttggagactgaaagttagaaacaaatttaattgagctaaaatcaaggttttggcagggccgcactccctatggggaggctctaggggagaatccattccttgcttcttccagcttctgatggctactggcattgtgtggcacaattattccagtggctgcctccttctccacatggccccctcttcagtctgtctggtttaccctctgctttcctcttataaggatacctgtgatggcatttagggtccacatggatgatgcaggctaatctcatcacaagactcttaattacatctgtaaaaccttta

SEQ ID NO: 50682 - DNA, 1030 bp, Homo sapiens
atcatggcagaaggtgaaaggcacttgtcacatggtggcagacaagagaagagagcttgtgcagggaacctcccctttttaaaaccagcagatctaatgagacttactcactatcatgagaacagcacgggaaatacctgcccctatgattcaattatttcccaccagttccctcccacaacacatgggaattcaagatgagatttgagtgagaacacggccaaaccatataattctgcccttgactcctcccaaatctcatgtcctcacatttcaaaaccaatcataccttcccaacagtcacacaaagtcttaactcatttcagcattaactcaaaagtccacagtccaaagtctcacctgagacaaggcaagaccctttcggctatgagcctgtaaaatgaaaagcaagttagttacttcctagatacaatggggatacaggcatcgggtaaatacagccattccaaatgggagaatttggccaaaactaaggggttacaggccttgtgcaagtttgaaatccagtgggggagtcaaatcttaaagctccagaatgatctcctttgactccatgtctcacatccaggtcacgctgatgcaagaggtaggttcctatggtcttgagcagctccgcctttgtggcttagcagggtacagcctccctcctggctgctttcataagctggcactgagtgtctgtggcctttccaggtgcatggtgcaagctgtcggtggatctaccattgtggggtctggaggatggtggccctcttctcacatctccactaggccgtgccccagtggggactttgtgtggggcctctgaccccacatttcctttctgcactgccctagcacaggttgtccatgaggtccctgcccctgcagcaaagttctgcctggacatacaggcatttccatacattctctaaaatctagccagaggttcccaaacctcaattcttgacttctgtgcacctgcaggctcagcaccacatggaagctgccaaggcttggggcttgcacc

SEQ ID NO: 50683 - DNA, 1068 bp, Homo sapiens
gcagacaggccttgctaggtttccccactcagtctgtcagctttagaatatattctttttggccaatcatatttctgcacagctgggctgtccatactttgttgaacctaagcataaaataggcaattcctcctttgggtcttaattctgaaggctcccatatatatactttaagtaaacttgtatgccttttctgcttttaatcaatctgcctcatttcagtgatttttcagtgaaattgtgaaactttagggaccaagggccttggcttctgtatctacttcttttctccctttcttttttctttttttttttttttgacagagtctcgctgtattgccaaggctggagtacagtggcacaatcacggctcactgcagcctcaacctcccaggctcaagtgatcctcctacctcagcctcccgagtagctgggaccacaggggtgtgctaccatgcacagctaatttttgtatttttttgtagagacagggtttcatcatgttgcccaggctggtcttgaacttctggactcaggtgacccacctgccttggcctcccaaagtgctgggattacaggggtgagccactgcacctggcctacttcttttctttttaacattttattgagagttcacagaccaaaagtggaccaatttaaagtatattgttgattggttgttagctgtgcacccatcactataatttagttttggaatattttcatctccccctgaaagaaatcctgtacaaataaatccctttccattctccctgcctcctccccaaccaatcaaaccctaggcaaccattcatctattttctgtctctatagatttaccccatctgtacattttatgtaaatgacttaattcaggatgtgaccttttatgattggcttctttaacttactatgttttcaaagttcatttatgttgtagcatgtaccagtattatgagaattccaattttttttgcattctcagcagcagttgtttttatctttttgtttatagccatcctagtgggtatgaggcagtatttctttccttcttcttcttcttttttt

SEQ ID NO: 50684 - DNA, 1046 bp, Homo sapiens
ggtggaagtagcggtggctgtggcacggctggagggggaggtggcggggctggagggggaggcggcggcggcggcgggaccctggtggtccccatcccggtaccgactcttttcggtcagccgttccccaacgggccgccgtggaacccggggagcctgcagcctcagcacaccgtgaggagcctggaccgggccctggaagaggcgggcagctccggcatcctgagcctcagtggtcggaaactccgagacttcccgggcagcggctacgacctgacggacaccacccaagcaggtgacaggacggggggaggggaagctggctgtgaaggaggaggtgcggggagtgggtggctgcgtggctgcgttgttggactctgcgggtctgggcgggtgcgcggggaccgccagactaacaaagtcggggcagcccgttctcctgaacgtgaggggcgaatcaagcaataggggaggggaggaatgctgcctgaaggatgtatagaaactggtaggatgttaggggtgaaagagcatcattgttaaagcaagtttccccagtttgggtgggagggagtcattgacaccttccttaatgcacttctttcaactctcctggatcttcccgtctttcccggaaaaccaaacccaaccaaactaaacgaaacacaaaaatcataatctctacatattccttaaaggcatacgtgcctgaaagaatggcatatcctttttcagagtacagcagcaggattgccatggtttttctgtgtggtttaatcatcctacgatattcttggcttctttcttgtcacgtatgcctttaaagactgagatttttcattttcctggtgttgagaaggtagtggtggttaaattagtatttgctgcagtggtaaattaaatcatcaatcacttacatgtctgcttactagaagaaagctaatccttgttttgagttatcttagagtcttaatttttatagtagaaagccaacaattttaagggtatttttgagaaaaaattatctccattctttatggagttgt

SEQ ID NO: 50685 - DNA, 1065 bp, Homo sapiens
tcagcagtctgacctaccttaaaggcttaggaaagggaatgatacctgattgagggatagcaggaattagcaggggtcacatcaggagaaaagactgggataattatgcctttgctctcctccatttgtctcaagtttcgttaggtagaatgaagtggctgtgaagcacgccttgcttgttattttttttaccaccacactctctgctgcagtaactgcctgggcctagcacccgacataatcttcttcgccatattggacactatgatccaatcaacatagctagggaatttcttatttttaaatttatagtgatgaaggatgatgccgttttgtatccctgtccacttgccgaaggagatgttcaaactcccaggggatcgattaggcatacaagtcatatcaaaaaggatattcctcgccatttacagactccttagcccgcacgactttctttgggatatcaaccacatggtttctgctccctctcacactctatcgctccctctcttgccacattcggacccaacactctctcgcccacttctactttgcgcgattcctgtcttattctgtctcaacgtcatagggtttcctagactatccaggaattcctgccgacgtaggcaggtaccagaggcaactgaacgcgtgagacatagagcagatgagctgagaggcagcaagagaactacgcaagaatccgatcacaccctccgcttctacgacgaccaccaacaccacccagaagccaacttccgagatgccccaagccaagatcaggcaacactcagctgaatgtcatcccgtacctcttcgtcacagcggaccgcggtcacgcttaaatgtgcattgaagtggaaggtgaatgtctctttgcatggcagtgtctctgcacacgggagaggaggggcacacgtatccacctggctcaatatctagctgtattcaggtggaatagagaaccatgaaccctctggaccttttctgctttggtcctgtgcttttaacgtctcaggcctaagaggcccaccgaatccttctgccttgcttcagtacatttaa

SEQ ID NO: 50686 - DNA, 1049 bp, Homo sapiens
acaccagaaaatggatagtctatgtttatgaattggaagagtcaatattgtgtaaaattccatactacccaaagcaatctacagattcagtgcaatccctatcaaaataccaatgttatttttcaatgaaatagataaaacaatcttaaaatttctatgtaaccacaaaagacccagaatagccaaagctatcctaggcaaaaagaacaaacctggagaattcatattacctgacttcaaattatactacagagctatactaaccaaaccagcttaatgctggtataaaaacagacacagaccaatggaacagaatagagaatctagaaacattcacactcctatagtgaactcattttcaatagaagtgccaagaacatacgctgaggaaaagacagtctcttctttgataaatggtgctgtaaaaactggatatccatatgcacaagaatgaaactagatccctatctctcattgtatacaaaaatcaaaatggattaaaaacgtaaagatctcaaactatgaaactactaccagaagtcattggggaaaatctccaggacattgttctcagcaaaaatttcttaagtaattctccacaacgacaggcaaccaaagcacaaatggacaaatgggatctcatcaagttaaaaagcttctgcacagccaaggaaacaaacaaaaaattgaagagagaacccacagaatgagagaaaatatttacaagctacccatttgacaaaggattaataaccagaatatatgaaaagctccaacaactctataggaaaaaaatccaataacctgaccaaaaaatgggcaaaatatctgaataaacatttcttcgaagaagacatgcaaatgaaaaacatgaaaaggtgttcaacatcattgatcattagagaaatgcaaatcaaaactttagtgagttatctcaccccagttaaaatggcttatattcaaaagacaggtaataacaagtgctggtgtagatctggagaaaatggaaccatgtatactgttggtgagaaattaatacaaccactatg

SEQ ID NO: 50687 - DNA, 1023 bp, Homo sapiens
atgtcaagggaaaccaaacaagagcaaaagttgctgcactgatatcagacaaaatatatttctagacaaaaactgtaacaagagacaaggtcgctatataatgataaaagggtcaatttagcaagaatatataacaattttaagtatatgtgcagtcaaccctggagcacccagatatatgaagcaaatattattagaggtaaagaaagagatagaccctaatacaataatagctggagacttcaccccactttcagcattaggcaaatcttttagacagatattaacaaaaaaactcaatctgcactatagaccaaatggatctaatagatatttacaaaacttttcacccaatggctatggaatataaactcttcagcacatagatcgttctcaaggatagaccatatgttaggtcataaatcaagttttaaaatattcaaaaaatggaaataatatcaaacatctactctgaccacaatgggataaaactagaaatcaataacaaggaattctgaaaaccatacaaatacattaaaattaaacaatatgcttctgaagaatcagtgggtcaatgaagaaaccgaaaaaaagttgaagaattccttgaaacagatgataatgaagacaccatctaccaaaacctatgaaatacagcaaaagcagtattatgaaagaagtttgtagctaaaaaaaaaaaaatctaacagtgtgcttgaactagaaaagcaagagtaaaccaaaaccaaaatcagtaaataaaggaaatactaaagatgacagcagaaataaatttgaaatgaagaaaacaatgcaaaagattaatgaaataaaaagtttgcagtttgagaagttaaacaaaattgacctttagctggactaagaaaaagagaagatccaaataaataaaatcagagatgaaaagggagacattatgactactacagacattaaaaggattactagtggctactatgagtaactatacgccaataaattggaaaatctagaagaaatggacaa

SEQ ID NO: 50688 - DNA, 1049 bp, Homo sapiens
ttggagttgttgcttctcttctgtcctcatggagccagggcaatcttacccaaggcagtccagcagcctcttgtagcttaagatgtcagcagcaggccctagagggaatggcaggctattgcggggcctgcaggaattgacaggtgctatatcaggtgagaagactttttcaaagtgaaaataaaaatctagagatgaatatctaaatttaacattttattacaggaggaaaaattgcagtttggtgcatacatacagattcggtggcctttagtatttctgaagaagaaagaggaggttgcaggttttataaaaggagaaatgtcacatacagtttttctagaaagttcattggtactagtaacgtattgtggagctagcagtctctgatgggtgagtgatagtcttgggtaaaagtggtcttagagttttgagcaggttgtttcagtagctgttagataaaagtgttttcaggatataacaggcagttttatcatccaggctggtagagaattacattcttagagcaatgtaataatgccctgagtgcttcttccccctgaactcttgactgttttagttttatattgtaagaatgacccaatgtgtgtgatcaactttcacacgcccctctttgatcaagatccttctatgaatgcatgactgatcaaccattgtgaagttaggcttaattgtctctcggtgctgggatggagctgtcctgttgtcttcctcattgagggtaagtcataggggtgtatatcagtgacctgggtcatattggagtaacaaggaggccagaaggaaaaattttctcatggtaggttcatctggagtccagcatcaagtttcatcttacagttccatagtcatcagcagtcaccttgaaacaatgggctaattttatccccttcagagagctggctttacaaagattagacaggtaataagagcaacacttaaaaatcataatacaaaaataaaaaacaatataataaaattagtttgcacaatggttttgctctaagagcacaaacttaagggcaaca

SEQ ID NO: 50689 - DNA, 1028 bp, Homo sapiens
tatgccctatgtaaatgaaaaggatgaagtaacattacagagttatttactcggcttatgccctgtgtaaatagaaaggatattacctgtcatagctgaagtgtttccatttcatttagttctaggaagtcagcatgaaatggccttatgtttcctgcctccagaccctgttctcctaccacatttccccccgagaggtgtgatctcataaatctttatggcaggtggagggactgatggtctttctcctctaactgctttctgctggcttagggggtagtccctacctgtcgggaattatggaactctcaccctgctctgtctagtggaggcagggtagctccttagtggccaggggtgatgtcttcacctggaactgcctggaacctttgttgcatgattatctgaagcttgatggtctctatgtgagaagaaatgaatttggttaaaagatttaatgggaacttcagggggtgtctacatatgctgtcaggaatgtttgttctagagatttgccggagaaaaacaaaacctggtctgttctaggacctgtgtttccttaaagttttaacacaagcgactccagtttggtttggtttggtcttttgaggcctagtgcataagctcaatccaaaacaatggcctcccacaattttgttttttaaaaaattccctttttggtcagtttctcacttagatgagagtatgaccaaaacttagggccttagcgacgctctcagttaccatcattttgggtttctggtctcagcctgtcattcatcagtggccttatagtcacacatttctttcagctcttgtcattccagttgaagagaaaccatttgacattctagagatggctgcatgcaagcatttaaaacctctgagagggccgggcacggtggcttacgcctgtaatcccagcactttgaggctgaggtgggcggatcacgaggtcaggagatcgagaccatcctggctaacatggtgaaaccccgtctctactgaaaatacaaaaaaaactagcc

SEQ ID NO: 50690 - DNA, 1045 bp, Homo sapiens
ctgcaggtaaagtcggaaacctctcctgcaaactgaccttcggcttctccagtcggggtgtgctcaggagaagggggaagggggtctccctttcccacttctacagttggggcactcatagtatttggggtgtctcctgggtcctgcaggtgcagtctgtttcctttagagggtctgtgaatcctctcaggattgctggtttgttcttgcagttgatctggagctaaaattcacaatgcaagacgctgcatgctgctctgtccggagctataatctagtcctgccttctgtctgtcatgatgctgtctctctcctgatttcaattttttaaaaaaaattctgtcttaatttcatcaatgacccaaagatctctttttaggagattgtaagctctttttaggagtgctctaagaaaggaagtttaaatattatcaagtatgtgttagctagaaaaaaaaactacatttttttctcaactgtgagaattctgtggtaaacatgataagtagggctgggccatcccagggacactgctagaagacattctagattttggtaagtcctttagtgcagaggtttgaatagagttttcaagtgccaagtattctgagatcttatatctaactgacctaaaagtaggaccatcgtagcctgaagacaagaggacagcattgtgagaagagctgggtcctcaggccctgttgtcttgggatggcagttttgcatcatacttcatgccagtcctgatgcctcagggctgcctctctttgtgtctagctgcctgagacctcaaggttaaattatattatagtaaaaatgcccaagacagaatgttcccactggtccaaagtagatttgacttcaactctgtgcccagactaaagacatttcctatagtcttgaccagatccagtgttaaagatagaaccatgggtagatatgtttggatccattcctagagttacatggtggggacaaatttatttttctctgagaggaagctaaagaccattctaccagaaagatgccctgcacactggaggac

SEQ ID NO: 50691 - DNA, 1059 bp, Homo sapiens
aatttcatttagttctgctctgatcttggttatttcctttcttctgctgagtttgggtttggtttgtcattatttctcgagttccttgaagtgtgaccttagattgtctatttgtgctctttcagacttttggatgtaggtgtttatagctatgaactttccttttagcaccacctttgctgtattccagaggttttgatagattgtgtcattattgtcatttaattcaaagaatttttaaatttccatctttatttcatttttgacccaatgctcattcaggagcaggttatttaatttccatgtaattgcatggctttgaaggtttattttggagttgatttccagttttattccactatggtctgagagtgcttggtataatttcaattttttttaagtttattgaggcttgttttgaagcctatcttatggcctatctgaggagaaagttccatgtgctgttgaataaaatgtgtattctgtggttgttggagaaaatgttctgtatgtagctcttaagtccatttgtttcaaggtatagtttaaatccattgtttctttgttgactttctgtcttgatgacctgtctagtgctgtcagtgaagtattgaagtcccccactattattgtgttgctgtctatctcatttcttaggtctattagtaattgttttataaatttgggagctccagtgttaggtgtatatatgtttaggattgtgatattttcctgttgcacaaggccttttaccattatatgctgtccctctttgtctcttttaaccgctgttgcttgaaagtttgttttgcctgttataaggatagctacccctgctcacttttggtgtccatttgcatgaaatgcctttttccaccactttaagttaatgtgagtccttatatgttaggtgagtctccagaaggcagcagatggttggtgagttcttatccgttttgtgattctgtatcttttaagtggagcatttaggccatttgcattcaatgttagtattgaaatgtgaggtaccattactttcattgtgctttttgttgtctg

SEQ ID NO: 50692 - DNA, 1030 bp, Homo sapiens
tgtagtttgtaagtaaatttggattttcgtttgttctgttgtcattaaacaaacatttattgtgaataatttgctggactgtgcaattagttaaggagggtgaggccaggaagccttgacttcaagagtgtaggatttggcttctgttcggcaagcagtgactcactgaatacctttgagcaagggagtgcttttctgagctataaatacaatcacagtatgtataaagaccattatgtatgtgaaaattataattaaatccaggtaagaggtaatacagacaagaactgtggtagaggcagtgagagtggatgggggttgaaggataggagcattctagagagagattcagttgaacttagcagttgattggacatgggaaatggggaagaagcaagggtcaaaggtggtcaaataattttggtgagagcaattgccttttagaatccaaatattttatctatagttcttttgaatgtataatatcaggatacatcggagatttctgaaatttcttctgactgaccaacattttaggaatggtcattaagaaatatgtatgtagtcaaattcattaccattaagcatatctttgacatatgaaaagattggattttgaagatgtaaaaatgatgattgcttcaacaagtatctcatggagatggagtgagtgagggtagtagcattttccgactagctagggaaacttttaacaccttgactccctgctactctcatctacatggtgactcttctccccttttgtctgcttctcatctacactgagagtcagaaattatagtttggggtgtgaaacactggtttaaaggactgtataaaaggaaggaaaggaatacttctcttttttcatttatctcacacagattaaggtaagtacttcattactacttcataattcatagattgcttctgcaaaacacatgtacacacaatctgaaaacgctccagttatcttcaatttaaaattcccatttaaatgaccaggagatttgaatgcttgatgcctact

SEQ ID NO: 50693 - DNA, 1061 bp, Homo sapiens
ggtgggaattgaacaatgagaacacttggacacaggaaggcgaacatcacactctggggactgttatggggtgggggaaggggggatggatagcattaggagatatgcctaatgttaaatgacgagttaatgggtgcagcacaccaacatggcacatgtatacatatgtaacaaagctgcacgttgtgcacatgtaccctaaaactttaataaaaaaaagaaagtgctcagttctttttcaatcaccttgtatattaagtttataacattcagcagttactcaactgtctattatgtgccaggcataactctgctgaggattaggggcatagtccttgtgatcattcaaagtgattattttttatcttccatactatcttcattcataagcaattaaatagcttaatttattctcctgctgtgaaaatttggaaccaagacaaacaggttaaataaattcttgcttactgtactttcaatattgataatggatttaagggcaatggaaacacctcagaagaaaaatttgtctggactaaatgaggagacttgaactggaggtagataacacatgttaaagtgcatattgcacaggatggaaaatgaagcaatttttttttttttattatactctaagttttagggtacatgtgcacattgtgcaggttagttacatatgtatacatgtgccatgctggtgcgctgcacccactaacgtgtcatctagcattaggtatatctcccaatgctatccctcccccctcccccgaccccaccacagtccccagagtgtgatattccccttcctgtgtccatgtgatctcattgttcaattcccacctatgagtgagaatatgcggtgtttggttttttgttcttgcgatagtttactgagaatgatggtttccaatttcatccatgtccctacaaaggacatgaactcatcattttttatggctgcatagtattccatggtgtatatgtaatgctcatcatcactggccatcagagaaatgcaaatcaaaaccactatgagatatcatctcacaccagttagaatg

SEQ ID NO: 50694 - DNA, 1232 bp, Homo sapiens
tgaactagttatgtgaatttggataaaacacctattctaatcaaaatataatataaaatggttgttgagatttttctaccaggccctaaggaaataatctgtcaatttgtctgtttttcacaaaactaaatgaggaaatggtctggcttattttctctttgttttaaaatctatggtgccattgatacccagtttaaaaacattcttctgaaggtgctgttgattaaatcattttaatgtcccccaagtactgcctgtttttgaagattatttggaaaatgtggcacattcaccaactcacattctcctcttattctgtacttgctttttttccttataagttagtggaaaggcaactggtcagttttttcactcaataaaaaagaaggaaggtgtagacagcttttatctgggaatgctttaagtcattgagagaatatttttaagtgttaactactttttgaaattattggcagaatcttttaatccattttaacataaaacagttgactaagatggaaagatttttattgtttacataaaagaaatcaccatggtttttgcatcattgcataaatctaagagattgtgcatacataaaaaggatgagacaaagctgaatgttaagtgccaaaatcaacgaaagcttgcgtacttactgggtatttgacactgagcataatggaatgtggttccacagagagagaatactaaatatttagacccaaggacatgtttctctgatagcttcttatcctaatctcctagctaacattattaaccctttttgaaacacctctttcttacacttagatttcctcctattaaagctcacccttggagattctaaaccttctatacccaagcacctacactcacccactcatctctttctgagatcttcatgaattccttttgtttattatatggatctttgggtgaattatcttggtttactatgagtagtaaagcacaatcacaatttctctccacttacagctctatttttccaaaggtcacagctccatcattcagctcttctgtcggtatccctttctcatcgattccctggaatttttgaaccagggctgtgaggtatacagccagcaatgttgcatagtactttagagttgctgcccaacacaggtccatctctcttcacaattcatgtttgttccttttcaggctcagagtggtgaaggaagttactaagattagcgtgcactatgaag

SEQ ID NO: 50695 - DNA, 1051 bp, Homo sapiens
attatgttttattttaagagctttgtgggtgccttcaggggtacttacaaactagtaaaatagatacatcaatacatagaattattagacaagactgaatgtgctgggtgctaaaataggggaacaaatgaggaaacaggagccctgaaaattagaatttaattgtggtctgaggattcatggattatttccaaggagaatcatctgaccttgaaggaccttacctgcaatttattaaatgtttgtggcacaaatgagccttgcaatacgtactttacatatattctcatattgaatctttacattcatccttatattcttaaattattttatgtcttagactgatttcaaaatattttgcttgaagacagatttttgttcatttgttttatttttaattgaaacttacctccagttatgtgtgaaaactcagtggcagtaaaatctacaagatagaacattatgttgcttttcaggtattttctattttcatattcattcatggatacctacattttaaaagatggttgaacacttttcacctgagaactagagtaaatatatgataatctctatatttaaaaagggaaacgttttgtttaaaaattgatgactcagtctctttttttttttccataagagagtgtgtcagtaggcttctaggagatggcatactttatgaaaaaatgtagcatactatttaaattagaggtggttacgctttgaatgcaaagtatcctgtcaaatcacaggatgagtgcatctcccagtggaagatgttgcaaagtgcaagtgagtatgagtcttcccgaaagcatttgtctttatagcttggattctatgagatgcccaccaaagacacttaattttttatcttagaaagtcaagatggatgagtcttcagatttattaggaacccttctttagttttgaatattttgtgatgaatccatactttatctttttgcagatgagatggaaatgtcctgtttctttggcaaataatatgtgagcatagcacatgtagctttttttttttttttaaataggc

SEQ ID NO: 50696 - DNA, 1065 bp, Homo sapiens
agcaaccatctatagacctaccctcaggaatgcatttcttccccagggtcccaattattaatattccttgctgggaaaagaattcagtgatatttctcctactcacacttccatctataggctctctgcaagaagaaaaatatggctctgttctgcccaaccctgtaggcagtcaggcctcatggttatcttcccttgttccctgaaaatcactgttattctgttctttcttagggtgcactgatttaatattgttcaaacacacatattttacaatcaatttgtacaatagtggtcctcaggtgacatacattctccgcttacgaagataacaggattaagagattaaagtaaagacaggcataagaaattataagagtattgattgaggaagtcacaaatgtccatgaaatcttcacaatttatgttcagagattgcagtaaagacaggtgtaagaaattataaaagtattaattttgggaattgataaatgtccatgaaatcttcacaatttatgttctgcctcggctccagccggtctctccgttcggggtctctgacttcctgcaacatgggggtattagttgtagtagtgccttccatatctgttataatttatcttttttccttctatttattgatttttgctctatactgtgtcaaatcctctctttactccctttaatgtacattttgtttgtcacattggtttagtttcctttagtttcctcgaccaacgtaatttatatctttcctcatcttatcttacttggctttctcttcctggctcattgaagtcatgtttccttattcaataaatagtgtttttcaatatatttccattgctgctttccatgctagttgtttttgtttttgtctgttcattctcaaaggaagaaagattccctgaaaggcctttgtactgttgtttaaaatgttttttgttcatggtctttatgtggctgactcttgttgtctagatctttacttaaatatcctctcctctgagaggtttcctttgaccatccaatctaaagtggccacctgtatactgtctattgtca

SEQ ID NO: 50697 - DNA, 1033 bp, Homo sapiens
aactactttaccactgcaatgaattttatcatgtttggttctgcattgaagtaatttgagcctttatttgcttatgcctaagggagccctttcagagagtgactggctgtatctaatgtatttttatatcctgtattgtacataatgcaagattttgcacatagtaagctttcagtaaatacctgtagaagttgtaccatttattaacaattactggatggtgattttattcagtaaaatggtttagagtagttttcttttgtttcccacagttaactcttacttatagttaagtaatttaatattaagtgacagtctttaagactgtaaagtaggctaactgaatttagtatagattctaggaataagcccagacttttgtactgacgtaatgtataatcatgtcttcatggtgtagaatgtcaagggaatacagggctgggaatcaggtcattccatgtttaaaaatatttagcctttactatttgtcaagtggtgtcctcatctgtcacatgtaagaattggaagatggaaatctttcttttcattttaaaagtctaaaattatatttttaagacgaagcacatagtacatgctaaagaaacacatatgtgattaacttcatataaaacaaatttaacaaggtgatcagccattggagataagtccttttattaatttatcataatttggttttctcactttcaatgaaggtatcttttctgtgttttttgaagattaaaaacttgtgagggtctggttttatcatgggtgaagtaagcgtggcaataattgtaagccaaatctttggctagaagatctagccaataaaaataataagagggtaacacatgaaattctgagaccagttactttttatacattggaattattttggtttaaaaattctgtaggttttggttatccactattattgtcataagatcttatggtagacgcacatgaaatttatcaccatatttgttcctataactgaagagttgcatgttttcatacaaaggatatgggcttg

SEQ ID NO: 50698 - DNA, 1057 bp, Homo sapiens
aaaagcatgatgaaaagtgatgagttcttctactcattgaccttcttctgggggtgtggtgtggtcagataataaatatatatcacgaagaaaattgttatgaaaaattaataaggtaggtggaaatataaagagttaagagtgagcggaggtcagtgtagaagggcattaacttcttattagccttgcatgtgtttagtcttgtaatctaccatccatcatatattttaccctatatgaagttttattctagtgctttatgagctatagggagaagtcagccacatgtggtttgctttgatggaaacagtatacttatctgaacatcctcatgcatgcattatggtaatgtctaggaggacacgttgtggtgagagtcaccagtttgttgttgtggcggtattttctgattgcattcctggagctaatagcatttctgtaatgctctgacagagtttcagtcttccaaatgtagtctttcatagatgaaacacagtataaaatatcgtctggtatttccaacacaggagaaagagtgccaaacactgtacaatcatatttttaccattttaacaaatattattcaccacttactgggtagggtgctagggatatagcagtgaatgttaatacatggttttctgtgtagtgggaaatacacacaaataattgtgtttcttaagtgctgttgaaaggacatatggggtgctactgactgtgtataacacatatatacaccgggtcttgggagggtcaggacaggctttatgagtgaagtcatgtttcttctacttctctccatttccactctactaccaccatcttagttcaagctactctcatcttttgcctgacgtcctgcaataaccaattggttagttcatttttctctaggttctaattagagttctcttttcagaattcaaatctagccatgttgccttttcgctttcaaattattctatagctgtatcttaattttaggataacatccaatgttaatctcacattgcactactatgcatgaaggcatgaaaaagcatgatgcattcacaga

SEQ ID NO: 50699 - DNA, 1060 bp, Homo sapiens
ttggttccaagtctttgctattgtgaatagtgccgcaataaacatacgtgtgcatgtgtctttatagcagcatgatttatagtcctttgggtatatacccagtaatgggatggctgggtcgaatggtatttctagttctagatccctgaggaatcgccacactgacttccacaatggttgaactagtttacagtcccaccaacagtgtaaaagtgttcctatttctccacatcctctccagcacctgtggtttcctgactttttaatgattgccattctaactggtgtgagatggtatctcattgtggttttgatttgcatttctctgatggccagtgatggtgagcattttttcatgtgttttttggctgcataaatgtcttcttttgagaagtgtctgttcatgtcctttgcccactttttgatggggttgtttgtttttttcttgtaaatttgtttgagttcattgtagattctggatattagccctttgtcagatgagtaggttgtgaaaattttctcccattttttaggtttcctgttcactctgatggtagtttcttttgctgtgcagaagttctttagttgaattagatcccatttgtcaattttggcttttgttgccattgcttttggtgttttagacatgaagtccttgcccatgcctatgtcctgaatggtaatgcctatgttttcttctagggtttttatggttttgggtctaacatttaagtctttaatccattttgaattgatttttgtataaggtataaggaagggatccagtttcagctttctacatatggctagccagttttcccagcatcatttattaaatagggaatcctttccccatttcttgtttttctccggttagtcaaagatcagatagttgtagatatgcggcgttgtttctgagggctctgttctgttcattgatctatatctctgttttggtaccagcaccatgctgttttggtgactgtagccttgtagtatagtttgaagtcaggtagcatgatgcctccagctttgttcttttggcttgggattgccttgg

SEQ ID NO: 50700 - DNA, 1023 bp, Homo sapiens
tatctcttcctaggcctggtctaaatgctccctccatggtcgttggctgagtttttccccttgttgctctctactctgacagggtagcactgagttccaatggaaagtccccattactgcaatctctctcctctagtgcacagattctccctctgcacaatgtggccactgccaggggatggaggggtggtgatgtaggcgattaagggctgtatatcctacaatcttcagggcctttttccttaatttgatgttaaaacaaggtattgtgatcattcacctgatttttggttgttatgaaagttcttttttgtgtaaatagttgttcaatttcgtcttcctacaggagagatgatcacttgaggcttctattcagccatcttgctctgattgccttcacttgagtaacatttcccaatctcatcacttcacttgttacttaattggctaaatattcctacattgacacttctagttccaatctaaatctagatgtaatcttttcaattttctgttagacactgtttggtgtgtcctatggtacataaatgtgtgtacatcaaacaattgttctccttttttcaatatttttccttattctctacatgctacctcacttgatatcttcatcctcatcccagttatttaaacagattttgtgattttgtttgtgatctccttatccctgtaatacctattcatgatcttttagtcaatcagtcctagttcactctggctatcctcatagacattgtctgggctcttatctcagttcttgactgtagaagaactttcttaactgatctctagatatctagtctatctctcttccatccccatattggagctgtgctaattttcttttcttttttttaattactattatactttaagtttcagggtacatgtgcacaatgtgcaggttagttacatatgtatacatgtgccatgctggtgcactgcacccactaactcgtcatctagcattaggtgtatctcccaatgctatccctccccccttcc

SEQ ID NO: 50701 - DNA, 1088 bp, Homo sapiens
agttttaatttttttctatgatcagattgaatagtctgttatgatttctgatatttgggtgctgcttgccttcttcactgcatgattataaataatttcacttaggttttcttttggtactctttcagcttcattttgttacctttaaattttgatccttctggaatgtatttcagggcaacaagtgaaatagtggataacctctgctttttaaaaaaaataaacacaaccaaatggctacccagttgtcctgaaatcacttattcaatcatccccccttctcttacttgtttgaaaggccatctttaccccagagtaactccctgctgtatttgcattcctcacaagatcttgaaataatttatttatttttgttttgtttttcaagccactgcagtaaagttctccccactgatattgaaactgctcttggtaaaggtcaccactcatattataattgttaaatcaagtagatgtatcttacttggtcttgaatttgttgaatgctgttgaactactcttcctttttagcttttatctcacaattctcatagtttccctcctaccgttctctctgttttccttactaatttgtcttcttccatttctttgggattccaccttctcatggggaatatattctttttctgctttttatttatttataatttttgtgggcacatagtaggtgtatatatttatgggatacatgagctgtttagatacagacatgtaattggaaataagcacatcatggagaatggggtgtccatcccctcaagcatttatcctttgagttacaagcaatctaattatactctttaagttattttaaaatgtacaactaagttgttattaactatagttgctcctgttgtgctatcaaataatagatcttatttattctatctaactgtagttttgtactcattaaccatccccacttctccctacccagctacccttcccagcctctggtagccatcattctaccatctgtctccatgagttcaatcattttaatttttagctcccacaaataagtgagaacatgtgaagtttatctttctgtgcctggcttatttcac

SEQ ID NO: 50702 - DNA, 1026 bp, Homo sapiens
atacctatagccaacatgaagtacaatgatagtgaccacatggtggtgacatgggcagattgcttcagtgactatagaagggaagctgaaattgttgagaagagtgtgtcagccactctggcacttggccaggaaaagggagaaacctaagaaacatgggaatccagtctttttggtaggagtttagacctaaaagtagctgtgaacatacctctctggaccccctagttgtagcataagatgctggtcaaggggaaaccaggcaggctgatcatgtacttaaaatgagcgttctgaaataggctttagctgcaacctttagtatagtgcaactgttattttgttagggtgcgtgtgtgggagcataccagatagacctatcaatttttagatttactgtagtgaagaatcaccactcaatgcaacagttagtgctcaggtattttaggataagacctctttagtgccacaggtgggagaggagaataagctaaatgattctatgatctaacactctgggacatttaaaaaaatcaacttttgtctaacaaactattttttaaagaacacaattctgttaaacttcagattttgcattttcaagatgattttgaatttttgtaatgctgctatatataatttaatttagaggagtgcaattatgtgcagtttttctagattttgcggttttttgattttgtcgtgtttagcatttttcactaatcctttctgtcagttttcttttcttaccacagtacttatcaaaattttatttgaagacagagtactagagaaactcctaaaatttcttttatatagcatcagtttaattcataagtgagacttaccttatgtagtgtgaaattggctaaggatatctcaaatctgattattttaaagctattagtttttggacagagtaggaaagagtgatacagtgggttttaattaaacgctaggtcataaactggaatctttatttgaaatattatctaagataggtgcttgagaaatattagatttgtg

SEQ ID NO: 50703 - DNA, 1031 bp, Homo sapiens
gtgttggccaggctggtctcaaactcctgggctcaagtaatcctcctgcctcagcctcctgagttgctgggatttcagatatgagccactatgcctagcatattcatctttattactgaattttttttgcaaccccttaaatttctgtggttgaggtgagaccctcacttactttacatcagttttggccctgtggttatagaagatttgggggaaattgtaaaaagtcctaaagattctgaattcagattgttttgcaagtgtctttatattctatatctgttttaaagaaaccaaatctgtaactgacagttcatgcattcatcatggtagtgaggttaattttaagatgccatgccaagatttaattaacaggcatttgtgcaaatcaacagccttagttctatatcaaatgataaagtaaaccatatcctactttaacttttttgatctattgttgaactgtgggtctgaatgtgttccataagatggtttctactgtggctatgaagattgtagaaaagatagagctacctacacttctctttatgtcttctgtcattttcttaaatttgctaaaaatatttgttatagatccagaaaaactgttacctttattcagacctgcatgctgtactcccttgaatcccttgcacagtaaaagtagagtgacctaatttagtaacatggtgatttctgctggaaagatttgtatctgaaatactgctttctaaggagttctgactggtgatttgccagttttttttttttttaccatatttgaaaatcacttactaaaaagagttaaaactctagtacattgactatatgaattttatcagaacaggttttaattgttttacatttaattgacttgtggcttttgatcgaataggatgttaaacagtatttcatctatttagagggaaatactttgtctttttaatgtaatattgaggaatatgataaactcctaaggaggcagtttataatttaatacagtactcacaatatttctaagactgattgtg

SEQ ID NO: 50704 - DNA, 1066 bp, Homo sapiens
gcacaaggattaccctcattgtgcctcaggagatattattgtaacctttgttttgcttacataacttcctttaagacacagtatacctgtcccctgggaatatgctgagataagtattcttcctctgtattgcatagtgccttagcacacataccttcattcatagcatttatatgctctgttatgtctgttttctccatgagactgaactctttgaatgtaggtactgttcctcgttcatatttatattcctaatgttctgcacagtgcctgattctttgtagatgtgctataaattacatattaccaacatttatgagtaatgctaagtgctagatgctgtctctgtctctgttttacagacggtagttaagtgctcacggtaacacagttcagtggtagagctagaattgaacaccatgatagcttatttgcagggcccatgctcttaaccattataatataatgtctcttccctgagaatggaagggtcatcatctggtatattgtaggtcagtgtagcccagagagggagtttggaacatttaattggtaggaccaagaacctgaagcacgccttacctgaaagcaagttgggggtgtgtgtgcatgtcctgatgcttggaaaagaagttatattttaatgcacatagtctgctatattatttgtactactggtattgaaggtttagataaaatttgtatctctgaaatgcactttcttcattaaaaatgaatttctatagtgatatagagtgaaatttcctagtaagcccccaaatcgcttaaaatggatgtcatcattgactgtgctcccttatacgttgatagcagggttaagatgattgatatagctttagggaatttgctatatttgtagtggaaacagcgtgagaagaaaagtgaagatgctgcttgtaacagttaaaacttcagatttcttaaatgcttaggagatgaactgttccagaattttgttttattgtatttttatttacaactgattttatctccttaatatcaatgtatttttcattttcaatactttggttaaattttttcctgc

SEQ ID NO: 50705 - DNA, 1026 bp, Homo sapiens
tacgtaacatctttccttaatcataatgcaccccctacgtccctggtcccaggccttttctcaccatgttccctcgtttttgaatatacttttatactcccacaccctccacaaggcagtaatttaaacctcatccatccttaaggaccagccccaaacgtcctcattcacccaagcagaagtaattactttttgtagattcccactgcatactgcttaactttctcttatagaattgatcacatttggcattgcctcatatagatgtttgattgcttccagttgtaaactcattaagtacctagcctagttcattggagacccaccacaccagctagcagtgtgccttgctatactgtaaggtcttagcactttcactgaagttcaggcataatcaagtgtgccacatgattccagaaagcaccaagccaagaggaaacacagaggtggatgtggaaagcaaaatacaataataaagcaaaagtatgtttctccctgtgttagtcggggttgttcagagagaaacggaaccattaggagattatctatcaaggggtgggggttgagagaaggggagagagggagagagagagagagaagaagaagagaagaggagaagagaagaaaggagagaggtgagagaaagaaagaaaagaaaagaaagagaaaaaagattttaaggaactgtggaagcctacaggctggagacccagggaagagttaatattgaagccccagccaaaggcagtcttcttgtttgggggtgggggacagaaaaggagcagtcatttttctattaaggccttcaaatgattggatgagactcatcaacattaggaaggataacctactttatgcaaagtaacctgctttactcagaaacgtctagaataatggttcaccaaataaccatgttgacacataaattaaccatgagacctttttttctctacaagatgctccacaagtctcttcttcccagtccttctcccaatgcaacgactgcagtgggagccacctccttaa

SEQ ID NO: 50706 - DNA, 1052 bp, Homo sapiens
aggtatatgatgatagatacatatatatacttggaattgtgattgctagatcatatggtagttttatttttagttttttgaggaacctccatacagttgtctatattggctacccaaggtgatccacagagtcaatgcaatcctaccaaaataccaatgatagtttttataaaaacaagagaaaaacaatcttacaatttgtatggaacaacaaatgacctagaatagccaaagctatccttagcaaaaagaacaaaactggaggaatcacattgcctgagtaaggaaaacagcacggtactggcataaaaacagacacatagaccactagaacagaatatagaacctagaaacaaatacacatatatacagccaactgattttaacagaggtgttaggaacattcagtgagggaaaggaaagtctcttcaataagtggtgctgggggaaataggatatccatatgcagaaaaatgaaaagtagacccttatctctcaccatatacaaaaaaatcaaatcaaaatggattacagaattaaatctaagacctgaaactactacaagaaaacataggggaagtgctttatgaaattctttggggaaagaaatttttggctaagcttcaaaagcatagacaacataagcaaaaatagacagatgggattacatcaaactagaaagcttctacacagctaggaaacaatcaagagtgaagtggcaacctacagaatgtgagagaatattttcaaactgtgcatctgacaaggagataatatccagaatatgtaaggaactcaactcaatagcaaaaaagaaaataatatgattaaaaaattggcaaaagagcggaagagctgtttctcaaaataagatataaaaatggctgacagatatattaaaaaaatgctcaacatcactagtcatcagagaaatgcaaatcagaaccacagtgcaatatcatctcacccctgttagaattgctattatcaaaaagacatgaaataaatgctggggatgatgtggagaaaagggaacttacatattgttggtg

SEQ ID NO: 50707 - DNA, 1027 bp, Homo sapiens
aaaagtttgattatgatgtggtttagagtcaattttcttattttatttatgtattttttaatttcaatatgtttttgaggaacaggtggtgtttgattacacgaataagttcttcagtgatgatttctgaggttctgttgcacccatcactcaagcagtgtacactgtacccagtgtgaagtcttttatcccttgccacccccatccctttctcctgagtgtccaaagtctaatgtatcattcttatgcctttgcatcctcatagcttagctcccgcatatgagtgagaatacatgatgtttggtggttttccattcctgagttacttcacttagaatattctgatatgtatataatgatgctacctttatccaggttgctgtgaatgccattatttcattccattttatgtctgagtagtattccatggtgtgtgtgtgttgtgtatctccacattttctttatcctagagtggattttcttgggtatattcaatttgggatttgcatggcttctcgattctgtaggtttcttatctctttgagtactttttcagccccaccctctttctctctccttcttatctctcatattgcaaatgttagatcgtttgttatagtccctaaagtccctaattctgtattcatatttttttcagtttattttatctttgtttttaaggttggataattagtgttcttctgttttacagttcactgatttttcctctgtcttttccattctgctgttgagcctatctgttgggtattttattacaattattgtattttttgcttttaaaagatccatttggttcttctttatatcttctatttctttactgagactttatttttttgctgaggctcttggtttcaaatgttttcataattgctcaatgaagcatttttatgatggctactttaaaatctttgtcagataattctaacatcgctgtcatcttgctgtcaacatctattgatactttttttattatactttaagttttagggtacatgtgcaccat

SEQ ID NO: 50708 - DNA, 1063 bp, Homo sapiens
aggagctgcgttcctcagttggaaatgcagaaattacccgtcttctgtgtcgctcacgttgggagctgtagactggagctgttcctattcggccatcttgtctccacccccgagagaaaaagtataatttttctgtgattccttttcctactctgttggaacatctgctaaactttagcccatcatacttcttatgcttgtataacaacatgaaaacctgtaataaccagtttttggcatcatacattattataagactttgtcataatatttcaggaaggtaatgctgttgaatgtactaataagttacaaaattaatttagatgatttcctagctataacctattgaaaatcatttgttttggtttccaatctgattgaaatcctaaaaatacttaaaataatttacagagtagcatgtaataggaatcgttcaatatacatcagcacacatcctgtgtattcattacatgaaatggtactcgaacattgtgaatataaagttatggtatagttttaattaagactgtggactctaaacctgacctaaaatctgattctgtcatttgctacttgtgttacttcattttattgcgtcatggtttcctcatctctaatggaggaacaagagattttatagaaattagataaagtagtgtatgtgagtgttaagcatagtacctagaatatgataagatttaataaatgttagttattattttatataactagtattatctggttatgaaaggaactttggcttttagtttcaaatttatctttctagccattttatttaagacgtttatacaagaagaaatacataaagaatgaggtaaatgacaaattagcaatgtaattgttatcaactagtggaggcacttttagcaggcaaattactcattattatggtcaattattttggcaaataattaaagaaaatgaaaaagaagaccaccagactatgaatgactttgcctttaactgatgctgatagaatttgttttaaaattttttcactattaggaagtagcctggttttgactaaactttttaaaaagaa

SEQ ID NO: 50709 - DNA, 1033 bp, Homo sapiens
attctaccagagaatacagacaataaacgagcaaacaaatgaagaagatccttatagactgtagtaagagcaatgaaaataagtaggggaatatgatacagatagctaggaagggcctactttagtgtgggaagtcagaaaaggcctttcagagaagatgattgagcagagacctgaaagagaagagagaataggcctaccttgtcaggatctgggagaacattcccgagataacattcttgcagagagaagagtaagagccaaggccttgaggggggaaaaagagacttggcgtttttgaagagcagaaagcaagccagcatggcggattaaagaagatgttacagagcctagaagcagctcaataaccgataaataggacttggaggtcctgagaaagaatttgggtttgattctcagaacaataggaagccactgaagagtctttcctggggaaggtcattggcttaaaaaaattatccagggaaatttaaaaaaaaatgttttgcagaggataaatagaatgtctactcattcagtcatttatattaatacctgagaataaaaaaaactctatgatcagtatgctaaataatcatgtaattcggttcctctactctgtttaggtaaggggatgggggaatgggaaccctgaggtgagtatgttaaaaggcagtttactttccactgtcacattgtgacttgtgctacaaggtaagttgtcaccaactttattaaaaatcagatcattgttcaacttaagaatttatttttcaaagaatgatatcttattttctcatggaaatatgtttcctttggaaggttggaaattttattttgtataaaggaataacctaggttttagaaagggcctttggaattttaagaagggcttatcattttcttttacctgttgcctctccaacattttcaaatggccatacctttattccttgagagattagggttactgtgtttcctgaggcttaaatgaatttattgccctaagcccttccttgaaagcaatccagct

SEQ ID NO: 50710 - DNA, 1048 bp, Homo sapiens
tgtcttactttgaatgtcctctttctttggctaatttcatgttttctttctctttctctctcctttccagctttttttaatcttgtcttcagcagctgcactaagtctaaaggagaagactgccattatagaagagttagggttccatattgtctcaaatcagaaatcaaccaatttcctctcccctcaaactgcaagcacacacacatacaccacaccactcaacaagtgttcatgtgtccctgtgtccaggcaagaagctctcttcctgactcacatggtattttaaatggaagtgtcttgtcctaactaacaaggcaggaaaagaaccatcagagctggaaaatggacgaaatgtaacctcagagaaacaactacaggaccactcacccaagtgtaagtgactggggcaggacacctcagctgtgggtatgaaagtactgttctgttcacaaggttttgtttgagttttatgtttttcttttaaacatttctctggttcgatgggttgactgtctacagccactgttaaacatttctgaatatgcaagagaaagtcaagtgacatttgtatcttcttcagcattcgcagaccttctatagattccagcaaagggggaaaatgtatccactatctaacacttaggtagagaagggagggggtttaagcttagtgagggcaaaattactccattccaccttccgagaccagttagggttttgagagaggtttctgctcaacctgggatctggagggagagctttgatgttggtaaatctgccttgaattcattggtttaacttgcatcaaaataccatgtgagtgtgctcattctcatatatcccctaccaccatcaccaccattctgctgttcagtgtctcttgagagagcctctttgcatgttttccagaatctgtgtgtgtttttcctttcttctcctttgttctttttgctcaaaggtgtgaccagtcattgcccctctggggctttcattctccaggagaaacatcccagaaccagcactgtttagcctgatacctttctaa

SEQ ID NO: 50711 - DNA, 1074 bp, Homo sapiens
aaaggcttcatatttgcaactttgatgattctatgtccagcttcagagctgctttcccagaaattcacgcttaaacaaccaaccggtaaccaccacttccccacaccgccgcccggtaattatttgcattacaaaccggaggcgccctcatttgcatttgtgtacagattaactagttaaggcttgagaagctctgaataattcaaaagtattagacccacacagccttggagagaccttcagaaactaaggaggagttttatattaagggagacattttagtcagtaagacgatataacctacttactccgtaaggggaaatgaaggcccagagaagggaagggacttgaccgaggtcccacttctgtttcgaggcagaagccagactaattttcatgcctcctgactcccaatcagtttcacaaagggattcaatctgtttatatacgttacattcctggatacgaggtcttttgatgttcagagtaactgactagttagtattagaagaccctcgaggtttttttccacagaaaaacatctgaagatggattgggtgagggctggcaaaacgaaggcatgccgggccagctccttaacccaatgacccagtgatgctgcaaggctggaacggggtccaggagactgtgtgtaacaggtgccctaggtgacccttataatcagggaagtttggtgaacaaaaatcgaacccatgagtgaacataaattaaaaagttgatcaacctattaaaatgtgtatttcattgggtagcttttctcactgtagacagattttttccttcttcaatgaaaaggcttttaaattagtacaactgttactatttaaaaaaaaaataccctaagtactctgtttacttctggtgaaacaaaaccagtcattagaaatggtctgtgcttttattttcccagactggagtggcttttctgaaacacacacacacacacacacacacacacacacacacacacacacacacacgtacacacatccctcacttctcttaagccaagaagtttgctttccctagctgcagtgtagatggctcttgttt

SEQ ID NO: 50712 - DNA, 1050 bp, Homo sapiens
tggaaaactgagctgtcaaaagaatcaagtgtttgggggtttgctctgatgagtcttctagttcatttggtgaatgtcatgatgatttttaacatgcattttgcatgcatcccccaataagaagagatgagactcggccggagagaagaaaaggcccttaactttctttccaatttaaggagttgagagtttaaaaatattccagccctaagtttttatcatgggtcccatctgatagtggctttgggaacctctgtgaagtagagagccctcccttgtcagggttatgaggcacagtggcctttggtgtttggccagtgacagtgtgagagatggagttgacctggcaatgatctgtggctaacatgccgtctctctgcccttcctttgcagtaatccatggctgtgtactgaatagtattccccgctacagctggactggactccatttagccttttaagccgaggttcctattttaactgacagctttcctttggggtgccaggcagcgaggccccccacccctatcctgccatgtacttcaagctcacttcttctttttgagttccgcaacttgctcctgcctcccagccccactggcactgaccatgaccacctacttctattttttttttagagtttctttttttgatcacttactttcaaagcacacagtcaaacaaggttatgccaaatttccaggcctttttgaagtattgagaaggggaaggggatttctcacttcaattatagatcataataggaagcaaaaagaaaaaaatgaaaagcaaacatatgcacgcacttttcttgttgacaaagcaagaatataggtttgctgtgtaggtttggtgctctattgattggtgagtgaccagagcaagtatgaaggtgatgctgccaaagcacaagccagtttcttgggaaaattcaagttacagtggagtatttttttgaagaccatatgcttggaggtagaaacaaaccaacgaccaaaaaaaaaaaaaaaaaaatctgctcagatactcagccagtagctcagagagatg

SEQ ID NO: 50713 - DNA, 1055 bp, Homo sapiens
aatactttgggaggccaaggcgaaggattgcttgagtccaggagtttgagatcagcctgggcaacatagtgagacctttgtctctacaaaaaaaataaataaataaacattagctgggcctggtggcacttgcctataatcccagctactcaggagactgaggtgggagaactgcttgaacccgggaggttgaggctgcagtgagccatgattgcgccactgcactccagtctgggcaacagagagagaccctgactcaaaaaaaaaaaaaaaagagtatcagtgtttcaggggttcctaccagtccacccttcccacttccccttcctgctactcctaatcacctttgacctctaacccttcattgtttgtgtcaagtcataatatttgatttcccctcatgctcactccatcttcatcagctcttactgttttacagttaactctgctgtttgctgcatgctgcatgagacccagggtcctggtaagcttgattaactctaaatagaactggcagtggcttctagaacatatctcccccaatcccgcacccccaacacaagcatctaatcgtagaagaagctgcttcattggtctagctggttttctctcgtgacttataatatgcagaaatagtctggtgtggtttcaggtgtacatgtggaatgcctgcctgcctgcctgattaaagtgaggggtcgttttcagacttttgctgctagaacagctgggtaacacaggtggatcctgtgatcagtatttgaggtttcagtgtgggaagtttttttcttaaagagccataatcgggccggacgcagtggctcacagacctgtaatcccagcactttggtaggccgaggagggcagatcacctgaggtcagaagattgagaccatcctggctaacacggtgaagctccatctctactaaaaatacaaaaaattagccggacatggtggcacaggcctgtaatcccagctactctggaggctgacacaggagaatcgcttgaacctgggaggcggaggttgcagtgagccgagattgcaccattg

SEQ ID NO: 50714 - DNA, 1063 bp, Homo sapiens
tacaaaaaattagccaggcgtggtggcgtgcgcctgtaatcccagctacttgggaggctgagcaggagaattgcctgaactgaggaggcagaggttgcagtgagctaagatagcaccattgcactccagcctgggcgacagattgagactctgtctcaaaaaaaaaaaaaaaaaaaaaaaaaagaagtgcagatacaggatagtggaagaaagagagagcctttagcagaaactcggtgcaccctctccccacccttgccctatatctgaggttgctcacctctccatggccgtagtcccaccctcaccctgcctcagttattactctctgcagccaacagaatttaactgctgccagtgaaggctgcagctcagccctgatttcccacccctttgtgatccctccctgctggcttagttctgcctagcctggggtgctgagaacttatgggggagccctcagatgccagtgtatgctgcatgtgccccatcctcaatctgtggaatgactgtaagaccttctgatctcccctggtattagaacagtggctcctggataccatgtgggtcaataatcctcacccaaccccagtctctgcttgctgaagttacccattcctcatcccagaactggagaaaaatatttcaacgggatctagaaaaactcctgtggtgcccttgtgccctgcagttgtttgtgcagtgtggcttgaggagttcccaggtggactgtttagctgtgtctttactgaagggtactgaggatccaaaaggtgtccatggtcattgccttctgttttcagccatttgttcctggacttaactatgggatatttttgccagaaggaagaaacaccttcctttcctctggcttatcacttaggaataacatggtaacttttgcataacagtaaaatatgttatatttgaaggcattcagctttgcaatccaattactctttatgcaaatgtgtaatttaaacatcttggccgggtacggtggctcacgcctgtaatcccagcactttgggaaactgacgcaggcagatcacctgaggtcagg

SEQ ID NO: 50715 - DNA, 1027 bp, Homo sapiens
agcaactgttccactccactcactttgccaaaagaagggtgtctttctagtatacatgggtcaggtctcaattccatgcagcaaacatttattgagctcctaccttgcgccaggtactgtcgagctctgaccatctaaaaaggaatggcttagtctctgcccttgagggactcataggcaaaaccggttttaagcaaataatttccatagagtataagatgttctgtaaaggacagggtacaaagagataaaggacaagttacaatgagaacacaaaggcgagaaccatcaattccacgtagggaggtcagggaagccttcacaaaggatgtgcctcctgagctgactcttgaaggacgaactgttttgccagacagacaagggaatggagagaggggcatctcaggcagaagtaactgcctgtataaaggcaaagtgatgtgtaggattctggtatgttctagggaagtgtagcttgctctctttggctagacagaggcagagtcactgtgaagctaatgaagattgcacaggccccttccaaagctctgtaactaatgttcaatcacaatgtcgtattattttcctcagagagtctttcagattgcataagcctaagggctggaaaaacctggttctgcccctgggctaacacttggagtaagcttggggaaaaaacggtgagatgaggctgaagaggtaagcaggtgccagatcacagaaggatttatgatcaaggcaagaggtaaaataggtgctgagatagggaagaggagacagatttgctaaatactgagtaggtaaatatcaacaggacttggtaggcacttggtgtggggttgtgaaggcaaaagaaaaatctagaatgaggcccaaatttccagctttggagagtggacacatggtgatggcattccgtaagagaaccagggttcaaaataatcagctctgttttggacatgtcaagtttgatctgtctgaggaatactgagatacgcgatgaccttcagcagtaggcagttgaaca

SEQ ID NO: 50716 - DNA, 1041 bp, Homo sapiens
ggccaacatggtgaaaccccgtctctactaaaaatacaaaaattagctgggcatggtggtaggcgcctgtaatcccagctactcgggaggctgaggcaggagaatcgcttgaacccgggagggggaggttgcagtgagccgagatcacgccactgcactccagcctgggtgacagtgcgagactctgtctcaaaaaaaaaaaaagaaaagaaaaaaaccctccagtaaccccacagctacctccagttctctcttgatttgcttatccacgtatccaactgtctattggatctcttcacctcgatgtcatatagccaatctcaaacttaatgtatccaaaacaagttttgatccccttcccctacccaccaaaaaaacctattcttctcatggcccttcctctcagtaaatgacaccaccatccaccctgttgctcaagtcagaaacctgagcatcacccttgccacctctgtcttcctcctcccctacattcagtcaatcacaagtcttgttgattccatgaaatctctcttatctgtccatctgactctacagaccatagcctcttaccagtccctctaatcctagcctactcctctccatcccgaatcagtgggttctcagcagcagtccacatgctaacgttgatgcttttttttttttttttgagacagagtctcactctgtcacccaggctgtagtgcagtggcgcgatcatggctcactgcagcctcgacttcccaggctcaggtgatcctcccatctcagcctcccaggtggctgggactataggcatgtgccaccatgcccagctaattgttttctattttgtagagatggggttttgccatgttgcccatgctgattgagaactcctgggctcaagtgatccacccgccttgattctgtaatctgtgggattacagaatcctagtactttgggaggctgagacaggcagatcacctgaggttgggagttcgagaccagcctggccagcatggtgaaaccccgtctctactaaaaatacaaaaaaattagcc

SEQ ID NO: 50717 - DNA, 1024 bp, Homo sapiens
atttctagatatggaggcgataagtactggtattttattacttgtcaagtaatttattacttgacaaaatttacaactgctactgtggatgggggacggggtgtaatctttgccttctttgtattggctcccattattatgcaagggtatgttcgtccaggttggccaggcattaaacctgcatccgtgccaattttgcaagattattctgtagatttgggggagtattggggttggccttagatgaaagccaaaagatgcaactagaaattgagacagtcatccttggaaaagtgacatttcatttatttttaaatttaaaagtttatttttttagccagtgaaatttagcagtagagatagagttaggattaataccgaaatggtgagtaggttagatcttctgaatgtcagggactttccctaagtcttaattaccctcccaataacacttgaaaagtacgtacccctgttttacaaagtagagcactgagattcgttgacttgcaaatggtaggtaggtggttctgtttgactcaaagctgtgttcttcccaggaagccagattccctagccattcccagtgtggtcgtctgagtccttgggggaccacagggtaaattgaaaggtagcctctggctgtggagcagaaaggacctgggtttgaatcctggttctgcacattgatgctctgattttgtgcatgtttcttaaccggattccacttattttatctgaacgatggaaactgtggtatctgcccccagagaagttgtgagggtcagagacttgcttggcttgatggcttagcattgagaagattttggggctggggtatgtgttaagcactcaaatgttggtttgaaggagttcttgactttgaatcattcgggcaggctctaatattgtctaaattgattgcattttcttcccagtcttctcacaagactttcaggattaagcgattcctggccaagaaacaaaagcaaaatcgtcccattccccagtggattcggatgaaaac

SEQ ID NO: 50718 - DNA, 1063 bp, Homo sapiens
ttccatggtgtatatgtgccacattttcttaatccagtctatcattgttggacatttgggttggttccaagtctttgctattgtgaataatgccgcagtaaacatacgtgtgcatgtgtctttatagcagcatgatttatagtcctttgggtatatacccagtaatgggatggctgggtcaaatggtatttctagttctagatccctgaggaatcgccacactgacttccacaatggttgaactagtttacagtcccaccaacagtgtaaaagtgttcctatttctccacatcctctccagcacctgttgtttcctgactttttaatgattgccattctaactggtgtgagatggtatctcattgtggttttgatttgcatttctctgatggccagggatgatgagcattttttcatgtgttttttggctgcataaatgtcttcttttgagaagtgtctgttcatgtccttagcccactttttgatggggttgttttttcttgtaaatttatttgaggtcattgtagattctggatattagcccttcgtcagatgagtaggttgcgaaaattttctcccattttgtaggttgcctgttcaccctgatggtagtttcttttgctgtgcagaagctctttagtttaattagatcccattggtagtccttgtttgattcttgacaatccagtgtgtgttttatcttaggtctcatgatctgagtgtgtaccctctccaggaaggaaactgcatcaatgtctgttcctgttaaatagcaacttttagtctcagcttgttttgttttgatgtcaataaatagtaacaacattcaagtatgaagctaagtgtgtttattaacttcactaaatagctgttatatttgagaaattaaatttttgatactgaattaacctctggagaatttcaaaagtgcatgaatgatattagtttctgctttcactggcatgcctttgttttgtctaccagggaaaaatcagttcatggttcactcctatattaggcctgatgttttttggctgtgcccccacccacatctcatcttgaa

SEQ ID NO: 50719 - DNA, 1033 bp, Homo sapiens
cagggtttcaccacgtgggccaggttggtcagatgacccgcccgccttggcctcccagagtgctggaattacaggggtgagccaccacacccagccgatgcttttcagttaaagcacgaagaggatttttgttgttgttgttttttaagacggagtctcattctgttgcccaggttggagtgcagtggcatgatctcagctcaccacaacctccgcctcctgggttcaagcgattctcctgcctcggcctcctgagtagctgggaccacaggctcatgccaccatacccaactaatttttgtatttttagtagagacggggtttcactatgttggccaggctggtcttgaacccctgaccttgtgatccacccgcctcggcctcccaaagtgctgggattacaggtgtgagccactgcgcctggcctaattttttcccttgcatattgatgtggatgacctgctgctgcaggcttcatcttcaacatcattttgtcctttcttacaagttatccatttgtaaactgctgatctctttaggggcattgtccccataaacttttggtaaagcatcagtgattttaccgttcttccacccaagcttcatcttaaattttatgtttgttcttccttcaattttagcagaatccatttttcgctgataggagctcttttcacactgatgctttctcctttttaatgcctcaaactagatcctgtcgagatattttttaacgagttagtaccagtttattttgatgccaaaagattttgcaatccatgcatagtttcttgataatacacattttccatggactttttgaagacttctcatatgactgttgatatgattgagctctgttcccgcacccaaatctcatcttaaactgtaatcctcatgtgtcaagggaggagcttggtaggaggtgattggattattggggcagtctcacacatgctgatcttgtgatagtgagtaagcctcacaagatctgatggttttaaacaaggcagtttttcctatgctcgcactt

SEQ ID NO: 50720 - DNA, 1034 bp, Homo sapiens
cgtctcaaaaaaaggaatgaaatgggccaggtgtgatggctcatacaggtaatcctagcatttagaaggccaaggcaagaggatcacttaacttcaggaatttaagaccagcctgggcaacatagggagaccccatctctactaaaaatttaaaaacttagcccagtgtgggagagtgtgcctgcaatcccagctgctagggagctgagatgggaggatcgcctgtatctggaatgtcaaggctgcagtgagccgcaattgtgctacttgcacttcagcctgggtgacacagatcctgtaaaagaaatttacccaggcttataaaataataattacaaaatggttgcttttcgttggagatggagagaggaagtagagaagttgtcatttactgtgccctcatatttatggtcttaaatgactgggctttaggatatattaatatataacttatgataaagaaaatcccatgtaaaagcttagtagcattgttgtaacagtaacatatttcattgtacttcagggtcgtccagggatgcagtcttaccatccaggagttcaaagccactatcaacactattttcctgatgacagcaccaactatagatactcaccagtagaagaaaagcaggaaagtagtattagctgtagaaaagaaggaggaggccaggcgtggtggcgcacacctgtaatcccagcactttgggaggctgaggcgggcagatcgcatgaggtcaggacttcgagaccagcctggccaacatggtgaaactcagtctctactaaaaatacaaaaatctgtcgggtgtcggggcaggtgcctgtagtcccagctacttgggaggctgcagcagaattgcttgaacctaggaggcagaggttgcagtgagcagagattgtgccattgcactccagcctgagcaacaaagtgagactcaatctcaaaaaaaaaaaacaaaaaaaggaggaggagaggtgtgtgataagtcctgatggccttaggtgtcctgactgtctaggcagccaaagggcac

SEQ ID NO: 50721 - DNA, 1042 bp, Homo sapiens
cattgcaatttgcagggggaattgtcaagtgaggacttcatcacatatgacacgagagaaaagtaagagctggttctaaaatcaaaagctgttgttcatcctgaattgaattttctgaatttgggtggagcagagtcgctttgaagccttgttccgatctaattctattgtattgttgatgataagtgttgacattgggtagtgtagaagcaacaagcatgtccttgtagtacaggtacagtgaaggatagaacacactttcgttgatacaaaaatttaaatagttatgttacttctgtatccagtgtcctaaagttttaggattagttttagttttttgtttgcttatatgagcttagcgtaaagaatatttttaaacttcgtgttttgtcatcagcatcttttctattaagaggtaaaatgtagtccttgtttgactcttgacaatccagtgtgtttgatcttaggtctcatgatctgagtgcataccctctccaggaaggaaactgcaccagtgtctattcctgttaaatagcaacttttagtctcagcttgtttcgttttgatgtcaataaatagtaacagcattcaagtgtgaagctaagtgtgtttattaactttactaaatagctatgagttttgagaaattaaatttttgacatctgacatcactcaccttctagtgaagcctaagggagctttaactcatggcagaaggtgaagtagaagcaggcatctcacccaaaactgtaaacaaaagtaagagctggttctaaataaaacaaataaaagtctattaatttaaacataaaataggctggatgcagtggctcacgcctgtaatcacagcattttgggaggccaaggtgggcggatcacttgaggtcaggagttcaagaccaccctggccaacatggtgaaaccccatctctactaaaaatacaaaattatctgggcgtggtggtgggcatctgtaatcccagctactcgggaggctgaggcacgagaattgcttgagcctgggaggtggagattgcagtga

SEQ ID NO: 50722 - DNA, 1050 bp, Homo sapiens
taaacattttatctttaaagctgctcaagaagccagaaaaaggagatgaaaaagaattggacaaaagagaaaaagccaagaaattggacaaagagaatctcagtgatgaaagagccagtgggcaaagttgtacattgcccaagcgttctgatagcgaacttaaagatgaaaaaccaaagaggtcagtagtcaaggactctttgttatgtttgatttatacatgctagttttgctgctatgtcctggacatgtacctgaattaagataagctgttttatgcagggcagggggatgaggaggaacagtttcagaatattcttgtatcttaatctgggtgaatggttttggggttttgttccttcttaaaacactagtatttttcactctgctctaaaagtgcaacctcattgcaggggccaaatcagaatcacagtgttcctgcatttgtgattacaagatctttcagggttctgtctcagatttgtttttcatgcagacctgaagatgagagcggcagagactatagggagagggaacgggaatatgaacgagatcaggagcgcatacttcgagaaagagagaggctgaagcggcaagaagaagagcgccgtaggcagaaggagcgctatgagaaagagaagacttttaagagaaaagaagaagaaatgaaaaaagagaaagacacacttcgggataaaggaaagaaggctgaaagtacagaatcaataggcagctcagaaaaaactgaaaagaaagaagaagtggtcaagagagatcgaataagaaacaaggtgctgcttgtcattaaacttgtttatgagggtttttttcccttttcctgcaagtgtaaagaaagtgtaaagggcactgttattatagaatttttaaaggggaactttaatcatctgcaacttttttttttttttttttttgagacagagtctgactatgttgcccaggctggagtgcagtggcacaatctcggctcactgcaagctccgcctcctgggttcacgccattcttctgcttcagcctcccaagtagctggg

SEQ ID NO: 50723 - DNA, 1979 bp, Homo sapiens
tagacagtggtaagcctttgaaggtcaattggtattttctagtaataagttcatattcctaaaaaaattttgacttgaaaatacgaaaaaatgaaattagttactgcaaaattgaaaactacttgaggaattctagcttggatcttggttctcagtaataggctgtcactactgtatcagtagctctaaacatgagcataatctttgacccaggatttctactcaggaatttatcctaaggaatatgtggggtttttttgtttgtttgtttgttttttttgcttgcttgctcgctcgctctctctctgtgtgtgtgtgtgtgtgtgtgtgtatgtgtgtgtgtgtgtgtgtgtgtgagagatggagtcttgctctgtcgcccaggctggagtgcagtgtcgcaatctcggctcactgcaacttccgcctcctgggttcaggcgattctgccgcagtctcccgagtagctggaagtacaggtgtccgccaccacgcccggccaattttgtatttttagtagagccggggtttcaccatgttggccaggctgatctcgaactcctgacctcaagtgatccgcctgccttggcctctgaaagtgctgggattacaggcatgagccactgtgcccggccaggaatatgtgttttaagatggctgtaaggccaatagcttattcagaatgttgaaaatgaaaaatattcttccaaaacttgacttttattaatagatggatagtacaagcctatttctggtaactttcttagaataaattcccagaagtggaattatggggtcaaaaggattagatatttttagccccttccccccaacttcttccagttgaacaagtttacactcctatcagtaaaacaagagaatgtcctaagtacttaattctcatcagttgggaatgactcttttaataaattattttgttgttttaatttgaatttctttactttttaaaaggtattttaatcccgtattgttgaaatcgaatgctgtaaaacttctttctgatattacaattgtgatctttctgcataaggggtgtacatgttttcccaccttgggtggttggcagggaatgtcagaaaatggaatcgtttctaggggttgataagtatgattaataatctgtttacatttatgtagctaaaaagacaaccccacttttgagcttcctgaaaaacaagcaggtaaatcttttgtctttatagttctctcaatactttaatttctttgctttgcattctataaacattttaagagcattgggtttctagaggagaaatagctgctttttccaccattactctttaaggatttgccttcttggtctcactctctagcctgctccttcactctggttgttggaccaggagttcactctacaaacgtggaatgttcttaggttgtcccagagacactcatttgatattctgaaagcctctggagagatagtaaggcagcagtggaagaataatattagcaggttctggtcttcattgtctttcgttttctgggtggagtggggataacggtggtagaatgccactttgtagaaagtaggaaggaaagattattcagttggggcctaccatgacttcaggatttattagggttttggtgatgattattttatttgaaggcttgtgttgatgtttctttctagagaatgagagaagaaaagagagaagaaaggaggaggagagaaatagaaagaaaaagacaaagagaagaagagaggaggaaatggaaagaagaagagaaacgaaaaaggaaagatatagaaaagctaaagaagatagacagaattccagaaagggacaaattaaaggatgaaccaaagattaaggtataagaatgttgaaactgactgcatgttgctaaaaattgcacgtatctacttctttaaatatgcatgcgtcttgtgttggtgtaaatgaattttttgttttgtttttgttctcttt

SEQ ID NO: 50724 - DNA, 1031 bp, Homo sapiens
ggtgcccagcccaacgtgataattttatatatgtatacattatgaaatgtatacattatgaaatgtatacatattgtatacatatatacattatgaaatgtatacataatgtatacatatatacattatgaaatatatacaatcaagttaacacattcatcacctcacataacacatcacctcaaatagttacacttttaaaaaataacagctttattgagatataattcacatgcctgaaatagtcacccttttaaagtatacagttcagtgaattttagtatattcataggcttatgagcctatcaccacaatctaaatttagaacatgttcatcacccctaagagaaaccccacccattagttgtcactcctcattcttctcaccacttctaccccaaactccaggcagctactactctacgttctgtctctatagatttgcctattttggagatttctaacattttaaaatgaaaaatagtttgtagggtctttttcacattaaaatatcacattttataagttgaatttatatgaatattttactttcatgccgtgttgtttcactatgttatcagtgtgaatttgtggctccttttgtagtatgttgattatggttgtgccagtgtgctttatgcctttgggagaccctcttcagatgactgccatcaaaagagtcatagaaagcaatgggttgattcccttatatccacttttgacattttctttgttatagcaagtgtggtattttttttctaaacaggtcaggaatatcccgctatagtagaatttgcaccttttcaaaaagctgcaaaaaagaagactaagaaaagagataccaaagtcgggactatcgatgatggtacagtatagctctaattatataatgctattgctgtggggtttttaaaaataatatctttgtgagagttaattcgaccccaaaattttaaattagaaaatatacaaaataaagtaagtgagaaatgttatttgccgatggaagctttgcttaattgttagactag

SEQ ID NO: 50725 - DNA, 1144 bp, Homo sapiens
ctggtctcaaactcctggccacaggtgatccacctgcctcggccttccaaagtgttgggattacaggcatgagccaccgcacccagccagagcatgccttttttttcaactgttctatattactcaatatacttttctagccctaatgtttaatctgtcacacaatcacagactttataacattgaataggtcactagagataatctaatgcagcccttcactttgcagatgaggataccagggcctagaagtaggtagggacagtctaacacaataaactgggactggtacccaggactcctgagcagcccgctcagtgctttctccaccccactagaagcctcagttctaagagtttcttcttctcagcttggctcttagtggatttttcctcccttttgtgaatgaaggcagccttacacatgacattaaatttaactattttcatcaggcgaatctcctcccatttttatccgtgtgcaggcagcagacttttatgtatcagcagtgagtgtgttttgtgatttttacatgatactgcttcatatactcacttccaggaaacagtatctcactgtactacttgatcatggatggcttagccaactacatactactggacactcacaatcaacagacacatagaagtatatgcacaaggcaaaaaacaatgaaaaagtatatgcacaaaactgttatccatggttaagtgacctttggggtaatagaaacgggtattttgggtaatttcattttctaatttgtatctttttgctcactgggcattttttatagtgatgtcttttttttattataaaagtaattttaactgtctgaggtgatgggcattctctgatttttcttttataaggaacccatttgtatattcctgttgccagactgtgttcctgaagagaatgaaccaactttgccattggcaatgtgtaagtgttccctccccacaactataccatcctataccatccttcttttttttttttttttttgacagagtctcactctgttgcccaggctggagtgcagtggtgcgatctcagctcactgcaacctccgcctcccaggttcaagtgattctcctgcctcagcctcccaagcagctgggattacaggcacacactacca

SEQ ID NO: 50726 - DNA, 1046 bp, Homo sapiens
gagttcaagaccagcctggccaacatggtgaaaccctgtctttaccaaaaatacaaaaattagctgggcatggtggcggacacctgtagtcccagctcctcaggaggctgaggcaggagaatcacctgaatccaggaggaggttacagtgagccaagatcgtgccattgcactccagcctgggtgacaagagtgaaactccgtcttaaaaaaaaaatgtcatttttttgtgaatgacatggtgaatgatttgattgtttacatagaaaatcccaaagaatctccagataaattataaatgagaggagggtttaacaactggttggatataaggttagtacacaaaaatccattgcatttctatttaccagcaacagacaactagaaaatgtaactaaataagaagaaaacatttgtaatagtatcagagaatatgaaggacttcagaataaatcttaacaaaagatgcccagggctctgtgaggaaaactataaaacattattaagagattgtgtattcaatacagttccaataaaaatgaactgcatttctatttactaacaacagaaacctagaaccttgaacgtttataacagtgtcagaatatgagagacttaagaataaatcttaacaaaagatgcccaaggttctatggggaaaaatgtaagacattaagagtccatatcttcaatatagttccaatcaaaatcacaacacagttgtttatgagacttattaagctggttctaaaatttatatattacactaaaaggacaagaatagccaggtcacttctgaagaagaagagcaagaaggtaagattaaagaaaacttaaatagctggagagataccaggttcacggataggaaggcaatattgtaaagttgtcatttcttcccaaattgatctttatattcaatacagtcccaatcaaaatcagaacacagtttttcatgaaacttaataagccagttctaaaatttatatactagactaaaaggacaagaatagccaagtcactcctgaaaaagaagagcaggaaggt

SEQ ID NO: 50727 - DNA, 1040 bp, Homo sapiens
atcacacccagctacttttttttttttttaatagagacggggtcttgctctgtttcccaggttcagttagaagcagatttttttaagtaaaattatcttgtaagtttgaataagctgggaattcagatcattttattgtcacctttctttgccttgaaaaattaagatgtatagtcaccagttcaaaatttaaaaagaaaagaaaaattaagatgccctctaacataggaagattaagtgaatttgtatcaaattaaaatccctataggaagaaatataagaaaaagaggtctaagaagagcagaaaagagtccagtgattcaagctctaaagaatcccaagaagagtttctggaaaatccctggaaggatcgaacaagtaggttcttctgatagactaactcagaacagatgaaacattaaagtaaccaattagtcagaatgtgaatgtgtttcttaatatctttcatgcagaggctgaagaaccatcagatttaattggcccagaggctccaaaaacacttacctctcaagatgataaacctttgaagtaagcagcagtgtgtttataatatctaaagtacctaccaaaaagtctggttctaacttaccttgccaagcttatctgactctattcccttatttctactccaggttccagctgagctggactactaaatattccctgggcttaatgtgcactttgcaacttttatgccatgttcagcttatttcttcatccagtatgccttcccttcttttccctgccctctgttttcttccctatcgccagtttcttcctgttaaaatccttactatccttcgaagcccttttcaaaaggagatgcatatgctgattcccaatacttcccctccacaagtaggtgtgatttctgtttctctttgatcctcacagaattttttattcctttttttctcttttttctttttttaccagcagaatttttttttctttttgtgagacggagtctcgctctgttgcccaggctggagtttagtggcgtgatcttggctcactgc

SEQ ID NO: 50728 - DNA, 1048 bp, Homo sapiens
ggcacgacccaaaccttggtgtctcctgcaccccacaggccttagctccaatcaggggaatggcagaaagctttcgtgcagtttcctagtcacgtttttaacttgcctcctttcaataaactgaaaaaaatctgccctcagcgaagaaacgctgcattttctgttatccttaccaaccggaatagtctttcagcaatatatatttattatgaaatcagaagctatttttcaacaaatgtgaatattgaatatgtaccccccaaaaaaacacaccctgggggaagatctccctagaatcaatggtctggaatcttttcacctgtctcacactccatgcccccttccatttttcaccccctggcagtctcttgattatgcattcaccttggaactatgattctgggatcttgcccatttatgtctgcttgctagctgtgtggcagcaagtgaatcaccaaactactctgaactaaaaacaccaacctcatagactctattcatttattcactcactcaacgcacgttaactgagcacctactcctgttgaaccctaggctgggtgctggtaataacatcagtgaacaaggcagatgctttccttactctcatgaaattggtcacccaactggggagccagacaataaaccaatacatacaaaactggtggtatgcatgtcaatgtaaagaacatgctaaaactagaaagaatacaaagacttctaatttaggatgtaggtcatggaaggccactccaaagaagggacatgaaagctgaacctgaaggataaacaagaatgagccaggtgaaagataatgggcagtgattccaagctgggaagttttcatatattcccaaaggggccatgtgactagatggtgaggagtgaggagaagagaggctccagtagtttgaagagttaagcaggagatagattaggcaaagctttgaaggccatgctaagaattttaaatcacatcctagggtatagtggaaagccactgtattatttttaatatgaagataacagatgggagggaatcaggcgt

SEQ ID NO: 50729 - DNA, 1025 bp, Homo sapiens
aaaagagagtagtcaacagtgttaagagtacaaagaaataaagtggactaagatctggatttgatgttttataagtttctgatgaattaaaatagcattttaaaagcaggagtcatattcaaggaactgcagagaaaatgggaggaagaaaaatacttttgcaataaacttggggtgccatttaaaggagtttgacatcaaaaagaaagcgagggtaatagatgggttacttaagtgtcatatacaaatctcttcctttttttttcaaaattgaatttttttgtaatgtctataatcctgtgtctgatttgcaaatttggatgtaaaataagaatcacttgaacatagttgcagagtttgatcagagaagcagagtgaaaagcaataagggatgattacaggaatcagaccatatgcaattgtgggagcagggtgtcaggtcctggggtccgggtccaacccatgctgaagtccggaggagtgggtggatgagcagaaagaacattcggggggctgtaggcaggtgaatatggttttattcagcagcagctttattttattttattttatttatttattttttttttttgagacggagtctcggtctgtctcccaggctggagtgcagtagcgcgatctcggctcactgcaagctccgcctcccaggttcacaccattctcctgcctcagcctcccgagtagctgggactacaggcgcatgccacctcgcccagctaattttctgtatttttagtagagacggggtttcaccttgttagccgggatggtctcgatctcctgacctcgtgatccgctggcctcggcctcccaaagtgctgagattacaggcgtgagccactgcgcccggccagcagcagcttttatgaacagctttctcacactggctctctcacactggccaccctgtcttggctgcttgagccagcggctcccacacacagctgtgcagccagttctcccttgccttcagggtcagcagcttaactctttttctctctgggcat

SEQ ID NO: 50730 - DNA, 1029 bp, Homo sapiens
ggaggcacttgtgatgcttcctgtgagttgaggcaggaacagctttcttgcataggaacccaagatgatggggaagctggctttccaccttgatctcactttttccaatgtagaaaccatgagtctcggaggatttttccatgtggtgtctagtagtttgggggaggggcattgtggatagagaagtccatttctctcactttcagctcatagttttttacttctctgtggcctcagggattgtcacagctttgattttgagttctgggatattgctggtgataattgtggcaccggatagttgtttttggttttcagtgggcagggggagtgaatccagattgcttctactccatctttggtgacatcactccccaactctgaagttttgagaacgagtgactgaagaattgtaatgccattatccaagttaggggacatggaacatgtcatggtaaataaataggtcagtttgtgcttgttgaatttgagagtcatctgcaactaaatggactataagaatcatgaccttggcattcaggagagaaagctgagataaaagcatagatctataaatcatgagtgtgaagggatggtggttgaatcctttagagtggagggggtcataaaggtagagagggtagagtgagaattcaagagtgccaagaactggactttgagcaaccaactcctacaccttgacgattgggtagaagagaagtgagcatactaagacagggagcagcagttggagagataggagaaaattccaaagagtgcttgtcatagaaaccaagggaagagagaaattcagaaaagagaaagtagcttttctgcaacaggtttgctgccaacacaggttgtcttgaaaaccacccctaaaaaccaaaatgggaaaggaaaaactcatatcaatattgtcgtcattggacatgtagattcaggcaagtccactactactggccatctgatctacaaatgcagtggcatcaacaaaagaaccactgaaaaattgagaagaaggctgct

SEQ ID NO: 50731 - DNA, 1177 bp, Homo sapiens
tttttaattcttgtgggtatatagtaggtatatatatttatgggtacatgagatgtgtggatacaggcatgcaatgtataataatcacatcatggagaatggggtatccaccccctcaagtgatcattctttgtattacaaacaatccaattatactattttagttattttaaaatgtacaattaaattattattgactatagacaccctgttgtgctatcaaatagtaggtgtcattcattctaactattttttggtacccattaatcatccccaactcccctacctatcccccactacccttcccagcctctggtaatcaaccttctactatgtccatgagttcaactgttttgatctttagatcccacaaataagtaagaaaatacgatgtttgtctttctgtgcctagtgccccccaaagcactaggattacaggtgtgggcctctatgcgtagcctaaatgactttattattgcacattcgtatccttttctttcagattgaagaactctctctagcattttcttgcaagacaggtctggtgatgatgaattcattcaccttttgtttgtcttagaaagtctttatctctcctacatgtttgaaggatagctttgttgggtatattattctcagtttttgccttgagcactttgaatatgtcgtctcactctcttctgtcctgtatcgtttctgctgagagtctgttgccagacaaatcaaagtcctttgtgtgttatttgcttttatttctcttgctgcttttagaatcttgtctttgtccttgacctctgagagcttaatacatattttggtatagtcctatttgggtttaatctgtttggtaatctttgactttcctgtatctggatatttatatctttctctaggtttggaaagttttctgttatttctttgaataagctaatgacccccttttctttatcaatttcctcttgagggtcaatgactcagatttgctcttttgaagttattttctagttcttgtagatattcttcattccttttccttcttttttctttttttcttctctgactgtgtattttcaaatagactatctttgagctcactatttctttcttctgcttgatcagttctgctgttgatacctctgtgatgagttgttcagttcagccaatgtatttctcagtt

SEQ ID NO: 50732 - DNA, 1027 bp, Homo sapiens
attagttcagtctatgtagttaactcctgttctgcttgataatcataaacatttcagctctccatgggagccttggaggtttttcctctattctagtgtcacaatgtccaaagttatcaaaagtgtgcattcaagagcacctgtcagagtcctatgctgattataaaaccaccttttgaaaaggatgaaagtggccaggcgcggtggctcacgtctgtaatcccagcactttgggaggccgaggcaggtggatcacaaggtcaggaaatcaagaccatcctggctaacatggtgaaaccctgtctctactaaaaatacaaaaaaaaaaaaaaattagccgggcgtggtggtgggcgcctgtagtcccagctactcaggaggctgaggcaggagaatggcgtgaacccgggaggtggagcttgcagtgagccgagatcgtgccactgcactccagcctgggcaacagagtgagactccctctcaaaaaaaaaaaaaaagatgaaggtaaaataactgtggatgaaaaaatcttagaacagtcatagttaaagagacaattgacaaggaaatttggttacttctatggcatacaacaatttaacataataatcacaattaccaccgataacatgctataagacacatcagaatcacaggaatttcatataattctggaacacatactaataacacatttatataaatccaaagaaagttaaacactttcatatttaacaatacttctgtatggttttattatatcaaataagccaaagatgtctcttttggacttcaggagactaatatcaaaaaattaatgaggtctgaagttaaaatttgattttgaaaagtttgtcaaacataaagagtttaaaacacatgatatcacaaaataggatcacaggtcattgtaaaataagtcattcatttagccaaagtaataactcgattttttaaaaaagttaaaaacttttattctttgagacaggagacttaatttccaaaacaataagtcctaataaagatg

SEQ ID NO: 50733 - DNA, 1027 bp, Homo sapiens
ccactggtcttatcggtccttttgtctgttgagaccagtcatgacagcattcaagattatgaaagtgttacaatgccgcttcaagtctgcaaaacctcaaacgtagccaacttgacaaatatttaagtgttacggcagatttaaaatccatctggcacaccgtggtaggtatttgtacagttcttttaattacacatagctttaaaccatcaacctgatgagtttaaagcttttgcacccatgccttcacttcagaatgaacaccttcattgtgatcttatgttaacctgagaattgatttaaaggaagattgataatcctatactttataacgtaaaaatacaggggctacaggagggtacctaattagacagttctccaaacacagaacacacactggaaaattttccggccaattttgctacctcccaacttgatggattagaggtagcgcaaatgctggtgctcccatctaccttgtagacacttagccatcaagaatcaaggcacaagaagtgcactctctcattaacagtaaatgtttgcaagatattcagtttaactttcagcatcatgaatgttcttatccagattttgaatccgaaaaactataatccttttatgttatacaaaattactatgattttttacagttctgagcatattaaaattctactggatttcaaaaagagactaatacccaactgactaactaaacaaatatcaacttgtaatactcaatgaatttttttgccatttacatttgaccgttggctttagtgaatgtccatatttaattttttaaggcaccattacacagtttatcctacatttatcacatttcttaaagtgttaagattctatggctcatttctatgtatttttcttactttacaaaataacctgaaacagtatagattttgtaacacttaatttgagcagcttttttattacattgaattatacaaagtgcatgttaccttagaaaaattaatatttgctgctttactcttttgcaaaacatttg

SEQ ID NO: 50734 - DNA, 1036 bp, Homo sapiens
tgatttcaggaatttgcactttataatgaaccctttaagtagggacaataatacatctggtgatggttaccacaaattataagataggaaacctctcttttgggtatggagccatcattcctcattcaaatcctaccccagaaatgaaagcaagattgagaatgccaacggtgacttggattgttggtttcagttcaatcaatgtttactctgtgttccatgtgccacgcattgagccaggagctgtggaaatagaaattaaatgagacagtccctgcgttagtctagggacttgggggtggggggtcaggggacagtagtggggacaaaaaagtaaagaaaacattacccagaatgctatggaaacagcatacctaacccagaaaagggatccagatttagctacctagtccaaacctatactatgggcttgtagcagagactttggggattgttagaagcctctcctttttttttttttttgagacagagtcttgccctgtcgctcaggctggagtgcaatggcacaatcttggctcactgcaacctccacctcctggggtcaagcgattctcctgcctcagcctcccgagtagctgggattacaggtgcgtgccaccatgcccggctatttttttttttttttttgtatcttttgtagagacagggtttcaccatgttggccaggctggtctcaaactcctgacctcgtgattcacccgcctcggcctcccaaagtgctgggattacaggcatgagccaccgtgcctggcccacccttactttttaataacagctactattcactgagtacttactatgtactaagcattgtgctaagtgctttacatatatcatcattcaatcatttacctctttaagagaagtactcttgcaattgccatttttaagataagatgactgaatcatggagagattaagtgacttcaccaaagtcacagaggtggtaagtgaaagagtaaggatttatatctagggctgactgattccagagattgggttgggggatttttga

SEQ ID NO: 50735 - DNA, 1060 bp, Homo sapiens
gtttttcatgttttagcatttgtataaagaaactggtccatgtaaatactttccatgttttttcttcaaatgtttaaaccactagttgatgtatggtatctttagatatttgcctgtctgtttgctcaaaattgcttctaaaacaataaagattcttttatttcttaaggcaatttgcttaccttttttcccgttggttaaagtcaagattttgtatactacataatggcaatttctttcaaatggaaaaactttagaaatgtttagaagtagaactgaattatttgcaaaatgttctgatgttctgtctgtatattaccatctggaagaatagtcccatacataggcctcgattgatgctaggcaggctacagaataagatcaacctgggaagcgttttataaaaatagattccaggctgcatccttagaggatttaacgtagtaggtctaatgaggagacagagagagagagagacagagagagagagagagagtgtgtgtgtgtgtgtgtgtgtgtgtgtgtgtgtgtgtgtgtaagctcccctgctgaacctgatgcatagtcagttagggaaccagtgatctagaatatttatttcataataaaagctgcggagtatctctttgtacacttttctcaattcctaagttgaggttgatattcaatatctctacatagtagctttacattgcagccatacatattgagctattgatctgaaccaacgtaggattgtgtgcagtctctctcttacttagatcactctaaaatacttgagccttccagtttccatatacggatagttacctagtcaccttactatatcacataagaaaacttagcaatgtagctggtaacttttctctgaattacccagttaagccatgtgaatgccagttagtcatcacggctgcaaactctgcagttaactaccattgtctttggccaagttgtttaacttctagtgtctcaatttcttcatccagtgggtgggggctttaaaatcctgctactcatttctttgagtgataatttgcatttcagaggaatgcatcat

SEQ ID NO: 50736 - DNA, 1032 bp, Homo sapiens
ttctaatcccaattatagttggtgctggtctttcaggcttgattatcgttatagtgattgcttacgtaattggcagaagaaaaagttatgctggatatcagactctgtaacactaatcaatacgtgatctctgttacaaaagaaaaaagcaagtacaagttccaacatgcaatactggtcaacttaaggtatatttagttgcagtccagctctttagaatgggtggtatgggggatttcaaacttaaacaaaaaactatcaactacaaattagttgcctgactttggtttttccaaccaaggaatttaaaactgttatttttacagcaaaagatgtgcaaaatcactggattataagttctattttactgtcttgaattagtatttcagtgttttcattttagacattcagactaaaaatacaccgtttagaaaaaacaatttttgaaaaagagattttttttccctgcaggtagttgagttggaacaacatgttctaccgtggatttgtacttgctccttttgctctttttgtgtgtgtgtgtgtgtgtgtgtgtgtgtgtgtgtgtgtgatttttgtttgcaggttaacttagctactttggcattgctgcatatttgacctttgagagatataatagtagatttgaacaggggctggtattattatgttcttagcaataaatgcttttctaatgccttttgaatacatttgtatttatgtggctgtaatgacaaaagatacaaaagctttttaaaatttagagtaggtattaatcttattgtttaatcttttttttaaaaaaactggatatttcaatcttttaaattgcaatatataagactattccaactgggcatttcaatccattttttaggtgctttagagataattgcttgccagtgccaattgagggcattagtactttgtgctcataaattggcctctgtatgcagtactaaaattaatgcagatttctctttagccttccaacatttcttgttgatagtgatgtattttattattttcttt

SEQ ID NO: 50737 - DNA, 1034 bp, Homo sapiens
ggaaatgtggaagctgtgtttaaaagcgaatatactgtgagccattcgactacttttgcagtggtgttgaatacctagtctgacttggttaggccacaataaattgggctctccaccctaccattcttgcgattaaagacgttagttacactttaaaaatattttcaagaattcattttcccttttgtctgttttgcttatgtacttcaattattttgatcctttagtagctttatttttggactttttatctggctccccttcattattcccctaattttaagtccagatttgtgtttacagtttaaaatcgtttgcagtattagtatcatcacttcaagactgtttatctagtcacctgtaatagagatgagctgtgctctttctcttactttgaaactttggtttttatgtacatagaattaaaaatatcacccaaagagatatacagcatttaatactgatattgaatgtataatctatttgtggaactaggttcttggctgtgggtacctataaatacaacacataggtaatatttgactgtatggggaaagaaatagaattgcaataaggcagaagagtgttgattggattttactggatcagaccactttctagaagtagaaaaaaatagcccccttaggctgccaaccctgaccagataagaaatgcagtaagcacgctcaaattagtaagaggtcccagttttcttgactttgcagccactaaaattgtatgtactaagtcacgatctgcaaactttaaagttccaaacagtgagtgttttaggctttggtgccatatggtctctgtcacaactatttgaccctgctattgtagcacgaaaacagcaacacataaacagatgactgtggctgggttccaataaaaccttatttatggacactggaatttgaattttatatgctctcatgtgtcacaaaatatttttttcaaccatttaaaaatgtaaaggccatttttagctcttggaccagatctggcccatgggctacagcttgctgacccct

SEQ ID NO: 50738 - DNA, 1084 bp, Homo sapiens
tgaaggcaggattgaagtgtggttcattttggtagctcctggagtacttgcactctgaaattattagaatgactggctgatcagatgagtacttcagaaagataatagcagtgaaaaggaaagattaggactggaggggctgaaaggcagggagcccacttaagaggctgctgtgatccaggctagaggtggtgagggctcagcaagtgacaggaggaataaaattgaggccataaatcttcaagtgtctgagatccacatgactacacctgtgctccaaaagttggaaacaaaatacagaggaaagggatttctgtcagattatgagttctcttttacttagttgcagtttattctaccgcatgatttcttcttctgtgtaatagtgttagattgcttttcttctgtgggtattaaccgtatctgttatctgtagacagttgtgaaatgttaattaactggaagctctttttcaaacagaaaaatgaaaaccgattttatctgaaggaagtgaacatcagcatgtatttggttaatggctccggtaagcaaagcactggcctggggaaaaagactgtggattaccctgaaggattagaaattacaatggtcttattaccaaatagtgccttatttaatgaaacagaagatgctatgtaaaaagtgtaccttgatcataccttaaaatcagtaacttagaactatgatgttctgtctttttctgtatcccattttttcaaagtagagtagataataattaaggatatgactgatttttagactatagaaacatctatagaaagataagggaacctagttatggtaagaattgctttttgtgggttgatcttgtcccccaggccttcactgaaaaaccctgaggactgttcctttttttttttttttttttttttgagacagggtctcgctctatgcccaggccagattgcaggggtgtgaccacagctcaatcccaggttcaagccaactacccacctcagcctcctaggtagctgggactacaggtgtgcaccatcatgcccagctaatttttttttgtattttttgtagagacagggtttca
